United States Patent Application Publication US 2020/0157537 A1 - sequence listing, part 2

SEQ ID NO: 2225 - DNA, 1110 bp, Homo sapiens
tagcgaatggtgtgttgaagtggggataaggtgctaggtttgtgcagtcccaagaaaggcctgagtctggcctggggtgggggttcagcgccatgaaattacagctcaggagtaattaacacatataaacaaacctgcctcttccagctaattaatgacttggtatttttgttttctcttccttgtctacctcattccctcccagggaggtgggagctgggactcctgagtccctgaggagaacctgcctgggagggatacatcagctggaagggagcatgctgggtctggagagctgacccgcctctcctctggctgggtcctggacttgaaccacatctgggccccacccccaacctaggcgtctgctgaggggagaagggctgctgggtgggagtggggaggtgtcagggggcctgtgggtgggagaagggggcaacttggtctgaattccaggtcactaaccacttgtctcttctgtttccccattcctttctgtctgccccatccaatttcccttgccctcttccacctctgtatttttctgtctgtccgtctgtctgtatcctgcctccctgcccctctcgctccaccccccgcaggtcgggcctgccttcaccttctcccatttccttccccttccccaccccgtgccccctccatggagaggaacagaccccttctctgtccagtctaacccaggtccctccccaaccccctcctccctcctttccccccgcccctcctccctcctggggcgaggggggcctccctccctctcccccccttctctctctctccgaggggggggggtcccagggagggagggggggtcccccgatcagcatgtggctcctggcgctgtgtctggtggggctggcgggggctcaacgcgggggagggggtcccggcggcggcgccccgggcggccccggcctgggcctcggcagcctcggcgaggagcgcttcccggtggtgaacacggcctacgggcgagtgcgcggtgtgcggcgcgagctcaacaacgagatcctgggccccgtcgtgcagttcttgggcgtgccctacgccacgccgcccctgggcgcccgccgcttccagccgcctgag

SEQ ID NO: 2226 - DNA, 1125 bp, Homo sapiens
acagatccagagacaatggccccgatgggatggagcccgaaggcgtcatcgaggtgagactggagaaatggaattctgtcctcccccattacaactttcagccgtatagagttagagtggcctcttgattgatttcccagatcatctagaagcagctggtttccctaaagggaggagggttgtaagctctgaggcttttgttagtaggcaccagattctgtttgctcggagactacagctcagctccaccttttccatgactcaagctttaatttctttgcatcccctagagtaactggaatgagattgttgacagctttgatgacatgaacctctcggagtcccttctccgtggcatctacgcgtatggttttgagaagccctctgccatccagcagcgagccattctaccttgtatcaagggtgagacctctcagtcccagaagacattgtggactgtccctgacctgggtagagtggcatctggttggtgatgcccatctcatatcagccagggacaaagcaactccttgttcatcccagcttggcttttgatccgtgcccatgcctggttcatgccttggacacataggtttcctttaaagaggtggtattgtagccagcttatatttgcatctacagccatgtttctagtccagcttggtgtgcaatactagatgagttaataactggtccttgtttctgatctggttcccattgtgtaactgtgttgattgggaaggtagtttgtgagccatgaaatgcttggttcattggttgcttattgacctcattaacctaggacttgaatatcccaaagggtatgctctttaccacattcaactcctaatttatttgtttaggttatgatgtgattgctcaagcccaatctgggactgggaaaacggccacatttgccatatcgattctgcagcagattgaattagatctaaaagccacccaggccttggtcctagcacccactcgagaattggctcagcaggtaagagtggcttctattccctccttcagggctgatttagggatgatgagtataatccaaggaccagagaagtcttctctgatcaccaccttgggaggaagacatgggtgccctaacactct

SEQ ID NO: 2227 - DNA, 1125 bp, Homo sapiens; identical to SEQ ID NO: 2226

SEQ ID NO: 2228 - DNA, 1125 bp, Homo sapiens; identical to SEQ ID NO: 2226

SEQ ID NO: 2229 - DNA, 2331 bp, Homo sapiens
agtaaagaaactgaattaattatctgagcggcctcattgtgaatcactgtacactcaggaaccagactgagttgaaatcctgtctttgccacctattgacagcacgatcttaagtggattttagcctctgcctgtttctcagctgaatgtgagtttaataatagtgcatgccccaaagttgttggttaggaatcaatacatgaaaaacatttaagaatggtgccgggcacagtggtaactgacatatgagcacctgcctctctctgctcagatacagaaggtggtcatggcactaggagactacatgggcgcctcctgtcacgcctgtatcgggggcaccaacgtgcgtgctgaggtgcagaaactgcagatggaagctccccacatcatcgtgggtacccctggccgtgtgtttgatatgcttaaccggagatacctgtgtgagtaattcggttctccaatcccctgggtcactttgctcttgtgcacgctttccagtctttcagcgtaagccagagtcattcccaaggatgctggtttctctctgggggaagagctgctctgtgatggagcccatgcgtgtcatctgagcctctggcttccctgccagtgcagccctggcagtgtcctacttcccagggctgttgtctgcctggcgggaaggtcctgggcaaaggatcagtctttgtactctgagagcagactacttggctcctctctgttttttatcagcgaagttggatatatctctcccacatttccctaatcatatgctatatattggctttttttttcttctctagcccccaaatacatcaagatgtttgtactggatgaagctgacgaaatgttaagccgtggattcaaggaccagatctatgacatattccaaaagctcaacagcaacacccaggtgagggcagtcttgcttgaatagctaatgattcttgaaaaatagtaagtgccaggggaaccatatactggattcttgagcctttttatgcatctgcttcagttttaggtgtggctagggaagggagcaggcctcaggaaggaaccagcactctaagactggcctttttttccactaggtagttttgctgtcagccacaatgccttctgatgtgcttgaggtgaccaagaagttcatgagggaccccattcggattcttgtcaagaaggaagagttgaccctggagggtatccgccagttctacatcaacgtggaacgagaggtggggcccagtgcaggaggcgggcctggtagtgagttgttgggtatagcccctgactgatttttgtcccccaacctccaggagtggaagctggacacactatgtgacttgtatgaaaccctgaccatcacccaggcagtcatcttcatcaacacccggaggaaggtggactggctcaccgagaagatgcatgctcgagatttcactgtatccgccatggtgtgtttgcccgctgccagcctgttgtgggtctgcccgtcagaagtgtcctacttgaagccagggttcctggaacccaggtgcctacctggtctgctgcatatttgttttctcttccagcatggagatatggaccaaaaggaacgagacgtgattatgagggagtttcgttctggctctagcagagttttgattaccactgacctgctggtgagtagagggaactgatagcaaaggcagaagggaggatccaaggtgattccctctccaaggggacatcagtgcctctcaggaaagtagcagcttggaatagaatctggcatgcctaaggcctttggggaactgggatgcttatttcctctgccttccttggctgcccacatggatgcctaagtgtcttccctccgggatagagtgtcctccgtgcacatgctgaagagttgtctttcttgacgtaggccagaggcattgatgtgcagcaggtttctttagtcatcaactatgaccttcccaccaacagggaaaactatatccacaggtaagcgtagatctggaacactcccctaccccttcacacctggccctccctgggcttaaagctcctgatattcctcatccccttccttgttttccagaatcggtcgaggtggacggtttggccgtaaaggtgtggctattaacatggtgacagaagaagacaagaggactcttcgagacattgagaccttctacaacacctccattgaggaaatgcccctcaatgttgctgacctcatctgaggggctgtcctgccacccagccccagccagggctcaatctctgggggctgaggagcagcaggaggggggagggaagggagccaagggatggacatct

SEQ ID NO: 2230 - DNA, 2331 bp, Homo sapiens; identical to SEQ ID NO: 2229

SEQ ID NO: 2231 - DNA, 2331 bp, Homo sapiens; identical to SEQ ID NO: 2229

SEQ ID NO: 2232 - DNA, 2331 bp, Homo sapiens; identical to SEQ ID NO: 2229

SEQ ID NO: 2233 - DNA, 1178 bp, Homo sapiens
cccgccataaaaaactcatgttcaagacagaagggcctgactcagactgacattctccacttcttgttccccactgacagcctcccacccccatctctccctcccctgccattttgggttttgggtctttgaacccttgcttgcaataggtgtgcgtcagaagcacccaggacttccatttgctttgtcccggggctccactgaacaagttggcctgcactggtgttttgttgtggggaggaggatggggagtaggacataccagcttagattttaaggtttttactgtgagggatgtttgggagatgtaagaaatgttcttgcagttaagggttagtttacaatcagccacattctaggtaggggcccacttcaccgtactaaccagggaagctgtccctcactgttgaattttctctaacttcaaggcccatatctgtgaaatgctggcatttgcacctacctcacagagtgcattgtgagggttaatgaaataatgtacatctggccttgaaaccaccttttattacatggggtctagaacttgacccccttgagggtgcttgttccctctccctgttggtcggtgggttggtagtttctacagttgggcagctggttaggtagagggagttgtcaagtctctgctggcccagccaaaccctgtctgacaacctcttggtgaaccttagtacctaaaaggaaatctcaccccatcccacaccctggaggatttcatctcttgtatatgatgatctggatccaccaagacttgttttatgctcagggtcaatttcttttttcttttttttttttttttttctttttctttgagactgggtctcgctttgttgcccaggctggagtggagtggcgtgatcttggcttactgcagcctttgcctccccggctcgagcagtcctgcctcagcctccggagtagctgggaccacaggttcatgccaccatggccagccaacttttgcatgttttgtagagatggggtctcacagtgttgcccaggctggtctcaaactcctgggctcaggcgatccacctgtctcagcctcccagagtgctgggattacaattgtgagccaccacgtccagctggaagggtcaacatcttttacattctgcaagcacatctgcattttcaccccacccttcccctccttc

SEQ ID NO: 2234 - DNA, 1193 bp, Homo sapiens
ggcctgggctacatgggatatttaggacagactatctctctgagacagaaaaacaagggaggaggcagtatgaaagaatgtattctcgctaaattccagtttctaaaggatgtgtaagaaaccagaggtaaaggtctcgcgatatcttaagacatccggcgtagtacgcttcagtgagccacagcgctagagaagtaggagaagctcgcgagatctgtgccgttgccgaggagactaggagggggaggagaggggatctcgcgaaaggaaagaggtcgggagcgctcgcgagatctcggaccacccaacctgaaaggtgcttaggaagttgaaaggcccagaggaggcctccgggcaaatggccggagctggaccgaccatgctgctacgagaagagaatggctgttgcagtcggcgtcagagcagctccagtgctggggttagcacgggctctggttctgggactgaggggcagtcaagcagcaagatggagggggtggggaactgcagctcccggcagcctctgggctttgtgtgagtgccccgcgggctgccgggagctgtggttccgcgggcgggcagcctgggctgcgcggtctgagcgcttgttacaccccgcgcaggattcggacggagagcgcgaggactcggcggctgagcgcgcccgacagcagctagaggcgctgctcaacaagactatgcgcattcgcatgacagatggacggacactggtcggctgcttcctctgcactgaccgtgactgcaatgtcatcctgggctcggcgcaggagttcctcaagccgtcgggtcagtgcccggggaatgcacacccgcctggtaatgtggcggaaccttacgcaaggcatttccccttaagggcctggctgcaacccttgttttctggggctcgttttcgtggctcagaggggcgggactgattctggcctactttcctgatgctctgatccttctttccagattccttctctgccggggagccccgtgtgctgggcctggccatggtacccggacaccacatcgtttccattgaggtgcagagggagagtctgaccgggcctccgtatctctgaccacgatggcgcttacctttcagacttcattaaacttatgaccgaatgggcctgtgtctgtgtgtagctgggatgccggtgcaggatagcacaccccatccc

SEQ ID NO: 2235 - DNA, 1119 bp, Homo sapiens
tgcctggatcactgaaggtagaaaggacaagacctaagaaccctagacatttgtcgccattgcctccttgctcccaccctcaggtgctgggcttcaacacccgtcagcggaaggctttcctcaatgctgtgatgcgctgggggatgccaccacaggatgccttcaccacacagtggctggtgcgggacctgaggggcaagactgagaaggagtttaagtgagtgtgggtgatacagggctgagttggacgcaaggggaagagctttgggtgttcctttcttccttggggccgccatatgatgtgaccttactcaactgattatcaccctccctgtcatacaatacttcctggctcgatttcctggggggtggtctcagcccactccacctcccctcagccgagcctagagtagaggggccaggcatcctccccaggggaggggcgttgaagcaaggagcctctcctgggctgtcctagcctcacatttacttgaccacaataacctggcaggaggagctggtggaaaggatgaagagctgactgatggggcccaggaattaagtaccaaggccaaagggaaagacccaggggtggggcgcagggggacagttaggacttggagggctggtaatggtgagagtgagaggcccaggggaggagccctggagcacctggggatttgggggtttgggggtcctcagtcatcctcgcgcctccctcactgccctataccccttctgtggctcccctaaccctcctcccactcccatgctccttagggcctatgtgtctttgttcatgcgccatctgtgtgagcctggggcagacggctctgaaacctttgccgatggggtccctcgggagggactgagtcgccagcaggtgttgacccgcattggagtcatgtctctcgtcaaaaagaaggtatcagtcttcctgtcacccaaagaatcaagctggctgcctagtctctgtccttcctctgcctctgtccctgagttgtaagcttgcgctggtgtgagacggaggagactggagcttcctgtctgtaagcgcctggagctgacacctaaccctcccaccctgccaccccaggtgcaggagtttgagcacatcaa

SEQ ID NO: 2236 - DNA, 1119 bp, Homo sapiens; identical to SEQ ID NO: 2235

SEQ ID NO: 2237 - DNA, 1192 bp, Homo sapiens
tcagctatatgggaggctaaagcagaaggatcacttgagctcaggagttcaagactagcctaggcaacatagtgagacctcatctcaaaaaaagaaaaagaagaaaaaattaggatattttaattttaattttatttatttatatacttatcatttatttatttgagacaaggtctcactctgttgcccagagcgctcaagcaatcttccttcctcagcttcctgagtagctgggactacacacacgtgccattgcccccagctaatttttaaattttttgtagagatggcatctctctatgttgccaagcctggttcaaactgccagcctcaaacggtcctcccaaagtgttgggattacaggtgtgagccactgcatccggaaatttataatcttattaaagtgtttgtaccatgtcttatctctttaaacctactgtgctttgacccttctttctgcctctctcctggtcaggctcctcctgctggaccctccagccccgggcctcaggagcccgagaaggaggagaggagggtctggactatgcctcccatggccgtggccctgaagcctgtattgcagcagagccgggaagcaagggacgagctacctggagcgcctcctgttctttgcagttcctcctcagatcttagcctcctgttgggcccctcttttcagagccagcattctttccagcccctggagcccaaaccagacctcacttcatccacaggtaactgggggcagaagtcactggggttccccttctgtgcatgaattggctccctctttcgtaccctgctttctgtctgatacttgagcatttagtttcccagatgcctttagtgatcgcaagttgcaaggagcagaaatctgctcacattggtccaaataaagggattgagatctcatggaaatatgacatcgctggacttaatgagaactggagttgggaacggggtactatcaggaactgaggcagctagctggcccttttctgtgggcctgcatagcctcctgggtccacctctcctgcacatctgctcttttttcttgctagaccagcattcaaggttctcacccttcataacttcagtttacacatgggtttgaccagctgtgatactgactctagctgagcctctagacatttatagagacatcggtgtctcagtttttttaggtccagtt

SEQ ID NO: 2238 - DNA, 1210 bp, Homo sapiens
tccaatgcgctatccattgcgccacagagccacccgacgaacggcggcgtcttgtagcttacgggtactagagtgggaatggggcagggttggggagcggggctaagggacttgggcgggacatgccaggagggcgcggtttggatctcagaggccaagccaggtagaggtagcgggcgcaaagcatgttagccaggtgagagagagggcgcacatgggtcgaaaaaacagggagggagagcaaccgaaaatggctgagcgagcgagtgcagagctccggctgcccgcttggggggtgtttccggctcaggcgctccccactcccagatatagtcccacccaaataaactagttttgttgtaaatttctgtgtgtttttgtctcttctcgtttatctgttctgccatctgctgctatgcggtccacagtctcgatggttcttcatttccagtctaaaagatgtggaaaaggagacgaatcaatttggcactcttaagatttgccccattccttacttctagtctcttaggaggacaacggggacagtaagttttcgtgcaggtagcgtggccgagcggtctaaggcgctggatttaggctccagtctcttcggaggcgtgggttcgaatcccaccgctgccaggctggagtttttctggtggattacgcacctgctacagttctgttaacagttctgtgaggttacacctatttacatgcagaaagtaattttacgaattcccctggtaatggtttcaccatcatcttccgtgtttggtcttccagagagatcataggcctgcatccatcccagaagctaagacctgatggtaactgctgaagcaatatttcgtttcttcataacatctctattatttcgtttcttcataacatctctattttaacatgttttcaaatgttagctcaacttccaacatatttaaataatttattgtacgttctcttaacactgtgttataggactcaattatccggtaggaaaagcacaaataattggtagtgtcctagtttactttttttttttgtcgtattatcttgggtcataggagtatcccctctgtgaaaatcaattaacaatattcaacatgctgatattaaaagaaaagcttcaaggttccaccgagatttgaactcggatcgctggattcagagtccagagtgctaaccattacaccatggaacctccctc

SEQ ID NO: 2239 - DNA, 1211 bp, Homo sapiens
cagcgccttagaccgctcggccacgctacctgcacgaaaacttactgtccccgttgtcctcctaagagactagaagtaaggaatggggcaaatcttaagagtgccaaattgattcgtctccttttccacatcttttagactggaaatgaagaaccatcgagactgtggaccgcatagcagcagatggcagaacagataaacgagaagagacaaaaacacacagaaatttacaacaaaactagtttatttgggtgggactatatctgggagtggggagcgcctgagccggaaacaccccccaagcgggcagccggagctctgcactcgctcgctcagccattttcggttgctctccctccctgttttttcgacccatgtgcgccctctctctcacctggctaacatgctttgcgcccgctacctctacctggcttggcctctgagatccaaaccgcgccctcctggcatgtcccgcccaagtcccttagccccgctccccaaccctgccccattcccactctagtacccgtaagctacaagacgccgccgttcgtcgggtggctctgtggcgcaatggatagcgcattggacttctagtgacgaatagagcaattcaaaggttgtgggttcgaatcccaccagagtcgattttatttcaatttttcctttttatccgtttttttcttaaaggcccccatcccttctccccctaccctatctctctctttccacctggtttcaatttcgatctcagttcccgctctgctctcttctttacttacctgtctgccccggggcttgggccatggagagcaggactgagggtgggagacagaagggaagggaaagtgggcgtggacgtcgagataaaggcaggcccctggctcggggacacacggggatttaataaccactttattccatgcactagggactcgggaagggactgggactgggctgaggggcagagagagtacaatcctagacgcaagggagaagttggggcagggaaaagggacaggaaccagggaaatatatatttatatagatactctaatatagaccacatctcacccgcgcgctgagcccgcgcgccccactgccctccccaacacctgctcgcccggacgcccgggtccctctgctgccctcgggctggagtctctaccccacccctagaccccgcccccaccaccccccaaggctcaggg

SEQ ID NO: 2240 - DNA, 1274 bp, Homo sapiens
ttcgtattcctggaagaaggaaggcataggcttcggttttcccctcggaaactgcttctgctggaggatatgtgttggaataattacgtcttgagtctgggattatccgcattgtatttagtgctttgtaataaaatatgttttgtagtaacattaagacttatatacagttttaggggacaattgagatggctgaactactgaataaaaaaaaaacaacgctgttttctagtcctgcagaccgtaagatacttggtatcgcttctattttggttactacggtaggtgcctggcggaagggagtgggcggagatatgtaaatagaaagtgcgtacagttagaacgtccggcacgtaactgatcggagcattctgggaagaagtaatttattccttttcggcagccgaatgaaaaaaaaatttaaaaaaatgtgcgagctaatatggcaaaacaactggaaggacgctaaataataggattgctcataccagcgcgttatgaactcaccctagcttgtaacggaatctttttcactgagtgcagaatgtcggctgtttgtctgtatcgtcaggtgggataatccttacctgttcctcctccggagggcagattagaacatgatgattggagatgcatgaaacgtgattaacgtctctgcgtaatcaggacttgcaacaccctgattgctcctgtctgattctttctgacgatcacttacatttgtgttatgctgattagcagatatccacaaacatagctatgaagttctgactgggataaccttgctgtttgtctattttgcagtcttgctattgctgtttgtctattttgcagtcttgctaaatttgtttgttcttgaaaattgtgatttggtttttgttgctttctggaatttaggcagtgaaataatacaaatgggctctttgttttttgtcgtttgataactttaatcctcacttctcaggaaacattgcacatcagtaaatatctgcagtcttgtgcacatggtggttgccctcaggatggtattcaataggaactgtatttctttttccttgaggtagggtcttggtctgtcgccaaggcaggagtgcacggcgcagatgtatatacatggatacatttgtttttggagagttggttgttaaaaatctaccagtacacccccaagaaactcatcatcaccaatgacttcttcccaaatccagagtcacttttcagacttgagattgacctctcttcagcatatggtatgttgaccacccccctctttt

SEQ ID NO: 2241 - DNA, 1177 bp, Homo sapiens
gtagcgcgtctgactccagatcagaaggttgcgtgttcaaatcacgtcggggtcagcggctatttttcttcggtttttattaaccccctttattttaaactacggtcgagcttcagcgttcaggtcattgaagaagcaatatctccttggggcctgaaggagaggggtttctggaagttccaaggccgccccgtctggacagcccaaccatcgcgcggggatttttgcgatggatccgggtaccgtaattctgggcggataacgcgggtcctaagacaggagcagttctagacctctcagcagagggacgagggtcgggccatcacgcatggaagaagtcggtctctgatctacgagttctctttccagtgccgagcggattccttccaaatgtgcagccttcacgacgtaggcgagccccacctgcaggaagttcaggttccagagaagtgagatgcggagggcagtctgaacagcgagggctgtctgcagacgaggtggccgagtggttaaggcgatggactgctaatccattgtgctctgcacgcgtgggttcgaatcccatcctcgtcggctaaggaagtcctgtgctcagttttgtagcatcaaaactaggatttctcttgttacccccagtcactccattcagttttcgtgtctttcccagctgcatccatcctttcctcattttcgtatgcagccgactttttgtgacatctttgtattcattctctgcaattcagctgacctggccaaggaaacaagatcctaagcgtctttccggcggcgccgtggcttagttggttaaagcgcctgtctagtaaacaggagatcctgggttcgaatcccagcggtgcctccgtgtttcccccacgcttttgccaacattaaacattgtgaggacagttgcagaaactcataacttccatcctacatggtttactcacgtacccatctatcctctcccggtgcatctgccacacgctgttgggtttttgctcttcgtgcacatggtacttgcgcctcgacctgcagttacaccagtcgcatcatctgtacttgccagtactgtctgttactcgtctaggtgctcagttagtcagtgtttgtgttctgttttcatttctcataaagcagtcccacaactgaaggtttttcccgagagaactgaacagta

SEQ ID NO: 2242 - DNA, 1177 bp, Homo sapiens; identical to SEQ ID NO: 2241

SEQ ID NO: 2243 - DNA, 1141 bp, Homo sapiens
accccagtcagagtaaagttgcaggaagccagaggaggcaatacagtgggacagttaggaatgcacccggggcctcctgcagatttcggaaattggcaagctacgggattccttcctgaaagatcaactgtgtcttaaggctctccagcctatgcatactgtatcctgcttcagacttaggtacaattgctcccctttttatatatagacacacacaggacacatatattaaacagattgtttcatcattgcatctattttccatatagtcatcaagagaccattttataaaacatggtaagaccctttttaaaacaaactccaggcccttggttgcgggtcgctgggttattggggcagcgccgtggtcgtcactcagtcgctctgcatgctctctgtcatacagacaggtaacctagttctgtgttcacgtggcccccgactcctcagccacatcaagtctcctagaccactgtggactctaaactgcacttgtctctctcatttccttcaaataatgatcaatgctatttcagtgagcaaactgtgaaaggggctttggaaagagtaggaggggtgggctggatcggaagcaacacccatttggggttaccatgtccatcccccaaggggggccctgcccctcgagtcgatggtgtcccgcatctactcatgtgaactggccttggcgagggctggtctgtgcatagaagggatagtggccacactgcagctgaggccccaggtggcagccatggatcatgtagacttccagatggtctcccgaaccgcctggctctgccggcgccctcctcacgtcaggagcaagcagccgtggacccctaagccgagctggtggaaggcccctccccatcgccagccgggccctcatgctgaccttgcaaattcagccgctgctttgagcccaaaatgggaatattggttttgtgtccgaggcttgttccaagtttgtcaatgaggtttatggagcctccagaacagatgccatcttcctgaatgttgacatgccagtgggtgtgactccttcatttttccttctcccttccctttggacagtgttacagtgaacacttagcatcctgtttttggttggtagttaagcaaactgacattacggaaa

SEQ ID NO: 2244 - DNA, 1260 bp, Homo sapiens
ttgagacaatcattggtggggaactggatttttggatagcgtacaacacaacacagtcacaagggggaaaatgtgcatggggatcacacttgcattgcattactcaagtccccaagtccagtggttggtgggacgaatggtgggacaaccagaaaacatgtgtcttctgatgtaaataaacatgaagaccacatcacttctgtgaattatcatattacatgtcaagatatttgactcgaatacatcaagctttagacctaactctagtttactggatatatatgagctatagaaacaagttaagtgatacaatgagaaagtgacaaatgacagaaggaaaaacactctggaggatcattggcctgatctcctaaacttaactagtgctatttcaaagagacataaggaatacaacaagcagacacaatgcatagtcctgggttgcatataatatggggtggggggagaacaaaaaaaaaaaaaccccaaagcacagctaaaaagacttctggggacaattaggagattttgaatattgtctaaccattagatgagattaaaaaattattgaaaagattcttccacaggaggcctacacgccgccgcttgtgctgctgccatgtctctagtgatccctgaaaagttccagcatattttgcgagtactcaacaccaacatcgatgggcggtggaaaatagcctttgccatcactgccattaagggtgtgggccgaagatatgctcatgtggtattgaggaaagcagacattgacctcaccaagagggcgggagagctcattgaggatgaggtggaacgtgtggtcaccattatgcagaatccacgccagtacaagatccccgactggtttttgaacagacagaaggatgtaaaggatggaaaatataaccaggtcctggccaacggtctggacaacgagctccgtgaagacctggagcgactgaagaatattcgggcccatagagggctgagtcacttctggggccttcgtgtccgaggccagcacaccaagaccactggccgctgtggccgcaccgtaggtgtgtccaagaagaaataagtctgtaggccttgtttgttaataaatagtttatataccaaaaaaaaattattgaaaagatgaataatattaacagcaaagttacaaagcagtatgttcaatataaactcatttcactgcaacattataaaagatctcacaaggtataaattagtgttaaagaggtatcctgtgagtagtga

SEQ ID NO: 2245 - DNA, 1127 bp, Homo sapiens
tccttccagagagttatactactgtctcccttccccaccctttataaaattagttcattggctgtaccttcagaacatcaagcaatagtagtaataggaaacttagtcttatatccaatttggtaccaagatatatgaatagatttattactattatatatctagagcggaccaggcttgcttgtaggttaattgcttagtacctgtgtagtgctggataatatttaatgctgatatgtaacttgcgtttcttatgagatccacagtaaatttcttattgtattgtttgtactattatgtttgtattatttgttatcgcaggattgttattaatgtgataaaatgaattgggatgctttctgtattttctattctgaaataagtgtgggatattgcattggaatggtctgttccttgaaagttgcagagtctgtgatgccagatggaccagaactcctgagttaattctccggcagctttttttttccttcttgattactcatgtatttcttccattttcttaatttcaatataggacagtgctaaaaacataaacattaataaatatctattgaataaatgaacgtatgggtgaacaaattttataactattaatttcctagaagaaactttaaggaattatatttttaaagcatattttacactactcttacgtatctgagatcctcttccttttctagatcctaattttatggatttccttttaaattagtaaaaagatgtttcccattgattccttcctcctcctttccttgaaagtttttattttcatatattaaataaaacatttctagaaagttatttttgatgacataatatttggttccatgagtgcttaaagtctggagcctgagttcagattctggttctgccacttactagcagtggacaagttatttaacttctctgttctcagcttccttatcaataaaatgaaaataataatagaacttacctcatagagttacaagaattaaatactccaggactatgaccagtactcattaggcactattatataagagtttgtggaatgtgatatatttactaatcttatttattatatgatttggcacctatattttactattatcaatttatgaagg

SEQ ID NO: 2246 - DNA, 1195 bp, Homo sapiens
taagtggaatcatacaataattgttattttatgcctggcttatgctaattagcatactgttttcaaagttcatccatattgtggcatgtatcagaacttcatttctggttgagctcagtggctcacacctgtaatcccagcactttgggaggctgaagtggaaggatcccttgagaccaggagttcaagaccagtctggacaacatagtgagatttcgtctttacaaaaaataaaaataaaaaaattagccagtctgggtggcgagtgcctatagtcccagctacttgggaggctgaagtgggagaatcccttgaatccaggaggtcaaggctgcagtaagctctgatcagtctgctgcattccggcctgggtgacagagcaagtccctgtctcaaaaaaaaacttcatttctttttatggctttattaatattccattgtgtatatatacatacatatatatatgtatgtatatataccacattttgtttatcattcatctaatgataggcacttgggttatttccaatttggggctattatgaataatgcttctatgaacattggtgtacaagtatttatttgagtaccggttttccttttttttttttttttttttgagtataattgctgagacatatggtaattctgtatttaaattttttgagaattgacaaactgttttctgcagcaactgtacagttttacgttgccaccagcaatgaactatggttccagtttctccacatctttgtcagcatttgtaattttccattttttggactatagccatcctagtaagtgtgcagtgatgatgtcacattgtggttttgattttcatttccctgatgactaaggatgatgagcatcttgcatcttttcacatgcttattggccatctatatatcttctttagagaatacctattcaagtcctttgcccattttctgattctagtttcattttaaagtcatgattttttttttttttttttttttgagacggagtctcgctctgtcaccaggctggagtgcagtggcacgatctcagctcactgcaacctccacctcctaggttcaagagattctcctgccttaacctcccgagtagctgggactacaggcgtgtgcccaccatgcccagctaattattgtatttttagtagagatggggtttcactatgttggccaggatg

SEQ ID NO: 2247 - DNA, 1217 bp, Homo sapiens
aaccccatctctaccaaaaatacaaaaattagccgggtgtggtggcgtgtacttgtaatcccagctactttgggggctgagccaggagaatcgcttgaacccgggaggcggaggttgtagtgagtcgaaatcgtgccactgcactccagcctgggcaacagcgagactccatctcaaaaaaaaaaaaaaaattacaacctactgagaagctaattaagatttgtagtcctcaataatttacaaaaacttagaaaaattacctctaattaggtcttaaggggcttttgttaggatggacttaaatttgtaaagtcattaattgactgtcatcagaaatgcctgtcctgctctgcatctgcagtctctaaggtgtatgcgccttctccattcccccaggttttgagaacagagtgctgttttagagctggcagcagcatctcagcccaagagaaggtaagccttgagctggccaatgatcccttcaaccccatagtggaatgaataaacagctgatcttgttaaaactcgcttcaaaaaaaaaagatatcaaatgatgaaatcacccaaaatagctggaattaccggcagattgtgtagtggtgaacctatggttttctgaagatatctcttaccctgtgattgactgtcagttggtgcagaaagtgagattgaaatgtagtttctttgcaggttatattcccagaggatgtcagtcccaaggaccagtagctgccatcagtttggattctgaaaactaactggcatcaacactgggtgtagaaacatgcttgccttatgtatcagaggacatgctcagcagatccaagagatatatttggcaactttttctagaaaaggcacattgggtatcattcattacattcttgagtttttttgggtttttttttttttttttgagacagtcttgctgtattgcccaggctggagtgtggtggcacaatcacagctcattgcatcctcaatcacccaggcctaagcaatcctcccaccttgtagctgggactacagctcacagcacacctggctaaaattttttttttgttgagacggattctctatgttgcccaggctggtctcaggctcctgggctcagatggtcctcctgcctcagcttccaaaggcacaggccaagttgtagctttgtcccttgccatcatgcccaacaagaggttctataccttttaatgaattgactt

SEQ ID NO: 2248 - DNA, 1217 bp, Homo sapiens; identical to SEQ ID NO: 2247

SEQ ID NO: 2249 - DNA, 1166 bp, Homo sapiens
tttaccttttggaaaagaaaccgtcacattgctttggaaaaggttgagaggagacccctgttaagtcaagaagaaagtacagaggatgtcagaatctgatgagaacagcacattagtgtttattgagactccgatcttaactctcatttaattaatctgagctctgaaaacctatcttgcagcatttatctttaaaagagcctggttaaagtaaacctatactaacaattttgctttttctaacagtttgaggaagacctttttaaccaccacaaaacattctatggcaattcttgaaaatctcttaaattggagtctattatggccccatgaaaaccattaatcccattaagatagggagtataaacccctggctggtggaacaggttctgctactttaggagcaaggtggggtgtgagtagatggttttcatgccaagaacatgctttcactttgtattcatgcttgtgttggtgtgatggtctctgtgggtgggtggatgctttgggcgttgaaatctagaaatcctgttgctcagtttctagatgaagtcatgagcaaggccatcagtggagctctggccccgcccccaatgtgcagaagggccgggagcaaggcctggagttttcatgtgttttcagacccaggtttaggtgctctcttctcactgaaataactaagtgctctccactggcatcgagccctttccacaagtttttaaggctcttaacccacactttcactcctctgctactagtcttcagtgttgttaacagcaagagaaaattgggtttgtttaaaaatctacttctctgaggtggcacagttgcgtagctgtagtcccagctactcaggaggctgaggtagtaggattgcttgagcccgggaggtcgaggctgcaatcagtcatgatcgtgtcactgcactccagcctgggtgacaaagcaaggccccatatcagatatagatatacttatcagaccccccctgaccatttagattggcagtgctttgagaaatgcactatgacctttctgtgtcaatgggaatatacagaaggaacattcgggaccccgctgtcccccacagcctcattgttgtctccaggacactgctgggtcacacgaatgctccaggacagacagggacctggagtgcatcagga

SEQ ID NO: 2250 - DNA, 1409 bp, Homo sapiens
tggccttcctggtgaccccatggaccatgggagggaggtgaggtgaggtatggatgctgcccgggctcctgatgcccttagcatgggaggtaaggcagggtcccgagaactgggcatcgaggtgttcccctgccacttgcaaagccctctagcctggctgcatgtgggattcagccaggaggagtgctggaacccggtccccagaagggaccgtgcagggtcaacctcagaggactgccctgctggaggaaggtgccccaggaggtccgggatgaaggagaaggaagctcagtaaagagcccaggtagccccaagaagatgaccaggtgtgggagggaggcttggcttggcaggggagcgactgtgaaagtttagtgacgctggttttatcttgctctagtttctctaagacacccacgggcgttgcaaaaccatcttccactcaatcatccatgtcttcagctacaaccccaagagtgctcgaaagcaacccacggtgtggcagttcctcaagaggttacaggcctttccgctcggctgttttcctgctcaggagccgcagggccgtaggcagccatgacgcccagccggaatggcatggtcttgaagccccacttccacaaggactggcagcggcgcgtggccacgtggttcaaccagccggcccggaagatccgcagacgtaaggcccggcaagccaaggcgcgccgcatcgccccgcgccccgcgtcggggcccatccggcccatcgtgtgctgccccacggttcggtaccacacgaaggtgcgcgccggccgcggcttcaatctggaggagctcagggtggccggcattcacaagaaggtggcccggaccatcggcatttctgtggatccgaggaggcggaacaagtccacggagtccctgcaggcgaacgtgcagcggctgaaggagtaccgctccaaactcatcctcttccccaggaagccctcggcccccaagaagggagacagttctgctgaagaactgaaactggccacccagctgaccggaccggtcatgcccatccggaatgtctataagaaggagaaagctcgagtgatcactgaggaagagaagaatttcaaagccttcgctagtctccgtatggcccgtgccaacgcccggctcttcggcatacgggcaaaaagagccaaggaagccgcagaacaggatgttgaaaagaaaaaataaagccctcctggggacttggaataaaaaaaaaaaaaaaaaaaaaaaaaaaaggaggttacatacagctttccatctggcccaacaaccctacttctgggtacatgcccagaagaattaaagacaggtattcaaaccaaaacttgcacacagatgtccatagcagcattaatcacattcactaaaaggtggaaataacc

SEQ ID NO: 2251 - DNA, 1149 bp, Homo sapiens
caggtggggcctcagtttcctccctgagaactcctgagtcctctggggtgtgggctggatgagagcagcctccctcctcctggagctgctgtgcaggcctagaatgctggtctagagggaagcagggacctgaccatctccccaacctcttgcctaagcccagagcagctcggcctagccctgcatcccctgtgagctgagcactgggagggactgttcagtctcggctgagaagtaggtgatggtcctgggggactgataattaaagctcagcagattataattccctgaaagaaagctcagcacagagagggaggaacagtgcccagagccttggcacaggctggaggaggattgctgggggaggtggtggtggggggaataagaatgatacctggaaccatcgtgttcagagcttcctctcggtgaggcctcctaggtgcccagccctgggcactttgctgtttccagtcttcagaccctccttgccaatgaaaggttcctgccatccccattttacagatgaagaaactgaggcttggaaaggtctggcaactgtggttcaaggcccatggctggtaagaagtgagcctgcggctaaaccctgggctgtgttgggagcgttggcctccttactgagaagaaggcactgcttaactcagagagaggctgtctgatggcagagtcctgggcaggccacaggcctgaagcaggaacaggttggagcagggaagacccctcaggacattccccatgtttgtggccttctgtctgggagagggggatgggatcaggggtcacactgtggtgactggatctgccattcacttagtcacctgttgtgtgatgccaggcaggtgacgtccttccttgggcatctcctctataaagggcttgtgttctcctggggtttgcaggcttctttaagaatctcttcctccctcattaatcctacaggtcccaactgagcctgttctcatgccaggagctcctggcacactcctttcatcacctgccggagctgggctctattatcatccctatttgacagaagagcacaccaaggcccagaggctactgctgcctggcggtcagccttctcctcaccagttaaacctgcttcgtgcagtcctgctgcccagcttgttg

SEQ ID NO: 2252 - DNA, 1150 bp, Homo sapiens
taccatgttcttttgctgctcaaatctttttagctttggagctattttagttggcttctttgatgtacttccaccattgtgtttttccagcacttcctcactttctgacactgcaagatgcctcaggctcattttgtatattccctgccctggcctagaatctgccatttctctaaggagccctggttcctttgattggagaatagcattagaaactaccatctgggcgctgacttacttttttacagaatcactctggctgttgtgtagatagcaggttatagcagggcaaagtgaagtgggacagtggagaggttgctagaatataggccaagtgagcaacaaccaaagctctggacaggtgctggggagcagcttctaactcagttcagctgaacaatttgagcccacacccagtttccattgctctgggccaggcacaggggatggtggttaacagctaccttttcttgagtgcttgctgcaggctgggcagtgtttagttttatttgttgtactgtctgcctatatgattggtatatgtatcagagagagagagattgatagagaagccgctctagttaccaagagccgtgacccttgaagtctgggcccatggcagatcccacctgccttattgggagtataggctctcccaccgtgggagggcccaggtcttacaggggccagacagaatcagggagtggccccgaggttggttgctggctgtctcaacagccattgctcttggggccaccgtgtctatccctatacctgtccactccaccaggtttttctcatttcttgagtttccaggagatccccaaggctgagggtttctggatttgggaactcgatgtatttccatcacatgccacattctggacttgagaggtctaagggtgccttggggagggtgcccccagtcttcctgccagtcagccaggaggcagggtctggatagctggccctgcaactcagagtctcaggcttctcgttcctggggccctgctgattaggatggggcaggaggcatggggctgggtttcttccctccctgggtctgcccactgcttggctggcctcagccacagcatctatcactgatgttacagtgtttggagtgaggcacatcccgggccttatcttt

SEQ ID NO: 2253 - DNA, 1192 bp, Homo sapiens
cttggtattcctcctggatggaaaggctgttggcatcaataggggacagaggctgatgctggagtggccagtagaggtggtggagcagagcagccatcttttaagtggggctgtatcaggctgggtttatttaaaagcaacaaaatgttttggttaagaaaattattttgctttcagtgtaaatcttcgcagtgttctaaacaaagttcagtcttctgctcgcccctttccctcactgatgtctgcacttggttgaggtctcctggagcctcacaggctctgctgttctccacttctcacctgccatccacgccctgcaagctcatgcaaacaccctttcttcctcctgcggcagagttgttcaggttgcctgggcaggggcttaaacagtgccagcccctgccatcccaaagctattgttaagccccccaggcgtcctccacccacgcccactagcctgccatgtccacagttccttgggctgctgaggggctagtgcagtggtcctgacctctcttatcaagagcacacttctttgctggttgctccttttgagcatatgcgtgtgattatttggaacagttagacttgccacgttgggtcagttttagaaattgtttctagctagagggactggtgtccttccaagtctagcatttggggtatggaaaattgttgtggtgtgtggtagggtttttgttttcttttttgagttttttttccccctttagtctcctggctttttcctttcccttcccttctccactggccagcttgggcctcatcctcatgtcatccttctaggaaggcgcctgccccatcttgtctgccggcagcatgcatccaaggccagagctcaggcctgcagactgggctggtgcctcctccgcttcagggtatgggagttggtgaaggggctttcaaaaaataataaggaaaaaaaggtaaagtctttggtagcttctatccactcagatcctggaaggcagcaaggttttgtggatctagattcattaggaatgtcttcttgtcagccaggccaggacccgggcttgccaagagcagaggccctcccagcaaccaggataccaccactttgggggctttgtgtacagaggtccgggtctgagacctcataggctgcagaaatctggggcagccaccatcaagaagcccctctcaggggccagaa

SEQ ID NO: 2254 - DNA, 1139 bp, Homo sapiens
cctcccaggctcaggcatcctcccgagtagctgtgaccacaggcatacaccacacctggctaatttttgcattttttaaagacaaggtttcaccatgttgcccaggctgatcttgaactcctgggctcaagcaatcctcctccctcagcttcctaaagtgctgggattacaggcatgagccaccgtgttcaggacttgccacttctgcatgtcagttctaacctcacccctcccctgactctcccgacagggacttctggagccccgtcctggacaggagacagaggaagaaccctggagtcggaagccagaagcaaaaggccccgggccagttcctcagacatggggtccacagcaaagaaaccccggaaatgcagcctttgccaccagcctggacacacccgtcccttttgtcctcagaacagatgagctcagggtagggtagagaacgccactttctcagacctgtcccctttgtgtttagaaatgagttaaccaggaccaagtggccatttagtgtcctggaaacttagaggacagtgttggcctttggagtcgggccttcttgtgttaaggggcacaaggtccagatcactctggagcaggccagctctgctggacagtgaccctcttcccaggcctcaggagtgaccatagccactgctgaaaagtcacgcagctgctccctcggaccccccaaggatggttgctgttagcagaggattggtgcagtcccagctgaagcccactgtgtgccaaaggaagaagctcccagggctgcttccttcacctgcagaaagccccaagtgagccaccagcactcatggggcagtccctgtccaggctgcccagggcttctcatagacgtcctgagaaggacggtgtaatgcaaggaaatggctgtggtaacactgatccttcagaagaagcttcattccctcttaatctagttaagccaggacatccagaattcattgctttaataaagaacccaggccgggtgcagtggctcatgcctgtaatcccagcactttgggaggctgtggggggcggattgcctgagctcaggagttcgagaccagccagggcaacatggtgaaaccctgtctctactaaaatacaaaaaattagccaggtgt

SEQ ID NO: 2255 - DNA, 1186 bp, Homo sapiens
ggataagcagcttcccttcatgaagaagttgccatttctctggccttcatatttacctactttttgttattgttatctgtatcggttcaatctcacactgctataaagaaatgcctgagactgggtaacttataaagaaaaaaggtttaattggctcatggttccatgggctgtacaggaagtatgactggggaggtctcagggagcttttactcatggcaaaaggcaaagccagagcaggtatcttcacagggctagagcaagaggaaaagagagaggggaggtgctacacactttttatgcaaccaaatctcatgagaactctatcacgagacagcagtagggggacagtgctaaatcattcatgagaaactacctgcgtggtccagtcaccttgcaccaggccccacctcccacattggggattacaattaaacatgagatttgggtggggatacagatctaaactgtatcattactcaaaaaaaaaaaaaaaagaaaaaagaaagaaaacacaggaaaaggaactcacctcttttatcatcttagtatttagtactaatggtttagagcaggagttgacaaactgtggcctggactcatggaccaactctggcccaccacctgtttctcagaagaaaattttattggaactcagccacacttactcatttacatgttgtccttgactgcctttgtgtccagtgtcagaactgagtagctgcagcggaggttgtgcctctgggctttaatatcacaaacagagcagcttataagcaacagaaacttacttctcacagttttggaggctgggaagtccaagatcaaggtgtcaacatatttagggtctagggaaggtctgcttcttggttaatagaaagcacctttcactgtgtcttcacatggtagaaggggagagctctggtatcttcaggcccttataagggcactaatcccattcatgagcgctccaccctcacgacctaatcacctccaaaaggccccatttcataataccatcaattaagtttcattatatgactttgatggggatatagcccatagtaggttctatgtccctgaaagcctaaaatatttactgtttggctctttacagaaaatattttcttggcccctgttccagagcattcatcaagaagtcagataaagggtttaaaccagtcag

SEQ ID NO: 2256 - DNA, 1268 bp, Homo sapiens
tgaactcagccagcttccctgactcaaacgatcatcccgcttcagcctcccgagtagctgggactacagacggtgccatcacgcccagctcattgttgattcccgcccccttggtagagacgggattccgctatattgcctgggctggtgtcgaactcatagaacaaaggatcctccctcctgggcctgggcgtgggctcgcaaaacgctgggattcccggattacaggcgggcgcaccacaccaggagcaaacacttccggttttaaaaattcagtttgtgattggctgtcattcagtattatgctaattaagcatgcccggttttaaacctcttaaaacaatttttaaaattacctttccacctaaaacgttaaaatttgtcaagtgataatattcgacaagctgttattgccaaactattttcctatttgtttcctaatggcatcggaactagcgaaagtttctcgccatcagttaaaagtttgcggcagatgtagacctagcagaggtgtgcgaggaggccattaagactatactttcagggatcatttctatagtgtgttactagagaagtttctctgaacgtgtagagcaccgaaaaccccgaggaagagaggtagcgttttctcctgagcgtgaagccggctttctggcgttgcttggctgcaactgccgtcagccattgatgatcgttcttctctccgtattggggagtgagagggagagaacgcggtctgagtggtttttccttcttgatggctcaatgacagagactagctcgtaaactccgggccgtttccgggctgttcgctcctgcttggcaatgtcgcgagaaaggttttcgcctcctgtttcagcggtgacggcttttgggttttcctcggggtggctttttaattttagtcttggcgcgaggcgggggatgctgtgtggcacctcctattgtctctttttgcgttttctcccattctcgctccctcttttgtcgccgtttcccgcccgccactcccacccccagacggggtctccgggtctcttgttctgtctgccggccccggctggagtgcagtggcgcgatctcggctcctagcaacatctgcctcccgggctcaagcgagtctcccgcctaagccctcccgagtagccggggcttaaaggcgcacacgccactccaggcttttttttttttttttttttttttttttggcagaaacggggtgtcagcatgttagccaggctggtctccaacgcgtgatctcaggtgat

SEQ ID NO: 2257 - DNA, 1200 bp, Homo sapiens
taactgatcagagctcactgcagctttgaactcagccagcttccctgactcaaacgatcatcccgcttcagcctcccgagtagctgggactacagacggtgccatcacgcccagctcattgttgattcccgcccccttggtagagacgggattccgctatattgcctgggctggtgtcgaactcatagaacaaaggatcctccctcctgggcctgggcgtgggctcgcaaaacgctgggattcccggattacaggcgggcgcaccacaccaggagcaaacacttccggttttaaaaattcagtttgtgattggctgtcattcagtattatgctaattaagcatgcccggttttaaacctcttaaaacaacttttaaaattacctttccacctaaaacgttaaaatttgtcaagtgataatattcgacaagctgttattgccaaactattttcctatttgtttcctaatggcatcggaactagcgaaagtttctcgccatcagttaaaagtttgcggcagatgtagacctagcagaggtgtgcgaggaggccgttaaggctatactttcagggatcatttctatagtgtgttactagagaagtttctttgaacgtgtagagcaccgaaaaccccgaggaagagaggtagcgttttctcctgagcgtgaagccggctttctggcgttgcttggctgcaactgccgtcagccattgatgatcgttcttctctccgtattggggagtgagagggagagaacgcggtctgagtggtttttccttcttgatggctcaatgacagagactagctcgtaaactccgggccgtttccgggctgttcgctcctgcttggcaatgtcgcgagaaaggttttcgcctcctgtttcagcggtgacggctcttgggttttctcggggtggctttttaattttagtcttggcgcgaggcgggggatgctgtgtggcacctcctattgtctctttttgcgttttctcccattctcgctccctcttttgtcgccgtttcccgcccgccactcccacccccagacggggtctccgggtctcttgttctgtctgccggccccggctggagtgcagtggcgcgatctcggctcctagcaacaactgcctcccgggctcaagcgagtctcccgcctaagccctcccgagtagccggggcttaaaggcgcacacgccactcc

SEQ ID NO: 2258 - DNA, 1284 bp, Homo sapiens
ctgatcagagctcactgcagctttgaactcagccagcttccctgactcaaacgatcatcccgcttcagcctcccgagtagctgggactacagacggtgccatcacgcccagctcattgttgattcccgcccccttggtagagacgggattccgctatattgcctgggctggtgtcgaactcatagaacaaaggatcctccctcctgggcctgggcgtgggctcgcaaaacgctgggattcccggattacaggcgggcgcaccacaccaggagcaaacacttccggttttaaaaattcagtttgtgattggctgtcattcagtattatgctaattaagcatgcccggttttaaacctcttaaaacaacttttaaaattacctttccacctaaaacgttaaaatttgtcaagtgataatattcgacaagctgttattgccaaactattttcctatttgtttcctaatggcatcggaactagcgaaagtttctcgccatcagttaaaagtttgcggcagatgtagacctagcagaggtgtgcaaggaggccgttaagactatactttcagggatcatttctatagtgtgttactagagaagtttctctgaacgtgtagagcaccgaaaaccacgaggaagagaggtagcgttttctcctgagcgtgaagccggctttctggcgttgcttggctgcaactgccgtcagccattgatgatcgttcttctctccgtattggggagtgagagggagagaacgcggtctgagtggtttttccttcttgatggctcaatgacagagactagctcgtaaactccggggcgtttctgggctgttcgctcctgcttggcatgtcgcgagaaaggttttcgcctcctgtttcagcggtgacggctcttgggttttctcggggtggctttttaattttagtcttggcgcgaggcgggggatgctgtgtggcacctcctattgtctctttttgcgttttctcccattctcgctccctcttttgtcgccgtttcccgcccgccactcccacccccagacggggtctccgggtctcttgttctgtctgccggccccggctggattgcagtggcgcgatctcggctcctagcaacatctgcctcccgggctcaagcgagtctcccgcctaagccctcccgagtagccggggcttaaaggcgcacacgccactccaggctttttttttttttttttttttttttttggcagaaacggggtgtcagcatgttagccaggctggtctccaacgcgtgatctcagg

SEQ ID NO: 2259 - DNA, 1210 bp, Homo sapiens
ccgcttcagcctcccgagtagctgggactacagacggtgccatcacgcccagctcattgttgattcccgcccccttggtagagacgggattccgctatattgcctgggctggtgtcgaactcatagaacaaaggatcctccctcctgggcctgggcgtgggctcgcaaaacgctgggattcccggattacaggcgggcgcaccacaccaggagcaaacacttccggttttaaaaattcagtttgtgattggctgtcattcagtattatgctaattaagcatgcccggttttaaacctcttaaaacaacttttaaaattacctttccacctaaaacgttaaaatttgtcaagtgataatattcgacaagctgttattgccaaactattttcctatttgtttcctaatggcatcggaactagcgaaagtttctcgccatcagttaaaagtttgcggcagatgtagacctagcagaggtgtgcaaggaggccgttaagactatactttcagggatcatttctatagtgtgttactagagaagtttctctgaacgtgtagagcaccgaaaaccacgaggaagagaggtagcgttttctcctgaacgtgaagccggctttctggcgttgcttggctgcaactgccgtcagccattgatgatcgttcttctctccgtattggggagtgagagggagagaacgcggtctgagtggtttttccttcttgatggctcaatgacagagactagctcgtaaactccggggcgtttctgggctgttcgctcctgcttggcatgtcgcgagaaaggttttcgcctcctgtttcagcggtgacggctcttgggttttctcggggtggctttttaattttagtcttggcgcgaggcgggggatgctgtgtggcacctcctattgtctctttttgcgttttctcccattctcgctccctcttttgtcgccgtttcccgcccgccactcccacccccagacggggtctccgggtctcttgttctgtctgccggccccggctggattgcagtggcgcgatctcggctcctagcaacatctgcctcccgggctcaagcgagtctcccgcctaagccctcccgagtagccggggcttaaaggcgcacacgccactccaggctttttttttttttttttttttttttttggcagaaacggggtgtcagcatgttagccaggctggtctcca

SEQ ID NO: 2260 - DNA, 1206 bp, Homo sapiens
atccataaagactgagagagaaggctattttttttcaaatgcgtacaactcaacaaaaaaaatatcacaagccacacaataaagcagggaaatataaccaaatcaaaggaacaaaataaatctctagaaactgcctccgaagagatggagatctataaactatcggattaataattcaaaataattgtcttaaagaaacacagtggcttcttttccgacaaaacaccaaatggcggatgacgccggtgcagcgggggggcccggaggccctggtggccctgagatggggaaccgcggtggcttccgcggaggtttcggcagtggcatccggggccagggtcgcggccgtggacggggccggggccaaggccgcggagctcgcggaggcaaggccgaggataaggagtggatgcccgtcaccaagttgggccgcttggtcaaggacatgaagatcaagtccctggaggagatctatctcttctccctgcccaattaaggaatcagagatcattgatttcttcctgggggcctctctcaaggatgaggttttgaagattatgccagtgcagaagcagacccgtgccggccagcgcaccaggttcaaggcatttgttgctatcggggactacaacggccacgtcggtctgggtgttaagtgctccaaggaggtggccaccgccatccgtggggccatcatcctggccaagctctccatcgtccccgtgcgcagaggctactgggggaacaagatcggcaagccccacactgtcccttgcaaggtgacaggctgctgcggctctgtgctggtacgcctcatccctgcacccaggggcactggcatcgtctccgcacctgtgcctaagaagctgctcatgatggctggtatcgatgactgctacacctcagcccggggctgcactgccaccctgggcaacttcaccaaggccacctttgatgccatttctaagacctacagctacctaacccccgacctctggaaggagactgtatttaccaagtctccctatcaggaattcactgaccacctcgtcaagacccacaccagagtctccgtgcagcggactcaggctccagctgtggctacaacatagggtttttatacaagaaaaataaagtgaattaagcgtgaaaacaaaacaaaaaaaagaaacacagtgaccttcaagaggacacagataattaaat

SEQ ID NO: 2261 - DNA, 1197 bp, Homo sapiens
tatttatttatttatttatttatttagagacggagtcttgctctgtcatccaggctggagtgcaatggcacgatctctgctcactgcaagctccgcctcctgggttcatgccattctcctgcctcagcctcccgagtagctgggactacaggcgcccaccaacatgcccggctaatttttctgtatttttagtagagacggggtttcaccgtgtcagccgggactgtctcgatctcctgacattgtgatccgcccgcctcgccctcccaaagtgctgggattacaggcgagtcaccgcgcctggcgcaattttgtttatatgattctgatatcgtcccatttaacacatcaaaaaatgcacaaatacatactttaaaaacattctacagttctttgacttttaaaaaatatctttcaaaaatctttttaagaatgcttgacattgtatctaccctcttaacatgcagacatgcacacgcagggtcatgcacacacacactggctgggactggcagaaggggccactgtggtgtgcctgcaagcctaggggtgggcccaggtggcaccatggcaggggcagatcttggtggtagtagtaaatattcaaatgagcgttttgaaggccaaagtggagaaggattccatgtgaaaagcagttgaacatgggtcagtcggtcctgagacaggcgagcatcatcccaaaggagtaggcattggcctcaatcgctgtcagtgatagaaagggagttgggtttggattcccaaatccagagtggcggagataggaaacaccaagttgccttctccagtgctgtatcctggaggagccggcaggagcccagggagagatctctttttcttgtgaagtgcagggcgtgctagaataaattcacagttctggagacttctagtggcacttgagaatccggggaagggggtgcaaatctccgtggcccatataccagcaggtctcccaggtgaacagcctctggacaaagtaggtaagggaagtcatccagccaatcacttacttgggaataaaaatgggctctaagggctcgtcaggtactcttgactggtgaatatggtttggatgtctgtcccctccaaatcacgtgttgcagtgtgatctccagtgcttaaggtaggatctggtgggaggtttttgcgtcatgggggtagatctctcatgagtgg

SEQ ID NO: 2262 - DNA, 1101 bp, Homo sapiens
ttgtcctctcctgagggagaccttttcctggtcacccagttgactggttttcctgcttccccacccacccctccagcatagggcaaatgtcttgtcactctctttctgtcagcagcactgactgaccacagctttgttcacttcgttgattttgttatcctgccacatttaggagatttgggaaccaagaatcaggtctcaaattaattaagaagatctctcttcgtgtgtgtgtgtgtgtgtgtgtgtgtgtgtgtggtgtgtgtgtttaatgaagtagcaaatgaaaggttcggaataccagggacagaaggtagaggggttttctaatgtgcctttgttttctgctcagttcttacctgcattgttccccagccctttgttgggaggagcagcctctccttgaattgttttgtgatttgagtaaaacgggactccccctgttctagagaggatgggcagaaagaaattcattccaagtgaagctttgtggacatagcctgatccttgcttttccctttagaacatgacctgcctgcctctcccacatgtgagatgactgactcagctttttatttctcctttgggacctaggctaggtgggcttttctactctctactagagctattacaaaatagccgatatgtaaacattctcataacaaaaacccaaccagaaaagccactgtcttaaagccctgttctatcctctccctttgtaataccgtcctaagtcagttgctccatgggatgcgatggcccagtttggcaggaccatctgttcctggttaaggaaaccttgtcctatgaccaaggagccttgacctatatagccacaggtccttgtctaggaggtaaacatattgccagcacccagcacagtgactgacatgagtgagggacaggcgggaagaggccaattggtaggtattgccagatccaaattggaaatggtggtggcttgtagagggtggtagcaggggagatagtggaaagggaagggggtatttttgggatcaagcagcaggattggctgatggagtgaatgttggaggagggggtgaatgagagaggatgactcctgggattttggctggagta

SEQ ID NO: 2263 - DNA, 1148 bp, Homo sapiens
actcctgacctcaggcgatccacccacctcagcgtcccaaagtgctgggattataggcgtgagccaccgcacctggcctatgagtggtcttttaattaggaacaaatctaatggaaaggagagttgactgaagttggcccacaggattgtgagctgggcagtgccttcatgaaggcttgccaccttgggacgccccagtttactggggtgtcttgcggagtgcagaaggctttctggcagctgcctgggtttggccagaccctgcctcccctcccgccggccaacccctagtccccttcctgtctccacttgcattcaggggtggctgctgttctgagaacattagaactgggaagagagatggagtcacatggatttttggtgggcattattctaaactttcgtatccaagttagtcccccttattccactgtggcattgccgttctaagcagttacctgatgcctgctgctgaagagctgctcacaggaggcggcggcggccctggcactgccccttgcattaggtcttgtgtttgatgtgttcttgtgaatttactttgtcagaacaaaatatttacgcgttgggttcaggaatttcttttagctccccatctggctgtgaaattcaggaaacctcccgttgcctagtaatcaccccatgtaggtgtacattgtgacaaagtgcatctgaccactaaggggcccccttggtgaccccagcacattcacagcagtgttaaaatggcctgcattttggagatgctggctggcctttcagtgcctcccaggaagacacatggcctttccctcttcagatgcctgaagggagtgctttgaggcaggtgatgtgctgggagtgtgggcggcctccctctggccccggggccctctgtggaccttggctccctccgtggacctgggcttcgtggtgagcactgcagcctccctgggcattccctccagcgccagcaccactgcaacatatagacctgagtgctattgtattttggcttggtgtgtatgctcttcattgtgtaaaattgctgttcttttgacaatttaagtgattgttttgtttactgtaagtttgaaaataaaaatgaagaaaaaaattccaatgactgtgctgtggttggagactttatt

SEQ ID NO: 2264 - DNA, 1182 bp, Homo sapiens
catcaaccttttttttccatttgttttttcaagtgtctatttggcccaggttccatcccacttcattttcaacccaaggattggttactctgttctttgtctctggctcatgattggttctttcgttccgcccctctcttccagcttttgcaggcgggattaccacgcagcttcctgctcctgccaaaaaaaaaaaaataaataataaaagaagaagaagaaaagaggagagaggcgaaagaaaaatgtcacaaagatctttgctttttaattggctttaagccttgtcggtcaagccaaactctgcctttgattggtctttctatctgcccatcccggatcgggggcgggatttccccggaagacccacaccttgttgccactggccgaacagtgcgcctgtctgaagctcctggcccaggattggaggcggtggcggacaggtgggcgtggattggctagggcagccggtccgtgcaaggcgggggcggggcctcggcggctggttgcgcgtgtccgacgctggctccgctctatccggctttgctaggggaggtgagtccggccgcggcggaaccggcggctgaggaggcggcggctgaggagaaggcggccgcggcggctgaggagaaagcggccgcggggacggaagccgggtgggggggagggggggagacggagcagccttgagccctgcggggccgttgcgcgggggacccacccgctctcccccccaaccctcctcagcagaagcagccggcggcgggggcaggagtcagcccgcttccgaccgtaccccgcccgcctcccggggctcctgttctttggccccgggaccctaaccttctcccggggcggttccctccgtctgggcgtccgagcgctgcccacatctttcattcctccctgcacctccttcccttcacttttgccccggctctctttctcctctctgtcctgctgtcgcctcctctcctcactccagcctccttccctggcttattctgcccaggaaagtttggaacccccgccccccctccccaatcaggtcaacctgactaggagtagggggagatgtaggaaggcctgagagttcggggggggggaagctggaagctggtttcccagaaaatttccccccatcttctccatttagggtggtgggaattttttttaatcctg

SEQ ID NO: 2265 - DNA, 1213 bp, Homo sapiens
tagcagacggtttcaatagacattctccaaagaagatatacaagtggacaagtatatgaaaagttgctcaacaccactaatcactaaggaaatgcaagtctaaaccacaacgaaatatcttctctgcaacattccaattttaatatgtgggctgccgaagcaagcacaaaaccacaatgaaacaccacacacccactaggatggctgctgttttaaaaaagacaaaacactcttcctaagccggcgctcggcaagttctcccaggagaaagccatgttcagttcgagcgccaagattgtgaagcccaatggcgagaagccggacgagttcgagtccggcatctcccaggctcttctggagctggagatgaactcggacctcaaggctcagctcagggagctgaatattacggcagctaaggaaattgaagttggtggtggtcagaaagctatcataatctttgttcccgttcctcaactgaaatctttccagaaaatccaagtccggctagtacgcgaattggagaaaaagttcagtgggaagcatgtcgtctttatcgctcagaggagaattctgcctaagccaactcgaaaaagccgtacaaaaaataagcaaaagcgtcccaggagccgtactctgacagctgtgcacgatgccatcctcgaggacttggtcttcccaagcgaaattgtggtcaagagaatccgcgtcaaactagatggcagccggctcataaaggctcatttggacaaagcacagcagaacaatgtggaacacaaggttgaaactttttctggtgtctataagaagctcacgggcaaggatgttaattttgaattcccagagtttcaattgtaaacaaaaatgactaaataaaaagtatatattcacagtaaaaaaaaaaaataatgagtattgttgaggctgtgaggaaatcggaacccttgtgcgctgttggtggaaatgtaagatggtgcagctgctgtggcaaactgcatggcatttccttaaaaaaaaaaaaacgaaacatagagctaccagatgatccagcaatactgcttcttggtatatatccaaaagaattgaaaggaaggtctcaaagagatatttgtacacccacgttcataacagggttattcacaatagccaaaaggtgaaagcaacccaaatgtctattgacagatgaacggataaacaaaatgtggtatataca

SEQ ID NO: 2266 - DNA, 1370 bp, Homo sapiens
gggtcactttcaagctaccatctgcccacgatatggatctatattctcagcctgtttataatgtaggctggttcacttggaaggacccaaaatggcttagcagcttttctttccctactattgggtctctatatgagcaacaaagattagccaagttcttacctaagcagaggtagtaagaattcttttcttttttgagtgcactatcttgcacctgtaattgtatgtcgggaactgaattgactgccttagacaactacttttgtttcctttggcaggaaggcagcaacaactcatctccagtggattttgtaaataacaagaggacagacttatcttcagaacatttcagtcattcctcaaagtggctagaaacttgtcagcatgaatcagatgagcagcctctagatccaattccccaaattagctctactcctaaaacgtctgaggaagcagtagacccactgggcaattatatggttaaaaccatcgtccttgtaccatctccactggggcagcaacaagacatgatatttgaggcccgtttagataccatggcagagacaaacagcatatctttaaatggacctttgagaacagacgatctggtgagagaggaggtggcaccctgcatgggagacaggttttcagaagttgctgctgtatctgagaaacctatctttcaggaatctccgtcccatctcttagaggagtctccaccaaatccctgttctgaacaactacattgctccaaggaaagcctgagcagtagaactgaggctgtgcgtgaggacttagtaccttctgaaagtaacgccttcttgccttcctctgttctctggctttccccttcaactgccttggcagcagatttccgtgtcaatcatgtggacccagaggaggaaattgtagagcatggagctatggaggaaagagaaatgaggtttcccacacatcctaaggagtctgaaacagaagatcaagcacttgtctcaagtgtggaagatattctgtccacatgcctgacaccaaatctagtagaaatggaatcccaagaagctccaggcccagcagtagaagatgttggtaggattcttggctctgatacagagtcttggatgtccccactggcctggctggaaaaaggtgtaaatacctccgtcatgctggaaaatctccgccaaagcttatcccttccctcgatgcttcgggatgctgcaattggcactacccctttctctacttgctcggtggggacttggtttactccttcagcaccacaggaaaagagtacaaacacatcccagacaggcctggttggcaccaagcacagtacttctgagacagagcagctcctgtgtgggtaagcg

SEQ ID NO: 2267 - DNA, 1098 bp, Homo sapiens
gtgtggacctcttgaccaagccctcagctgaccccagcccacctttgccctggtgggacaagagccgtcttctgttccatggagactggcacatggacattgaacaggcgaacctgcaccagctggccactgaggtgaggggtgtcatgatacttttatcctatcaggatggtatggttgaggtctgtatagcacatgtgggaagagagacaggtgctgatttgggagatgaggatggttttcttacctatatctcaccaaattctcgggggtggtcataggatccatacaacacaactgaaaatatgcactgggagtggagccacctgtcttttcattggaaacctggtcagtttgtgttcaagggtgacttggatatcaacgtgagaacagcctctaagtgagtggagtgaagggagggtcctccatgggatgaggggctcaggttggagggagggggaagagccaaggggaagtgagtgaccagggcactgagggctggggttccattgtgaggcaggtatgacgactgctgcttccttcacctgcctgacctctgcatgacactggacctgcagtggctgtgccatgggaacccccatgatcaccatagtgtcactctgcgggccccagagttcctgcctgaggtgcccttgggccagcttcatgactcctaccgggcctttcgctcggagaacctcaatctctccatcaagatggatctgactcggcacagtggaagtgaggcttgggcctggggcagtggggaggaagggcttgggaggacgggcatggatgctggggactttagcttgaccctctggggaggggaggggaggggagaagggcaagggagaatctaggttaggacctttttttttgttttttggcaggggaaagggttggtgtcttagtcctttttggctgctataacagtaataccacaagtttggtagcttataaacaacaagcgtttatctctcacagttctggaggcttgaaagtcgaagatcaaaaagagctgatagattcagtgtcagtgagggcccattcctcatagatggtgcctttttgctgtgtcctaatatggtggaagga

SEQ ID NO: 2268 - DNA, 1191 bp, Homo sapiens
tcacaagatggcgccgaaagcgaagaaggaaggtgtgtgttggtgatggggccgcagctggtttaccggggattgccgcgccgcagagcgaacgaattgggaacacggctgctgggctaagccctgagggctctgctccggggctgctccctgcgtttcggacacgctgcagtatacgtgggccgcgtgggcccagcctcgtgggctgagttccggtagagggagttgggggggggcaacgcggcaggcatcatccgccagggagggccagacattcggttctgggaagctacatgcatccactggttggagctccatgtccccgggcctgtaaggaattagtgccctcagctttaaccattttccttctggttcatgttcaaccgggctacattacccgcccctctctccgcagcgtggttttgcgatggggtatgtgtaaaattcgtaggacattttctggaaagtatcaagcgttcattcagtgctactttgtttcatagtcgtatccctggagttacttagagttggtcgctttcgcctctggtatcgtgcatatgatggaaaagttttaatctcctgacacttgtgatgtcttcaaaggaaccactgatgcacctgtggccagggtggcccactgcagttcttggggccggaagtgaccgatttctaaatcccgcacccacgttttctttccttttctcccagctcctgcccctcctaaagctgaagccaaagcgaaggctttaaaggccaagaaggcagtgttgaaaggtgtccacagccacaaaaagaagaagatccgcacgtcacccaccttccggcggccgaagacactgcgactccggagacagcccaaatatcctcggaagagcgctcccaggagaaacaagtcagtactgccccctgtacccatgaaaagatttgggtattctccattggtaatttggaaattcactcactctgcgtgatggtttctcaaacgcaaattgtgtccagtgtgcttctctaattggaagtatgaggagattgtttctgctgcatttacaaaactggcaggatcagcccagaggccgggcgcggtggctcacgtctgtaatcccagcactttgggaggccgagggggggcggatcacttgaggtcaggggttcgagaccagcctgagtgacatggagaaaccccgcgtctat

SEQ ID NO: 2269 - DNA, 1191 bp, Homo sapiens; identical to SEQ ID NO: 2268

SEQ ID NO: 2270 - DNA, 2198 bp, Homo sapiens
gtggctaacacggtgaaaccccgtctctactaaaaatacaaaaaaaattagccgggcgtggtggcaggcgccgctagtcccactactgagtcccaggctgaagcaggagaatggtgtgaacccaggaggcggagcttgcagcgagccgagatcctgtcactgcactccagcctgggcgaagcgagactctgtctcaaaaaaaaaaaaaaaaaaggaatttgcccctggcccgattctcctgcctcagcctcttgagtagctcggactacaggcgtgcaccaccatgaccagctaatttttgtatttttagttgagagggagtttcaccatgttggccaggatggtcacgatctcttgacctcgtgatcagcctgcctcagcctcccaaagtgctgggaatacagccatgagccagcacacctggcccagagatgattctttaatcacttgaggttgtaagagcccttcaagagaaagaaaatgcacaacgttctgcccctgggattggggcttcaggcccttagatttcagggtgcagatgatgacactgtaaagcgaccaaagtctgaacaaagtgattggtacctcgttgtctgatgcacctaggctctcctggctctgggctccaaaagaatgggcccaggccaggtgaccccattttgcctctcccaggcttgaccactatgctatcatcaagtttccgctgaccactgagtctgccatgaagaagatagaagacaacaacacacttgtgttcattgtggatgttaaagccaacaagcaccagattaaacaggctgtgaagaagctgtatgacattgatgtggccaaggtcaacaccctgattcggtgagttgggcctcaagggatggggagcaggctggaccagcagtctggagccaaaaaaacctgcattccatgaagctttttgatgtttaggtagtcctggtaatgcaggactacacgtgtagtccgagctatgcaggaggatctcttgaggccaggaatcacccatgattgccccattgtactccagcctgagcaaccaagcaaggccctttttaaaaaaaaaaaaaaaaaaaatcccctggacctttcagcaggggaaaaaggttccttgacttaaacttggtgtaggtttagcagtgtgtgtgagccttgaggcaggaattacaggctgctttagttacagacctttgtgtggacctgaggctttctaggacttgattgggggttggtcctcattttctgggtccctacttctattgggaaaggcaactagagtgcgacacgtggcagattaccttggtttaagtcttaatgtggcctgtggtgtttcccataagagaattggctttgtggcttcatggtgtcctctgggctaatgatggaaaaatcattattggaaaagaatgacatgaacaaaggaaccactgaagtgccggaggactggaggaggaagggggagggtgtgggggcagtgagggtggcagggactaaggcttccttctctaccctaggcctgatggagagaagaaggcatatgttcgactggctcctgattacgatgctttggatgttgccaacaaagtaagtttccttcctacaaaccccttaatgctcaccccttgggtgcaaatgatgcatatgttagcgaccaaagcctgatctttgctgattagtcataattaactgactgcacccctatccttgacaaaccttatcctcacattcctcattttgctttctaaaaataacattccagcttaatcttcatatttcaactccagtaacgaggctcccttttgtttttcagattgggatcatctaaactgagtccagctgcctaattctgaatatatatatatatatatcttttcaccatatacatgcctgtctgtcaatttctggttgggctgggaggccacacacacacactgacatgacagggcttgggcaagactcctgttctacttatccttttgaaatacctcaccctgccactccaccatgtatgatcattccagagatctttgtgactagagttagtgtcctaggaaaaccagaactcagaacttgcctccatggttgagtaacaagctgtacaagaaccccttttatccctggaagaggctgtgtatgaaaccaatgcccagggtttgaagggtgttagcatccatttcaggggagtgtggatt

SEQ ID NO: 2271 - DNA, 2198 bp, Homo sapiens; identical to SEQ ID NO: 2270

SEQ ID NO: 2272 - DNA, 2198 bp, Homo sapiens; identical to SEQ ID NO: 2270

SEQ ID NO: 2273 - DNA, 2198 bp, Homo sapiens; identical to SEQ ID NO: 2270

SEQ ID NO: 2274 - DNA, 1211 bp, Homo sapiens
gagctgcaggagcttcggcgagagctggaggagctatcagtgggcagtgatggcgtgctcatctggaagattggcagctatggacggcggctacaggaggccaaggccaagcccaaccttgagtgcttcagcccagccttctacacacataagtatggttacaagctgcaggtgtctgcattcctcaatggcaatggcagtggtgagggcacacacctctcactgtacattcgtgtgctgcctggtgcctttgacaatctccttgagtggccctttgcccgccgtgtcaccttctccctgctggatcagagcgaccctgggctggctaaaccacagcacgtcactgagaccttccaccccgacccaaactggaagaatttccagaagccaggcacgtggcggggctccctggatgagagttctctgggctttggttatcccaagttcatctcccaccaggacattcgaaagcgaaactatgtgcgggatgatgcagtcttcatccgtgctgctgttgaactgccccggaagatcctcagctgagtgcaggtggggttcgaggggaaaggacgatggggcatgacctcagtcaggcactggctgaacttggagagggggccggacccccgtcagctgcttctgctgcctaggttctgttaccccatcctccctcccccagccaccaccctcaggtgcctccaattggtgcttcagccctggcccctgtggggaacaggtcttggggtcatgaagggctggaaacaagtgaccccagggcctgtctcccttcttgggtagggcagacatgccttggtgccggtcacactctacacggactgaggtgcctgctcaggtgctatgtcccaagagccataagggggtgggaattggggagggagaaagggtagttcaaagagtctgtcttgagatctgattttttccccctttacctagctgtgccccctctggttatttatttccttagtgccaggagggcacagcaggggagccctgatttttaataaatccggaattgtatttattaatttgcttccagcctgacttacctgggttggttaggtccctgggaggctcaaccaaactgaaggcaaagaaaggaccagtcagagaagggccgctgcctgggtctggccccaggatccagcttacctgctggctcgccctctgatggacgccgggaaaactgcatc

SEQ ID NO: 2275 - DNA, 1266 bp, Homo sapiens
cctcccccagggtttgactcttggaagctgaatcttttgaggaagttgtttgctatgagtctgaatcctgaaagtagaggacttgatggagtctgtaatctgtttaccactcagatgaggatgtagaatttattgttggtgagttactgaactcttcctaaagaatggttgcttaggcaaattttctctcaatcagtttaacccttagtagtttacagtctgttctcagtgaaggccagagctgtctttctaatgatactgtcctttaagaatccttgttggatatgcatgtgtgttgttcagtggctcaaaataaaggactggaatgatgtatggttctctcttcatccaggacaatttagcttttggtaacctgggctggcattgttattaatttctctcctagatcaaatggttggtggggttgctttccaacgttaagacaccactgtgtttgattattttggttttgtaactaatagggcaatgagtaatgcattcattttggaaacaggccagtggtaacacagctcttgggcctgctggacgtgtggaaaaataggacagagtaaacaattgagggcataaataatgaatcttccaactgagccctgggagagtgagggagattatcctcagagctgttcagtctggcagtaaaagggaaagagtccactgaattaattacccagactgtatttgatactgcaggaggtatgagattgtcaaaaccattcaaaacaaagttacctttccgatacaaacttttaatccatctttttgtttgttttaaaccagacatttgaattgttcatttattttttagagtccaggcctttgtatcttctttaaactttgttctatatgttagcattctgtgaacacttgatggtccttttgtttagtcagatcttagaagtttacttcattagagatttcatgatctgtaaatacataaaacgtctcacaaaaggttaagacaagagtttgggccagatgtggtgactcatgcttgtaatcccaacacttcaggaggctgaggcggacggatcacttgaggccaggagttcaagaccagcctgaccaacatggtgaaacctcatctctactaaaaatatgaaaattagctgggcatggtggcacaggcctgtaattccagctactcaggaggctgaggcaggagaattgcttgaacccaggaagtgggggttgcagtgagctgagatcgttggactgcactccagcctgggtgacagagtgagactc

SEQ ID NO: 2276 - DNA, 1174 bp, Homo sapiens
caggctgctttggggttggagtgagttaaggaagggagggagagatgctggaccgggctgagaacagagtcagcgccaaccaggctgtcctcccactcttacctcctagattgctgccaaaatcgctgccccacttaccaaggtcgatgagattgtggtcctcagtggagacaacagtaaggtcacatcagaagtgaaccgactgctggccgagctgcctgcctctgtgcatgccctcacaggcgtggacctgtctaaggtatgtgcctgcctagctgcggtggggttgcccaggtagcccgtcggactggcccaggcaaagtggtcctgggctctggagccaaggtctcatggcatctcccatccttgcagatacccctgatcaagaaggccactggtgtgcaggtgtgaggctcctgcaggcccactctcttcagcagccacccggccctccctccagcacccgttttaatcccacagaacaacgggaacgttactgactctggtgccttatctcgaagggaccagaagtgctgcgtgttcaggccatctctggctgtcttcctgtctctcctgtctgtccacctcctcctcttcctctcctttaccccactttcactgccactttcatcaggtttgtgtctcatctccctgcgtgtcttttcctttgtctgtctttttctttcccccatgcacatcatgtagattaagctgaagatgtttattacaatcactctctgtggggggtggccctgctgctcctcagaatcctggtgccttgaagttctctgtgcatctgtccatcctccctatggccctggccagagctcagcatgggcaggggttctgggtaggacggtcactgtcctctctcctggactggtcttcccagccctaaaccctgccccaggaagcccacagcctcacctgctgctgcccctctaggtctgggcagccatgacctgcagggcccagagacactgtccttcccctcatccacccaaggccccagccagcgctcataccctgtcctttctccctgaccccaagggcacagaggcaaggcctcctgtctacagcagcttcctcagtttcctactgccttaggaggcccctgcttgtgctcagggaaggcctcttcatgggcatgttcctgctggggcggtgcggtttg

SEQ ID NO: 2277 - DNA, 1183 bp, Homo sapiens
actttatagatgttgtatgtcatacaatgagttaatgttaatgatatatattttgtatagttattcctaacttaccatgctttttggtgattctctgatgcaacagttttgtcagctttagttcagttagagttgtgtcaactttaacagaccagtgttccaagtgaccaggtagatgagtctgtgatatgtgaaggccttttacagttttgattagtggtctaccaggactttgtagcacccatctctttgtttcatggtacttttcatgatgggcccacctgttcatttgcacagaaacgagagcagaaaaaggagctgggtcatgtcaatggactggtggacaaatctggcaaacggactacatcccccagcagtgacactgacttgttggacagatcggccagcaaaactgaactaaaggccattgcccatgcccggatcctggaaaggagagccagcaggcctggcacacccacatccagcgccagcacagagactcccacctctgagcagaatgatgtcgacgaagacatcattgacgtggatgaggaaccagtagcagcggagccagactatgtgcagccccagctgaggcggccctttgagctgctgattgctgccgccatggagcggaaccccacccaatttcagttgcccaatgaactgacttgtaccactgcactaccaggtcagccaaaccatcatcatatcccttcccaaccccagtttccccaaaggaccagcacaagagcagtgctgcctgtggagtcactgttcatgtagctactgtcttgggttcctgttcctagttctgcttggagagatctttgaaggtcttagccattacagagcttactcagttttccattttctcagtttctgaacttctttccttcccctcccccagaattatctttttccttttttttttttttttttttttgtgagtctcactttgtcactcaggctagagtgcagtggcacgatctcggctcattgcaacctccgcctcccaggttcaggcgattctcgtgcttcagccttccaagtagctgggactacaggcgcatgctaccatgcctggctaatttttgtattttcagtagagacaggattttaccatgttgttcaggctggtcttgaactcctgacctcaggtgatctgcccacctcggcctcc

SEQ ID NO: 2278 - DNA, 1198 bp, Homo sapiens
ctgcccggccctggtccactccccacctgcaaggcagatttgtctctggaggacctgttccccacaccctgagaatccccgcgccccctctaggagtctggtccccaacttcgtcggtcttgggtagagggaagcttggccatggtgtgagcggcaagggagtgttggggagaggataggggttccgtgcctcggggaagagtcttgtctggacctgccgtcctggctcaaacaagctctcatggaagctactggcacccacgtccttctcccgctgcagtaggctggtagggtcggcagaaccgcacttggagttgagacctgccatcccttgccatatggtttgaagggcctgatgtgaagtgtgagggtgggagtttctaacctccctgctcgatctttccaggccgctgccgaggtcaaggcagcgcggccagggacaggctgggcccccggacggcagttttcttcatccaggaagaaaaactgtggccccggagacgcagaagcctttttctgagcctctagctccacttgcacacagcccagtgtcctcaccccgctaccgggctgcccatgctggatcctccggcagcgcccagaacttgaaaccgtgtgctcacgttctggggagaggggaagagtcctgcaagacccaccccagggatgaagaccgggaaggagaagtgtgaatccctgcctagctgcctggggatgtccctaggaattccgaacctatcttgggtcctgatgggtcctggcgctggacagctcccctggggcgcagggcctgtgtctgtcccctggcagttagtcaaggccttgtgtgtgagtttgtgggtctgaatgtgagagtaatcagggccctgcatgactagaggagccagtcccagtgtgtctgcacttcaagtggtccgaatcttgggtgaggggtcagcagtgaatgggtgtgaggactgtgtgaggccactagtgtgtgggtgcagcctcagccagagagctccctgcagggctagagtgagactgtgggaatccaggaggaaggctggtgtggccaggagtcccaccagccctgatggggatgtgggtgtgagtgttaggaggaatctgctcactctgtggcctcaagtctgtgtgtccctgggcagtgtcccttcctgactatcaggatctccagtgcccatggaggcacctgcca

SEQ ID NO: 2279 - DNA, 1134 bp, Homo sapiens
gcataaatagctgctttaggtttgccagaggcacatagcttaacattagttcttaatatcgatgttatttttactaatgtaattaatcaacagagcaccaagattctttcatggtgaaaagggtgggcttctgttttggtatcttaaaatgtttcttttaaaatatacatcacctgtgtgagaaccaggaccacctgggagagtgatgaatcattggctccactcaaaagcattgctttactgagttttaaatttcacactgttttgccgctcaagaaaggtcttaaagtagttaaaggatgccagcaatagtgcgaatagaattttcggttgtctgcataataaaaacacccattgcagcatgattggtatgttgctcttgcattattgggaatggtaaatcagttatgggctagaaactatggaatggccgtcctcatatgtgatgggattgctgattcagacttccctattttccatacaattttgttatgtgcagagttctaaagccattttataatactgcagtatcccccccccccccacctttttttttttgagacggactgtctgttgcccaggctggagtacagtggcgcaatcttggctcactgcaacctccacctccctggttcaagcaattcccctgcctcagcctcccatgtagctgggattacgggcgcacaccaccacacctggctaatttgtattcttagtagagacggggtttcaccatgttgaccagactggtctcgaactcctgacctcaggcaatctgcccgcctcagcctcccaaagtgctggaattacaggtgtgagccaccgtgcccggccaagtatctcttttctacagccttattaaactaactacaaacatttattttccaatttagttttactttcagtgcatatcaaagttgttgtactcttcagaccaacaaattaacttgagggcaaattacatagctttccatgtacccttttttcctcaggtgctaatcaaaggctctgaaaatggatactgctttagtgatgtctgctttattcttaaaatgcttatttcttttgctagatgtaaagatttggtgttaacaaaagtggttttaatatgtaaatatgaatgaatgcctttag

SEQ ID NO: 2280 - DNA, 1405 bp, Homo sapiens
ggggataggggagggcattgaagttctacaattctggaatagttagttgatggtacatagttaacttggcttcggttacatattggactttaacaactgaagaatctatgcgtgtcatttaaagaaaagttgcagaacaagcaattggcttagatatacaatctggaaaaatattcctgtgcccatattttaatgtaattgtataactgggagcaaaaatatattctgcttttcaactgtaggtgctccagacttgctctccgtcactaacactaaatgtgctgttttccttgtttttcatcaaacatttaagacaaacttagacctttctgtaaattatcttttaatttctcagcaaaatctaaaaggggaagaaaaaagtccatgaaaactaaaacttttcatgtttttagccagtgagaagataataaaccctgactgtagaaggtgtgttttcatgcaaactatacttctgagcttgttagcttctaattatatcttaataaatatattttattactagagcaagatgggtttttaaggaaaataatgtgaaattctggaaattttctttggggcagagaagagcattagccctgtcttatcattacattgccatcctgttgcactgcagcttgtgtatagcatgctaaaataaatttttgtgtgtgtgtgcagaaattaagggtccaattgagattgggtgatgttagtaacataataacaagttgtctggcctgacacagcatcacatcacacacacagaaattagtatatccatgtatgtcaaatacaggttaaaatatcagggcatttatataaagagttgtagtcttctgataaaagtagactggatcccctggggtatttggggagaaagtaactactttggctctacccctagaaatgtccagttttgagtgactgtagtatggatgggttttcttgttttgttgattatttgaggcttttaaaacaagtagttcatgaaagaagctgttggactcaacatagagtagagtaactatctttttagtctggatttctgccctgcttagattttaaaagtataagcatggattgccaattccacttgatgtaaacaaaacttttttttatacataatatatatatatatatataaaataacttattgtatcagtccaggttcagaaacttgtggtaggccagttccagatagtttcatttcacctgtaaactgtatcactttgactgatattgtaattttcaaatgtataatatgtttacagatgtgccctgcatttagtctgccttgttcctattttgatttttgttgagtctcctgcctgcttgccaaaagctaggatgcttcaggcccatgtacaattgaaagcagaggcatccttgagctttaaagcattga

SEQ ID NO: 2281 - DNA, 1211 bp, Homo sapiens
tgcaaatgctgtttgattcattttccctttctgatcctaaccttgtttgagtttcagggaaacttttaaattttgatcaagtaaatgaagttgctagtagtcaaagaagtaattaatattaagtaacaggaagggaaattgcattcacttcttagttcagcatttctgataatgctgatttctttctttacttttctttttttttttttgagacggagtcttgctctttcgcccaggctggggtgcagtggcacgatctcggctcactgcaacctccgtctacggggttcaagtgattctcctgccttagcctgctcagtagctgggattacaggcgtgcaccaccatgcgttactaatttttgtatttttagtagagacggggtttcaccatgttggccaggctggtatcgaactccttacctcgtgatccacctgcctcggcctcccaaagtgctgagattacagatgtgagcccctccgcaccaggaatatgctgatttatttctttgctagaagcttggcttgcttcatagctagttttataggtacatcatacatccctatttccccctcagaagtcatgatcaaactcactactctagagctcacatttaagggtaataacattttatcataaatcatttttaaatgtatagtatttgagtaaaaccttaagctgcagtaaagaagtatcttcaacttgggtgtttgcaaatagttgttttgccttctttattctaaaatatgtatgtttgctttgtttttaaagtagtgttgttactgtgactctgaagtgtattctcaaaaaaaggggaaagtgcagggataggttgagtttccagtggggaagaaaaaaggaaatgttacttataggtggttaacatgaaaagttggattaactttttcttttctttcttttttcttatttattttttaataatagacacagggtctccctatgtttcccaggctggtccctcaagtgatcctcctgctttggcctcccaaagtactgggattacaggcgtgagccactatacctggccaattttttttttcagcgtatgactaaatatagatttatctttgcagtagacaaaatgaatatcaagttattactatatacataattcttcaggaatttatttgctacaaaatatgaaatttctgtgctttaaaataaaaaatattggttgtattggatcaatt

SEQ ID NO: 2282 - DNA, 1174 bp, Homo sapiens
acagggacttgaaactttcaagcctgactatagtgaacaaaagggaaatcgagtagatggttcgaagcccatttggaagtatgaaactgggcctggaggaacaagtcgaggaaaacctgctgtgggtgatatgcttcggaaaagctcagatagtaaacctggtgtgagcagcaaaaagtttgatgatcggcccaaaggaaagcatgcttcagctgttgcctccaaagaggactcgtggaccctatttaaaccacccccagtttttccagtggacaatagcagtgctaaaatagttcctaaaataagttatgcaagcaaagttaaggaaaacctcaacaaaactatacagaactcttctgtgtcaccaacttcatcttcatcatcttcatcatctaccggggaaactcagacccaatcatcaagtcgcttatcccaggtccctatgtcagcgctgaaatctgttacttctgccaacttttctaatgggcctgttttagcagggactgatggaaatgtttatcctccagggggtcagccactgctaactactgctgctaatactctaacacccatctcttctgggacagattcagttctccaggacatgagtctaacttcagcagctgttgaacaaattaagactagcctttttatctatccttcaaatatgcaaactatgctgttgagcacagcacaagtggatctgccctctcagacagatcagcaaaacctgggggatatcttccagaatcagtggggtttatcatttataaatgagcccagtgctggccctgagactgttactgggaagtcatcagagcataaagtgatggaggtgacatttcaaggagaatatcctgctactttggtttcacagggtgctgaaataattccctcaggaactgagcatcctgtgtttcccaaggcttacgagctggagaaacggactagtcctcaagttctgggtagcattctaaaatctgggactactagtgagagtggagccttatccttggaacccagtcatataggtgacctgcagaaagcagacaccagtagtcaaggtgctttagtgtttctctcaaaggactacgagatagaaagtcaaaatcctctggcctctcctacgaacactttgttaggctctgccaaagaacagagataccagagaggc

SEQ ID NO: 2283 - DNA, 1179 bp, Homo sapiens
cggcagcggcgaaggggaaggaaagaggatttgagctgggggcggggcttgcggcacagcgtggctcctgattgttggagtgcggctgccaatctcgcagaatcgctcggttaaccagtgcgctggcgagacgcgctcagatatactgagtgagccctgagaagcagtctcagatcctgacggtgcagcagcccgcagcctcagccagggagtcccagccgctttcaatggaggagaagcccggccagccacagcctcagcaccatcacagccaccaccatccgcaccatcaccctcagcagcagcagcagcagccgcaccaccaccaccattattatttctacaaccacagccacaaccaccaccaccaccatcatcaccagcagcctcaccaatacctgcagcatggagccgagggcagccccaaggcccagccaaagccgctgaaacatgagcagaaacacaccctccagcagcaccaggaaacgccgaagaagaaaacaggtctgggagggaggacgggtgggggaagggggttgggggtggaggacaggagagatgggggtggggctggatccgaaaagcgcggacggggtcggggtgtgtgtgtgtgtgtcccctccggctctggggatgcccctttcattctagagctcgggctgagcaatggggtttgcagcgccctctccttccctccagcatgggagaggcccagccaggccagcgtgaccttcctggccccggccccggctgaagggagacctgctgggtcggccttgcaagtccaacctcattattcttttcccattcacctccctgcgtccctggagttacctcaatttgggggccctgagatggggtaaacctacccccccaaaaaatccctcgaggtgtaactcaggaaggcctagcgaatcccgactcggatggtgtcgcgagacccttttgcaggcggcgaggagtgggtaggtagggtgagttgaggaagtgcccctcacccgccaccccaagcccacctgtggccttggggctccccgtctcggtggggggggctgttgggacccctcatctcacgggtcatttccaccactaaacgccctttttgggcgccggaccccgcagtcttgtcccgcggctcctcccgaggccggcgccccgcgcccgctccccccagagccg

SEQ ID NO: 2284 - DNA, 1218 bp, Homo sapiens
agtttatatataacttaccaagatgttggctgtcctggtgtattgccagacagctctcttttggttcccattccaaatgtgctgctgtccttctttgcatttcacaatatcaaagaaaccaccacccttcttcctaacagcattttatgccttttattccacattaaatgggaattgtgcctacttaggagtgcccctccaattaattacatgtgtccaagaataatccaagctagagacacaaggtgggaaaacatttcaaaaaaaaaaagtcctcttaaggccagtaatttatctgaaaaggtattttatcacaccttgacaccttatatatgagcctattaggagctgcaggtggtttcatagggtaaaatccaagaaaagagaaggatgtgtggggtttctattagaagataattttgttctcattttaccttttcttttatgatccttctctgctagaacaggttaattctccaaatttgttttgttttgttttgttattttttagggaactcttttgcaaaagcaatggtcggatgtaaataacatttaaagtatagtgcacataacttccccggactgttccaatctgataatttgtaaatgctttagagtttttttaattaacacttgtgttgctaaattctatttatgtaagtctgctaaagttttttagcccacttaaaacttaagacaaccatttaaaataatggatgggttactatgagcaatttcgctttcagaacccccttgttttagtatatgaaaaagcctaatgcgcattaatgaggttgaagagactatgagaaatatgtatagtgtatattttaaaacagctttgcttgtattgtgaagatttaaaaacaaacttgagatttttaacgtaactattaacacagttttaacataagttatcccactgggtttaagagcatcttgaatgtataatcctttttgtaacccaggttggtttctacttttaccagtcacccaaacatatttatgtttttagttttatgtactcatttccctttgttttcctcaaacagcatgatttttttgcacatgtagaaattttttaaaagaaagaaattagtacatcattttctctggattttcttcacttccctcttcctttctactaactccttccttaaaggccatatcactccatttgcattatttgtgcaaatgccagggttggtttttattttt

SEQ ID NO: 2285 - DNA, 1244 bp, Homo sapiens
ctgaacttatactaaatcaggggaccaaaaaacttgctcttatcttctcaaattgtattctatatccattaatgtatcagttatcccaaagccttcaggtggaggggtttaccaccttcctaggtcgttcaaccaggttttgtgaggaatgcattcaaagtggctttataaaagaagattttctttagcaagaataatgaggtcatgtcatttgttaataagtatctgtgataaatccgtggttcaaggttaagccattctggtattctggtattagcaactgtaaattctgccacctcatacatggaacagagcttgtgggatgctaatagttagtgaagtatacatgatttaatttctaataatctttatgttttctttaaggatggtggtgtattgctctttttcagctttatttttaagagtacagtcaggaaaccaacaaggggcctaagagtggctgcccctgcttgggacattacagcaagtgaaacaaagttaatgtgacaagctttgctttgttatcattggtcttcactagaggataccttttacatgtacttctctcttggatcaaatatgtctttaactgtacatctcagtggctggaggccatgccttttaagcatgtgtaaaatttttaaagaaatgaacatacacatagttattttagtaatatttcctgaaagaaaaaccaaattctgctataagtcttgatcttcaatgaacttttaaataatgcatttagctggaaaacaagactttcccagcttgtattacctagaagcgtgaatgtataggatacctgactactaagactatattctcagccctgccctgtcttttatttgcgggtctaatctaatattagaatatattaaccgcttaaggcattgaagccatatgggatggggaatgcatttcttcagtgtttctccgagagactttccatttccttggagttatggcggcaagtaagtatcatagtattaagaaatttgcctaaatctgagttgtgcctttctttactcacaaggcatgggctttgtcctggtgatcagtttgtaagccttcttccttcccagctccttaataaaagcaaagtgattgagtaggtaatgttcaaagtgtctgcctgtgtacatgtacttgtattgattatgtagttcagtaagatgtgcccaagtcatttcagaaagaaagacccttcagttttgatgcattttgctgaacacttgggtagt

SEQ ID NO: 2286 - DNA, 1216 bp, Homo sapiens
cgggctcaagcgatccactgggaccacaggcgtgctccactacgtgttgctagtagtagcagtagtagtagtagtaatagtaatagtagtagtatttttggtgagagagggtttcgccgtgttgcccaggctgggtctcgaactccagagctcaagggatccgcccgcctcggcctcccaaagtgctgggactgcaggcgtgagccaccgcgcccggccgattcccccctttatccctcaatttcctcatctgagcaatggagatacaggtagggctgaaggtcaggcaagaatgcgatgagctgtgagaagcacttggcaaggtgcgggttatcaaccttgccaggcctcagcacgtttcccaaggaggcccaaccagcggcgctgtgccgcagcacggaagaggcggggtgagccgcggggcgggcggcgctgggacccggacgccacccgcgcgaggcgccgccgtgcgcccgtcaatcaaggtcgtcgtggggcatggggcggcggggctgggcggtgcttccgcctgcgcgaggccgcgccgggccgcttggaggcgcccggtgcagtcgggaacccgcgctaggtttcgccggccgcgcggccagatgaggggggcgatggagctggagcctgagctgctgttgcaggaggcccgcgagaacgtggaggcagcgcagagctaccggcgggagctgggtcaccggcttgaggggctgcgtgaggcgcggaggcaggtcggagggccacacccacaggggcgctgtgggcccgggggtggcgcggatgccgggcgaaggctgggagggctttgaggggtgggactgtccgaaaactctggagtagggaagaggcattcatttgaaaggagacctaatggagtctgggaacggggaaggtgggagttggggaggtcgtaaggggaagttttgggggtggagggagggtgtgaggagcgttcactaaactgtggggcagcgatgggagtagcggtggcctccgaagtttgggagagtgagggaccagagcagaatccgagggggtcatgcgggtagtgatgagtcgggggaggaggagactggtaaaaaacctgcggtgggtaggcggggaggcattgattttagagagcctgaggaagaggtgggacagtgacctgggagagctgaaagtggagacaaaatggatattggaaggggaggactaaggggcgaga

SEQ ID NO: 2287 - DNA, 1219 bp, Homo sapiens
gtccccgcccccggccgcgccgcccttcttggcttgcgccctggtccccaccaaccccgcccgagcccccacggaccctgcccggcccgacggaaatgacccggccagggtcacacacggcccctgcccgctccgctgcggccatctccgcttccgcttccgcttccgccgaggcttctttccgactcaggcacggctctgtgccgtagctttcgaccccaccgccaggccgctgcccgctctaggcgtgggctgggtctcggggcatcgctcgcggcgggcgcggggcgagagaggagggaggagggccgggcttctcaagacgccggttcgggtcccgcaggcggcgggcgcgggacctgcccctgaccgggcgggagcggtgctcgcagagtcaagcccgggcttgcgggtggggcttgcgggggcgggaccgggggcggggccgaggccgcagctcccagccggtaccacctcccctccactgagagattccaccggtccctgggctgtcaggcgcggtggccaagtggtaaggcgtcggtctcgtaaaccgaagatcgcgggttcgaaccccgtccgtgcctgagacccgaggtagggctttggctgtggggaagtcgggttttctccacgtacgccgtcccttctacgtggcattttttccattttcggattctgctcagtcgccctccagttcgtctcctgccccgggctccgcggtcggcgggggccggtgcacctgggcttcgagactccagggtccaccttacaggtgagctcggcccccgccgcgccgcgtgcgccctcgccgccggtccccgcgtctcctttcccccagccgcatttcgcagagccggagtcgtcttcactgcttcgccaatggggacactaaggtccaggtggcccgcggggactcgggtcccgcccgatttgcgagtgttatggcggggcaactttccagagagggtgcctgagtttcccgaacggtggtttctggattgttctttggaaggtgaattatgcaggccatgcgcactgcctgtcttcctgtctacaaagcaaaccagattgttcaactggtgggtgcttcttttccagtcctggtgaactgatcctttgaatctgcccccagccagttatgacactccccacatcatctctaggataaacagtctgatttaacatattaataacatgacattgagcgcctcctccc

SEQ ID NO: 2288 - DNA, 1322 bp, Homo sapiens
ctcttttatattgaaaaaatccaaattttgcatttgactccataatgtatcactgttttaaagtcaaaactgttactctctccaaaaatctctgctatgaattgagcagctgcagatagaagtgctgtgttatccagtttgcttcttcactgctaagaacccttgtctgagaagcatagcttctcagctgttccgaatgaacgcatttacaattcttcaggaaaggagaactgtgtgtgtttttaaacaaaataagtgcaaggatctgtcccctagacatacctttttggctgtccgtttttaccttccttccttccctccttccttcccttaatctgtcttttaaaactgcctgcagatgctgacgacatccaggagagcatttctcaagagcttaaaccttgggtgtgctgtgccccacaaggagacatgatctatgaccccagctggcaccatccgcctccactgataccctattattccaagatggtctttgaaacaggacagtttgacgatgctgaagattgagtgtggagctttctgccttgtaggtgggcgggcctccacgtcaagatctcttttcctgtcttggaggtgaaaagtcatatctgagaaaatgtttgcagtgacccctagtctggggtacacagaccagtgttccttattgacagtgttcaataaggccccgtcattctcgccagtctgttgttgttcttaatgggctcctccttgaaatgtgtgtgtgtttgtgtcaagaggagttgtgttctttgtaaataaaggttaaaaagagaaaccagtatgcttcgtctgcttttttcccatttatttatttatggagacagtctcactgtgtcacgcaggctggagtgcagcagcgcgaacttggctcgttggaacctccacctcctgggtttaagcgatttttgtgcctcagcctcctgagtagctgggactataggtgctcgccaccacacccggctaattttttgtatttttagtagagatggggtttcaccacgttggccaggctgttctcaaattcctggcctcaagtaatccacccgccttggcctcccaaagtgctgggattacaggtgtgagccaccgtgcccagccttcactacttcatttaaagtccctgaatgacattttaaagattcaaacgcttggaggcttaaaactactctgtgaaagaaaaaaaattttagttttgcttctgtagatctagcactgttgaccaaggattggaatccaggagacactggtgattttgtagctgattgttttcctgttgatagaaaatggaacatttacttagt

SEQ ID NO: 2289 - DNA, 1099 bp, Homo sapiens
aacaagagcaaaacttcgtctcaaataataataatagtaataaaaaaattacaaagagggaatttttaatcttagtaaaactgaaaaaatttttaaggcaggtgtatgcatatgtaaccagtgttaacggcttttctgctttgtgaatatacatgagttagaatacacagttttgacatgtaggattttatatgcatattcctatctgaatgtgccctaactagcacttcatttctttttcctcctttttaactgtaacttttcacacccagaaagacagtttgtgtttgaattaatatgtaataggtttgatttacattatgtaccaaaagaaaataactagtgggggtgtgcctctaatactattgttttatggttagttttataaaagggtgatgttgcagattatcacagatctcaactcctagtcgtgaggttagatggtatacatgtagaggccataaatcaacatttatttcttttcattaggccaaaacgaacaaaagcaagcatgtctgaatttcttgaatctgaagatggggaagtagaacagcaaagaacatatagtagtggccacaatcgtctgtatttccatagtgatacctgcttacctctccgtccacaagaaatggaagtagatagtgaagatgaaaaggatcctgaatggctaagagaaaaaaccattacagtaattattattatctttattggcaattatcttggaatattattttgttttgaaaattgcttactatgaactagacttttattgtaaaggaactttttttaaaaaaaaaaaaaggaatccggaaatgtacaggttttaaaattatgtcactttaaaagttaaccaagttaggctggtggcggtcgctcacacctgtaatcctagcactttgcgaggcaggcgcattgcctgagttcaggagttcaagaccagtctggacagcatggtgaaacccggtctctactaaaaatacaaaaaattagccaggcatggtggcatgcacttgtagtcccagctattcagttggctgaggcaggagagtcgcttaaccccaggagatggaggttgcagtgagccaagattgcaccactg

SEQ ID NO: 2290 - DNA, 1202 bp, Homo sapiens
ggaatatggattttcttcaagtaaatttgtattgtgtgttttcatttctatatttataggtaatcgtaatttaggctttccctttttaaatgacggcaggtgtgctggctcacacctgtaatcccaacactttggtagggcgagttgggctgatcacctgaggtcaggagtttgagaccagcctggccaacatggcaaaaccccatctctactaaaagaaaatacaagagttagctgggcatggtagagcgtgcttgtgatcccagctactcgggaggctgagacaggagaattgcttgaacccgggaggtcaaggtttcagtgaactgagatcgtgccactgtacttcagcctgggcgatagagcaagactctgtctctaactaaataaataaattaaattaaatgactacttaaatagaagttaattttaagaaatgttgccactttgctgtataaatatgttgtatttttagttccaaaacattctgtttttgacattctcacaagtttttcttaaaatatgtgtttaataggtgtttttctttctttttcccagcaaattgaagagttttctgatgttaatgaaggagagaaagaagtgatgaaactctggaatctccatgtcatgaagcatgggtagggtatttctaaattaatttaaatattttattattctttatggtcttttgctgtttcacattctagaaatcttacgtgtgttagaatcttatttaaaattccattaatgtatatttgtcccaaattttattctattccaatgttttttggtttggcaggttttttttaggtacaaagacgttccttttggtattatttataacaatgaattaatattatattcattagtattaataaaatcaaggcaaaaaccgggccttgcctttagaacttgttgcacagatgtgagtcatcgcagcattatttatcagggttgttgattctgtcagctttcaagaggaaacaggctgctgcaaccctggtgtccgtaggaaagggtgtcatcatcatagaacctcctcagaaatcactggtgcccatcctaactctcgtagtagtgtttctcccatgcttgcaaactctatcagggttgactcgttcacactcaaaacattttatagagctgggtacagtggctcatgcctgtaatcccagtactttgggaggccaaggtgggtggat

SEQ ID NO: 2291 - DNA, 1203 bp, Homo sapiens
tgttatatgtgtttcacgcacatatttgcagttggattttctccaacagaaagtggattcactactggcacattaacaagcaccaataggtttttattccaactccgagcactgtggttgagtaacatcacctcaattttttattatccttaaagatattgcattttcatattctttatttataaaggatcaatgctgctgtaaatacaggtatttttaattttaaaatttcattccaccaccatcagatgcagttccctattttgtttaatgaagggatatataagctttctaatggtgtcttcagaaatttataaaatgtaaatactgatttgactggtctttaagatgtgtttaactgtgaggctatttaacgaatagtgtggatgtgatttgtcatccagtattaagttcttagtcattgatttttgtgtttaaaaaaaaataggaaagagggaaactgcagctttcattacagattccttgattggtaagctctccaaatgatgagttctagtaaactctgatttttgcctctggatagtagatctcgagcgtttatctcgggctttaatttgctaaagctgtgcacatatgtaaaaaaaaaaaaaaaaagattattttaggggagatgtaggtgtagaattattgcttatgtcatttcttaagcagttatgctcttaatgcttaaaagaaggctagcattgtttgcacaaaaagttggtgattcccaccccaaatagtaataaaattacttctgttgagtaaactttttatgtcatcgtaaaagctgaaaaaatccctttgtttctatttataaaaaaagtgcttttctatatgtacccttgataacagattttgaagaaatcctgtaagatgataaagcatttgaatggtacagtagatgtaaaaaaaattcagtttaaaagaacatttgtttttacattaaatgtttatttgaaatcaaatgattttgtacataaagttcaataatataaaagctgtattctgttttggggtttttttgttattatgcattgttaacatgtacattaaaattttgatttagatagcatagtaagatttcagcctcaaatgagtcagagctaataagaaattaggaaaatcttaatgtgaaatcctgctttcagcagttacaactaatatgtcatttatggtattacataaatatttaaaaattta

SEQ ID NO: 2292 - DNA, 1359 bp, Homo sapiens
ttacagacctttcagcatggatggattactaattttcaggtatcgaaactgaaatttgatacctgatcctgtggtaaagtatgttaaactatggttttggagtgattattttgaggttcattttcagcctcactgaacagtgttttacgcacatgtgaaaagtatccacatttgtttccaactaaaatttgcttttatttggtgagaaaagttgtgtgcgtgtgtttgttgtagggaataattagggaattggaagagaggccaaaaacaaacctgaattacttttgtttcttgtgtttgagccacgattctatccagatagcagtttactctgagcagtaacaatgaacaagcagtatagcatttagcaaacctggaattgtttgtatatggttttcattcttggaagcataaagaaaaaatatgcattaaatgaattgtaaattttgacttgttaaataacatgtttttcactataactaataggattttaatatttaaagaattttgttgcttccatgacaaaatatcccattggactattttataacctcagtaatcaacatttaagagtccttaattggagatctgttttctctattacctaccatcctgcaatatgctgaaatctttctaagttgcttatcttaattctaatggtgataattgaaaaaagtgtgctggaaatacaggctcttatctggttgagtactgggggtgggaaggatttagtaatgtcataatctgttgaaggtaatatctatagataactaagatagttcctttttttttgtagttctgtgactcagacaaataagattttgagaattatgtagtttttaggtgtctgtaacatccactagtaaaacttggcaaatgaaagaaaattgtgaagtcaccactttaactgagtcaaaattttgtttgaataagctgatgaaaatagacatgtaccctagaagtagatactctaaaattatacagacatgaatgtcttttttaaaaggttgtcattattgacctaatattgagtaatctttctgcgttattccaaattgaaatttgtttgctcttcattgtaacttttatgtaaaagtcctttaaaaggggattcaattataaggctatttgactatagggcagatttttataagtaaacattcccccaattccacttatgctaactgtctcatgacagtaaagtttactcctttttagaaaccctttctcagtattttaatttctgtcattgaatcatttaaataataaccttttgtttttatagcaaagaaatcatctgacttttctgtgtgatgtttcttggcaaaataagcacttgatgtatggtcatgtacataa

SEQ ID NO: 2293 - DNA, 1224 bp, Homo sapiens
agttttattcttattgcccaggatgaagtgcagtggcgcgatctcagctcactgcaacttccaccttccagtttcaagcaattcttctgccctagcctcttgagtagctgggattacaggcatgtgccaccatgcctggctaattttttttgtatttttattggagacggggtttcaccatgttggccaggctgtctggagctcctgacttcaggtgatctgccgacttcgacctcccaaaatactgggattataggcgtgagccaccacacccagtccacttttcatactttctaaaacaatatttagggatttttgtgttagccactctcctatctcatttctccaattgaagtaatgcataaatcttccattctcttttttctctcattcatggatagaatgaatgtctataatgaaaagagcttcttatcaatagccctctcagatttgttctgaattttgccaaatatttgtataactctgcaaaagactttctttccctgccttctcctttagagggaaaaacaaactgtaggtgtgacagcttacctcctagcattgttgtgaggtttggctggcacaagataaagtgctgtgtaattactctgaaatgtttgtaattaataaagaaatgaattgtaggcactttgtcagtagaaaccactgtgatttggaaacgcaatgtttcaataataaagactataaaatttaaaaaagaaaaaaattaattctctccaaattataaattaaatggtatacctaatgactttccttagaacttgaaaagcttaacccaaaatttatatgaaaaggcaagagcctggaatggttaagacaacgttaaagaagaagaagaatgtgagacttacccttatagagaccgcaattaaccataaagccatagatgttctcaagcctagtatagcgcctgacacacagtagttaatgaatgtttgctcagtagactgatgggtggaacaatgagttgcttgggggtcaggattaactctggaagtggtagttgtgggaagggttgaacctgaagattagggcgactcagaactgcaaagaccagggaagttgggttctgagaaggggcaggacagagagctgactaatttgtttcatttgtctacacatacccttaagcaaattttatcttgtacagtttgagtatggggtttatgttttcttaaaattcagcaagcctttaacaggaat

SEQ ID NO: 2294 - DNA, 1201 bp, Homo sapiens
cctttgtagggacatggatgaagctggaaaccatcattctcagcaaactatcgcaaggacagaaaaccaaacaccgcatgttctcactcataggtgggaattgaacaatgagaacacttggacacaggaaggggaacatcacacactggggcctgttgtggggtagggggaggggggagggataacgcgtccagcgccgtccgtccgttcgtcttcctccctcccggcctctcccgccgaccacgggcagtggtggggggcggggggcgcgcgtccccggtcggcgcgccgcttcttcggttcccgcctcctccccgttcactgccggggcggctcgggacggggcccggggagcgtgggtgggaaccgcggaggcggccgcgccgagccgggcccgtggcccgccggcccccgtcccggggggtggccgcgcgggccccggtggggcggccacccggggttccggccctcgcgcgtccctcctcctctttcctccgcacgggtcgaccagcagaccgcgggtggcgggcagcaggcggcgaggcccggggcgtccccgcacccggccgacctccgctcgcgaccgctcctcagtcgggcctccggggtcgaccggctgccgcccgcgggcgtgagactcagccggcgtctcgcatacctaatgtaaatgacgagttaaggggtgcagcacaccaacatggcacatgtatacatatgtaacaaacctgcacgttgtgcacatgtaccctaaaacttaaagtataataaaaataaataaataaaattagtggttttaaccatgacttttacttggtctggtaaaattatcatggtaaatattcttgttttatttcccacattcaggaaggggtgatcatgtgacctagttctggacaatgagatgtaagttgagggtttctagtaaagttttgcttcctcagtataggcaccccttttcctcgttttctttctgtctagaatgctgatgagaggttggaggtggagtaactatcatatgaccacaagacaagcatgagcacaaaagtcacaagccaaggatagactgagtgagcacccagggtcagggcactgatgacactacgcagctacaagatcagcccaactactaacctctgcagcattcattttatatacatatatatataaaatattttacagagaaggaaactgaggcatagtg

SEQ ID NO: 2295 - DNA, 1188 bp, Homo sapiens
tagtttgtgagatagcagaggggtcccccatgatccctgactttattaaatggaggatatgtttatagataaagccttgtgatccttaatgaaccattcatcacagttccatttctatctaaacttttctgaaccagttttatctttttagcctgttctgcctcaggggataatgagtccctacgtgccactcacacactcactatattacagccccaacagtctgaaaattatttcttttaagctttgagaactttgccttagttctcatgttctgggatgtgtctgatccacaagtgctgtgtacttttcaaatctttacctgttggaggggatgaagtgtggattaaacaagtaaccagagttggttattgaggaaatgtttcctcggaggagctctatttgagggaagcatgtgcactgagactttgtttacaatgtacctgttatctcccacctccctcccccagtcacccctatacacttaagacattctcctcactcctctgcccctttttttctgccctgtgtgtttgtacagggggagcagtaccatcaggcttggaggagaacctgtgtaagatctgcatggactcacccattgactgtgttcttctggagtgtggccacatggtaacctgtaccaagtgtggcaagcgcatgaatgaatgtcccatctgccggcagtatgtaatccgagctgtgcatgtcttccggtcctgagagcttgcatcggtttcttcagtgccttacagggaaatagcctggggtgtctgggctcagggttggccagcttgcagaggagcaagctagtagaaatattgcagggttcccaaaaccaggtcaagcaagatgccatgtcacccctgagcatgcctgtcttcccaggggtgtacctcttggctggcaaagcccaaggccagtgggaacttgtataaatcacatgggtatgttcttggttcagtgatcttggagtgatgatggtaactgatgaacagagaactttccagaacttgggtcctgtcttcctccctgaacctagacagtttcacccctcctcctgtacccaacccatccccaccccatatgggagatgcttgcccatgtgtttcatcaatcagaagtcctcctccccagcacattcggatttaaatttctggtctctccggctttctgtgctttaactat

SEQ ID NO: 2296 - DNA, 1188 bp, Homo sapiens; identical to SEQ ID NO: 2295

SEQ ID NO: 2297 - DNA, 1245 bp, Homo sapiens
cacacccagccttgtgctcatttcctttgggggtgcggagaggtctttccttcgcctatccctctctgaatctctccttagtttatatttcctcagtccttgagtctgcaccctggacagcatgctgtggtcctaccacagggcttctccagatgtgtagaagttattgagtcttggagcaaggggctgagtgatcaattaccttatggctcttacagagaggaaaccaacaccccaagagatgccccacaaaaactagcagctgagccaggactagggttcaggatttctcacctctggtccaggttctccgcatcctactccatttcctagaaaatattttatgctcctggctcacatcagtaatcccagcactttgggaggctgaggtgggtggatcacatgaggccaggagttcgagagagtctggccaacatggtgaaaccccatctctatcaaaaatacaaaaattagaatccccgccccgcggtggggcgcgggaaatgtggcgtacggaagacccactccccggcgccgctcgtgtggggcccaagtccttctgatcgaggcccgcgacctcagatcagacgtggcgacccgctgaatttaagcatatttgtcagcggaggaaaagaaactaaccaggattccctcagtaatggcgagtgaacagggaagagcccagcgccgaatccccgccccgcggtggggcgcgggaaatgtggcgtacggaaaaatacaaaaattagccaggtgtggtggtgcacgtctgtaatcctaggtacttgggaggctgaggcacaagaattgcttaaacccaggagaaagaggttggagtgaggagctgagatcatgccactgtactccagcctgggcaacaaagcaagaatctgtctcaaaaaaagcaatcatgctcctaatggggcctggctctcctctatccctcatcgatgtcttcaattcccatgtattttataatacatagaaagagagagagatcatgttgcagacatactaagttataataatatttctaagcctccatctggaatttttttggggggggcgggggtgggagagacagagtcttgctctgtcgcccaggctgaagtgcaatggcacatgatctcagctcactgcaacctccacctcccaggttcaaacaattatcctgcctcagcctcttgagtagctgggattacaggcgcccccaccacatccggctattttttgtatttttagtag

SEQ ID NO: 2298 - DNA, 1246 bp, Homo sapiens
catttctgatatgatttacttttttttattatttctttcctgagttagattggctccctttaccttttcctgttgtcttgccctcacctcacattatctggtcatcccttccccagatgttttcttttactgttgtgtggtcttccttggtagctagcattgttgtttgtttgtttgtttgttttgttttttcaagtatgttttgtttgtcattaaggaagttgtactgctgtctttccacttttttataatagggctttgaacagttgctgtgttttttaccattatgatacttatatttgaatgagttggaatttgcaggactagctattagtagacttctatagaaaaggaagctaggcgggtagttttttagactttgctcctcaagaacgtttccttcgttgctctggtgtagccacagcttcttagcctctctgaatctaacttgattctagagggctgatctttgccttcaagccctgtctttcaaggaagccctgtcttccaaggtgtttgttttctctttagaaggtggtgctttttgagctctttcatctccagggcccccttggtagaaagggacttgctaccttttttttttttttccagccttattcatatgctgctcctgtttgatcttggtctactctgggaatggggctgtcttctgagaatgaatatttgtggtcagtctctaagacctactactactggtttcctctgaactccttgtgcctgcctactgtatcaccagagcatctcaccagttctgtggactttctttgacagtagttttggagaaggtgaaattacagctttatagggactttttcccccttgtttgtttcctctatttcatttcttaaatgagcacttggaagatttggaaccatgctgctgccatgtttcccaatattgacttaatgacagagttttgatgactgtgagagcaaaatcaaaagagtaaaattttttttgccttataactattatgcctaaatgagtgatgtgaattctcaagatcatttcattattacaatttggtagtcttaagatgtagtttatctaggaaaaggaaaatatttctttagccactctaactcttggaagagtatgtgtgtaaactcttttttttttttttttgagacagagtttcgctcttgttgcccaggctgcagtgcattggcatgatcttggctcactgcaacctccgcctcccgggttccaagtagctgggaattac

SEQ ID NO: 2299 - DNA, 1148 bp, Homo sapiens
tctcctgccttttctgtgcctagtttttggctcttcacatattccatattgattttgacgctctgtatattggcatcaggtggcagctgaatatcttttgaattactcgaaggtaaagccagatgccagaatgaaggtgtagccagtgtttcccatatgcccctggagccccacttattgaggccagcagaataggtgcagagatgaagtgagcttagagatgttgcaaatgctctttatcccttcagctctctgatctgctctttcttcatgatacttagtctgcagggcatattaagatcatcccagaggttcaggcagttcctgtcatctctgaaaagactgggggatatgaaatcttccccctaccccacttaatgcgttggatatgatttttcaaagaatgcttcatgcccaaaataccagcctgtttagcagtgttacactgtttgatctgcgggcacttgttgcattgcctggcacccaatattcagggtccatgactaagactggtcttctcagatgccctgcttaaatcaggggcacttcaggctccacaggcgtcatgttggactgagacctaactcactggactcagaggaggaatcgtggaaaacaagagcaaaactaccccacacccctatttcatgtctgaaataaccctgtttcataccagttgcaaagcttgtggggagcggtcccacaaagcactttcttaaaccttgagaatctccaagagaaaaatatttggggaaggagggaggaaatatgtcccttgcacaccacccctgaagcacatggcagtaggaaacagcataggattgtatgtgggaggtggataggtcggtgatgtgtggagcggaaaagcaggttggtaaagttcccttcttgggacttattcctggagtcagtggatacaagtagtgcagaaggttcacactgcaaatagtgttctcatctcaaagcaaactatcattccagaaggaaaagtgtgtcagggcaagcagacaacacaatttcctatcagaatatgtccctcaacccccgaaacaaggcttctctcagcctccccaccagtgatggataacagctcctattctcagctgacctgactgagccaacccatgaactcttcactccttggggaa

SEQ ID NO: 2300 - DNA, 1234 bp, Homo sapiens
ggggatgaaatcataaggagttgaagctatcctcttgcactgagttggttcctgggtgggggccagaagaccagatgagccagtttactggtctgggtggtgccagctgatccatcagaaggcagggtctgaaaaatacctcaaacacccatgttaggttttacaataataatattatctacaggagcaattggggaggttcatgatctcgaggcctttggctgcatgactcctgagccgtcatttctaatcttgtggccaatgtgttagttttacaaaggctttctggtccccaggcaaggagtgggttggtctcagggaggggctgttatcatctttgtttcaaagttaaactataaactaaatcctcccaaagttagtgctccctatgcccaggaatgaacaagggcagctgggaggttagaagcaagatggagtcaattaggtcagatttctttcactgtcataattttctcactgctataatttttgcaaaggtagtttcagaagaggacaaccttccccaatagaggaggactgttctttggtcaagggtatacgagtagctgcgctcccctgctagaacctccaaacaagctctcaaggtccatttgtaggagaatgtagggtagtcaaacttccaagactccagacacatccaaatgaggtgttgcatgcggcagtgtgcctttcttaaaaaaaaaaaaataataatctcatgaaagctgtgaacacttccaccaatctgtagagacctacacagacagacacatgtaattttgcatgtaaggagttcatagaccctgcaggctcactgatgggcctcttgatccacagggcttgttcctatcagctttcacgcctctggcaccccttttcctagcataatcctctaaagccaggcccatatcccctccagcctagtgtagcccctctcctcccctcccttcctggcacagtctttttttttttttttccccatcattcactcttttccaaagctaagctggctgctagccaaggctcacattgtgatgttaggaaaccaaatgcaggcagagaaaatgaaaccttactccatctggattccaaagcttttatctgacatggagttcccctcctgacttcagactgtgggcagcagctctggctgttccagtgctcttaaaaacatgcccaaagcagggacattccccccatcctctagaaatctgggatcccaagagaagcctga

SEQ ID NO: 2301 - DNA, 1364 bp, Homo sapiens
gccacttaagtttggcagagatgacgggcagccctttgcatagagcttttccctggacttggagttggtctttccctgaggatctaggactttgggcccctctgggctacctccaaggaatcagtcacctctgttctgctgagtctggagaccaggtggtggggtggacggggcataaggaagagtgatgcatacacagtgctagagtacagaatgcagtaagtgatccatgggggcagagagcaaggtaccgcatgatcagaagagagaactagtgctaccgccttgcttgtctagtacattaaaacttacaagtcatgttcacacttctctgctcacttagttttttaaacagtcctctgtgtgtgtttatttccctttatgcctgagaaaaccagagaggtaaagtgacgtgcccaaggtcagataccactaagtggtgatacagagtaccagacatagtaattccaagttcctaccctctctgtcttcccccaacccgtgccccgtcgtcctctggaacatgagactgccccaggtgagctgggctcctctcagtcacactaggggggcctcccttctgtctttgctgacagagctgactacctcctctcatcttcctcaccctctagagcagcaggaggggatagataggatggcctggcagtcgagaaagggaggccacttcagggaggtagcaatgcagtggaaagtgaccctcacctccagatgggggctgctcagacactgccaggtaagaacttgacagaaggacagtacctggggacaagcccaggataagtggacaacactgggagtcggggcaggagtgctttgggggtgggcatgaccctctgccacagcccttctgcctggtgggcatggcagtcttctggagcaagttgtggccggaagaccagtagcacatggaggcaccctgcctgggaccatataggaatggtgggtggggtccctgtgtcaggtctgagggtggtggttttttcttttttttttttttttttgagatggagttttactctagttgcccagtctagagtgcagtggcacaatctcagctcactgcaacctcctcttcccgggttcaagtgattctcctacctcagcctccgagtagctgggattacaggcatgtgccaccacacccagctaattttgtgtgtgtgtgtgtgtgtgtgtgtgtgtgtgtgtgtgtgtgtgtttatttttagtagagatggaggttcaccatattggtcaggctggtcttaaacttctgacttcaagtgatccacctgcctcagcctcccagagtgctggaattacaagcgtgtgccaccatgcctagctgggtctgagggttttga

SEQ ID NO: 2302 - DNA, 1151 bp, Homo sapiens
caaggccaggagcagggagagtggctgtggagcgggacggccttgctagcctggcctcttgagtgctgtgacctgaggtcctctcctggatccttcccctcctcttgtgttcagagagaaatgacaaatcaatttagatggagagagaactgtccagcccaagtgtgaagcaattgtaagttccccactgtccctctctctcaaaatgaagagcacctgggcaaaggagccgcttaggggaacttgttcttagttgtggccctgttcccaggcagctgggcagcctgccatgcagcaccgcactgcgcccacacagaacatgccctgactgcctgccacagggagcagcagcatggactgagtgagcactgctgctggcccttgcctggtccttctaggcctgcccacacccaccatgccttcagggtcaaggttgccccaggtgcagatatggagcattgtggtggcaggtgaggatacgcttctctgtaaaaatcttcaggaatgccttcctcccaagccttctctagcagccagaatgacaggaaaaggactgttccctgggctaaggggacttaagggttaagctgcttttctggcagaggtgatcaaagtatctgagctgtgtttttccaactcttatgtccatcttcgagaggctgaaagctgaaaagagccagagttgcttgtttgaggcagaaagtatgtctttgcctggaaagttaagactaggaaagaaagaagttccgatacgcatgccttagtgagtggtctttcacctctcacctgttgaacttggagtgtcctcactgacactatggccactgtgtcctttgcggtaaggaggctgatgagaaataacacgaggctttctatcacgaaggtagatatgggatcttgcctcctctcttttgttagcagtagctgaaaacctacccctcacactgattcagaagctatttggctcggtgaagtttagtgcaatagtgacaaaattttctgagaagagaaaggggtcattttagtttgatcctttaatctgattgtatttataaaagcacctgggcttgcctcccccaaggaagcagtgtttcacaattctgtatggccagagggacctggcaggcatttagttagagggaacccaagag

SEQ ID NO: 2303 - DNA, 1198 bp, Homo sapiens
tccctctcttgaatgcacatgaatgagcacacttgacatgtgcacccttatttgtttttggaactgcctctctcccttccctctcaagattccaaaggaatgaaacagttctttcttttatttttatttttatttttttggggggacagagtctcgctctgtcgcccaggctagagtgcagtggcgtgatctctgctcactgcaagctccgcctcccgggttcacgccattctcctgcctcagcctcccgagtagctgggactacaggcgcccgccaccacgcctggctaattttttgtatttttagtagagacagggtctcaccgtgttagccaggatggtctcaatctcctgacttcgtgatccgccttgtcttggcctcccaaagtgttaggattacaggcgtgagccaccatgcctggccaaacagatctttaaaattattgaaaaacattaaagtgtttgttgctgaaacagattggcttctgttctcccagaaacatggtggtggctttgaaggagctgtctattcggggtgactttcgaactacagttgaatacctgatcaaattgttagagactgaaagctttcagatgaacagaattgatactggctggctggacagactgatagcagaaaaagtacaggtgtgtatttctccacaaacagatgctgggattgggtttttatagacttgtgtactcaatccctgccactacatgaaatttatttgattctaatgtaaatggttcttgatctacctggaaaaatctaggagtcagtgtaattttagcactctgatggttcctgtgcttgtgtcacacagtcattttatgttctagcattacttcctgaggtatatttgaagtgaggcatgcagggatttaattactttctttttcttcatttaatgttaaacctggtccatagttgccaacttctgtatctaccagatgctgaagagagaggcctcatttagatcaagagttatcacttattccttaattcctggggctatgctaaattatccaagattttgtataaaatcgttagattcatataatttggaggtccaaattttggctatacaccgtttttctttgagattatcagtagccaaatcgttgtgtctttttaaatttatttctgtcagaagcctatttttgagctattcaatgattggctaagtggaagtct

SEQ ID NO: 2304 - DNA, 1159 bp, Homo sapiens
tagcttatttattcactccagaaatcctgcgtttactgtgtaccaggcacttgcctaggctcggaatattcactggcccacaacagtgcctagtatataggaggcgcccattaaatggaaatttaatgatgcaggtgggaaggggaaggcgtcgcgtgtaggcgtcgcgggtattttgcggctgcaggggttcagctgtgaaagggagtttggaagccgaagcttgttctgatttgggggacttcctgcggcccgacttcacgtatcctcaatctcaggtcaccctaaaaagggacgttccgcgcctctccacgtttgaggtagaacctgaggatagccagagtcgacctctcgccgttccaatggaggaagggcgtgcacgtcccgcgtcctctcctcccaagctctttcgcctccctcccccatcaggatccttccctttctcccccgggttccacttatttcgcccgatggcggcatctcttacggcgtctgcgccgtccaggctcgctcccattgactcggctcactactacgccggtagtcgactcggtctctgtggcgcaatcggttagcgcgttcggctgttaaccgaaaggttggtggttcgagcccacccagggacgctatgaccttttttttttttttttttgtcttttgggttttttttttctccccggaagataaaaacctaagccttttactcaaaagccaaattttgcattgaaatggcagcagcaatactttttctaggagaatcactgttcttgaaaattctttgctgctcagtcaataatgggataatttctccagcacttccctccacacccccccaacccgcctccaagctagatcgcaggaaacctaaagacacaggtttttgtctcactgtgcatgcaacacgtttcaggatgcattttttcataggattaagaatgaatttacagtggaggttcgacagttttctattgtctgcctcaatcgatattacagtctccaaatactacatttggaagggaagagaatgagagagacacagagagagaaacaagtatgaagagaaacaaaggtgagaaagggagaacattgttgtgatacagggaaagaagggacgtgacagaactaggcagggtgggtaggggaagacctcaagacaatg

SEQ ID NO: 2305 - DNA, 1114 bp, Homo sapiens
tccgaagcaggaaccagcactgtctctgtgcctgactcacagcatataggtcaggaaagaatggagacggcattcttggacttcactggggctgctggattggatgggaaaccttctggaagaggcagatgggggtcaaaccactgccttggccccaggaaggggccataggtaggtctgaacaactgccgcaagaccactacatgacttagggaacttgaaaccaactggctcatggagaaaacaaatttgacttgggaaagggattatgtaggaataatgtttggacttgatttccccacgtcataatgaagaatggaagtttggatctgctcctcgtcaggcgcagcatctctgaagcttggaaagctgtcttccagcagcctccgtggcctcgggttcctaccggcttctctgcatttggtctgctgatcatgttgccataatgtgtatggaaagtgtaacacattcttactggttaaagacgactaccaggtatctaacttgtttaacattgagtttgtgtgtgtgtgtgtatgtttgtgtgttttgtatattgtttacattttgagaggtagcattctgtttcaaatgctttttgtttttctgacagtattgttgactgggtcataacattttgagctgtggtttggtggattttcaatttttttttttaaaggtcattcgctgtgctatcttcaaaaccttgagtttggcccccaatttttggcattcaaatgtttaaaagctatttatcttggtttatacaagtttcctttctcttctttttgtcatggtattctatttggtctgcagtttgaatgtagagaaagtggactgatcccccaagcgttgtctgcccccactctttcctccttgggtcccgccattcttttactgggcagtcgagggcattggaggggaagtgactgccctcagcctcactccctggggccatgaagaaaagctaaacagtctcatggcatctcagaataatgttgggtctcccaagaagaaaggtgtaagaataacgacatggctgattaggcgaggccaggatagggctaaggccaggattcctggctggcatccagtcaccccttctcccatcctt

SEQ ID NO: 2306 - DNA, 1258 bp, Homo sapiens
agtaaatgaacaaggtgctgcctcctggcccctctaggactctaacaagcctacttgagttcacctgctggctctcccatgtttgctcatgcagtcgactttgcctcagcttgacttcccctgatggctcttatcctttcagggttctacggttgccagagaagcgagcgacaaggagaaggtatgctggtgctgagcaggaatggaagggtcgcttggagtcagaaacaactcctgtcggccatcctgtccctcgcccaccccagcccctagcccagctcccagacatgccgtctgtcaacatgaaatgccgtgtgtcatgaatcacctgtctgtccttgtgctaggcctagaccttggtctctggtcttttacctctgccctcactacgttcttcatagtcctgctgggatggcagacatttctatctcatagtccagcctgagtcagtcagtggctgcctgagccctgagctggtccaggctcaacaggaaagaatcctttagtcattcctcatctttcatgtgtttgccctccctgcccacccaaagcctgggactagaggctcctgcactgctgatttagcaggttgagggtcggtacactgacaacccctccttcccctttctgtatagttgctcccggcagaacagttgggtgtccctggggtgaattaatcaggcttacccagcctaactgctgttgctctcctaggccaaggacttgccaacattcaaagacaatgacttcctcaatgaagggcagaagctgcatgtgggagaggagagtaaaaagaacttcctggagaaactgaagcgggacgttgaggtacttactaaccttcattttcacctgcaaggctccttctgtacctagagtaggcgcctcttaaaccttaagaagaatggaattcagtactttccaggagtatggacaaaagggtggtgatttgagcagcgtgggcacttatgggcacctaaagcaagtgcaaatgatcattccacctgacggagcatagttggcgccagtaggacctttgtaatttagtttagaatgcttttcccttttcactaattcattccaacacctttttcaaactcccttctgctgttgtccctacaatggagagggcatctggccatcagagctgtaggaacccagctattaaggtcctgtaaccccaacattttgggaggctgaggtgggaggatcgcttgagctcagcagttcaataccagcctaggcaacatagcaagac

SEQ ID NO: 2307 - DNA, 1495 bp, Homo sapiens
gccctaggcagctggggcgctttgctctccttcaggccggagagagagagccaggccaccgcgagagcactgccagggccctcgaaagtggcagtggggtgctggagagttgagatggcaggatcccgacgtgaatgtagtctggataccgcgagatcgctccgcgaatagggctatcgtaatggggttgaagttagactggattaggccctggtttgcgcgacctctgcggttttatgccttgcaggagtaattgcgttttgcgaaagttagagcaagggttgagtcgtctaggtttcttaatttcgatgtcagagtgttaatagtaagaaataggctactttccgtgagaatcgggtggcacatggggacggcataagtaaaatccgagcgagctaatctatagcgtacagtctatcaaagcatgtgcggtgaattacagcttgagtatgagggggaactccgaaccatgtctagattgtgatctctttatcctgtttcccttccctttatatccacaggacgtggtgggtcctctggtgcgaaattccggatttccttgggtcttccggtaggagctgtaatcaattgtgctgacaacacaggtgaggtctttgcacgttgctatactcccccttttaaaagcactcaatgggcctgtggctaatgacctattgagccgtcaagaaaggggagagtgaaaacatcgcttttgggtgaagtggcaacatgtgttgtttgcttcaatcggtggtgtgacaaggcgttcttgcggactaactgcttgggcagtgagtggagggaggggctttggaagtgtttgggaaatgttatactgatggaacggcctgatggccctcaacattttttatttttatttacattcttttgtaggagccaaaaacctgtatatcatctccgtgaaggggatcaagggacggctgaacagacttcccgctgctggtgtgggtgacatggtgatggccacagtcaagaaaggcaaaccagagctcagaaaaaagggtgagtaaacactgagcccaccttaatactgatgagtagtggggggacgctttcctttattggaaaatggatcagttttcaaggcctcaagtttgttttccattgagaggcagtgtgagataagtatcttaagtttttgctcatattgtgttggaggggggaccatcatcttgtcacttccataccttagttgtttttttgttgttgtttttgttttgttttgttttgttttttgagatggagtctctctctgtcgcccagcccatactggagtgcaatggcacgatcttggctcactgcaacctccgcctcctgggctctcaaaaaaaaatatattacaaaacgaaaacaagctgcccgttgcttattttattatttgtttttgagatggagtctcacttgttgcccaggctggagtgcagtggcacatatctgttcactgcaacctccacctcccgggctcaagagattg

SEQ ID NO: 2308 - DNA, 1495 bp, Homo sapiens; identical to SEQ ID NO: 2307

SEQ ID NO: 2309 - DNA, 1304 bp, Homo sapiens
tttctcaagccagtcagtggacatttgggggagagtctaggcacggatatagaggacccaatattcctttttttttgagacagagtctcgctctgttgcccaggctggagtgcagtggcgcgatctcggctcactgcaagctccgcctccagggttcacgccattctcctgcctcagcctcccgagtagctgggactacaggcgcccgccaccacacccggctaatttttgtatttttagtagagacggggtttcactgtgttagccaggaggtctcgatgtcctgaccttgtgatccacccgcctcggcctcccaaagtgctgggattacaggcgtgagccaccgctctcggcccaagattccttaatctagttggttttccgaaagcgtggctatgaaggaagaactcaggagttctagccattcccattgtattttgtgtttttttcagtaggtatcccgacgcaaccctcagattaaaactttaagggaaaatgaagaccacacccctattccatagaaattaactctaatgacaacgtagtggcgtggcgggggtatagctcagtggtagagcatttgactgcagatcaagaggtccccggttcaaatccgggtgccccctctgtgctccggagttacctcgttttgttggtctccggaggtcctctaaagagttcccgcacagatggaatgggagggagtctcgagccctgccaccctttttgctttcgcaggcgagtgaggatggagtcctggcccctgccagtggctcagcctgtgtgtgtacccagggtagaatgcaatgcgagtgagggcgaggagctccgggctgacccttggaacacggtacgggtggctcaacctcgcaatggcagggcggaggcgagcgcacccccaggtcagcctggctctttcttggcgggaaggaggctgagtttctaagggctgggctggggaagacaggtcgggagaagccgcgtgagcatgtgggagggagaaagaagctccgagacgtggcaaggggtcttctgcagggcaggagagtgggacgcccccgaagtgaaatatttcgagagacttctccttccacaccccaggaatatattttcttatactgccagtggggatcttcagctcagagcttcagggaacaacccctgcttccaagtgagtaattcttctgggagttgtattttttccatctcttgtaaacgtcttaccccacttccacttcccttcgggaacgccacacagcgcctgcgcagcaataccactaaacgactacgtgcggtcggtttgc

SEQ ID NO: 2310 - DNA, 1223 bp, Homo sapiens
cttcactccgtgtaccctgcaggtatcacagcctgtacctgaaggtgaaggggaatgtgttcaaaaacaagcggattctcatggaacacatccacaagctgaaggcagacaaggcccgcaagaagctcctggcgtaagtttcttttcagagtcttaggggaacattcttagacctttgagagttgttcttagatacttaaaatgtgccaatgcctaagtcttgacttgcacgtagtctgtcttaggaatacagctgttcccttagaggcacccactcctctgtcctgtacacacccactcttcctgtctcgtagggactagaggttagttgaagcaggagcctttggtgggcccagcaactcattccagaagctgactaggctcaaagggagaggtctggggatgtgcttctgtctccctagcatctcatctcttcccaaactgacccgtcttttctcttccctgaccagtgaccaggctgaggcccgcaggtctaagaccaaggaagcacgcaagcgccgtgaagagcgcctccaggccaagaaggaggagatcatcaagactttatccaaggaggaagagaccaagaaataaaacctcccactttgtctgtacatactggcctctgtgattacatagatcagccattaaaataaaacaagccttaatctgccttcctctctgcttcttgcaaggtttacggttactgagtgaggttttttttttttttttgagacgagtcttgccctgtcgcccaggcttgagtccgatggcgcagccttggctcaccgcaaactccacctccaggttcaagcagttctcctgcctcagcctcctgagtagctgggattacaggtgcgtgccaccacgcccggctgatttttgtatttttagtagagactgggtttcactgttggccaggttgatctcgaactcctgaccacaagtgatccacctgcctcggcctcccaaaatgctgggattgcaggcgtgagccactacacttggcctgctcactgagtcttttaccttgttttagtgggatgtagggagaaaaggaatggcttttatgcaagcctccaaaatactgtgcctcagaactgcccttcgaagcacgagtgacacctaagaagtggtctcagaatgttggttgggaccagtagttgtgacatcagttaaggaatcagtctttacaaaagccataggaaatacttagggtgttt

SEQ ID NO: 2311 - DNA, 1164 bp, Homo sapiens
tcaggggtagatgaaagagaaaagaaatggatcttcctgtttttccccctgcctcaccccctagattccacaggttttggtgaagttgaagaagtactctcatggagacaaggtgagttggggattgagatggaggcatgggagcagaaataagggcaaaggggagggtccttcaggccccagctgggcagtgttctcatgcctggaagagagccggatgtgagtgtacacctcagcgtgcacgtgcttcacaatgtgcatgcttcagcatgtgcgtgtgcttcagcatgtgcgtgtgcttcagtgtgtgcgtgcttcagtgtgtgtgtttcagcgtgtgtgtgcttcagcgtgtacgtgtgcttcagccagtgtgtgtgcttcagcgtctgcgtgcacccacaacatacacccaggctccaggcagaaagcagccaggcaactcaggccgatgcctccagcagacaaggttgcctgagatgatcagggcctggtggccctggaaaccagatggacacttctgcctctttctaggacttcactgaggatgtcaactgtgcttttgagttcctgctgaagctcacccccttgttggacaaagctgaccagcgctgcaagtatgagctcccctggtcacccccgccctactggaaggcgttctgggctcttcccctgatctctgtgccagagaagcctcaggggactctgtctccttgttcactccccttggcaggggcaggaaataggagcccacagttgccaagtccccagagcccctctaccgtccctcaggcactccagattttcctcatcctgaaagagggaggatgctgctcagggacctgccactcccacccctcaccatcctatccaggtgcccagttccctcagcatctttctccctcacagctgtgactgtacaaacttcctgctccaagaatgtggcaagcaggggcttctgtctgaggccagcgtcaacaaccttatggctaagcggtaagtgtgaacgcacctgtgctaccccaagagccccttgacctctctcttgttacggtggggctgctgcgtgcctttcaacctcctgtcgaaagtttgggctgcaagtgactgggaccgtgcctgggggtacagggaacaggaaggaaaagaaagcacagatgtctt

SEQ ID NO: 2312 - DNA, 1152 bp, Homo sapiens
aaaagaaaaaagacccaatcagtgtctcttgactttgttctttgatccctcagtttcttcttgatttcagcatgtgtcgggttcctaattttgggtatgagttagcaaatttaaccattgtgtttgtgccctacccaggggactccccagtttctgacttgaagtagactgagaagaatccacgaggtgctatctggccagatttaagtagattctatttccttggttctccctctccctgaggacctcttattttattgtcccctcttctaggttaattctcctttgatttgactttgttgagaaggaggttggacagtagattagcaaagttccaagtgcaaaattacagtgtgttagagtgtggggggaaaattagtcttatttttccctacatgggatacaacactgtgaattcaatcttcaactgaaggccctgcagttctcctaaaacatagttgtttgtttttctttaacaaagtttaagctagtgttaataaattaaaaaaaattgcttgtctgtctacttcagctttgttttatgcccatttcatattgttgtctgtgttgtaattcataacttttgataccatttctgatgtgtaaaattggttgtcttgtaaatatcttataaagagttcaattgtaaataaactattgtggctgttaatttttgaacttctgcttcaatttattatatttattggcaaacaaacaattctgcttgtatatttgaaacattggaaaaagaaatccattttctcaataaaaaagaataacacattattttcccctttataataaggtactcacttccatttgtgtataagtataatgtatgtttcatccctctttgtccagtgtacttccttaagtataatcagcaacttggctgggcgcagtggctcacacctgtgatcccagcactttggtggctgaggtgggcagatcacttgtggtcagaggttcaagaccagcctggccaacacagtaaaacatggtaaaaccccatctactaaaaatacaaaaattatccagatgtggtggcatgcacctgttatcccagttacttgggaggctgaggcaggaaaatctcttgaacctgggaagtggaagttgtggtaagccaagatcaagctgctgcacttcagc

SEQ ID NO: 2313 - DNA, 1507 bp, Homo sapiens
tgcttcttattacttggtagaaaatagaaaactccttgaatatagtgtcttgatacatttttttacattacaattatgttgtcagatttacaatgtgcaagttacctgggcttttctcttttagaaatccaagggggagagtgatgacttccatatggactttgactcagctgtggctcctcgggcaaaatctgtacgggcaaagaaacctataaagtacctggaagagtcagatgaagatgatctgttttaaaatgtgaggcgattattttaagtaattatcttaccaagcccaagactggttttaaagttacctgaagctcttaacttcctcccctctgaatttagtttggggaaggtgtttttagtacaagacatcaaagtgaagtaaagcccaagtgttctttagctttttataatactgtctaaatagtgaccatctcatgggcattgttttcttctctgctttgtctgtgttttgagtctgctttcttttgtctttaaaacctgatttttaagttcttctgaactgtagaaatagctatctgatcacttcagcgtaaagcagtgtgtttattaaccatccactaagctaaaactagagcagtttgatttaaaagtgtcactcttcctccttttctactttcagtagatatgagatagagcataattatctgttttatcttagttttatacataatttaccatcagatagaactttatggttctagtacagatactctactacactcagcctcttatgtgccaagtttttctttaagcaatgagaaattgctcatgttcttcatcttctcaaatcatcagaggccgaagaaaaacactttggctgtgtctataacttgacacagtcaatagaatgaagaaaattagagtagttatgtgattatttcagctcttgacctgtcccctctggctgcctctgagtctgaatctcccaaagagagaaaccaatttctaagaggactggattgcagaagactcggggacaacatttgatccaagatcttaaatgttatattgataaccatgctcagcaatgagctattagattcattttgggaaatctccataatttcaatttgtaaactttgttaagacctgtctacattgttatatgtgtgtgacttgagtaatgttatcaacgtttttgtaaatatttactatgtttttctattagctaaattccaacaattttgtactttaataaaatgttctaaacattgcaacccatagaatgcctcttttaaaacacacactacacccttttccttattctaaaatatagtcttcacttccctttcagaagcattccaatcatattgtgacagaccttacagcctctggctaaggtgataagtccaagagataggcattaagacctaattaaggccaaagactctttattgagattttatacatgaggactaagttcttcatctccaccacacttgatcagtaaatatgcatgtatcttttttttttaatg

SEQ ID NO: 2314 - DNA, 1124 bp, Homo sapiens
gatacaaaaaataaaaactgttcttgctgataaaaaattcagaaattagaacaaagttttaagagtatgttttaaatattccagaaaagtcacatatttggtgtttaaataggaattcataccagggacaaagcagaaaatggattttcatgtgttgcttaaatgtactattttcctttccatttgaaataatagaccttgaagctgatgatgttaagggcagtgtaccactgtcttcaagccctcctgctacacatttcccagatgaaactgaaattacaaacccagttcctaaaaagaatgtgacagtgaagaagacagcagcaaaaagtaagcctaaatctttgagatgggttaatgttgcaattacctaactggtttccacgtgtctatttcaatttttttattgccaaaacttactattgatattacagattaaatgttttccaattggaagcaatttcttttcgatctttataatcaaaattagtagtcaaggctgttccaaaacagtaagttatctctattgattgttcagttacagatcaaactccttgttctactcttttccctccttctcactactgcacttgactagtcaaaaaacaaaacaaaagccaggcagagtggctcatgcctgtaatcccagcactttgggaggctaaaacaagaggattgcttgaggccaggagttcaaggctgcagtgagctatatgatcaagccactgcactccagcctgagtgagagagcaagaccctgtctccaaaaataaggtagtccaaatgtttaaaatcagtgagtttctctcagtaccaggcttcatctagttcatttctgtgacaaggataggatttataagcaattgcaatgtttaacgtaaaacgtattcttgaaattgaattaagtttaaggctgggtgcagtggctcatgcctgtaatcccagcactttgggaggccaaggtgggtggatcacctgaggtcaggagttcgagactagcctggccaacatagtgaaacctcatctctactaaaaacacaaaattagccaggtgtggtggcacatgcctgtagtcagctactcgggaggctgaaacaggagaatcacttgaacccaggaggcag

SEQ ID NO: 2315 - DNA, 1144 bp, Homo sapiens
atctcagagcttcccgtcagaacatggacccaggtaaataattatggatttcttttttaggtttgtgatcaaaagaaataccttttgtactattgctgttgactattcagaagcctatattttagaaacttcaggattatttctttctttagacatacaaagaacaagttctagaacccatgttgaatggcaccgagaagacacctcctctcataacagactatagggaataccatacagataccactgtgaaatttgttgtgaagatgactgaagaaaaactggcagaggcagagagagttggactacacaaagtcttcaaactccaaactagtctcacatgcaactctatggtatgtatttgttttgtgagatgtacacgtttcaatttatattaaagattaatatcaattttaaaagtatatcttagtctacctttataaagtttagccaatttgtctattcttggctctaatcttgttttcctttttcaggtgctttttgaccacgtaggctgtttaaagaaatatgacacggtgttggatattctaagagacttttttgaactcagacttaaatattatggattaagaaaagaatggctcctaggaatgcttggtgctgaatctgctaaactgaataatcaggctcgctttatcttagagaaaatagatggcaaaataatcattggtatgttttgggaataataactgcttactaaaactctagttacgccaaactttctttaaacatttttggtgagagtaatggtggagaaagaggcaaaatccatttaattcacctggtcacttatacacgcatttctttaaaatatctgattaggtatttatagtttgaaagagatgatgtttccttgactgagcatcttgagaaatcaagatttagttgacaattagacatgaggagaatagagagctagaagaccttgcataaactgattgaccaagagaatagatacactaatcatgtctacaggaacagaaaataaaagagacagagaagagataataaatctgatggtaaaaaaaaaaaaaggcaggaagattacgaatggcttctactctctgggtgtggtggcgcatgcctgtaatctcagcacttgagctggggaggtcaaggctgc

SEQ ID NO: 2316 - DNA, 1258 bp, Homo sapiens
tgagggggctcatgatagaaattcatcattgggtggtgttgatgttcacacccagccccagaggaagctgctaattaatttgtaatttggtttccaataaaagaggccaaacttatcatttggctaaagcaggagtctgggttcctgtcattgatcaccatgagagagcttcaggacacatcttcaaagggtcagccgcatgcctgggccctcattactagggcaggccctccaggagactgccacaacccagcctgtgcctccactggctttgcccactgcacccccgcctgctctagccctgagaagcctgcaggtctgtgcagcagtggctgcctcttttaatgaaagcattccccatgggaagaggcctggctatttaacaaggaaatgtgtgggtggtagaaactgctccgatgctggcagcggcataaatccagcagaaaggaacaggaacctcagaggcttcctaacagacatcatcttcctgccaaggggaagaaaataatatcagtggggagagaatgaactcaagacataggcagcatcacttctcagccttttggctaagatcaagtgtggtatctgttcttatcgtcttaatatctgatacgtcctccatctgaggacaacatattaaatggattttgggagcagggagatggaataagagcttgctctgttcactctacatgttgacctggtattgcagtacctccaggaatgctgcaccccttcaaaaggcaaaaaaaaaaaaaaaaaaaagacccaaacagaagcctaagaatcaggtacatctttccagttggtctcttcctcttggaaaagtccatatcatgaacatctccaggtggcagctgctctgtcttgaccccctctggaccatccattcaattatcactgcaccatatacacaattgtcaagtgctcaataattgtttgttgaacagactgagaatagttggaacaggttctacttttactttctgttgtggcagatggggaaggctcacttcaggatctcagactatggaagcagtgtgaatccactcccttgggaaaggatgttctatagccctggaatgagctaagccaggagacagggagcatatttgcccaactatagaagccctgggcattcacttaagaaggcaacatgctagagcagtggttttcagtcctggctgcaaaagctgtgagcttcacatttagtatgtgtgtgctatatagccacttttttattcagtaatcttcttga

SEQ ID NO: 2317 - DNA, 1163 bp, Homo sapiens
agacccagacccacagaccaggaggaagcgctagagatgtcaacagccaacaaaaacagtgctttacacacttgtaaaattgtgacctacaggggctgggcactgtggctcacgcctgtaaccccagcactttgggtggccaaggtgggaggattgcttgagccccaggagttcgagatcagcctggcaaacatggtaaaatcctgtctctactaaaaatacaaaaattagctgggcgtggtggtgcatgcctgtaatcccagctacctgggaggctgaggcaggagaattgctggaacccaagaggcggaggctgcagtgagccgagattgcgccattgcacttcagtctcggccacagagcgagagtccgtctcaaaaaaaaaaaaaaaaaaaaaaaaaaaggaattagcttggcatggtggcgtgtgccttgcagcgagctgtacgtgatcagtgccactgcactccagcctggggcaacacagcgagaccctgtatcaaaaaaaaaaaaaaattgcgacaataagtacattttactacgcacccttacgcattctttttctcacctctgtgtgtgtgtgtgcgtgcacatgcacacacacaaatgggtgacacaattctcaccatactaagagaaatcccctctgatattttgtagcctattctgttgcattaaaaaactacacaatcggccgggcgcggtggctcatgcctgtaatcccagcactttgggaggcggaggcgggcggatcacgaggtcaggagatccagaccatcctggctaacacggtgaaaccccgtctctactaaaaatacaaaaaaaaattagctgggcgtggtggagggcgcctgtagtcccagctactcaggaggctgaggcaggagaatggcgtgaacccgggaggcggggcttgcagtgagccgagatcgcgacgctgcactccagcctgggtgacagagcgagactctgtctcaaaaaaaccccaaaaaacaaaaccaaaaaacccccccaaaacacaaaactatacaatcaccacctggtgccttgactaatgagtgatgacctgctctttgaaaaacagaacacaattaccttattcaatgataagctggctgttgtgaatgcgcctcttaggtcagtaagacctcaggttggggtga

SEQ ID NO: 2318 - DNA, 1137 bp, Homo sapiens
gcctccttccaacaaccattccccaggcctcccctagcaatatgctgtttatcaagtgctcaccctgtgctggccctctgcgtggcatttgtggacagtagctcattcaacctggggttagagtgtgggaccctgtgggttagatgaagacactgaggctcggggagctaatggccatggtcacaggtagtaaatggcagaactgggatttgaacccaggactgtccgtccccaaagctggggtttttctgttccaccacaaggcccacgtgtctccctgggagaagtgagatagacgtctgaggtagtgattttactggaaatggatttggctcagggccccagggtggtggggcagcagtgaaggcccagaaaggtgacaagcgagtagacatggctcagctgggccactgaatcatgcggccccctcaacaattgcctcctggtctcgaggcctcccttggccaccgtactttggcctgaggagggttctgcctgggtctgagggccccagggaaaggctgatgagttggagggaagagatgtggggcttagagccaagcctgggttcagatccagccactagctgtgtgtctgtgggcaagttccccaacctctctgagcctcattgcctcacttgcaccacaggatagtaacgccctctcacagggtgtggcgggtcatagggatgaaagttcccgggcacacacaggcagggctgacccctttaggtcatcccactccccttggacatattcgagaaggctccctggagttggctgctccctgactcccccgtcccttccttgccctccaggagggcctggagagtgtgctgaagattctggtgaatcagctgagtgtggatgacgtcaacgtcctcacctgtgccacgggcacactctccaacctgacatgcaacaacagcaagaacaagacgctggtgacacagaacagcggtgtggaggctctcatccatgccatcctgcgtgctggtgacaaggacgacatcacggagcctgccgtctgcgctctgcgccacctcactagccgccaccctgaggccgagatggcccagaactctgtgcgtctcaactatggcatcccagccatcgtgaagctgctcaaccagcccaa

SEQ ID NO: 2319 - DNA, 1154 bp, Homo sapiens
gcagtggagaagggcagccaagtttggggagggagggtggttatggaaaaacagaaccagcatacccccaggacccagctgtgctgggagcctcagtgtcctcacctgtcaagtgggcaagccatgctgatccgcagggtaagttactgggagtttgcaagacggtgagtggaaaagggctttcttactggaaagctgccttcccctgccccctgccccagtgaaagtttgttagaattgactctggacaaacatcccgtcccatcctcctttggatcctcagggtcgggaaggggtatcaggtctggggacctccatggagagacctcaagtagcctctcctagtgctctgagctgaccacactcccccattctggcctcaggagacaagatccctggctctgccgtgctaatcttcaacgtccatgtcattgacttccacaaccctgcggatgtggtggaaatcaggacactgtcccggccatctgagacctgcaatgagaccaccaagcttggggactttgttcgataccattacaactgttctttgctggacggcacccagctgttcacctcgtgggtccgggggggggccgggactgggcaggtgggtgggcacaggcatggggagtcctcctcagtgcacccccgacgcctgctcctccctcttggtcctcgagcgccaggggagcattcaacctcttgctgctttctgtaagtccccatctcggagcatgtcgaggagatgaaattctctgcttcgcaggggaagggaaggtgaagccaacagttgggggagaactgctctttctatttcacagaggggaaactgacgcagggagccatgagccctcgaggccacactttagggggcagaggcaagatgagaagggaaccccacgtctgcacagctgggcccctgcactctgctgcgtggcccaagtcaccagtgggagtaactccggaactgagggcttgttctgggcccacctcagagggagaggggtgtgcgctggcaggggacagggtggctgctgacctgggcatctgctctcccccaggcatgactacggggccccccaggaggcgactctcggggccaacaaggtgatcgaaggcctggacacgggcctgcagggcatgtgtgtgggaga

SEQ ID NO: 2320 - DNA, 1240 bp, Homo sapiens
ggcaccgaagaccaacatccacaggctaacaccccttcagtccacacaaagaagcttcatattttttttataagcatagaaataaaaaccaagccaatatttgtgactttgctctgctacctgctgtatttattatatggaagcatctaagtactgtcaggatggggtcttcctcattgtagggcgttaggatgttgctttctttttccattagttaaacatttttttctcctttggaggaagggaatgaaacatttatggcctcaagatactatacatttaaagcaccccaatgtctctctttttttttttttacttccctttcttcttccttatataacatgaagaacattgtattaatctgatttttaaagatctttttgtatgttacgtgttaagggcttgtttggtatcccactgaaatgttctgtgttgcagaccagagtctgtttatgtcagggggatggggccattgcatccttagccattgtcacaaaatatgtggagtagtaacttaatatgtaaagttgtaacatacatacatttaaaatggaaatgcagaaagctgtgaaatgtcttgtgtcttatgttctctgtatttatgcagctgatttgtctgtctgtaactgaagtgtgggtccaaggactcctaactactttgcatctgtaatccacaaagattctgggcagctgccacctcagtctcttctctgtattatcatagtctggtttaaataaactatatagtaacaatgaaggcatactgctggctcctggcatccatatcctttgatctgtattcctttgtaactgtacttttttccagacagggtatcactctgtcgccccagggctggagtacagtggcaccatcacagctcactgcagcctccatctcctgggctcaagcagtcctcccactccagcctcccaagtagctgggactacaggagcatgccaccactccaggctaacttttgtattttttgtggagataaggttctgctgtatttcccaggctcttctggaactcatggactcaagcaatccatcctccttggcctcccaaagtgctgttacaggcgtgagccactgtgcctggcctggcctgaactgtactaatagtttcagtatatatggttttaaaaatgctcatctacggtcaggcgtggtggctcatgcctgtaatcccagcactttgggaggctgaggcgggtggatcacgaggtcagcagatcga

SEQ ID NO: 2321 - DNA, 1225 bp, Homo sapiens
ttgtggtttctgcccccacaggttggaggcatcaagcctgggtgctttaagattggcaacacaggtgggatgctggacaacatcctggcctccaaactgtaccgcccaggcagcgtggcctatgtctcacgttccggaggcatgtccaacgagctcaacaatatcatctctcggaccacggatggcgtctatgagggcgtggccattggtggggacaggtaatcagctgggaagccaaggaggggcttcctgctttgagagcagtgggctaggagacgatgctgtgtcctgcaggctgcttgctgcccctgagttccaggcccgcaggaatgctgctgaagtctaaacaatggggcatcactgctcttgtctcaggactgacagagcatgaaatcggaaaacacagaacagggcaacaatgtgcaggaggggcgactgggctttggggataattctgtttgttgtgattggccatagggaggcagcagagtacagtggttaggagggccagttctgaaattggactaaagaggttcaaatcccattttccctctttagtagggggtgggtggcaggggccatcctggtccggttacttaacctccctagacctccatcatttttacacatcaaatgggtaaataatacccccacctcatggggctactggaggaataaatgaattgtaatacatataagtgtctgagccagggcctgcgttcagcaggtgctcagtgagtttttattgtagttaataatagtatcctcattatttttggtagtgggaacactgatcagtaggtcatgaatacagtattatatctcagagtaacgtctggcacttagtaggttcataataaatgttagccattattgtttattattcctactattactactgctgtcgggcttagaaaccaaaagctgttgagatagagtcaccttgttcgtctccctggctctaccacatgatttccgataggatgcctgggtgaggaagaactctcaccaaggtctttaggggtgtagcctgggaatccccagtccttgggtactgcctgaccaaaggctcagggaataagtctaggaaatgctgcttgtttagattgtcttcttagatttataatgatcatatcaaaagacatgaagaggccaagaacagtggcttatgcctataatcccagcactttggggggctgagggaggaggattgtttcagcccaga

SEQ ID NO: 2322 - DNA, 1099 bp, Homo sapiens
aactttgacattcacagccgtggaggcggggaagtctttgttgtccccttgctaaggggaggggaaggagtaattggcagggtcgataaccagctggaaaggcctggaatgcagcactgtggccacctggctttaatcctgatgtttttgcctctggaaaaagttaagagcagagtgagcccagtgtggaaagaacagggaccagccctggttctccaggagctctctgtgctctgaaggggaggagggttatgaggaggggggttatccttgttactttctggagtgagagaaataaaaggagggtgtgtcagggagaacagattatggctgagcgagccctcccctcagcgaggccagaggaggcctggtgtagggggcatagcccctggcacagaggttctctctggagcctctctgctgctggtgggctgaggatacacccttcagctttggtttctctgtgcttgaggaagggccactttacctccacccttcctgctggagatgctggtaggttggtagattccaggctttgtcttgatttctgtagctggcagggtagatagatcagaggcatgtgcacgtgcgtcacctggcgggggtgacatgatgcaggcttcccctgaggatggcgggtcatgaactcacacttatattctccctcctcactttcacagttgagctgcattttaagtgattgtgtaatcctggctctgatgctggatgacctcggacctcaatcatttggcatctctgggcttcagtttcctaggactgggaagtgggagaactggattaggtggctccccttgttctgtgatctcatgtctcagcagaacccggggggtctaggtgacagtaaatcccaggtatttgcaacatcaggaaccttctgtcatgagaagctgtaaggctgtgatggaagaggcaggcctgtacagggatttaatgagaccatgaacttggttagccaagcctgctctagtacagtaggttaattaatacgagatgccactgggctagatgcatcattcttcctaggggagctcagaacctccctgagggctgctttcctcctcttggacttgcagggacc

SEQ ID NO: 2323 - DNA, 1244 bp, Homo sapiens
gattggagggagggatgctgagcatgtccccagggagcacatcctgcttccttctgctggcctctgggaggggaaggtgggacatcagacatctgagctggcagcagcgttgggccagcaggagtggctcattacctcttatggattgctgtctggtccctgactcagcagtgacgcacaggccaggcgggggttttgggacttactaggatgagggctgtctcgccacagccgccgccagggaatcactcgaactgattagctctgcaggcctgtggtcctcagccaggagagtctgcgtggagaagtttccctgattaagccctggctccccacttctccacccattccctgcgcccggacccatgtcctgaggctgagtcactgtgccttcctcaaggctcatgaagcagaatggttacctcccttctacccggtttcccctccccgtcaagctctgccacagccgtgacttgttggagccctttcacttgcgcaggtcctgtgtcaccctccagaggaggccaagagtgggcaaggtcggtgcctgttcaggcacagcccgcaccagagcaaggggtgaaagggcatctcctgaggacttactgagcttagggatctgtgaccccattttttctggaaaaatctctctttgctgggtgtggtggtgggagtgcttgggcaccacccctgtgcagtccctccttctgccctaggggcaagacgtgctgtccctctgagtttcatctccctcaatttttctgtaggttggcaaggccacaggcttcctcaagaactttctgatcgagcccttcgtcccccacagtcaggtatgtgtgaggcggctccaggctgggtcttctccctcctggaaccttgggtttgtccaccgtaacctgaggaaagaagtcaagctgatgaggacagtcagagggaccagggtccctgaagctgcactgaggatctgagggtgctgcggactcgggagtccagaggggaaggaaagggcttggtctacagcagagaggagttaggactggtaacaaaggggacttccaagtgcagggatgagaacgacctgcaggcaggccccacccctcagctggggttggtcatactgattcagtctggaccaccagccagtggggtagaggcttcttcctcttgtcctcggggaaaagatggtggacaagtctctggatgaatggttttcactgggttttagaaaatgagaccgtggggat

SEQ ID NO: 2324 - DNA, 1183 bp, Homo sapiens
tctctacaaaatacaaaaatttgctgggtgtggtggtgcgtgcctgtaatcccagctactagggaggctgaggcaggagaatcgcttgaacccaggaggtggaggttgcagtgagctgagatcctgccgttgcactccagcctgggggacgaccaaagaactccatctcaaaaattaaattaaaaaaaattgagaaaagtagcttctctctgagaagtagccttttgcccaatgggttgataactgttactgtatgaactccttcaggcttaatgatctcatgaaggccaggcgtggtgactcatgcctgtaatcccagcattttgggaggccgaggcgggcggatcacctgaggtcaggagttcttctcccctaatttgcttaccccaactcaacatgcacatttcatttcagcctggcctgttaacatggtgaaaccctgtctctaaagatacaaaaattagccaggtgtggtgggcgcttgtaatcccagctactcgggaggctgaggcaggagaattgcttgaacctgggaggcagaggttgtagtgagccaagatcacgtcgctgcactccagcctgggcaacaagcgcgaatctccgtctcaaaaaaaaaaacaaactcatgaatgataacttttttctttttcttttctttttttttaactctttaaattttttaaaatagagacagggtcttaccatgttgccccggctggtctcaaactcctgggctcaagcgatcctcctaccttggcctcccaaagtgctagaattacagggatgtgccaccatccccagctgtgataacttcttctaactggggtgggtagtttttcttttgataaattaaaggcaattccagaaatactgaatgttatggcaaaacccacctaaatacatttcagtcattgtcaattcatttactaccttagaaaatggcctttgtacataaaagaagtcttagttatctccatgcttaatttgccagcatactttaatcccgtgtcagcattcttctcacctaatttgcttaccccagctcaacatgcacatttcattttaatgtctcattatacaaaacagttcattaagattaataagctgcctctctcctcaaaagataatcactacacttcaaagccgtaccttgttttgttttaaaactgattgtatccttgct

SEQ ID NO: 2325 - DNA, 1139 bp, Homo sapiens
caattttaagtcttaagtcacttttttaatatatatgatcttctgctcttcccacttcctcccctttctactgctctcccattttcccttgctgggagtagccacatgctcttgccccccaacccttgtatatggggacagtggggtcagtgcagctaccctttctttccctcctgcggaacagcggacccagcaagagcatccacatcctcactttgttcggagtggtctttggtttgggcggtggggcagaccttgggaaggggcttaggaagggagaggcagctcttccttcagctggctctcatcaggctgcagccccctccccgctcccacctccctgctgggaaaccacagcattatcacagcattattgtgacagccacgaacccattgcccacaacccctccaccctcggtcaccccaacctctggctctgagccctgttctgaccaaatcatgatgatgagtatttgggggtgggtgggtaagggggggagtgggaggggacggaaccaactttttctgtattttgtattgtatgttttcttcaacatgtaaccaatcagtatcttgtcaatatagtcagccgatcgatcgacctcacaattgtcttccttgtctttctctggcagtttatcagacagtgccctctgtagttgaagttgatttaaaatgaaccactgaatcttgttaaacaaaatcttcccctctaatgtgaggggatgctggtggtcatggtaaccaagagaaagaggctcttactgttagcagctccgatgaggtagctgacctgggctgaccaagtttgaagtttcagggcccgtgttcacttctccacctcccttcccctcccccacctaccagatcatactggggtgacatgcagtgtgtatttgatgatcattagtctctgaaacaccagaaacaacctctttgggttttttttggttggtctttaccagtgagagggtctggatcctctctcttcctgaagaggaaggaatcccaacagcccctggaacgctggactggtcttaaggccaagactgtagccactggctttcctcaccacctctgtccacgtcacccccccacaccacatccaagttgccccagtccagctctctactggttct

SEQ ID NO: 2326 - DNA, 1190 bp, Homo sapiens
gtgggcaaaggggcagtccagctgcttccaggggctgtgtgtgtatttgaggaagcccagggactgccccttcgaaggcaccacaattaccttcaaaatcatttctatggtggtttggccagctcagcccttgtggtcaggtctgtgtcatctgtgggcaactatgactacatttgggactttgtgttgtacccaaatggggcacttgaagggcgggtccatgccacgggttatatcaacacagctttcctgaaagggggagaggagggcctcctctttgggaaccgtgtgggggaaagagtgctgggaacggtgcacacacatgccttccacttcaagctggacctggatgtggcaggtgagtgctgaggggatgaggatggagacttgggggcggggtcaggtggggtggagggaagggaagggaatctcccaggtcaagctgaaataacaagtggcaagagcagggtgttccaacaccacagctctagtggcaacagggcagggactgtttgagcatattcagtgcagtgagtctggtactgggctactgggtatctggtaaaaggtgaaaagagttcccccgcccagcccctctgacttgctatgattgtgaaactagtttaaatgtaatggctgggcatgattgccttagcctcaagtgacactgggtgggtgaactggcccaatggggctggagttggagcactttgcttcttcctaattctgagggtcagtaggggtggggagggcagggtcctgagccgaggtcggaagaagtctgtccagagtcttcagggtgggggtcgacctggggcttaggaaggagagggtagcaaagctggggttgctccccaggatagggccactcctcatcgggagggccatcccattcctgtcatcacagttgactcatggcaggcacacagcttgctgcaagtatggaaagagatttctcaagcacaaagggctcaaagcacacagaggacttgctgttcctgacagactttgtcaaggacagaaaggaacttacagactcacacactgatccacaaagaaaattagaaactcaccagaccctctccattttaagggaaactaaggagggtggcgggagatgggacaggaaatgactgcccaagtataatgcaacataaactagtatttcttgtgaaatgttttcttatcct

SEQ ID NO: 2327 - DNA, 1086 bp, Homo sapiens
cccttcagcctgggctgaccagtgcccgcctctgggcttgaccagttcccaatctcgtcctctgtccccaacttcttaagcacaattgggcttcttccatctccaggttttctgccattcttaaccaaggctgcctcttccaacagggcgggaatcagacctactcccctaggtcacaactctgggaaggatacagagcccccacccttcactgagttctctggatttgttctcagtgccttagcaacgaaaacctgtgcttgtgtgtgtgtggcggcggggagggaggatcctgtttcccacctccttctcctcccctgtactccccagtgccttccttgttctggtggagctggggtttctctcctccccagtcccacaacactgccaaaaatctgtgtatgtgccattgggtggggcagccccaagcctcctggggaggcagggcaaaaacaggtgccctcatcgtggtctgtgccatgtcccgtctctatggtggttgaggagaaaggcggggaagcttcctcagccttgcagatatgtgtggcatttactagccagagctctgaaaggcagtgctgtctgtttcttgtactgggaccaaagtaaaaatccaagcacattccccttgcagttaggggaggccctactgccttctcaaagcagagaggcagcttatcaaactcagcccaaaactctgtttacatgggtggggagatggagcagggaagtacagagtgggatggtcaggacctgggccattgcaaccaaaatggggacttcctgggtagggaggtcactccctctactcactgagctaggattagggagggttattgccccaaccattgcaatgggaggtggagggacaggctcagcctcctcattgtctaaatgaggcctaaatgtgtgaagtgcgatttctgcttttgtgtaccccaccaccccattaccacagctgcctttgtgtgtttgtgtcaataaaaagccaaaccctgggtcctgcttgttgcctctgagagtggagggaaggtgagctcctggaaggctagtgctgccagcagaagatctgggctgcttcctgcc

SEQ ID NO: 2328 - DNA, 1204 bp, Homo sapiens
cagcctcccaagtagctgggactacaggcacgtgccaccacgcccggctaatttttgtatttttaatagagacggggtttctccgtgttatccagaatggtctcgatctcctgacctcgtgatccacctgcctcggcctcctaaagtgctgggattacaggcgtgagtcaccgcgcccggcacgcccggctaatttttttgtatttttagtagagatggggtttcaccgtgttccccaggctggtctcgagctcctgagtcgagacgggatttctccgtgtttgccagaatggtcttgatctcctgaccttgtgatccacccgcctcggcctcccaaagtgttaggattactggcgtgagccactgcgcccggcagatttttcttttaaaacgtggagaataagaaatcagcccgagtgtgtaatggcgtcaatattggtgtggacaagacaaagtgaatgaggcaaggagcgaggctggggctctcaccgcgtcttgaatgtagatgagagtgggacggtgatggcagggaggaaggcgacgacatctcttctcgtccttttggctaagatcaagtgtagtatctgttcttatcagtttaatatctgatacgtcctctatcagagaacaattatattagatagatttttggagcagggagatgaaataggagcttgctctgtccactccacgcgtcgacctggtattgcagtacctccaggaatggggctccctctcctgggatacaacctgtttgcaaggttagaaagaaaagactgcgccgggtagtttaggatagttggtaggttttcttactcctttaagtatcataaggttcatgatttatggagagtatcctaggacccaaaacaagaatattcatttccaagtagggaacatgttcgactttacttggagggctttaaatctcagcttggctgtggaggggtgatgacctttcaaagggatggattccagtggtgtgttgcccaggctggacttcaacttactctgtttgtttgtttgttttttgtttttgagatggagtttagctcttggtacccaggctggagtgcaacggcaccatctcggctcactgcaacctctgcctcccgagttcaggcaatgctcctgcctcagcctcccgagtatctgggattacaggcacccgccaccatgcccagctaatttttgtatttttagt

SEQ ID NO: 2329 - DNA, 1231 bp, Homo sapiens
tgcagcagggccttgagcgcctctatgagatgatcctcaagaggaagaaggcagctcggggtggcaagaagagacggtgacccaagccccccctccctttcctcccacctagtaggggtctgcacacttggacagcagggtgggaccagcctgtgacctctcagtcagactggggtgcaggacctgtccacctcaatgaaggagagaggagcatggggtgtcccgttttggtgccacactggggtggggatgggagatgggatgtctttgcatatctctctcatcctctctggagaagtgggcgctgcaggactgtggagacgtaaatgtaaactgtgactctacctcgaccctgtttcttatttttcttctctggctaaaaatttttaattggatgtgtttgggggcggggggatggaagtgacttggagaatgtgtttgggatgaaataactatctccccttcctctgtcccccaactggggagtctccccaggctgcttttctaggaataccagtcacatagtttttatttttgtgtctgtgaaagtgccaagaacccctccccacatttgtagatccatgaccctttttataagctgtgtgtgtcctctgtattattgttattaactattttttagcatttgcctgtaagttattaaagactgataactgtagctcttaccttggtctggggcattttcctctccttatcttgccccagagacaattcaagatttctatatggggttgtggcgcagggggagggagatttatcttgaagctgaatttgcaaagcaagcacttataaaaattagattgtgtgttacgggatggcttgtgaaaattataggggggagtggaaaacccctcaagctattgcctgatctctgtagttttttgggtggggtcacttcctttttctctgatttaacacccctcccctcatcctctgggtcttacttgtcccttatatcaactgctccttgcagatttaacttcaaattttgctagtctgagctactcctaggttcttgaccttggtgacacctaagtctatataggtaagtcctcaaagagccattctgttcccatcctccccacttccccagtcttaggttggtttgatttttttcctccttgtaagatgtggtgagagtggaaagtaattcctccctggccttaagtcacctctgtgtactcaatcctgctgactggctcactggcatgat

SEQ ID NO: 2330 - DNA, 1210 bp, Homo sapiens
ttcccaccgcaggatcctagagtaagctgctccctgggcccctgacaatggccacttttccagacttgctgtcaggttagaagggcagtggccttgaggctgctgtgccactgatgagctggctttctctggtgctaatgagacacatacaagaagactaattagagcaggtcttggggtttaataacgtaccacagctcagatcacaggttcgttggaggaaagggaaagaggccagatggcgggctcctcaggcactcgggccgtggctgccctcagccgcagggtccccgcttccctccactaatgctgttccatctgtcttttgtgcaaaccgcagatgatcagccttgtgacaaaggtaggcccagtatctatccgctgtccacaggcgtggccccttttccgtggaacgtctggggcctgaggggctcgtgttctttccctatctgggcagctgtgcccctcccactgtctgcgcacctcttcctgctctgccagctggactgggctgttccttgaggcaggcaaagctggtggggacagggttcaaggccttaggggcacctccctgccctcctgacacgtgcggcccagcctttccaggactcggctacgctgtgatggggctggataggagacaaggggtgggagggcagggcaggctggagtgaatccctccctattcacactgctcacactcagggactggggaggcctgctggcctagaatccccctcagggcctggaaaggctgttaggggcctaagcatggagaactgagcaaaacagaggaccttgctttcttggggtgtccaggacatgggatttcccctgagctccccacgagacaccatcccagggggctcttcctgcctggccatccaggggctgggtgccctgggccggatgtgtctggtgggactcactggcttccctccctctgtttgcttcccagagacctgtgactgtgagggctacctcaaagggcactatgtgggtaagtagctccccctgacacccacatgcacgacctgccccacccaaggccccagagttagggagaggtcaaagcagggtgatctgagccccaggagtccttctggagcagtggagcctatgggacccccatctctcctcagttctctcaacccaagcaggagctgagcctgcccaggcattgggcccccacccagcttttacccagctg

SEQ ID NO: 2331 - DNA, 1173 bp, Homo sapiens
gtgttcttaaacttggtgctttttattctttgagatgctaaccagttagtgcttctaactgattggtagtgaggccagcagctagcatgtttgcattgaaaatgggtgtagtatgggtgatagtcattgaatttttatggttactttttttttttttttttttgagatggagtctctctctgtcacccaggctagagtgcagtggtgcaagctcggctaactgaaacctccgcctcccgggttcaagcaattcctctgcctcagcctcccaagtagatgggactacaggtgcatgttactgtgcccggctaatttttgtaatttttgtagagatggggtttcgctatgttgaccaggctggtttcgaactcctgggctcaagtgatctgcctgccttggcctcccaaagtgctgggattacaagcatgagccactgctcttggcctggaaaaaatttttctatgttttgctgcataaagaaaatgaaaagacaagccatagactgggagaaataatttgcaaaacatacatcttacagagcacttgtgtccagaatgtataaagaactctttttatttgcgtgtgtgtgtgtgtgtgtgtgtgtgtgtgtgtgtgtgtgtgtgtgtttaatacggacactgtctatgttgtccacactggtcttgaacccctggctcaagtgatcggccttcctcagcctcccaaagtgctaggattacaggtgtgagtgaccacgcccagccaagaactcttaataaggcagcccgggcttggtggtttatgcttgtaattccagcactttgggaggctgaggtgggaggatgatttgagatcaggagtttgagactagcctagggaacacagggagaccccatcgctacataaaattaaaaaaaaaaaaacagaacaaacaaacctgccaggcatagtggtccttgcttgtggttccagatgcttgggaggctgaggtgggaggattgctttagccaaggaggtcaaggctgcagtgagccatgattatgccagtacactccagcctgggcaacagagcaagacctatctcaaaaaagaaaataataatgataataagacaatccaggctgggcatggtggctcatgcctgtaatcccagcactttgggaggccgaggcaggtgaatcacctgaggtcagg

SEQ ID NO: 2332 - DNA, 1173 bp, Homo sapiens
cctctttccccttttcattccacgtaggtcatttatccttaacttctaaaatggactctacaagcacttaaccgagcggacgcagctatacaaatacttttcagattcccctttatttcctcttctttcccactccacctaggatcccgccccaaccagcgccaggccacgccccggcgtgtgacgcaagcacgctccgtgcgcgccgtcgcgtcgcggcgctcactgggggcccggctttcgcccgctgctgccgccgccgccgccggccgcggctgcactcccaagatggcggctcctccgggcgagtacttcagcgttgggagccaggtgtcgtgccggacgtgccaggagcagcggctgcagggcgaggtggtagcctttgactaccaatccaaaatgctggctttaagtatccttccctgcgtgaagcccgagtccgggccggcgtgtaggtgcggtggtcggggggtgggggacgacggcggcggctggggctctctccgggcctaggggcgaccggctaccgcggcgcccggggcgcatgcgcacggccctgagctcccctccccctcccgcgggcccttcggtcagctttggggatcctgtctctctctctttgcgggagctggggctttaccgaggatcagtgggtggaggagggcttgacacggggatggctttttggggggaacgttatgagaggggacacagtaattaggagagggggtggtggtgggagggggctgatggattggagcccggatggaaaggaggggcgggtgaaatattatggggaggggtgtttagggtaaggaactgctggtagggcaaaggtatggaatttaggagggcatgtgcactgatgggatttcgtccaaggaagggcggtgggatggtgaccaaattggtccttgcctgttttgggggagagtaagttcagggcagagtttgtatctgagctagggatagtggcttgtttcgctgatgcgtgtgtatgtgtggtgggggggctgtgctgatttttaggcttctcggtcatttggaagttgctgtttaggggatgtttgcactggaaacctgttccagagagggcttgccaggggcttatgtggtttggggatgtgtgagttacaggtgaaagagtgaagttctcatgctgccttgatcagt

SEQ ID NO: 2333 - DNA, 1270 bp, Homo sapiens
ttgaaatgttttcttacctcattccctgccccaggaagggacccagcctcaccctcctggggtggccccgtgttcctcctgcccaccctgccccactgccctaccggggcagcccaggttcccaactgctgcttccacccccttcaccttgactggcttcagttcctctcagcgctcctgcctccaaagcgtgccctgtttcccttccttagcgcttttaagttatttattctgtacttgtggtttggggctctgaggaaaatcctaatcttgtgcctctccccctttgctaggagttgggtgggaagagagggtggcctctgtgccccaggttgtcagtggaggggaaggggtgtcactgcccctctgtgggactgtcatgccagtgtgcccacctgcctggtctacatcctaaagagatgtaccgtcccccctccatgcgggcaccaccactcccaggagccaagctggaggaccgcgacctgggctgggagcagagctgactgacatgggtggaggtgaccctgagccaagttctctggcacttgctggacatgtcccctaccctcttcccaagaggagccatcccacatttgggtagttagtacccaggactggttggactgatcgggttagggaccctagagggttaagggaacaacagagatggggctgcaatgccctgtctggaactccgctctcccgctggggtggttctgattgtggctcatgcctggttgcaaattggtttttaacccacaaattgtgattattttttaaaaagccaaacagattttggcaggagttagaataaatcccggggcctgggcttctctattcttggccctccgtagtctccctccgagaggaggccagagggagaggaggatctcagcaggcctctagccgcttccagatgcagtctggggagtgggctgaaggtgaagggaggaaggctgtgggccactctcccttctgagaggcagctgcagctcaggccctaatacactctttgccctgtggcctctcccttttccccccttctggttggaggagggagaagtgggaagtagcttgggaactggtttgtccacataaacttccccattgttccttggcccgccctcagggcagagccccctgcccaggctgggtaagagatgggcttggtccagcagggaccctgagggaacaaacccttttccttctggggagagagtgccccccctaccatgtagttgaacaggggctaggagctccccactcccct

SEQ ID NO: 2334 - DNA, 1184 bp, Homo sapiens
ggatgaggatgacgaggacgaggatgaagaagaggaagatgatgagaatggggactcctctgaagatggcggcgactcctctgagtccagcagcgaggacgagagcgaggatggggatgaggtggggcagacagggcacagtgggaggggaggggagtcctgccaggagggccacctggtgactccacatcctttctcaccccccagaatgaagaggatgacgaggacgaagacgacgacgaggatgacgatgaggatgaagataatgagtccgagggcagcagctccagctcctcctcctcaggggactcctcagactctgactccaactgaggctcagccccaccccagggcagccagggagagcccaggagctcccctccccaactgaccacctttgtttctcccccatgttctgtcccttgcccccctggcctcccccactttctttctttctttaaaaaaaaaaaaaaatacggtgggggtagggggctggaggagcccaggccaggactctgcagcctcagagacatcagcccttgggggtcctcctccagggacagcaactatcagactaagccagcaccggaccagcctggcccaccccacccacttctgcacttgcggttccggcatggacaatggaccggagagtgggggtggggggtcccaaagagtttgatgaggccctccacacctgcggcccaatccaaggtggggtggaagcttggggaagacccattccttcccagaggggcctgccacctggacccctgcattggaactggaggcagggaacatggggaggaggagggtcggtgccttcaagaaaacaggcactgccctggtggccctctcccctgccccctgcaggaaggagctgcctggacccgttcatgggggagggggcagaagtgttttttatatatgtgtatatatttttttttaagctctgagctgtcaacgagacgtttcctaccgatctcggctgccgtctctgttgtcatttctgggagagggagggtttaggggtagatttggaaccttttaaaaatggtcttgatgtatgtggaagagagtatgtgtatgtgtgttcctgtacatagcatgggtgcagctgtggatgtgtgcaaaagagtgtgagtgtgtgtgtgtgtgtgtaaaggggtctgtcctagagccca

SEQ ID NO: 2335 - DNA, 1099 bp, Homo sapiens
gacaaggagacagagccagggatagatggggaagggcagcaggaaagacaagaagcacatctgcttggagaggaaacaaagtcatacacagccagttctcaaaagggggcactggccgctgccatgctatgagtagccctttttcctggttggcataccctggctgcagactcacatgcccttggtgctgtacccaaaaaagccagctgtctgcaaccactgcccaagcagagaggggtatggattgctggaactgttgacccctttgatgaggatgttggacagttgactgcacacacccaaacactctcatgggatgggagggagaggccaagctctagagtcagagccagggaaggccagaagaaactggtagagtggacaaggtgctgtcctgggggacacaagacttgggcctgttctcctggctctgccactgaaccgctgtgtatggggcctttggtaagtcatttcacttctgtgggcctggtctttatgtgaggtgagccaggtctgtgtggtccccttcaggtctaaaactgttttgtctgaggaggactgagatgggggaagaggaggctgagctctgcttctggttttctgtgggaactgtgggaaaggagcactgcctttctatgcctggtgcttctataagaggcaggggttgggctcagttgccatgagctcctggcacctgccagtgccactcttgtgagcccgcgaggatgaaagaagagatggacattgtgtgggagccaagagagaaggtcgatgaggaagagaaagagacacattggaaaggaggaacaagaaggagactatggagaagtggggaaagatgcagggagggagtgaggtgagagtggggaggctaaaaagggggtgatgaagggaagggaagccaagtggtgggaaagaatgagtgggctgagggagggagggctggaggggccagacagccaggatcctggagaaagagaagaaggtgatggtgtgagaactgggcaggaagatgcagggtagctggctgagacttgtattggaagaactcgctctgggttcccctccacacaatctcccctcatgccttggaaacagg

SEQ ID NO: 2336 - DNA, 1232 bp, Homo sapiens
aggggacaggaacataatgccattctgtgctcccttccccgccaggctgtgtgctgcgaggatcgccagcactgctgcccggctggctacacctgcaacgtgaaggctcgatcctgcgagaaggaagtggtctctgcccagcctgccaccttcctggcccgtagccctcacgtgggtgtgaaggacgtggagtgtggggaaggacacttctgccatgataaccagacctgctgccgagacaaccgacagggctgggcctgctgtccctaccgccaggtcagtgccaacccccatcctggggctgggtatggccagggaccaggtcccacctcgtccaaccctctcgcccccctctgaccatccagggcgtctgttgtgctgatcggcgccactgctgtcctgctggcttccgctgcgcagccaggggtaccaagtgtttgcgcagggaggccccgcgctgggacgcccctttgagggacccagccttgagacagctgctgtgagggacagtactgaagactctgcagccctcgggaccccactcggagggtgccctctgctcaggcctccctagcacctccccctaaccaaattctccctggaccccattctgagctccccatcaccatgggaggtggggcctcaatctaaggccttccctgtcagaagggggttgtggcaaaagccacattacaagctgccatcccctccccgtttcagtggaccctgtggccaggtgcttttccctatccacaggggtgtttgtgtgtgtgcgcgtgtgcgtttcaataaagtttgtacactttcttaacagtgtctgatttgccgccctgcctgccctccccagggccccagaacaggggttcacgtccactgccaacactcccctcccctaccccacagaaagacatacacagccttaacctcaccagttttatatttgctgctgcccacatcggctgtatcacattaccccctagtccccagagctgtcccagccaccagccctgtgacatcgtagcccagagatgggctagtcagcaagcagcaccccctcccctcccaggggtccacaaagaacgccccctcccttcccagccctcacactagcagctgaggctgggtcacccctcctgctttcccacaatagagctttctatgtacagccacgtctacacaggcactgcttccccccagccctcctccccggcacctccccgtgggggtctgga

SEQ ID NO: 2337 - DNA, 3095 bp, Homo sapiens
atattccccagccccatctgacccccatttctttgtcccacctcactcactcaatcatccctggccaccctgccacctttctcgctagccatcccatccacatcattcccgcctcagccatccatcctgggcccttcacctttcaccctgtcccacatgctgccctctaccccaccctacttgctccacggcctgctgcagcagctgccactgcacttcaccttcacccactacttcaccccatcttctcaggtcaggacctgcaacatccccccagccatggcacgtgagttgggggatgggatcctaggtagggccaggggaggagacccataaatgttcccttgggggtgttgagccattaataccagcaagtagaagctgggatgggcagtgtctgacagccaaagaattgagttttggcttgcaggggtgggtttagatttgaagtttgctttcagtttactatcagggatttctttttcctgtcctcctctcaatttgtccctccctcttctgtgtttctaagctagggaacaccagtaagtgctacccacccctctgcagcaacatctccaaactgtcaagtttagataatcccctcctccctctgcttttttcctctgctcttcccttctgtaaattttaaaacattttcctcccctctggccagtgggttgtcaccagagcacttgctgtgggcccatctggtcttgccttctcagcgccacagggaaggccaagctgttctagtggtggaagtgccaccattttggggtagtatctttgaccatctttggtgacgttacgttatcccaggtgaggtggaaagcgtctcacctggaacctgatataactcaggctgcaattccatccagttcccacatcaacggagccacacatttggcactgttatcttggtatccctcatcccagaagaggcatctccatatcccagaaaagaagatcctatcatgaataaaagctgtatggcccagagaggagctcatgtgtctaaagtgaagggtatattttcttctgttgtgttgatgtttccttcttaatttataggatttttttaatgtaaaaaattgcactgaactctataaacgtaaatgctgctttttgtagctcatataaaaaaggttccatatttgtagtatactgcaataatattttttacatccagctctttaagtgatcctcgttctggtggctttgtgtaaatatgtttgccctagttgaattaagaaactctaaaggttataaaatgaaaacaaaaaataaaatatttgttttctgctagatgcaaaactgactaagcatgtatattttaccaaacttatgtattttttgaagttatgaactataaaatgttaaaacattttttgctgggacaaaatgttaagtaatttgcagtatgtagtgcccccagtattgggatttttgagctaatgggcagcagtcagctgggggcttctgagggatgctcatctttaacagtctccctcatgtacttttgctgttttacacagagaaacaggtagaccccacagaggagaaggaggggattcaacagctttattgtctggaagcagtgagatttggtgattgtctggggggattcctgggtttccctgggtaccttgttccaggcagtcagtccatttgccttcctagtacttagccccctctgacaattttttttttaatgtgccttttgggttggtagaaacggaagtagaagtaggctggaggatgagttgggacagtcttccttttgttgggaggtgagcacatttacagatattttgcttcatagtttccatgccctctgcccagctcagtttagacagtaaacgttccttgtttcttttctcccatgacactgacaagaggaattaccacctcagcctcttttgcccctcttcttgcctttcacccaggctctcagccctaattaacacactgacccaaaggtgcttgtgttgcaggtcccatctcctttgatgaggttaacaattcccactttggcattttcctaactattcgtgtggctagaattggttggttggtcacttgacaagaaaaaccatacttacctgggccaaggctctgttcctgccttcgcaaattctcaaaagagtaaagtttatgaaaagaaagtggcaggcaaacacaactcttgactgccctcccaccctcctacctgttcagtactcatctgattcagaagcatcacttcttggataactagcactggaaaaatgaaatcatctgtgtaagtgaagggactcatttttctttgctttcagcccatgtaaataaataatacagtattaacattttcgtgctgcttcccattagcttgtagattgagccatactctggctgcctctttgccttcctaggggcattttctttaacttccagaatagtgattttaaaagtaaaaataaaaataaaccttacttacaagcataacagattgtatttaactttatcacatatgatagagatatatatgctgtaaaatgagggaaaggaactttctaataaaccaatgatttgtggaaacttagcagagtctgtcgtaattgttgccccatccactcaaagttaggtagggttggaggtgtgggttataaataacatcttgtttgacatgaccaaggaatagattcctgtgaaccagttagagatgtttgcagttgtgcttctgaaagctcaggctacgcaaagagagaggaaagatgatggtgtgggaggtggtaatagtagttaatttctctcagttgtaggtagatgtattgggatgtacacctcctttccacttcctctttcccacaagaggaaagatttccttccattttagatatataatctgtgtgtagtagaatatatggtgtatatataggtgcttactaaatgggtgtggaatttctggctttgaattttaggattttggactactttaagggcactgagatgacaagaatcatctgccggacttttgtcctccaggtggagttctgtatgccagtcttcagttactctcctcagccctttaataccactacagtgtttgagcacct

SEQ ID NO: 2338 - DNA, 1167 bp, Homo sapiens
atggatgtttatagcattctttatttgtaattgccaaaacttggcagcagtccagatatccttcagtaggtgaatggataagtaaactgtggtataccaatggaatattattcagccctaaaaagaaatgagctatcaagccaggaaaagacatggaagaaccttggatacttattcaagaatatgtgaaagaagccaattggaaaaggctacataatgattgcaaatatatgacatcctggaaaaggcaaaaccgtagaaacagtaaaaagatcagtgattgccaggagtttgaggggaagaaaataaagggatgaacaggtggacactgtggattttttgagcagtgaaattattctctatgatactataatggtagataaatgtctgtatacatttgtcaaaactcatagaactacatcaagagtgaatcttaatgtactatggactttggctgataatgatgtgtcaatgttggttcatctattgtagcaaatgtattataataaatgtgcaggatgctgtgtctatactttcagctcaactttgcgataaacctaaaactgcttgaaaaaataaagtctgtctatctgaaagtaatcacaaaagttaataattacaataaactcatattcagtatttctaaagcacttcttccaaagagcatgtgtaatttaaaactttactaaaaaactgaaaggtaacaaattgaaaacaatgattacctctaagaaatgaaacggagaaaggagggctttctttcatgttttacttgttacagtgtggcctaaacttttaacaatacccattttacatttgtattatttgtgtttagtagtatattttaataaagggggccacaatatactaaaaaattaaagacattgcttgcacaacctttcctcacctgtgaccaggctatcagactagatgacatatttagaggtaagattaaagttattacaaaaattgttaaaaaaaattttttttaagttctccctatgagctcagtctaataaaatgtctcaagaaaagcattttacaaaaaaatgcccttaatgggcataattttaacaatgcaaatcacctttaaaagactgtgtgcctgtaatcccagctattctggaggctgaggcagcaggactgcttgggcccaagtttgaaaac

SEQ ID NO: 2339 - DNA, 1099 bp, Homo sapiens
agccacaagtgaatacagttcttgtcaccagggttgccctgccctcactcggcagggagttctgacaccccagggcccgtgagctacctgcttgagcccctgtttctggggcaccttcgaggaggcgttgtggagggcatcgccccctgtttattcacaacaccctcaggggcaaacaggcctgggacccgctgacaccattttgggtagctggatgcacccgacagcagtggggtccacacactgagctccagctggcactgcccactcaagggctgagtggaggggcccctccggccagctctgctccaccagccctgcaagctgatgcagggcgggggaagggctgggtgttgcactattgctgcgctgccttaaggcatctgtcctctggtggtgcacccgtgcacacaggtacagtgcatctgggcacagcttttggatccacacctctgcacaagtgtgaatacctctgcacatatgggcgtatctgtgtgtgctcgtgtatatggggtggggaacatgagacttcctgtgaccagtccaccctggctcccagctgtctgtatcctcctgccccgccctggcgagtgcctaccctggcagaacccagggaggagtggaggctgcctctgcctgggcctccacacagcatcctgtacatacgccacctgggctgggggtggggaggcagggccaggagcatcgattaaagatcacatcctggggcttccagggagctcacaccaaccttgcgtttctctcctgtctgtgaatggccatgctgtgacttgtcccctctggctcaggagggagcatgataactggggtgctggaggcgggaagggagcgcccaggaccagctccattcatggtgaggaaacagggtggaggcctggccctcccgcttccgcttcctcgcttcctcggctcttccaacaaagacagttgtgcccctcctctggctccagcaaagcaggaggccaggcgagtaggaaagcattttcccaaaagtctggagacccaacttcccttttatggctgaagccaaagaagcctctcctcacctcccaaaagattccagaacgctggacaaaac

SEQ ID NO: 2340 - DNA, 1099 bp, Homo sapiens
cttgcttagtctgcgaccacctcgggctttcttatatttgccccattccctgcagggcctcagtgaagatgtgagcatcagcaaattcttcgatgatcctatgttgctggaacttgccaaacaggatgttgtgctcaattaccccatgtgagtgcgtggactcctgggagctcctgctccctacagtgggctgcaactcctgtacttgaagctgagacctcatatgacgtggccttcgtgttgtcagagagtgtctggaagctgctgttgccatcttgaacaactcaccaacctccaacccagagccccagtgagagaggagcatttggcctcctgcttccttctgtggcctctgccgggctccattcccaaggaaaagagaggagcttgggctcacagaaagagaaggggatgaaaccccaaggggccctatctttgggatttacatggaattttattttctacaagtttgaccttagccatggtttgcaagtgaacagaacattctgacctctgtcttgctctgctcctttcatcctcgtctcccctgccccgtctggtgcttacattctgaatatatgtcatctcccaagaggcttcactgcctctgcttccagctgcagcctccttcctgcctgggtccccagggaagccgcctgccttttaattcagtgttcccatgagcgccaaggccccattattgcccccttgctcccactccatgctgcttctgggtggaacctaagatggcttgggagttgttgggttcctgcgatcagaagtctaccccaccacctcctcaggaaactgctgcctcccctaagaatcttccttgccctggagtagggggccagagcactttgatttccagccatttactccaagtcctctccccagctaccaccagtcccttactctgttctcccccagtgaaaaagagtctgttgattttcctcaaaactgctttattaggaatgtaccagggattgagttaggggagttggacagccccggctcctataggagtcctacttctctccagcatcctgtgccatcctcttgacgtaatcgctgtacattgtgtacacagcacctgtgt

SEQ ID NO: 2341 - DNA, 1217 bp, Homo sapiens
cctacggggccaccggggctgggaagacacacaccatgctgggaagggagggggaccccggcatcatgtacctgaccaccgtggaactgtacaggcgcctggaggcccgccagcaggagaagcacttcgaggtgctcatcagctaccaggaggtcggctgcccctgccctgggccttgttctcacaaccacccggggggaagtgagcccatggggtggagtgagctggtgtgggacagggtggcaggaaatggagagctggcacccctcaaggagatagatactgctcagtgagatgctgcactagagacacccgcctgttcaccctgctgtggtcatgtaacacagtcctgggaagcgccacttctgtgggtgtctcagatacatcccggcctcagctcccctgtccagccgctagggagaggtttcctgatgggccgctctccctcaggcctcttcctttcttcctttctcaggtgtataatgaacagatccatgacctcctggagcccaaggggccccttgccatccgcgaggaccccgacaagggggtggtggtgcaaggactttctttccaccaggtgtgggattgggctcgggtaggatgatcggccccatgggtccttggggttccctcacaaaactgtttggggatgccctgggtcctgtgatggtggtagcagtggtggtggtagcaagggggtgatgtagattctgaagagcagcccttcctgttaggggaaaagtcctgatccgggaacccacagccccgttcctgggcttctcctctgtagccagcctcagccgagcagctgctggagatactgaccagggggaaccgtaaccgcacgcagcaccccactgatgccaacgcgacttcctcccgctcccatgccatcttccaggtgaggtcatgggtcagagcctgaaaccagtgcccctgatgcccatctccccctcacccctgccatctgccttcagatctttgtgaagcagcaggaccgggttccaggactgacccaggctgtccaggtggccaagatgagcctgattgacctggctggctcagagcgggcatccagcacccatgcgaagggggagcggctgcgggagggggccaacatcaaccgctctctgctggcgctcatcaacgtcctcaatgccttggccgatgcaaaggtaaagcagcacaggccagtattctccccaggatagcaa

SEQ ID NO: 2342 - DNA, 1211 bp, Homo sapiens
tgtcacccaggctggggtgcaggggcgcaatctccgctcactgcaacctccgcctcctgggttcaagcgattctcctgcctcagcctcccgagtagctgggactgcaggcgcccgccaccaggcctggctaattttttgtatttttagtagagacggggttttaccatgttagccaggatggtctcgatctcctcacctcatgatctgcctgcctcggcctcccaaagtgctgggattacaggcgtgagccactacgcccagccaaggcagtcttatgatcctaaacctcattttatggatgagaaaactgaggttcagggaggcaagcggcttgcccggggttgcagcacatgtgagtggaggagctgggtgtgaagaagccatgccccaacctttgtgccgtgctgccgctgcttggtctgaggacgccacaaaccacgacgccagctcaaagtcacaccaccagcatcgcccagcctcctggcctttccctcacattccttcttggcaagagtggtacttttctaaacctcggccttagtggctgccgagccactgcttgcggctcagttccccatctgggccaagaggattgtgcgtctccatctatatcagctacccaggcagtcctagtgctggcgttcaaggggaagtgatccatgggaccttctgtggggaggaggccttggggcaaaagagggcccaggcacctggactctatttgtggtctcttttgcatcttccgtggatggctgcaggcaggccatttctttcctttgagcctcagtctcctagactagaaagtaaaggccagggggaccagtgggcatctgaagagtgctgtgggtctaccacagagagacaggtgtctccttcctctaggaagttggcctccaaggggatcctgcctcgtccaggaagcatgctgcctaacagcacctgaccttgccctgcctgttcagcttttgattgctgaatttatagtgttcgtttgcttttttttttttttttttttttagaaggaatctggttctgtcacccacggctgcagtgcagtggtgggatctcagcttaccgcaacctccacctcccaggttcaagcgatcctcctgccacagccttctgagtaactggaattctaggtgcacgccaccacgcccagctaatttttgtatttttagtagagatggggttccaccatgttggccag

SEQ ID NO: 2343 - DNA, 2148 bp, Homo sapiens
tccgggtcgggggttgcgggggacctctgtgccgtgctccggggccgagctctccccgccggcctctcccgcgtccgtccggccgccctcccgcccaacctctcccgcccaacctctcccgcgtccgcccgcccgcccaacctctcccgcgtccgcccgcccgcccaacctctcccgcgtccgcccgcccgcccaacctctcccgcgtccgcccgcccgcccaacctctcccgcgtccgcccgcccgcccaacctctcccgcgtccgcccgcccgcccaacctctcccgcgtccgcccgcccgcccaacctctcccggccccgcccgcccgcccgcccaacctctcccggccccgcccgcccgcccgcccaacctctcccggccccgcccgcccgcccgcccaacctctcccggccccgcccgcccgcccgcccaacctctcccggccccgcccgcccacccaacctctcccggccccgcccgtccaacctctcccggccccgcctgctggccggacgtccggtctgcaggcgcgcgctcccgaggtcccgcctcgcccgctgagccggcctgtaagcgctgcggagattgggctagaggcggaggcctgggccacggcggaggcgctgggtacgtagcgcgccacgcgggccggtgagagccagccgggcgccggggagggggcgggccctggccgcggctgctacgcggggctgccaccgccccgggcgacccaatttcgcggcctagtggggcgtacgggcctcttttgaaagcctgagttacgatgtattgagcgcgtcgtatgcggccagcactaaggcaagtgcttttatatccacggcccattgtcttgacagcaaccctaccaagcaacgtgttatttcctctgttttacggctgaggacgcgcaggaaggtttacagctagaaagggctggagattgtggattcaaactcaggatcagaccaaagccactgccctttagaactttgcgggccgattgattcttgaatctagcttctgccacttcagttgtgtgaccttggggtatctttccgatcccaagtttgctcatctgaaaaatgggaataaagctacagtatctgtcccatagggtgggtataaagtgctttactgttgagctgagtgatcatctccgattttcagacccctctcctccgcttccctctcccctgggaggccagttaaggttttagtgaaggcccccgggactggggcggcgtggatctcacgcccaccaactagtgagggaggccatccggccacccgtctcttccttccccagctccgcaaaggaggcgttggcatttcaggtgtttgcttacagagttttcaaagatttttcactctcccttagttgtgggaaaatgattcaacctacccaagtgaactttgacattaagtctcaattctaacggtgaggaaatggaagcctttgaatatgttttatgtcttaaacgtgtttgtttttgcaggagggagagtgctcattttacctgaataaatcaagattgagttggtgtggcacagtgctggcataggcctggggaaaggggtgaaatgctagagatctggtagatggatagaaagtggacagacgggttcgggtggtttttgtctcagcagggccctaaattcccaccaaatcctcctctgtctgtcttcaccaaggtctgaatctgtccccttggtaaataacgtttaaatggtctccgagcccctcttggtgcctgtaccttaaggagagaagaagagggctgatagctgaaggcaggcaagccacgaacttagctttgttttgaaaattaccctctgggccgggcacggtggctcacgcctgtaatcccagcgctttggtaggttgaggagggtggatcacccgaggttaggagttcgagaccagcctggtcaacatggtgaaacccccgtgtcaactaaaaatgcaaaaaaattagccggacatggtggtgcatgcctgtagtcccagctactcgggaggctgaggcagaaaaatcgcttgaacccgggaggctgaggttgcagtgagccgagatcgtgccactgcactccagcctgggcaagagagtgagactccttctcaaaagaaagaaagaaagaaaaaat

SEQ ID NO: 2344 - DNA, 1198 bp, Homo sapiens
tcagagttcaaggaagtattgtggtatgaatgccttgttaacaattatcattcgtctttggtgccattaccctggcaatataaagaaaataagcaacataaaagcaagaacggaaaaggccctttcacacaaataggacatcccttgcccagcactccctccctgaaagccgagggggcgcgagtcaggaggagtgctggtgtcctccaaatgccctttctggacctgggttcttcagcctgcttctgaagccaacaggcttgattaaggaaggtctggctccacagaaagctctttgtcaggggtagcacaaaacagattttttttaaaccctgcattagtatttactttttgttacagtggtttgagtccagccaatgacactggagccaaaaagaagaaaaagaaacaaaaaaagaagaaagaaaaaggcagtgagacagattcagcccaggatcagcctgtgaaggtaacaaggaggttctgttttttgtgactcagtcactttttcacatgagagagttttgaggtgaatgtataggatcaacttggattgacgttctccactggtattacttcaagatggaagagttggatcccagtgctgtcctctgctgccctagacctaggtgatgaaactgctctcagtaccctaaaagacacagcaggtcagacactgactcccaagcatggtgcccatcagaatggacaggtgcgtactgcatgtgctgctgtgccagtgccctggggagctacgtgtgacagcccctggcgcctagagcagtggttctctgtcttaagtccccaccgctctgacaatgaaaggccccccctttctttttgagacagagtcttactctgttgcccaggctagagtgtagttcatgattatagctcactgcagcctccactcctgggctcaagtgatcctcccacctcagcctcccaagtagctgggactgcaggtgcatgccaccacacctgtccagtttttttttttttttaattttttgtaaagatggagtctcactatgttacccaagctgggtcttgaactcctgggctcaagcaatcctcctgccctagcctcccaaagtgctgggattacaagcgtgagccactgcattcagccaaagacttcttcttaagacctttatatatttgcaaacattctcttaatgccatagtcattataatg

SEQ ID NO: 2345 - DNA, 1177 bp, Homo sapiens
tgccaggagacttggggagcaggacacttgtgggccctcagttcccctctgtcctcccgtgggccatcccagcctccttcccccagaggagcgcagtcactccacttggccccgaccccgagcttagcccctaagccctcctttaccccaggccttcctggactcctccctccagctccggaacctgagctccccttcccttctcaaagcaagaagggagcgctgaggcatgaagccctggggaaactggcagtaggttttggtttttattttttgagacagggtctcgctccgtcgcccaggctggagtgcaatgttgcaatcatggctcactgcagctttgaactcccaggctcaagcgatcctcccatctcagcctcctgagtagctgggactacaggcacaggccaccaaacctggctaatgtttaaattttatgtagagatggcggggggggcgggggtctccctatgttgcccaggctggtctcgagctcctgacctcaagtgatcctcctgccccagcattccaaagtgctgggattacaggtgtgagccactgcctggcctggccgtaggtttgtaactgtttcatagaagagccctggagaagacagtagaatgagcctatctagtttaaaaaataaagaagcacgttgatttcaccaccgccactccctgagcacctctatgctgccacccccacaggcccatgaggagggacagggctggatgagtttcttgggcctctcccctcaacagggcatggacttggctaagacagccagggggtggcagcaggagatgccacagctctaaatagcccgatccctgctcctggcttaaagctgctgcgagtatcacaagactgtctgaggatgccaattcagcaggtcagcgcctccccacaacacacacacacacacacacacacacacactcacacatacacagaggggccttgaatgaggaggagacaggagtctgagggaccctcagactgccactctccaggcttggctgggctcaaggcccctgtctgctcagtagggcaaatcccaaggacacgggcttcccttcctccagccagccagccttttacacaaaggctggaaacgctgcttgggccgcctctatagaaatgccaggagagcgcactggacactaggcgacagaat

SEQ ID NO: 2346 - DNA, 1560 bp, Homo sapiens
cacaattccaatctcaaaatatatatatatatataatgtataaatatatataatttatatttatatatttattatatataaatataaatatatatatatatattgcctaggctggagtgcagtggtccaatctccgctcactgtgacctttgcttcccaggctcaagctatccttccacctcaacctcccgagtagctgggtagctgggactacacgtgcaagccaccacatctggctatgttgttgttgtagagacagagtttcgtcctgttgcccaggctggtcacgaattcctgagctcaagtgatccacctgccttggcctcccaaagtgctgggattacaggtgtgagccaccacatctggcctaaaacactattacccaatattttttcatgcctgtatctatttgcagtagttattcctggttcctgctaaccagtggataaaagcacatctctgtgatttggggtagtttcttgaaacacgtctgttctcccttcccagacacatcatctcagagttggagcacctgacgtttgtcaacacggatgtgggccgctgccgggcatggctgcggctggccctgaacgatggcctgatggagtgctacctgaagctgctgctgcaggagcaggcccgcttgcatgagtactaccagcccaccgccctgctccgggatgctgaggagggcgagttcctccttagcttcctgcagggcctcacgtccttgtccttcgaactctcctacaagtctgccatcttaaatgagtggacgctcaccccattggccctgtctgggctttgcccgctttctgagctggaccctctctctacctctggtgcagaactacagcggaaggaatctctggattccatttcccattcttcaggctctgaagacatcgaagtccatcactcgggccataagatacggaggaaccagaagctgactgcctcctccctcagcctggacacggccagttcatcccagctgtcctgcagcctaaactctgatagctgcttactccaagagaatggctccaagagtccagaccattgcgaggagcccatgtcctgtgactcagacctgggcacagcaaatgctgaggactcagaccggtctctgcaagagtgagtacgctgcccccactccttcccatcttctctcttccctcctttctttcctctcctcctccctttcttcccatagcatgtgattgtctgttactgaactctattagtaattaaagaaagccaagggagtcatcgacttctccagggactggagtagctgggaactgtagcaggcaatacaggcatagtggagaaagtggacttagaacagcttagagctggtttgggctccagctctgccccggtgacttttagcaagttacttggccgggtgcggtggctcatgcctgaaatcccagcacttgggaggctgatacaggaggattgcttgagcccagcagttcgaggccagcctgggcaatgtagcaagatcctgcctctaaattaaaaataaataaataaataaaacaaaaactgaaaaca

SEQ ID NO: 2347 - DNA, 1560 bp, Homo sapiens; identical to SEQ ID NO: 2346

SEQ ID NO: 2348 - DNA, 1560 bp, Homo sapiens; identical to SEQ ID NO: 2346

SEQ ID NO: 2349 - DNA, 1893 bp, Homo sapiens
acactagatagactggtcctaggctccaggccacaaggtttgtggcagggccttggagcaggaagcaggctggctgggactgggtcctcaaagagcaacttgtctgcctacagtctgtccagccctgggagcggcggaccttccccctggcgcacagtccccaggcggagtgtgaggaccagctggatgcacaggagcgagcagcccgctgcactcgacgcacctcaggcagcaagactggccgggagacagaggcagcgcccacctcgcctcccattgtccccctcaagagtcggcatctggtggcagcagccacagctcagcgcccgactcacagatgagcgggagacagccatctaaacagactcactaactattggcattaaagcttcagaaatctctgcgtttgatattcaaacatcatatgccggaaattttcacagtttttagtgaacttaaggaatttagatcctactttggtatttttttttcttgttttaatttttgttttgtttttgtttccatgttttcttgtcacacacctgagcacttcctcccgttggcaaacagaagttcaggatgagaccctgctggcctggtcctggcacatcctctgcactgttgaatcactggacttactgatcttagatgaccaccccctccctcacacctgtgggcagggcagaacagcctggcgggctacagtttagcatggccttcttgagctagggtggaatggggcagggtgctctggactcttaccccctcccctcccatctgtggcttggctctgctgtggccctcctggctgggtccccttggtttttcgtgctggaacatccccaccagagcctctctgccataactgccagctgctctccccgagtgctcagctggcagaacacctttcctttctcacccagaacttaagagactgattttttgtttcatctgcatttggtcttctctgttttgactctttcactgcagtaacctggctgtggctgctcaggttcccctcctcatgccccttggtacccttccctgtctgctctcccatgccatgtacacacccacaacccgtccttccacttggaatatttttaccacctatcctgatctttgaaggtagggttaggactacttaacctctattcccactcccctgcaaactgggggttgtgggaagtgagcagccatctccctgtgtgattttttttttttttccctctgattcactttgccatgtttccttcacatccagatccctgtcggtgttagttccactcttggtctttcacgctccccttgcctgtggaacattgtctggtcctagctgtggttcccattgttcccccttcacccttctctgttaaccttgtgcctgtctcctgtatgatcacatcaccaaaaagggggaggggggagaagactctttttttttggccattttgtaatcgtataaaaatagtagacaactgcttaatggttggggttttttcacaattttcaacattagtgatttttttttctgtttgcaagttaaagggtttgtcattgtttctttaaaaaaaaatacaataatgcaccatatccctatgcataaagtgcttcttctatttataaggttgaaaattctgaataacccttttagcattgaaaaaaaaaacaaaaacaaaaaatggaaaaaaaaaaccttgtattttgtaaatattttcttttcctgctttggagctgtgtaatggcagcgaaacatgtagctgtctttgttctatagaaatgcttttcttcagagaagctgatctttgttaatgtcttgattctgttcgcaaagcacagactagtgcttaaaaaaaaaaaagaaggaaaaattgaaaaaaataaaaaaaaaag

SEQ ID NO: 2350 - DNA, 1161 bp, Homo sapiens
gatagccaactccaaagggcaccattcacataatatcccgtgtaaataacacaccccctgaagtcttgggattccctgtacatcattgtatagcagtaaataacagtgaaggctagcagcttggcatacgactgtgtaggtcaaacatttgtgtggtagattttactactgggccacccttacaacctcttctctagaagatgttttaaagtggcaggatttccaacttttttttttttcataacaaggttaaaaatgattttgattcattgattccatatagttacatttataccagacataaaggcagaaaattgtttgaatgtgatacttagctgttttctggccccataggacagatatttttttaagtagttttagtgctgtttcctaaccagtttgtgtagtttgttagaataacaaccaactgctgcttttcatcctggagttgtgcctcgcaccttgactgtacctcagcccctctcattaagtgtgtgtgggtgatagaaattgagggactgtgttatagccaactctacgcctggctgtggaaggtggagagactagggtataataacctgttagtattccagcaggaagggggctttgttttatcacctcaagtaatcaaatccagttaatccttagttggaaatgtagaggatatataaccttggagaaaagcttgttaactttataaaaggggcttaataagagcaccacctgctggccatgaagatctgtggtattttgagagagcttgccaaaccctgcacatgaggctacagcaacttcccagcaggaggaagaagtgagcattacaaaacacccggaaaaagtgcgcctgagaaaatggtggaaagtaaggagccagacagccaggtgaatcgtggaatgtcagaccctagtcatcctgaagtcagggtcttctcattcatctttcattttgtttgaggaaacagtaacttaaggatgacattagtaattcgtcttattttcctgttatttacctgataaggatcagcaccctcttctctgaaaatagcagtttacctatgtgggtatggaatgtaggagacctctagctgaatggatctctggtgtgttctcttccatttcatatccctttttttgcttactttcaggtcccgtatccagtct

SEQ ID NO: 2351 - DNA, 1208 bp, Homo sapiens
caagggagaaaacaaaagattcagggagattctgtacaagtgaatgatgtgtacaacacccttaaaattcgggtttcatagaactgattctaaggaagcccattaacatttgcaaaattcatcattttctaaccaactgtagttctctagactttatttactcgtgtgtttgatgtagaggagaactcaatcactagaacttgagtttatttattgacttttatctttcagacatgatgtagttaatgtgcaccaagaaccttacacataagcacacacaggtagattaacagacatcaagaggagacctgcttctgctctagaatgcttctttgtgtctgaacattagcaaatagaggttgaactagtataagaggctttgtttctttgtgttttcttgttgtttatttattttgtttctttgtgtgttctgagaatactcttccttccccttgtatagtcttcagcctgtcttggcagaccacattccaggtgacagctctgatgctgaggaacaattacataagaagcaacgactgaatctcgtctcttcatcatctgatggcacctgtgtggcagcccggacacgtcctgtactgagctgtaagaagcggaggcttgttcgacccaacagcatcgttcctctttccaagaaggtcggtacagatgagagttggtcattgtcaagcagtgagccagatgctcagatagagttagtctcttgccaactttggtgttttctaaacttggctaaccaccaaggtcttctggggagctttataaaatactaggttcctgggccctgtttgctctggagttggatgttggaatcttgttttcagaaaacacaaagctcctcggtgactctgcagctagttttgaaaaccactgtcttgagctttttaatagaaatgggagagactgaaagtttaagtactgcccttaacactttgaaggagaatagtgtgccctctcaccttcactgttatcactgaaaatggcagtatagaatcctttgccctaaaaaagaatcttggccatgtgcagtggctcatgcctgtaatcccaacacttcgggaggccaaggcgggaggattgcttgagcctaggaattgaataccagcctggaaaatatagtgagaccttcatctctacaaagtatttaaaaattaagcatggtggtgcacacctgtagtcccagctattca

SEQ ID NO: 2352 - DNA, 1152 bp, Homo sapiens
tgctggtaaatctagttaccatagaacttgaaaggatattgaaagaatagttgaggactatcctgattggttttcatctacttagtctgtatttgtgtcatttcagtgtctgagtaggtggtttgtgattaacatttcacatgttatttttattgatttggcaagtaccagaaaacttgaaggatgaactagaggttatttttcttagcatttgtggtattagtactaaaaggggagtaagagagtagaaagaattctggacaactgttaagaattgttacattttgtctacctaggctcgagttcctcacttttaaaattaggactgtactttttggaagaatattgcttgttgttttgtggtgggaccaggctgtgatgggaaaggctgttgtcataggcataggcaggccttttgctttgctgaggtatagtgagcagcccggtgaccctccatgtagcctgcattgcatgcagtttccacagggtccatagagttagtgcaaagctccagcaggcctactcacctgcttttctcatgaggcaacctgggaccagtgtgtccctgtagtaactgtaattttttgttgtgttcacttattgcagtgaaaaaaaaatctgagcgtaaggttctgagtggacctggaaaggggtgggtgttgtagtgagagactgaagacaaaggcctgtaacagatgggtatctttttagcttaatcaagctattgctggagtgttatgcttcagaaataagtctcttggccgggtgtggtggcttatgcctgtaatcccagcactttgtgaggccaaggcaggcagatcgcttgaggtcaggagtttgagaccagccttgccaacatggtgaaacctcgtctctactaaaaatacaaaaatgaaccgggtgtggtggcgggcacctgtaatcccagctactcgggacgctgaggcaggagaatcacttgaacccaggtggtggaggttacagtgagctgagattgctccactgcactccagcctgggcgatagagcgagactcagtctcaaaaacaaacaaaacaaaaaatacaaaaattggctgggcatggtgacacatgcccgtaatcccagctacttggaaggctgaggtgcaagaatcacttgaacctgggaggca

SEQ ID NO: 2353 - DNA, 1302 bp, Homo sapiens
tagctttgtagtataatctatacttctagagaagtgagaagctgatgaaaactggattccctggccagaaaaatgcacagacctgtgatatttggcatactttttttagtgaacacgggaattccttactaatttttttctgtttaattattgcttagtttgatgtgtcttgctttaaatccatttatttcaacaagcttaaagagatttttttttaatggagatgatttaattttaacaatctgtgattttctctgaatcgaacttgtgttttggcacctttcaatctgtggtaacaaatgacaagaagggtgcaattcttccttcccttgtgcagggattttgcctccccctttctcccagatgaaagatatttgggtctctagaataactgtggtacagttagctccagagtgttttctttctggaggcagtttagacaacagcctcaagtagtgcttttgttaaaaatatacatgtttttaaaagtgcttgtatttctaatattcttttctcctttctcttctagtctgttctctggggaggcagtaaggggccgtggagctggcctcggcctcggcatcgggagaggctggacttcctgtctctctgtgctgaatggctgcgatggcgcccgctctcactgacgcagcagctgaagcacaccatatccggttcaaactggctcccccatcctctaccttgtcccctggcagtgccgaaaataacggcaacgccaacatccttattgctgccaacggaaccaaaagaaaagccattgctgcagaggatcccagcctagatttccgaaataatcctaccaaggaagacttgggaaagctgcaaccactggtggcatcttatctctgctctgatgtaacatctgttccctcaaaggagtctttgaagttgcaaggggtcttcagcaagcagacagtccttaaatctcatcctctcttatctcagtcctatgaactccgagctgagctgttggggagacagccagttttggagttttccttagaaaatcttagaaccatgaatacgagtggtcagacagctctgccacaagcacctgtaaatgggttggctaagaaattgactaaaagttcaacacattctgatcatgacaattccacttccctcaatgggggaaaacgggctctcacttcatctgctcttcatgggggtgaaatgggaggatctgaatctggggacttgaaggggggtatgaccaattgcactcttccacatagaagccttgatgtagaacacacaactttgtatagcaataatagcact

SEQ ID NO: 2354 - DNA, 1176 bp, Homo sapiens
agccagcccagccccagcgagctgtaattcctgcctgttacaagtgttaacacctggcctggggccttcctcccccgcagtctccaggtgcctccctgggcccagcccactgacccccacggggtttgactgaacatgttcacaagcctctgaaaggtgggtggaggtgggagtgggtgggagaggcagcaggacatctgacagatggggaaactgaggtaggtcttaggcaggtgctcgagtgggaggatgggtcctgggatggcgagaactcaggtgtgctatttcccagctcactgcccttgtcctctgcaaaacattttcacccaagctgtgaggcagggcaggctggggactcctgggtgaagtgtaaggaagcagacccagatgggtggccactggtcctcagtcacacagcggcagggtgagctcctgatctccagcaggccccctccatctgcacgtccatcgctggaatgtagcaggtgctgggctaggccctaataacataggttcatccccccaccccagcgcccccaagaagaagaagaaagacaagtttctccaccaggagctaactgggactgacaaggggaattcgagaaatcagtgctgttgtttcctgtcccggctctgtcactacctggagaacatctcttccttccaggggtgtcagtctgaggccccttagagctgtcccttctggtcaaccttctgtcaggactggggtctgagcagtgtggactcagggtgtcatgcttgagggtccgcgtggacagaaatcccagctacatgacttcccctgtaaatccttcctggggaatgcatgagctgggtgggccaaagagggcaggccaagatgggcttagatgctcaaagtactggaatctgactgccaggcggggggctgggttggggagtgggggcagaaatgggatcaggaatcagaggcccatctaccctacagccccagccctaaccctgagaaggtgactcaccctccaccccagctccaagaccaaagaaaaacaacctcagagagaagggccagtgactctagtgcctggacagacaggacaagctggtgtcaaggaagcctgtgcccctgcctctctagcttgccatccctggccagctgtgccccctgcagccaccttgtgagacttttgcttcctg

SEQ ID NO: 2355 - DNA, 1232 bp, Homo sapiens
tgatgtcctgattcactttattctctttctttgataagaaactaaaaactttcctatcattcagtaggcttatgcaaagttatactatcataggatttttcaaattcaaaaaaaatccagttccttaattcctaatttatagatcttaacagaaaaatcctgagattcattctaaatcagttctacattctcaaaactctctcagagactcttatagtcagcattcaggaatgaacttgagacttcctcagtccctagttttgaggcaccctagttcaggcaccatgctcagggctgcccttaggctctcaaatgttcttaaggcaccagtgaagcaggggcaccaaaaagactgagaaaaatgcaggtttaattgaagaactcagaattttgcaatcagaaattctggaaacaggttattttactttcagcatacatgtgatttttgtctgtaataatagttaagtagtttgaattacgttcagggagaggttatactagatgtcttccatttgcctttcagaacccctcttcatcccactctggaccccagcgggtgctgacccacatggactgcagcatgaatggctcccttgccctctgacttcagcttctgtttatccaattattaatatccaaagaagatgagaagatataaggaagagatggtcagagtactctggctttctcattgccaggtcacatgggttgtctgtgtccctttagcaaagaccacagctcttaccaagcagccccctctagcttctggctccttctctttgctccttcacatctaggaatagaaagaaaggagaactcgagagctgggtgcggtggctcacgcttgtaatcccagcactttgggaggccgagacgggtagatcacctgaggtcaagaattcaagaccagcctggccaacatggtgaaaccccgtctctactaaaaatacaaaaattagctgggcatggtggcgcatgcctgtaatcccagctactcgggaggctgaggcaggagaattgccagaacccaggaggcagaggttgcagtgagccaagaccgtgccactgcactccagcctgggcaacaagagtgaaactccgtctccaaaaaaaaaaaagaagactcaagctgggtgcggtcactcacacctgtaatcccagcactttgggaggctgaggtagacagatcacctgaggtcaggagtttcagaccagcctggtcaacatgatga

SEQ ID NO: 2356 - DNA, 2064 bp, Homo sapiens
ccaagatcacgccattgcactccaacctgggccagaaagcgagactctgtctcaaaaagaaaaaagaaacaacctgcattttgaaaatctgaggctgggcatggtggctcacgcctgtaatcccagcagtttgggaggctgagactgacagatcgcttgagtccaggagtttgagaccagcctaggcaatatggtgaaaccccgcctctacaaaaaatacaaaaataagctgggtgaggtggcatgcacttgtggtcccacctatggaggaggctggggtgggaggtttgtttgagcctgggaggtggaggttgcagtaagctgagattgtgctgctgtactccagcctgtgtgacagagtgagaccccatcaccaaaaaaaaaaaaaagaaaagaaaatctttcttttcctatcttttctttcaagcctagcttcctttttatagttacatttctgaaatttgcatgtctgtggttaaagccgggttggggcagggactcacttgaatcagtacttatttggggcctggggtgtttttcttcttaagatcacaatcgaagcaatgaaaagtgacattgatgaggtggctttacaagggatagaattctggtccaatgtctgtgatgaggaaatggatttggccattgaagcttcagaggtgagctggggagaactattactctgaatacgctttgggacatatctcatttgtggatgatgttccccttctaggagaactttattctgtctgggtttagagggtatctccattggcagagattttgatttttctgctagccagagcccttcatgaaggaggcacatcagtaatgagggctcacgttcttgccaagcagtcaggcatgattgatcgtaaatagtggtattatcactgtgaacacaagggggcagcaggctgtcgcagtttaccaaggtgatgcctgatgctgaattatttccttttggaagtcctaatgcaagcctaggatgtataattgatactttactaactctggtgaaagagtcagatatggaagagaatggggagttctgtacttgggatctttgaattcaagttttgtttccagcttggtctttacacacttttatttcaggacaaaaataaaaaggttttttttggcatctttaggcaaactgagtgtgtgttgatccaaggaacactgaaatatcaggttgtccatatgaattgaacttatgaaaaaaaagttatacttaatgttgccttggacctatattatatggcctaaaagattctcactgaagtagaccaaaaaattagcactttccaagatcacattgtatgttaccatttgtccttgtatgtttctgtttctgttaagagatccctgttcggctctcattgtatgcctttagtatacagagctcggttgcttttgtctagaatttgctttgtttctcctcaggcagcagaacaaggacggccccctgagcacaccagcaagttttatgcgaagggagcactacagtatctggttccaatcctcacacagacactaactaaacaggtgagttaccttccaaatataggtaggtaagctgtggaaccttactaagagtaaactgtggaaactttccatggaaggaacttcgcagcccatcaactatttgatgttctgttgttgatgacttagaaacagctaagctgcatctataagatcccctaggctctgacttctttgtgaaggagaactgagtcttaacatctcagatgcatcttgctcaggaatgagccacatgctgctctgatttcctgagtgctccattgtccaaactcataaaagaaaggtgctctgtcaaagcttcagtgaagcaaggttaggagcaaagatgtgctggttttaggccacttgcgtatctgttgtaatatccaggatactttcgtgagttcacagggtgtatgtttttaaaattctaaggaagttggatataagttattcagatgctaatgaaggaccccaacccaagaaagaaacccttctactgatcctttaagataattaacttcaattattaagattcag

SEQ ID NO: 2357 - DNA, 1593 bp, Homo sapiens
ctcagcctcctgagtagctaggattacaggcacaagccactacacctggctaatttttatatttttagtagaggtggggtttcaccatgttgaccaggctggtctcaaactgacctcaagtgatccgcctgcctcagcctcctaaattgctgggattataggcatgagccatcacgtctagccaggaaaattggggtattttcttcatagcacttcagacaacctgttaaattgttcacatgattttttaccatttcaaaccattttttcctctataattttagcccatttccaaaagggccattctaaattttaactgtctggagaccataatgaacatagccattggctcaaaggacttgaagatttcattcttggatattgtgttttcaaactcaaaccaggtctgcagacataccggttcctgagttcttatttttggcaagacattgtctatgttcttccctgtccttttcatttgaggctttaagattttcgctgtgttctttacagacctgatggacaccagaacaacctgaggagttctgcatatgaatctctgatggaaattgtgaaaaacagtgccaaggattgttatcctgctgtccagaaaacgactttggtcatcatggaacgactgcaacaggttcttcagatggaggtgagacctaagagtgcccctgactatgggtgggaattgggtagtacttttgacacctaggtctgttttccagactgttctgtctttttagtgtttaagtatatattttctcagaaagataataaagcttatacaaaaaacattgcaccttaacgttagcattgtttgtcatggtttactcatatatgtgttacactatatgtattatgggttttttgttgctgttgtttactttcctatgttagtattagggaagattattaaatggtcccagcaaaagtggaaggttttcatgtagagtatgttttcttattttctttgtagtcacatatccagagcacatccgatagaatccagttcaatgaccttcagtctttactctgtgcaactcttcaggtatggtggtgccttatgacttaataactccaggttggagaattattagtatctcagtataacaagttcgtgtacacacagaactcgaaaatggtatagatgatgcggatcagaagctgttctcagaaggctttggtctgtgattggttgattgggagaggaattccccacctgccttacctgtctgtctagaaagattcaaatcctacttatttacagatggtctagatgtaatcttgataaaatcaaaccaacttgacttctcctaattcaacatacactcctcagacctctcttcctcactcgtttgtttcaactaatgtcactgtgtagagaaggaaactacttaatgtgtgatggttccttccagatgtatagctcatttgtgttggcagcttgaatggttttggtttttttattttgaaaaccaaaaaactcttggtttttcattaggttattcaagcctagctcagtcagatttggttcccagctatagttcacttggctaaaaataaagccttgaatttgtaccgtca

SEQ ID NO: 2358 - DNA, 1193 bp, Homo sapiens
attggctctttgagtttccctcgcaccctctgatgtaggtgttaataagagcaggtcaatggcacataggacaagaagaaagagtgtcaatccttgaaatgttgacaaattccattcaggcctaggagcatgtaattgtaggagtcagcattattggctctgttgggtatatgtgatctcaaagattgacctttttttccatctgttttcagatctgttaccattgggatgataacctgaggacccccactggaaatctcccatcttttgaaaaacctggaagtgaggagtgtgcacggatgctgaatgtttgggaatgagaggatgagtgagtgaggcttgaaaacacaccacattgaaaatcctgccacagcagcagccgcagccgccaacagcagcgctgttagtgagctaagtaagcactgacttcgtagaaaaccataacatcggccatcttggaaaagagaaaaacaatggagttacttatttaaaaaaaaagaaagaaagttatctcttcccaggagaggctagaagtagcttttctgtcttttggccagtgccgagtggaatgcctggtttgggggaggaggagggactgggttcagctgtggtgctttgttgtaaaaggcagcctggcctttgctactgaggagaaagatggagcctgggtctcaagcccaccttcgctgtacctttgccacatggtactgtatgcttgccagctagaaggagggtcagggattttttacagtctgagaatgagtgtgtgtgagtgaggcggtatccacattttcaacttcaagtcattgcagtttctttttcccagaaaacaaggggttagatgttgcatttcataaaactaaccgaagttttgtttactgatgcagcacaagagatgtaaaaaaaaaaaaaaaaaaaaaaaaaaaaacacacacacagaggaaagacgctctttaggttttgttttgttttttttttttggttttgttttttgttttttttactctagggaaaacactgacgaatggtcagagctcctatcctgatcttttcatcaaggcgcctttcctaataatatggttcaactgtgaatgtagaagtgggggggaggggggagaaaaagaaaactctggcgttagaggatatagaaaaatataagtacaattgttacaaataacgcagacttcaaaaac

SEQ ID NO: 2359 - DNA, 1111 bp, Homo sapiens
gtatttgcaacggcctcccagatcggcgctaggaccccgccagcagacgtctcaatctgcgtggagaagacccagtgcccgccaggggaagcggctgccaggctgggctctcgagcgccgcctgtcgcaatcccacggccgctgcagcgcaccccctcccgtcccctgccctgagcccgcctcgcgtctccaattggctgtctccattctcccgcccctcccgagctcagccattcggagcctggggtgggcggggcttgaggcctgagtggagcgtaaaccctgattggctgtacggaaggcggcgacgtggccgaaggatgcccgtttgtgtctaaacggaggctcggccacaacgccactggattggtggtagggcggggcgggccacagtctccagcctgaagcggaagtggaggaaagatggaggtgtggggacaggagctgggtgtgctggggactggccgcggacccctaacctgtgtctccggtctccctccggaagcggctcaacccagcccatcgctctggccccgttctggccctgcagggtggtggttgggacgttgaaatgagcgcgcgagtggtacgtcctctctccgcgctcacgcccccctcctcaccgtgtttcccgccaggaccatcagcacgtgcccatcgacatccagaccagcaagctgctcggtaggagggggcgccaccgcgcagctggctgtcggggggaggcctgtgcgttgccccctgtgtccaatagccgggagctctgacccctgaaagcctgagtcgagatgctgaccactggcctcgttctatgccccatctgtggccagacctgcttccctgatagcagcgggaacgaaccatatgtacagtctgtttgacctgcgttttctcctttaataacatatgttatcgtatcattcagggacaggataaatgactcgctttaaaaacagtcaaccactgccgggcgcggtggctcatgcctgtaatcccagcactttgggaggccgaggtgggcgaatcacctgaggtcaggagttcgagaccagcctgaccaacatggagaaaccttgtctccatgtctccatgactaaaaatacaaaaaaat

SEQ ID NO: 2360 - DNA, 1375 bp, Homo sapiens
ttatttgggggagggagggatggggaggggagaaagggagatgggtagcatcattttgattaacatttggggcctgataggggaaatggtgaagcaatggaaaagaacagacaactaatgatttgcttctatgtccagaatattttacctttaaaaaaatgtcattggcaccataaataaggactgtgagagactgtttaaaagctgtgaaagtctgaaacctataagccaaggtgttccctgcctaaacttattgctgttcccacaaaggactaagcctgttcataagttaccaaagttgccattttggagatggaaattgacgaggagggaaggtcttttattggagagtatacagtacaagcagatcattctgccttagaggtgctaattcccgaaattagaagaccctttcttttccagtaacgaagttataaatatcagcttgttcatccaagccactggctgaggtgttaggaagaggaagagggtggtagaggaggtaagacagtagggaaagacaagggcccatgctcttagtggggaaaactcttggagccgtttactttgagctttgaacactgaaaccattgttggcagggttcagtcactgacagcacaagtttcactgaattgatccaagagtttagtgatttcaaaagccttggtctcaggagaagattaaactttcatattgggcagtggttcactttaaaacacacacatacacacacaaaacaattttttaagaaatcctaataagtaacatacccaaaatgctctgtcttgagtcatgagaaccatcagttcttgatattgtctagacttgcatctagagctacgttgtaaaattcttttaggcatgtgttagatttctgtgtaaactttgtttaaatgtaaacttcatactacattgtcagtttttgtcttaataaaactatagatttataatccctgatttctgtcttaagtcttaccaggaacccttcttgccttataggttcagcctgttggaaatggcttcctcacttgaatggttttatttcttgaacactgtaggcttgaaaatctagtgcctggcctgaatctttaagtggtcacaccatgttaatttagtaaatacttactgggcatttatcagttgctgcagaggttgtaaagatggtcgcatcatgctgtcttcagtactgccaaaagtttattgagcactctgacctgatagcacttccaaactatggtatatttggaaacatgggtttttaagttaggtttagatcctgcctatggtatgtaatagattatatgaccttggctaaaatctacttctccaaaattttccaggaatttggccctgtgtttgcgcactgatttaaaa

SEQ ID NO: 2361 - DNA, 1156 bp, Homo sapiens
agcaaggttcgatgggcagccccctgtgtgggtatatttcctagcagtgtgctatgacagccacttcccagtagggctaatggagagaaatagtggcttggcagccctacaattgtttgtactcagacttgaaattcattgtgtaatatttttgaaatacatttgtctctgcaaggtgctaacctaaacctaaccaaagtgcaagctctagacctagcctgaacctgaacctgaacctgagccttagcctcactcctaaccctaaatctaaatcgtttccaaaccctaactctaatcctaatctaaacttgaacccaactcaaaatgtaaacataacctgatcccagatcctaatcctcactctaaaaacaatcttaacattaaccctaatccttattttaactcagtcaggggtgattacccctcttcttctcagggaatatttggcaatgactagagatattttggggtcctacaatgcagaggggaaatactagaatctaatccgtaggctggtccaagtgcagtggtgtttacaactaactgatcacaaccagttacagatttctttgttccttctccactcccactgcttcgcttgactagccttaagaaaaaaaaaaaaaaaaaagaggaatctaatgggtagaggccaggaatactgctaaacattctaaaatgtttaggatacacagaacagcaccctcaaaacagaattattcagccccaaatgtccatattgccaactttagaaatgctgtctcaactttcaccttaattctaaaataaactaatactattaaccttaactttaagaataaaccaggcccggcacagtggttcatgcctgtaatcccagcactttgggaggccgaggcaggcagatcacctgaggtcgggagtttgagaccagcctgaccaacatggagaaaccccgtctctaataaaaatacaaaattagccaggtgtggtggcctaaaaatacaaaattagccaggtgtggtggcgcatgcctgtaatcccagctacctggggggctgaggcaggagaattgctcgaacccgggaggcagaggttgcggtgagccaagattgtgccattgcactctagcctgggtaacaagagagaaactctgtctcaaaaataataataataa

SEQ ID NO: 2362 - DNA, 1150 bp, Homo sapiens
gagtgaaggtgctggaaagggagggaggacgcgaggggaaaggcctgtggggagccgagggcgtcagagagacccgggaaggaaggctctcgggtgggggagccaggagacctgctctccggcgcagacaggcggggcccagcgctctcctggacgcccccgcccgcacagctcccggcgggtgctctgaggcctcactactcgagcccacccagcatcccgcgcgcccttccttcccgaggaactcgcctcagcctgatcaggcttcctggtgagaactgaggagcggactcacttgatgtttcctggaagcagagcaaaatgctcttgtccctgtcgcgtctcattttgtccatgtcccccgtgcacggttcaatggtagattcgctgtcccctcagcgggggccttgaagactccctgatcccagacctgtcgtctctcccaccccctccccaaagccactggaaggagcacatactacctagaagtaagaagaggagcctcagaagaaaacaaagttctattttattaattttctatgtgttgtgtttgtagtcttgtcttagctctggacgtgaaatacttcgatgatgatgatgatgatgatgatgataataataataataataacaacaacaacaacaataataaagatgtgaaaactcgacgctcggtcacctccaatcctcccctgccattttttcctctctcctcaacccccagcctctccatctttcctgagccagaattcttcagcaaaggcgagagccctggcccgccgaagcgagccctgttcgactgggaagttacagctgagataaaggctggagcgatcagtcctgcccaggccccagcgctgcgtttccctggtgctgaggctcacagccgcttctccccgtgcagacttgggggatggagaggtgctgtgtccctctcattctctagcctttcctcgtgtatacacagcactaagggagccactgaggcccctaaagctctctggcggagacggagccatagtctgggggcctctgcagcgcttttctgtcctcaccttcgcagcgacccctggtctttggcccgtccacatggccaggttttttcgccagccttggccctccgctcctggcctgtggctctggagactga

SEQ ID NO: 2363 - DNA, 1190 bp, Homo sapiens
gtcgaagcaacgcaggggttaacttttctgaaaacacaattaactttttccaatcctgcgtggggtgggggagagacatatttatttaatcacccgggagtggggtggtctcaatctaaacgttccctcctccctcaaaggcactgagcctgtttcacagatcctacgtaggtggaacaggacgcgttgtgttgttggggggagagaggagaaaggcgaaggagaaggaggaaaaaaaaaaaggttgataggtttgtgcgcgggtccctcgtgcgggctgcgctcctcctgggtgctatttgacaattcctgcctctgccattggtcagtgttggatcagatggttgtatttccttctggccctcactggcacctcgccatcccccctcagctaaaacccaatctcggatatactactaataggcgcggcgctcggactataaaacacaacaaatcataaacccggcggagcagcagcggccgcgcgcgcctcccctcccaatgagttcctatttcgtgaactccaccttccccgtcactctggccagcgggcaggagtccttcctgggccagctaccgctctattcgtcgggctatgcggacccgctgagacattaccccgcgccctacgggccagggccgggccaggacaagggctttgccacttcctcctattacccgccggcgggcggtggctacggccgagcggcgccctgcgactacgggccggcgccggccttctaccgcgagaaagagtcggcctgcgcactctccggcgccgacgagcagcccccgttccaccccgagccgcggaagtcggactgcgcgcaggacaagagcgtgttcggcgagacagaagagcagaagtgctccactccggtctacccgtggatgcagcggatgaattcgtgcaacagtgagtgagacttcccgtcgccgtcgccccggctcccctgggcgcccaccccgggacacagaactagtgagcgccccctgccccaatctcccacagggtgctgggtgggcatctcagttaggagatagaagaagattgggcgccggccgggggtctctcgctgtgtcccctattaggcaggagttacaaagtttgcaaagtcccagccgcactgggagccatggggagcaagtgtgctctcctggggcgcctggccagagccggggttccagga

SEQ ID NO: 2364 - DNA, 1121 bp, Homo sapiens
cctgggactgacagagagacaggtcaaaatctggttccagaaccggaggatgaagtggaaaaaagagaacaacaaagacaagttccccagcagcaaatgcgagcaggaggagctggagaaacagaagctggagcgggccccagaggcggcggacgagggcgacgcgcagaagggcgacaagaagtaggcttcagctgggactgccagggccgcggccgcccgcacgtccgcgggtcccggccgcgccgccgccgcgcgcccctgcccgagagagctctggccccgctagcggggccaggagccgggcctcccaccgcagcgtcccccgccgcgccagtccccgctagtggtagtatctcgtaatagcttctgtgtgtgagctaccgtggatctccttcccttctcttgggggccggggggaaagaaaaggatttaagcaaaggctccctcgccctgtgagggcgagcggcaaaggcccggctgagccccccatgcccctcccctccccgtgtaaaaagcctccttgtgcaattgtcttttttttcctttgaacgtgcttctttgtaatgaccaaggtaccgatttctgctaagttctcccaacaacatgaaactgcctattcacgccgtaattctttctgtctcccttctctctctctctctcgctcgctcgctctcgctctcgctctctctcgctgcgtcctcatttcccctcccaatcctctctcccctctgcaaccccccagctcgctggctttctctctggcttctctcttttcctcctccacccaccccctttggtttgacaattttgtcttaagtgtttctcaaaagaggttactttagttagcatgcgcgctgtgggcaattgttacaagtgttcttaggtttactgtgaagagaatgtattctgtatccgtgaattgctttatgggggggagggagggctaattatatattttgttgttcctctatactttgttctgttgtctgcgcctgaaaagggcggaagagttacaataaagtttacaagcgagaacccgagactggcccggccagcgctcctcatttgctcccgggtgccttgcagagccggtggggagcctgtcaccgggctcctgc

SEQ ID NO: 2365 - DNA, 1215 bp, Homo sapiens
agggacactccaactctacacagctcagcagacatccacacacagtaatggggtgagctcacaaccaccattcagtcaagtgaggtgacactccagttgcagaccatcgcacaccaaatttggcaaaacagccctcagactgtcaggcaagcccgggttctacccctaatgcaaatacccaccagggagatgtctagaggcagactcctgagtgaggtgttgcagcccaaaggctgcagcattgccataccattcccatggagttgccaactattctcaggccaagggccatggggaagatggagcaaacctagcccccaagccggtgggctagaaagtacaagaaaaggcagcacgtggttttatgaagctatcttaggtggagctactccccacctcccaccaacatatacattttgttgcaggaaatgtttaattccgcatgatgtttccctctccttccaacaaaagaaggtcaaactgtgggtcgtagagccttgacaatgttgtcctcctgttcatctgtgcaccacttgacagactgtagcttctcttgctctcgaccggccctgcattcttccgcaccctccctagctctgaaatcaactctcttcggtcgtatccaccttgcacccgcaagtcaagccgccccttgtagaaaaatccctccaccttccgttccccgctaggtcaaccccactgtagacaggaaagccaggccaggagagtccgaatgagaatttattgtgaatcgattcccaagctcccttccgggacaagtggtctgggacagggaggagcaacggccccagcgcgcaacgctctgcgcgttcctccgaatcccgtcggcttctcgacccacgcagagaagccccgggcttggcggctctagccccagcgccaaaggagacccgccccagggccgggcttggcctcctgcttcatgggcctggatgcagatctgcgtggctggtgcgtgcgcgcgcttctgggaaacagtcccgcgtgcaaaggaaaggggcaaaatggcacctaagcatcagatggaagcttactctctgcttccgttcctccccctgctcccctacttctcagtccccttcaatttgtagactcttgctcctgcttctcctgatcctgcaaggggacattccagtagaagttttttgctttgtcggtggctgtcgtgaaattgtgcttgtgtttcgtgatttc

SEQ ID NO: 2366 - DNA, 1196 bp, Homo sapiens
ggaggcagagattgtagtgagctgagattgtgctactgcactccagcctgggcaacaaagggaaactccatctaaaaaaaaaaaaaaaaaaaaaaaagccagacgcggtggcttatacctgtaatcccagcactttgggaggccaaggtaggcggatcaccagagatcgggagttcgagactagcctgaccaacatggagaagccccatctctactaaaaatacagaattagctgggtgtgatggcgcattcctggaatcccagctacttgggcggctgaggcaggagaactgcttgaatccgggaggcagaggttgcggtgagctgagatcgcgccattgcactccagcctgggcaacaagagcaaaacaccatctcaaaaggaaaaaaaaaaaaagaagagatagatttggcttcaaataacaggaaaacacaaaataatagtggcttcagtaagacaggacattatttctctttctcataaacactcaatacttacctggcaggggagataccatgatcctgaaggtggttttcctagggcgaggctcatccattgcactccggatgtgccgactcgcgatttccccaaatgtgggaaactcgactgcgtaatttgtggtagcggtggactgcgtttgcgctctagtaaaattaaaaataaaaaaaaaaaaaataggctgggctcacgcctataatcctaccactttgggaggccaaggcgggcggactgcctgagctcaggagttcaagaccagcctgggcaacatggtgaaaccccgtctctactaaaatacaaaaaaaaaaaaaaaaaaaaaatagctgggtatggtggtgtgctcctgtagtcctagctactcgggaggctgaggcagaattgcgtgaacccaagaggcagaggttgcagtgagccaagatcgtgccactgcactctagcctggcgacagagcaagactctgtctcaaaataaataaataaataaacactcagagattggtggcctagggctagtatgacagtctgctctgtaaaatccttagggatcgaagctcattggactcatggttccaccattcctctaggtccaaaatggcagctacatgtcttgccatcaacctttgctctcatcctctttttatcattttacttgaaaccttcctagtaaaattcacattcatgatttcactgtgttgatt

SEQ ID NO: 2367 - DNA, 1099 bp, Homo sapiens
aaattgtgaacaccttcaaccaggcattttgtctcctttgtttatttgtgtgtctccagcatctggaacaaagtagtatgtgaagtaggtatcaattaaatggttgttagattaattaataataatgtcttgggccgggtgttgtggctcatgcctgtaatccctgcattttgggaggccgaggtgggcagatcatctgaggtcaggagttcaagaccagcctgaccaatatggtgaaaccctgtctctactgaaaatacagaaattagccggatgtggtagtgcacacctgtaatcccagctactagggaggctgaggcaggagaatcgcttgaacccagggggcagaggttacagtgagccgagatcgcaccattgcactccagcctgggtggcagagcgagagactctgtctcaaaaacaaataaaacataaaaaataatgtcttatttagctttgtattcctagtgcctggaacatagtcatggtaacctgcttactgaataaaggaatgagaaagtggtgggacaaacaaagtgtgtgtgtgtgtgtgtgtgtgtgtgtgtgtgtgtgtgtgtgttgggaatgttaacagagtgcttagaacacctgattctgcattcctaggtatggtagcatccatgataattttggtctctaaagcgggtacccctactccaagtctccattcctaaaagtgtattcttagattttaagactatggtgttggtgagcagaaggtggggaaatagaaactggggcaaggattagaaactgcgagttcacagacccctaatgtattcagagctttctttaactctgctccccctttactttcaggagccggaaaattcaaatccgaaatattccaccccagctccgatgggaagtaagtgtttgggggaaactctaaatggagtgggatagtggagcctggaaagtacgtctggactagctggagttgccagaaatgattggggaggtctggggccaggctagggaggcctgggtctcatcctttctttctttttttctttttgagtctcatcctttcttctttttctttctttcttttctttctttttttttttttttgaga

SEQ ID NO: 2368 - DNA, 1112 bp, Homo sapiens
ctcagcctcccaagtagctgggattacaggcgtgtacccccatgctcagctaattttgtgtttttattggagacagggtttcaccatgttgatcaggctggtctcaaacgcctgacctcaagtgagccaccgtgcctggcctcatgtaacccacagccccatctttaggttgtccctatggtgagagacattagggaggtggatgagtgtttcctaagccctaaacttggtaatatggcagaagataatttagggacccaggcagcccaggtctgcttcccaaaaggcccttaaggcagaacttaagtacactcctgcaaagataccccatcagcattagcaccctagaaaggtcacactggacaggtaataatgctcaaacactcctatggctctgtcaatgcccgattgctttgggatgcagggtgtccagtggctgctttgcaagggtcttgggactcagagttaagtgtacttcccttctccattctcctaggtactggacagcctgctggctcagtatggtacagtagagaactgtgagcaaggtaagagtgggccgggtgtggggtggcactcgtggtgggggttggaggagtttggtgcatttgttctgcttcactttgtttctttctttttctcccttccttccttccttccttcctgccttccttcctgcctgccttcctgccttcctgccttccttcctgccttcctgccttcctgccttcctgccttcctgccttcctgcctgccttcctgccttcctgcctgccttcctgccttcctgccttcctgtctatcttgctctgtcaccaggctggagtgaagtggcgcaatctcggctcactgcaacctctgcctcctgggttcaagcgattctcctaccttagcctcctaagtagctgggattataggcacgtgccaccatacccagctgatttttgtatttttagtagagacgcgtttcaccacgttggccaggatggtcttgatctcctgaccttgtgacccacccgcctcagcctcccaaaatgctgggattacaggcgtgagccattgcgcccggcctctgcttcactttctgtgatcaaatctacattgaaaaccaa

SEQ ID NO: 2369 - DNA, 2744 bp, Homo sapiens
tcaagtgtgctgggaagggaggaaggcctctctacatatggaaaagcccatgcgtggagttcccctcctttcaacattgcaacaacagtaacaacaagacaaccgcaacatgtgggcgtagtcaggcaatgctgtgtgcgaagtaaactacctcaaggtatgaagttacctcagcaattattttcctttttgttccccccaaccccattaaaaaaatttttttttgatttttgtttttttgcagcttgctgatattttatataaaaaagaaaagcaaagcaaaagagaagctgatagtcttgaatattttatttttttaatgaaaagaaaaaacaagaaagttatgtttcataatttcttacaacatgagccagtaaccctttaggaactctctatggagaacaggcctggtgggaaaggctttgggggctgcccccttaggaggaggctagtgctaagagggaaggcccaggtttgagagagcccagaggggcagagcccagagccttgtttggccctgatctctgacttctagagccccagctgctggcggctgctggaatatcctacctgataggattaaaaggcctagtggagctgggggctctcagtggttaaacaatgcccaacaaccaaccagctggcccttggtctcctctctttcctcctttggttaaagagcatctcagccagcttttcccaccagtggtgctgttgagatattttaaaatattgcctccgttttatcgaggagagaaataataactaaaaaatataccctttaaaaaaacctatatttctctgtctaaaaatatgggagctgagattccgttcgtggaaaaaagacaaggccaccctctcgccctcagagaggtccacctggtttgtcattgcaatgcttttcattttttttttttgttattgtttcatttcagttccgtcttgctattcttcctaatctatatccatagatctaaggggcaaacagatactagttaactgcccccacctctgtctccctgtcttctttagatcggtctgattgattttaaaagtggacccaaacttagggaattcttgatttagggtggctggtggcaaggaggggcaggggatatggggacgtgactgggacaggttcctgccttatcattttctccctaggacattcccttgtagcccccagaattgtctggcccaaattgaatagaagcagaaaaacatttagggataacatcaggccagtagaattaagcctctccacctgtcccaaccataaaaagggtctcccagctttccatctctggctctatatgctttatcccaaaacaaagcagataacgttcagacgtcggccatttagtaatttaaagcgaatttccagcagcaagcatgctttgatatctggttcagactatcatcaggaagaaaaaaaaatcccacagtacctgaaatgtgattgttgcagtgttcagtttccttgggggcctgctcccttcacaccttgagcccaagtccttttccgttggctgattcagctcccagaagagacgaggaagtgtgtggcaagggactggaaaacttcacttgcttggattaggcaaggctccactcattgttgatatttgcccagcaggaaaatcatgtaagttataccaccagaaagcaaaaggagcatggtttggtggttaaggtttagtgggatgaaggacctgtcttggtgggccgggccctcttgtgccccgtaggctaggtcttagggcaactccttgccctcctgctcagcacctccatttccccatccttggtgagataacaagctatcgcgaaaagcacttgggagatttggatgatttgagaagagtgacttaaaaaaaatgcttctgtgctctaagatatatatgtgtgtgtgtgtgctacatatatatttttaagaaaggaccatctctttaggatatatttttaaattctttgaaacacataaccaaaatggtttgattcactgactgactttgaagctgcatctgccagttacaccccaaatggctttaatcccctctcgggtctggttgccttttgcagtttgggttgtggactcagctcctgtgaggggtctggttaggagagagccatttttaaggacagggagttttatagcccttttctactttcctcccctcctcccagtccttatcaatcttttttcctttttcctgaccccctccttctggaggcagttgggagctatccttgtttatgcctcactattggcagaaaagaccccatttaaaacccagagaacactggagggggatgctctagttggttctgtgtccattttcctctgtgccaaagacagacagacagaggctgagagaggctgttcctgaatcaaagcaatagccagctttcgacacatacctggctgtctgaggaggaaggcctcctggaaactgggagctaagggcgaggcccttcccttcagaggctcctgggggattagggtgtggtgtttgccaagccaaggggtagggagccgagaaattggtctgtcggctcctggttgcactttggggaaggagaggaagtttggggctccaggtagctccctgttgtgggactgctctgtcccctgcccctactgcagagatagcactgccgagttcccttcaggcctggcagacgggcagtgaggaggggcctcagttagctctcaagggtgccttcccctcctcccaacccag

SEQ ID NO: 2370 - DNA, 1230 bp, Homo sapiens
aggcacacacgcatgtggaggcgaaactttagaacggttttctcgtgagctccagccacgtgaaacagtaggactcgcaccgacgcagtcaggctgggggcgcaatttcaaagtctccgttacgcgcgtccctggggcgcctggggtttgaaccgttgttccccacatgctagtccgcttcccttcccgcttggccaaaataccttttctaaggcactccccacgtaaataaataaataaacaacccaggctccgtgcgccgcgcctcctgccctggagctggggttggagcaggctttccctggacccagtccggccccacatcgccaaccccgccagcctgctgcctttccgacctcccagcccccggaggagcgcaggaagacatgatatccccgggaccagaaacgccgggaacacgaaggacgcagaagccctcgccacgccgcccgtggggccccggtccagggcccagtccctcaaacacggacaccgctgccgctctggaaaggccgcccagagccctcctagcttgaggagactcgcggccgccttaagaagccagcaggtcccatggtgtaatggttagcactctggactttgaatccagcgatccgagttcaaatctcggtgggacctcacgagactttttggtcctacaattcctgttttggagaccgcttccggcagcagccacctcgggctgtgtgggtagcctcactgacctggcctacagcggcttggggtccctccccctctctcaagatgttttcatttcagggccgttctgggggtgtcagtgcgcacgcgcgagagtcgggcagaaaaataaatgtgttgatgggagagcgaacgcgacttcaccctggagggcagcttccgaaagaacccgaaggatcaggaggatgctgcttcgggcggggcatagctaggtcggccggtctaggaggtcccaggttgccgagggtgccgtcatgcttcttattggctactgagcaagcgcgatacgttactgctgcctgagccgccaatgaagtggcgcgacagaaccaaggggcggggaaacggcgcctgcgggactccaattggtcacgaacaataacgaggctgcgctccccagaggggtgtgtttttggggtctggaacgcaccctagtgtgtttgtcttggttgtccggtgctcagtgaggttgtctgtgtctgtcagtcagaaaacaggcccttaggctgt

SEQ ID NO: 2371 - DNA, 1133 bp, Homo sapiens
tttatgattgttgaatagatatgtatgtttagttccattattatttcactggaagttttaaattttgagaagatgaagcagagatagaaatccattgcagatatatgtatatttaccccatcttgcaggtttcagttagtaaaacacagaatgataggtcggttttaatgttttaaaaaaaaactaaaaaactaaagttagagaaacctttctgtttgagctactgtatagaaaagacaacttttattgcattgctggtccacatgataaatatttcaatgctgttctagactgtatgagaagtacttaatgaaaaaagggatacattacatttaagaattgtatcagctaattactgttttaaaaaaatcaactcatttggaattcttcggactataaaattgagcaagtaaagtttgggttttaattttcctttgcctgaaccaagataggaaattacttaagagttttttttttttttttttttttttttttttaggaatgaaaggtcataagccattagaaatagtggcattattatgcaataacaacaccctagctaacctgcttttgtcatctgtagcacttacaataaagaatgatgaccttccaaccctggacactacctcgataaagcaaaccagagatcctctctacactttctatggaagccataaaagttgccatcaatatatccactttcatagttctatacttttatactttctagacttttttatagactttatgatcagatctttttgtctcagaggataggttttgcaagattcaaaggaaaatcaaactccttggttgttccagctttgaagcttttgcttcagtaaatttgtttaaagaaccagatcacataccatttatcaaattctttacttaagtcagaatactttgcagacatacatatttggaaaacaaactgtttcttgttcactagatagaatctgtattgtagtaagaaactacttacaaggtggctttctttctgctttgttactctatgtattactcaataatatatgtatggtcacaggttcctggagttgttttatttctttatgacagacacatgagtatgcacctctctctaatcctctgatgtcactgcagcttcagtc

SEQ ID NO: 2372 - DNA, 1161 bp, Homo sapiens
gcagcgcctgctacaaccccctgcactcttcactttggcttcctttcggcaaccacgccccccgactcacggagagcgccgcgcatgcgcagctctcgtctttacctgggctcccggcagtgggcggagtgggagaaggcgggggcggcgcggggagccggcggttatctgggcggcggagcgctcacaatgtggcaggagacagaaaaggtgcgcccgggccggcccgagggctgcgcatgcgcgccgccgctcccagcggccgggatgctgagggggcgggcggagggaggtgtcgggatccccgttgggcgggggggccagcgagggaaggggccgcgggcgcgcgcgggcgcgcgcgtcctcgccgccgctcgcctccctccctgccccctccggcacacacatccacacacgcacaccccctcccctgccgcccgccccgcgctgcccgccccgccggccccgctcgccctcgcgcgctgggaagggagtcgcgagacgtcggagcggcggccacgtagcgctgcggcggcagcggcagcggccgaggccgggtctgaggagcggccctgaggacagacgttgggcagggggggaggggctggcccagccggcggttgtgactcgagcgccgcggctgcaggcccccgccgcagggatggaccgccgaggcggcggccggggcggcggaggcggaggcggccggcccgggtgagtaagggccccttcccccacgcactcgccaccgccgcggcggcgcccccggcagcccttcctctccgccgcccgcggggccggcccgggctccgggggccggcgtaacccttcgccgaggcagctgcgtgcgctaggccggagcagcccccatccggctgggaggccccgggcgctgagctcctcaggcacccagcttgggctgggggcgccccgctcctgctctttcgcccccttcctcctggacccgggcttggctgcagttttgcagcgggtccgctcgccctgaggcctgaggggaggctggggcggcacgggttagcgggccgagaggaggtttgcaccggtcctcctgcgagcgttctcctgccctgcagctggtggcttgcacccactacctcccccgccttgcggttgcacccaaacctccaacccccgggagta

SEQ ID NO: 2373 - DNA, 1176 bp, Homo sapiens
atctttgaaactagatctgcttacattgcccttgatgaaagtgtgttctgagtttcctctgttggggaaacaagtttgagatgtgcaaccccaggcagtgacatcaacattttaataacagagacccattttaagtacggttttatcatatgctttcccagccctgtccatggtggtggtgggttttttgtttctgtttttcctgtatgtttctctcactttccatccagtgttctcagcagctgaaaaaagttataaaagctattggtcagtgtgagatttcttaaaatgtggatgaggaacataaggtgagaaaaacctgaaaactgctatcttcctatcaggatcatgcagagggagggaggggaaatgataatctgcccttcatcctgttttttcaggttgtccacttcctatttaattgcttcctgtttttctatcaacagatcaaggtagtgaaattctcctacatgtggaccatcaataactttagcttttgccgggaggaaatgggtgaagtcattaaaagttctacattttcatcaggagcaaatgataaactgaaatggtgaggaagaatacgtctaactgtaaaaatttttctgaagttgtctgttttgtttggttttatgggacactgacaagaatgtaatttccatgaaggccaggacttttgttttgttcttactgtatttcccagtgcctagcacagtgcctggcacataataggtactcactaaatgtttgttgaactaattcaatgagtatatcagaaatcagcaaactcaagctatagggtaatgtaaataaataaagaaagccagtgttataaatgatatccataaatggaatgactggtgactgcttggcaaactagtgagtgttcttctaaaagaggtgctggctactcagctccagctaactatagctatgcatgagtaagggctgacccttgccagattttctgatttttcaagaaaagcaagaaatctagattttaacataaaaatctctttacttttaaattgcctgcttttaaacaagaaaggggatttatttgcttatgtaactgtattgacagggtataggatgggtttgaaggtagcttgatccagcaagccagtagttagagtaagaacaccatctctgccctggccctgttctccacgctcttgg

SEQ ID NO: 2374 - DNA, 1185 bp, Homo sapiens
ctcaccggggggcggaaggggctgggatcatgcctggtgtccagacctgaccccctaccctcctttgttttccagatctcagaactggaaggaaacttgcaaacactgaggaattccaattctacttaacaggaatcattccatgactggacaataattaacccccctcccattgttcctccctcccctgtcctcaacaccccacccctcccccttccagcctggggacaggtgccccgactccccccacccctccaccccacctcccccagcttcagggaccagagggctcatatcacaggcccccttaagatggcctgggcagacagaggtggctagaagggcagcctctttcttgccccatggggctgaggcacagaggccgagggctgccgagggctggcctggtggtcgacggacacaagcacctgcagatcaaactgccagactttacacactccagcttttgtctctggactggaacggggctggggctctcccagcatctgccaactgggggctgctccctgcccatggggcacctgggtggcccctgggcctcttgacttgagattctaccttctcggcccttccctctccccccatcattgtgccgtctctgttgcattctgaccctcccgcctggggggtgggggcgttgcctcaacacctcccccatccctgttccctgtcctgggagggatagagtccaccccagagcccggaggctgggcctggccctggccctgcactgatttctcatgtgtccttcgggaaaagggggagtgagagtgggaaaaagggagagttcaggacacctggtccccagctccccattgcctggggcagcagccctcaatttctccttgtgcctcccctcttccaggtgccaaatagccataacctcgtcttggaactgttatgtggcctctctggggtccaggtttcctggtcaagcctgggaatgccagggaggaaagggggtctggctacagcgaccctggtcttaggcaaggggaacatttctccctggagagtcaggtcctatcctgtgctgccctgtctgcccagcccagggcgatgcctggaagcctactgacattgcagggagtcagcctcgcccccaccccctactggttttccaatgttttgactggagggcaaaattttactactactcatctt

SEQ ID NO: 2375 - DNA, 1541 bp, Homo sapiens
aactgggggggactagaacaccacgctcagtaaatccagtctaaactgggaggtaggggtattcctgttttctttaggacctcagagatgtaagcattttagcagccacacaaaatctctggctatgaaagggacttcatgaccatccagtccaatataacacttgcagacagagaaactgaggtcttccatgacttgcctagtctcccagctagtttgaggcaaaactggattcccactctggtattctttcttccctttacatcattttccctcctttataatgtcctgagagaccagaactcacaccagaatcgattattcctcaggtgaagcatagactctttcatggtagacagatttcacgactcagagatagaaatctcttgctatcatcaggtcacgggcagctcctgtggagtcctgcccaacttatgtggcttccataaaatggcaacagtccaggctccttgcctaattttagagcattaactccctaattgccagtaagcaaggaggtggatctctgcaaacctacactgtctatgacagctctagttgtacttggtgtgactaaatacctcaaaggcaacctgcttctgcaggttttgaagtgtcagcttcataagacactgaggtttagaattgtttgattctagaccataactgaagggcataaatggaaacaggatatgaagggaaacaagtagcatcatggagctgaaaagtggtgcatcacccaatggctagcacaaacaaggatcacactgtccattctcttgtctgctaaattaagcattttcttgcctcctttgcttcatcttttcacaacagctggatagagggatcagaaatgactgtgtcatggtgctcattcactgcaaactcccagttgcaagctccttggctcccccggagggagcaagaatctcatagttcagagacacagagggccttttagccctaatgaccttttggatgggactgcaactcatgactatcctgatattggaagaaaggactttgttaatcttctcccccatagctctgctgcgtaggtctacatcttactcagaatcactacacattcctttagtcttcctccaagctccagagccattggtacaaatgctttattgaaactaaatacataatacacacaatgagatgaagacaatatagaagtccgcatagtcatcataatcccgttccttggccggttgaggcagctcagtggctgagcccagtcaagccaacccgcagcttcactcacgacttcaagatttgatgctaattcttttggatttctacagttattaaataagtgtctgagtggactgtctttgttcctttgtgttttgagggctggctgggtaggagtgggggtggtttgtctgtggcagtgaatttttgccaggagaggaacattaaatgccaaaggtaggtggcagtatttcagtctctgccccagccgacaggcagagagaccttcacaaataataagacccaagaaagactgggcctcacctaggcttgtgttc

SEQ ID NO: 2376 - DNA, 1208 bp, Homo sapiens
tcatgctcggggagaccaaccctgcagactccaagcctgggaccatccgtggagacttctgcatacaagttggcaggtgagattttggtatttttcccccttttccaaaatctgatttagttgccacaaggatttgggtttccgaggctggaggtagacatgataccatatgcaggttgattttatcggagtttattgttttcctccctcttaagttggcgtttggctttggttgttaacatcacttagtcgtacctctgttacacgaagtgtagaacctggtacaacacactttgctggccagtctttcctgaaggctctcactgtttgcaccagcgtggccgggagggctggatgtggggagggcatttttcagccttaagtgaatggccattgtaggctttttcttttaacatggtctaatgtccatggagcttcagcttttatgctgctgtggctgtagatttctggcaatgggcgcattttaatccttctggtcttggtcatgtgactatctctttctccacccaggaacattatacatggcagtgattctgtggagagtgcagagaaggagatcggcttgtggtttcaccctgaggaactggtagattacacgagctgtgctcagaactggatctatgaatgacaggagggcagaccacattgcttttcacatccatttcccctccttcccatgggcagaggaccaggctgtaggaaatctagttatttacaggaacttcatcataatttggagggaagctcttggagctgtgagttctccctgtacagtgttaccatccccgaccatctgattaaaatgcttcctcccagcataggattcattgagttggttacttcatattgttgcattgcttttttttccttcttttcatgtacactgaataacctgacctaatagagagtgtaaatactataaaaatgatttattttgaggtctcacatacacacaggcattctttgcctgcccttcttaacccccgcatcccttccactcttggcactgagctattcaacaggcatctatggagcatgtgctacgtggccaagactggactaggtgcagaggattcatcagaaatgaaagaaaacatgagggctgggtgtgctggcttgtgcttgtgataccagctacttgggaggctgagatgggagaccagcctgggtaacatagcaagaccctg

SEQ ID NO: 2377 - DNA, 1208 bp, Homo sapiens; identical to SEQ ID NO: 2376

SEQ ID NO: 2378 - DNA, 1202 bp, Homo sapiens
aagcagaggggagggaaggctggatttcagaggtagggaggataaggaccgtgggtgcacgacggggagggagagccaagtcaaggttaatgccggtgctcgggcggatggtgaaagcagcagatggccttgaccggggtagagaactcgagcacaggagcaggttctgtgtgtgtgtgtgtgtgtgtgtgtgtgtaggagcttttggggtcacgggaagtactgagaggtgaggagtgggatttgggacgtgcgtagttgaactcataggacgtccaggtggagaaggaatcacttcctgtctctggatccgtctcgatctctgcctggcgagggcgcgccccggctgggcgtggacactgttctccggccgcgtcgggccgggcgggtggggcgttcctgcgggttgggcggctgggccctccggggtgtggccaccccgcgctccgccctgcgcccctcctccgccgccggctcccgggtgtggtggtcgcaccagctctctgctctcccagcgcagcgccgccgcccggcccctccagcttcccggtaaggcggtgggggcgcatcccctggcgactcctcccgttccctcttccgcttgcgctgccgcaggtgggcccggtctgtgggcgccccccgatttcccgcaggtcccgcgcggcgtcggagcgggagattcccttgcagcttgcgccccgcgggccttcgggctccgcagagggacgccggccctgcgcggggcggaagcggccgggaagccacgtgtccccgcggccgcgcgtggtgggggaggagggaccggcggcgcccacgtggcctccgcgggccccgccagagcctgcgcccgggccctgaccgcacctctcgccccgcaggaccatggccaacctggagcgcaccttcatcgccatcaagccggacggcgtgcagcgcggcctggtgggcgagatcatcaagcgcttcgagcagaagggattccgcctcgtggccatgaagttcctccgggtaactcgcccccgtctccccttccccgctgcagccggctcgcgggtgtttttccctcccggcggcggtttgtccgcgtctgctttccgagttcatttcgctgccgcgaaatccctttgccctctgcccccgcccacggcggcttgggcccgccgaccctttcccggggtggtggggacagacgcccttgggaa

SEQ ID NO: 2379 - DNA, 1202 bp, Homo sapiens; identical to SEQ ID NO: 2378

SEQ ID NO: 2380 - DNA, 1196 bp, Homo sapiens
gtgcttagcgcagaaattgaaaggtggtataaaaggagagtaatatttggtgtcagaaaactttagcttgagtctagatgtccttttattacctgtgaaatcttggtttcaatttgttgaacctttgccccctcacctctaaaaaccaggctagtcctatttacttcccaggtattgtgaatatctcttgggataatgcatgtggggaaagcaccatgagctagaaagcatgggtactaaggttcacctggctgccaatataggggtacataggctgacataaagaaagcagcaggcctgagtgtccactacagcttgattatctcattgctctccatctgttgctttttctctgacccacatttcctttctggaacttagtgggtgttctcactaatgaacacacaccttctactgtcaggaagaaggagtctcaacaagaagcctgtgagagtgtcttaaaaggcttggctggataatgaccaaggaacttgaaccactggtctatcttgttttccccatctttagagaaaaagttcctggacactctggtacatccgattacagaagaaagagataagaattggctctgaggacagagcgaacaatcttttatcccccatcctatcaacggctatgacaattggtatccttcagtttttaagaattactacatatcagattccaagaagctcaggcaataacataatagacaccaatgtctcaaatatccttctggaagagccattgatattttgctaaatgtactaagatttatttcttgaaaaaaataattacagatagggttgaagttctactctgtatgctttctctttctctcccctcccttgaggcatctcatttctgaggttggtcaaagccatttgcaaatatgcttttggttttctatccaaagtcttcacataatatgctatgaggtatcattaaagttatagaaaatgcatctagccctatctatcctttgtaacttgcttttttcatttatcataatgcagatacaattcattcattttaactgcaatgatacaattcattcattttaactgcaatgtataaatgatcatggatttgtccatttgcttacaaataaatagctggatccaccccacttctgccatttttagctattttaaattatgctgcaatgaatatccttgtgtagatctcattgttta

SEQ ID NO: 2381 - DNA, 1181 bp, Homo sapiens
tggatgcagctttgagcagttaaaaactatgtgtttaggccgggcgctgtggctcacgcctgtaaccccaacactttgggaggccgaggcaggtgcatcacggggtcaggaattcaagatcagcctggtcaagatggtgaaaccccgtctctactaaaaatacaaaaaattagctgggcatcgtggtgagtgcctgtagtcccagctacttgggaggcttgaggcagagaattgcttaacccaggaggcggaggttgcagtgagctgagatcgcaccaatgtattccagccggggcgacagagcgaaactccgtctcaaaaaaaaagaaagaaaaagaaactgtgtgtttaagcgttttgatatagggggaaggatggacccgatcctttttgctgaagtctgcagatttcataggccaaggtggaggcctagttgaaaagggggctcagggaagcctggctagagcttggtcaaggaggggatcttcatcagtcgtacgtatgtacatggcacgtggacctgcatagacacgtgtttggtggaggctgtcttatacggattctgcacaactcaagtcccctaatgggaacagacttggggaggtcactcttgaggctttttgtggtattgtggctactgggagacctgaggagggttctggtcactagcagactcatttcattcaccccttggaatctgcccaggacttggacttctgtgtaatagtaacttcacgccccaatgatcctccacgttccttgctgatgctgtgattgctcctccaagttctccacctatgtccatctgagcacttggtatttctactctagtgtcaaaaggtcctgttcccaagtctcctcccaaacatttattccaatttatcatccagatgcccgtcctttgccatccctctctgttccagcaaaggacaccacccctcagggagatgctcacagtggactccttgtcctcatcctgactccccttttctctggcacccgcaggcctcagtgagtctctcggtctctggcagcagcacaggtcctggactcgagcccatctctccatccccccctccactactcccctggtccagctgtcaccattctcacccttgaatgactgtcacagcctcccacctggtcttcctgctttactatgttccctgcaggctgcctct

SEQ ID NO: 2382 - DNA, 1296 bp, Homo sapiens
ggtgctttggagttgtaaattgaggagtgcatccttgctgtcttgaaccattctgtttgcaatggtgagaccttacataacctagccttgcagggccgccacacaaccctggagtcctagagttggaggaacctttgtatccatctgacttctcattttgcagaatatgatgagaaagtagaggatcgctctgttcaccactcttgctattccattagtggggagatgcctgctagcatgtgtgaggggaacactctgatacactgggaagtatcggaaattcccagaaacacaaacataaaataactctcctagacccaggtactggggactgtctcagtccgtgtggcatgataaataaaaggttaggatcaagtctttgtatttttcaagatgtggtagctgattattcctgttttaagtactctgaaattgatctgtgatcaataatactaatatgttatcttttaccgtattctgcctctcactattgattttaattagttaggagtatttgagctgttatttcttgagcttaatatttttttagagttaactctttaaggagataatcatggctgtagacaaggccagggctggctgacgtgccttagaaggtttgaatgcaataaagcggtgtttggcgttctcctgcattgtagtgcgggtacaaaatgctatttgttcgtcatactgttgtcagcagatgagccgcccactacagacggctactgcccagggacctgcccaggccccacccaagggctcccaagggttgagatttctgcagacctatagccagcacacttagtcctgccctatatagagttcctcttcgggaagcttttgataaggaattctcagaccgataggatgtctgtctgggctttgctgcgggacagtctaactgtgggggctaggggaaagcaggagagtatcgatcaaagagtaagccacacacggataatcagttactagggatggaggtgtgagggttcattatattattcattttactgttgtatatgtttgaaaatgtctataataaaaagctttaaaaaaaaaaaagaaacaaaaatagttcaggccagcaatgggccctccatgttcagtggattttatccttgtttcaattggggtaggagttccaggaggtgtggattggaggttgtctaaagaattgaactggcctttgtccctgcttcctgggagggagactttcagtccttgacatttccagggtaataggagtgtctttgttatttgtgaggccatgggatcacacctgagcttatg

SEQ ID NO: 2383 - DNA, 1196 bp, Homo sapiens
tgaacttttgacctctggctccaggtccataaatgtcccgaggttcccaggaaaaggaagacttgttagatgggaaccctgatgtttgattagagcagcttttagtcactactgtcatgtgtttgtttattcaggcaccagttgcatctgagtagtggtaggtcctggagacaggaggcacagcctttactcatggcctcatggtaaggtagagtcatgcagaacatttaacgaaagtatggcttggccgggtgtggtggtgactcacgcctctaatcctagcactttaggaggctgaggcaggaggattgtttgagcccaggaattcaagaccagcctgggcaacatagcaagacttcatctctacaaaaaattaaaaaattagccgggcacggtggctcacacctgtaatctcagcactttggaaggctgaggcgggcagatcacctgaggtcaggagttcgagaccagcctggccgacattgtgaaaccccgtctctactaaaaatgtaaaaattagctgggcgtgatgacaggcacctgtaatctcagctactcgggaggctgagacaggagaattgcctgaacccggggggtggaggttgcagtgagccaagatcatgccactgcactccagcctgggcaacagaacggaactctgtctcaaataaataaataaataaataaataaataaataaataaataaataatcagttgggcgtggtgacacatgcctgtagtcccagctacttgggaagctgaggcaggaggatcacttgagcttgggaggatgaggctgcagtgagctgtggttgcaccattgcactccagcccgggtgacagagccaaaccctgtcttgggaaggaaagaaggcaggaagttagggagggaaagagaaaaaggaaaggaaaggaaaaagagagaaagagaagaaaagaaaaagatttgatgggcaaaatcctgtctttggaaggaaagaggggaggaaggtagggagggaaagtggaaaagaaaaggaaaaagaaagagaagaaaagaaaaagatttgatgtacgccaccatgaaagcaggtagaaggcagaggaatcatgaggagctggatgggttcacctggggagagtactaatgggacatgaggcaccccgcctgtgtgtttggagaactacagcagtttgcaatgccagaaggaacaaa

SEQ ID NO: 2384 - DNA, 1216 bp, Homo sapiens
ctcagtaagcttctagccaggtgattctcgtgcgtattcaatagtccagtgaagtccatctttgaaactctagttaaaacagtggaggaaatcgcatacttgtctgacacttctttctcctcccctctcccctccattttatgttttcttctggacatcctggccttccctgccctgcagagcatacctggatgtccaggcaagactgggcgaagtttctgagtggccctttgtttaggtgatgtcctcagacctggacccccaccagcctcactccccatcccaaccagagatggctcacttcggatcgagggttgactacatctcatcatctcacgaatctgctgtaatataagacaacagcttttaaatgtgtatataacccatgatttcggttttgttttgttttgtttttcttgatggtttccctctccctccctctcttcccattctccttttaaatctctttgaatcacatttggtagtgattttgacttagtccagtagtcacatagctttaatatctagttcaaagctaaccatagtataattgttatattaaggagttattttttcttaaaacatttttttttgcttgttttggttctgttctcacttttaaaggatgctgagatggtaatatgactctccatattttggtaccaattctgagactgtatgaattttcaggtggaactttagcacacactgaagcaaagttgtgaagtgcagggcgggaggtgggcgtgagctttctattttgcgttgtagaagaagtgagatgtagtaagctaattaacagactttctagcagttctttttgtgatgtctctttgttaatctgagtctatctattttcggcaataaggtaaggacgacagtgttttgagtgtcctccttttctataagtgctttttttctgttgaaagaggtgatattataaggttttttgaaattgtgaattctaaaaaagaaatgttgtaaatacaattccattaactacatagaaactattaagaaagagagaatcaaaaatatttttgtgagggagtcggtcccaggcagtttgatgctctgtggaaggaggcgggaagggaacgttggccaagtcagttactgagatgaagatcgcccagctgccaggaccaccccaggacaagttagagcactgtttagctcctttgtctgtgtgatagacctaagaactgtattagtg

SEQ ID NO: 2385 - DNA, 1180 bp, Homo sapiens
ctctttattggttgcaagtggcacgcaggaacagagggagagtggggggctggtgggggaggggagatttttttttttttttcttgaatgtgcttcgcaagccaggctatcttccaaggaaggcagacagtgggagagcagagggactgactgcaggcaagcacattgaagaaagacactggcgggtttccccaccctcaccccaaagcagaaaactagcagacgtcagctcagccccgtcctgggcacagacactacacaaggagacgctggaagttaagcaatactttaatactgtaatatgtttgttttctttttctttcttttttttctaccaaaaaaaagtaagtaaactaaaacacaaaaacatataaataaaatccatccctcttgtcggggacctgcaggggggcaaccttaatccaaacacctggctatcaaataatcagaatgtattgtctcagacaggatttcagttccgggaggcaggggcatgatgggggagggggccggaggctgagagacaaaagttccagagcctccctcgaaggttctctactactgtattctgtacataatgtaccatcccatgtggaatctgtgagtgtcctcttaagtagcgtgggctagccaatctgccgttcatggtgtattgtaaactccgaattccatatgtaataggatgcaagtctaagcgtttcatgtggacataaatgtatctaaataaaactttccctagcactgtggctgacctcacccttacttttatactttagtatgaaactgatgagaactttggtagtgagtattttttttatatatatacatatatatgtactatctatatatatatctcaagcatctttcaggtctttgtgtgtggctttcttaaagccctgttgtaaaaaattactatgtggatggcagtctctcacatcacagatgtggaaagtataattttatatttgtattttcaaataaataagtttgtgaaaggtttccatcctctactgtggtccagaaatcaatgtgtttgtctgacaaaaaaaaaaataaaataaaataaactgttttgaacagagttgtttggtgttctttcacttgcagaggaggtctggggtctgggagagctgttgttttgcttgggcgggagaggatatcatcaaatcgcacctgccac

SEQ ID NO: 2386 - DNA, 1153 bp, Homo sapiens
tgcccatttataggggaagagtgaaaaaaatcaggaggagctccttgagaaaccagctggcaacatgtctcttacgaagagtacatgaaaacatggagacattttataacaaggctggaaacagcagttacactaacatttgtatatgctagaatttcaaccattggctgaagatgatggagacagtgcatttcaaaagaaaatgaacagaatgaaatagacgaaaatggatttatgctcgtgtttcggtgatagaactatgactagattttttttttattttccccttcttttgtatttttcaagagttctttgatgaggtgttttacttttaaaatggaaaataagtatgggtcttcaaattagaaaatccatcaagagtttttgatctaacctcaaaatgaaaagtttttcatggaagtcatttttccagaatttatttcattccactgaaaagtctattggcttggaagttctggatgtgagggcgatctggctgcaacgtctgtcaccccattgatcgtcagggttgattcggctgatctggctggctaggtgggtgtccacttcctccctcagcactccatgtgcgtccctccggaggctgaagaggatgaccatccccgacagaggaggaccgatcttcggtcaagggcatatgagtagctgtgctcccttgctagaacctccaaacaagctctcaggttatgccactggaagtatattaacacatctttgctccctgaaaatgcccatgcttcctgagctttcatctccaaacaggagggatattgagtgggggcagaagcaattatggtatatacagccaactacagactgctgtttacacaggaacaccccaagaaagtcaggataaagccttgcaccagatgacctgatttacctaaaatactgcctctctttatgggcagtcccaggcagatctttcaggagtacccgtcttttgtgttgcagacacagatatgagaggacccagaaacggaggaggaataagagtttgagtatgagaacccatttccttcaagcctgccaaaacagtccagaacctgtgtgctgtgaactgtggaatgagccagggccactcagaagtcctccccacccaccagcaagccctgcaaaaaggagaaacaac

SEQ ID NO: 2387 - DNA, 1207 bp, Homo sapiens
gctgaatttgaagattagagaggatctaatgtttacttaggtaaaggggcataggttttgtagttaagatgaccagacagctaaaagctgtgatgggaagtatggactgctcctatttatagtctcagaaaatggacctttaggtctctatccgtattggcaattattagaagaaagttacacccttttgaaactacaaaagctgtcttggaatttccccctcttctccctatttatgtccccttagaatattttagggagcctataattattttctaaccaaggaaaaacttaagtctctttaagaagcaattacttttcataacatcagattgaataacccaccttgctgttcagcccacatcctactggaaacaaaaggtaagaaacccattttctggttcttgattgtttgggtctgaattttgtttttaaaactaagctaagtttaatgttttttaaaatgctgtttggaatatgaatagattccccgtaaaatgatttttcctaagttttatgctttagtaaatattcagtgctcacgtctgtgcatcatagtgcttgcgtttaatatgatttattgtagaatctcaacttttcttggtgtttgttgtctttgaaacattgtcttggtcattagggctggtgttttcacatttctgtggtcaaggtggatttcttatgtgtgcctttttgcttactttgtatatgaattttgtaatttaaattgcaagtaagttatatatatgtatttaccataaatagtattaaaagatgagaaactgttagactgaagttctgttgtaacataaccattatttccatcacagtatgaagactgcaaacgcagaaaacagattacagtctcttatccattttttgaaatccaaaaactacgaaaacaaaagattttctgttgttgagctaattaaatgtgaaccctgaccagaattgctgccttcattttgcacttagtgtgactaaactgtttcctgttgaacttcattattcattgcacagttgccacagactttgctgagggttttatgtaatacagggtatatatgtacctcataaagtgcatacagctctgaatcccagatatgtctgtctccaaagagttcatataagggattgtaggaactgtactagcatacacaggcctaatgcttttgtctgtaactggggtgtcttgactgaaaaacct

SEQ ID NO: 2388 - DNA, 1515 bp, Homo sapiens
cctccaagtggaagttggcaggatttaaaggatcacatgcgtgaagcaggtgatgtatgttatgctgatgtttaccgagatggcactggtgtcgtggagtttgtacggaaagaagatatgacctatgcagttcgaaaactggataacactaagtttagatctcatgaggtaggttatacacgtattcttttctttgaccagaattggatacagtggtcttaacagtggaatttcaaggtaaggattcaggcaaggttgtccaagtaaattgccagatttctggttttagttacattgtattcattcagcatgtctgaagatagatgaaagcttagatctttcaatggaaagttctgtctatccaatagggagaaactgcctacatccgggttaaagttgatgggcccagaagtccaagttatggaagatctcgatctcgaagccgtagtcgtagcagaagccgtagcagaagcaacagcaggagtcgcagttactccccaaggagaagcagaggatcaccacgctattctccccgtcatagcagatctcgctctcgtacataagatgattggtgacactttttgtagaacccatgttgtatacagttttcctttattcagtacaatcttttcattttttaattcaaactgttttgttcagaatgggctaaagtgttgaattgcattcttgtaatatccccttgctcctaacatctacattcccttcgtgtctttgataaattgtattttaagtgatgtcatagacaggattgtttaaatttagttaactccatactcttcagactgtgatattgtgtaaatgtctatctgccctggtttgtgtgaactgggatgttgggggtgtttgtggttatcttacctggggaagttcttatgtttatcttgcttttcatgtgtctttctgtagacatatctgaagagatggattaagaatgctttggattaaggattgtggagcacatttcaatcattttaggattgtcaaaaggaggattgaggaggatcagatcaataatggaggcaatggtatgactccaagtgctattgtcacagatgaaattggcagtattgaccttatactaaaaggcaggggttaaaaatgattatatacattttccttaaaacacttgcaaacattttattcagttgtctttagctacaattgctttgctttttaaaccttggcaattgtggcaaaattatattgcccattttgtagcaacttattttgctcccttccccccatttttgttttaatagggactaatgtgggaagaactggctaatttgtcacagtgcttagttacaactgttaatgtgtgacctgctgttggtgtacatgtgggtacagggtgtttttaaatccaacaagatagagtataatatcaatactgctaaatctgcatgtcctctgtgtgactgatagagcgttgctatttcatttttttaagacaaaatgaaagcaaaatatagagttccaatgtattggtgtaga

SEQ ID NO: 2389 - DNA, 1093 bp, Homo sapiens
ccgagttgctttcaaagatcctcattcctggagaaatcgaccatccttcaagacccgacctggatgactagctcctttaacgaaagttcgttatttaacttttaccaaacggctggtcactctgttcgcaaaccaccccaagctgggaacgcgggggacttttttacccccttcgtggggagggtgacgtcgcgcgtgcgtgcgcgtgcgctgaacgtagccctcgcagcacccgttgcgctcccgcgcgtgcgtgttgggatcgaatcgctgtttccttccgcttctcttcctctgtctcccccccatatccgtgcgccgagctgataaaggcgccattttggaggggccgcgggagacgtggtgccgctgcgggctcgctctgccgtgcgctaggcttggtgggaaggcctgttctcgagtccgcgcttttcgtcaccgccatgtcgggaggtggtgtgattcgtggccccgcagggaacaacgattgccgcatctacgtgggtaacttacctccagacatccgaaccaaggacattgaggacgtgttctacaaatacggcgctatccgcgacatcgacctcaagaatcgccgcgggggaccgcccttcgccttcgttgagttcgaggacccgcggtgaggcggcatggggcttgcagccttgaggaaataggtccgagtagttggggaaggctccaaggccttaacatagagaacggggaagcgggggctcttagagaggttggggcgagactgtatcgcccatgcaggagtcgagtaaggagctgagttgatgtggcttctctggcgcctcgccttggacgtccccggagcccattcgcaggctggagcgggaaactgaggcgctgagggctggtgtagtggttgggagcctggcgtgtttctgggtgggggaggggccattcctattatgcggcgcatgtgggctcttccacgttgggtgcgcatgtgcggggggtttgctggttcccaactgagcgagcttctcctcctggtgtttctcatcccttttactttctgcgatcccgcagagacgcggaagacgcggtgtatggtcgcgacggctatgat

SEQ ID NO: 2390 - DNA, 1102 bp, Homo sapiens
ttgttgacatataaatggtaaattatatttaggcttatcctgttttgaaatgatggtagtcatctttcttactgctactttcatgttgctttctagaaaacagcatttcattccaaaataactaggatctgcatttagaacaagaatcattatttgtcctgaccttttcagtcctacagagacgcatctgtggttcttttgtacttgccatagatgtaacctaaaaagttttggcatatttaggtcagcctagcggaactttttttttcatttaaatggagctgaataatggagattttgtgtctgcaaaattcctgagatcattgaaaaagtaacaagctgttccttgtttctgatacataaaattattttaagcattttatcaatcattaaaatttactgccagttgtgagtggctttttaattaacttgtctttcattgcacttcactctgcctgttttcaaggggagtaagattggtaacatttggggagactgtatctgtctacttagcgtggctgttttgagggactgtcccatcagtgaacaaactgcatggccttggagagagactctgggctcttggctcagatgtgttcatcaaatactcctttcagagctgttgtgggtgtaagtgacatgatgtggccaaaaatccaaactgtgcagttgcgttgtgacaaacatgcaatgtgctgtaaaaattcaatacagtttaaataaaatctctatattagtgctgctttgttgggtcgttttattttcatttctaaaaaaacttaatattcacttattctttgaccatgagaagagtagaacattgtacccctttctcccagcaatttccaatttatttattttgagatggagtctccctctgttccccaggctggagtgcagtggtgcgatctcggctcactgcaacctccgccttctgggttcaagcgattctcctgcctcagcctcctgaacagttgggactacaggtatgctaccacgctggctaatttttgtatttttagtagagacagggtttgaccatgttggccaggctggtctcgaactcctgggttcaagcagtccacccagctcggcctcccga

SEQ ID NO: 2391 - DNA, 1099 bp, Homo sapiens
atgtaaccaaataccacctgtacctcaataacttacagaaaactaaaataaaaaaaagaaaggcttgaactattgattctcacacacacactcacacacacacacacacacacacacacacacacacacacaaaaataaatagaatgaaatatctggctgagtgtagtggctcatgcctgtaatcccagcactttggaaggctgagacaggaggatcttttgagcccaggagtttgagaccagcctcggcaatattagtgagactgtctctacaaaaaattaaaaacaaacaaaaacttctgaataaaatatctaagcgtttttcaattcagaaaaaacttaacagtttagaaagctttgtgttaacattggtgttttttttttcaggaaacaaatgaaaacgtattttttttattctctgttgttttttgttgttgttgttgttgtttggaaacagagtctcactttgttgccctggctgtggtgcaatcttggctcactgcaaccttcacctcctgggttcaagcccagcctcagtctgattctctagcctcagcctcccaagtagctgggattacaggcacccaccaccatgctcggttaatttttgtattttaagtagagacttggtttcaccatgttggccaggctggtctcaaactcctgacctcaagtgatccacccaccatggcctcccaaattgatgggattacaggcatgagccaccgcacgcagccccattctctaccttattctatatagttttactacattttaatatttttagatataaatgtagaaattatagttttagttttaatggttcctgacatttttttttaagtttattcagagcaaatgaaaactgcttttaggccaggcatggtggcttatgcctgtaatcccagcactttgggaggctgagtgaggcggatcacctgaggtccgaagttcgagaccagcccagccaacatggtgaaaccccgtctctactaaaaatacaaaaattagctggatgtggtggtgggcagcgggcacctgtaatcccagctacttgggaggctgaggcagggagaattgcttgaacctaggaggcaga

SEQ ID NO: 2392 - DNA, 1320 bp, Homo sapiens
gttaacccttgatgtctagagattgggggctggtgaagggggtttggcttcaatgactggataatgatatctttcatgagagagattataagaagaagggcagataatatatgaataaagttcagccaaaaggatcaaatgagaataaaacgatttaaatatatgtacacacgcatgcacacacacacttagtcttgtaatttcaggccagaaattctcaacactattttgcatctgttttctttttctaagtcatgataatatagatgttctggtctatcataaaagaatgtttatgtacatttcagtcattcggtatgtggctttgtaaattaaagtataggcaaaacatttgtgttatacatgatatataatttcattttgtaaatgttgattgcacatgtggtcacattattgttgagactgcttttatgtgacctgtagtctcccacagaacctaaagtaataagctggcttttctgtgatagccacgtttgcgtatttctttccctatttcccttgcctgctaatgttgaacagcatgaacttgctttctgatgctgttttagactgtccctgttgtatctcaataatatctttgttttccttcagcctttattactataattgttcattctacatgaaagctaggaaactgaaattagaagagcacttatctgctacttgccagttttgcgtgagtgtgttatatgtatgtgtcaatttccctttaaaataactatttattttaaaataactattggcaataaggaaactgttcaaagtagaggcagatcttgatagaaagatgttaatcacagggttgtttataatagcaatatacatacacatttggctagtactaggtgaataggaaaataaatcatgctgtatgtatacaataagaggtcaagttgccaataaattattactgttaatgttctgggaaatgctgaaactatgctaagtgggggagagggaaagcaggtattgcagttttgtagtgaagattgggctttggagtcatatctgagatgtaagtagcagcttttaaattctagctatgaccctgtgcagatcacttaacttttgagtgtcaggatgtttggaaggacaagacaggaaagtgttttaatacagggttcagtatttagtaagccttcaataagtgatattacatacatgtaataaaaactaagcattgaaaggactaggaaaaatgcatcaaatgttagttctgcaggttatagaattatacttttatgtaattttaaaatttcagttatgaacatgtttgtccattaacaaacttataatagc

SEQ ID NO: 2393 - DNA, 1295 bp, Homo sapiens
acccacctcggcctcccaaaatgctgagattataggccggagcaactgcacctttaattttacactttggctgggtgcagtgcctcatgcctgtaatcccagcactttgggaggccgaggcgggcagatcaggagggcaggagttcgagaccagcctgtccaatgtggtgaaaccctgtctctactaaaaaatacaaaaattagttggcgtggtgatgcgcgcttgtagttccagctactcagaaggctgaggcaggagtatcgcttgaacctggagagcggaagttgcagtgagccgagatcatgccactgcactccagcctgggtgacagagtgagactctgtctcaaaaaaaaaaataagaagtttaaaaatgttaaatagaaaaaaacttacataataaggatataaagaaagaaaatatatttgtacagctgtaaaatgtttgtgttttaaggtattattacgaaagagtcaagttttttaaaatttaaaagtttataaagaagttacagtaagctaaataggtattttttaaattttattatatttttaagagacagggtctcactttgtctcttaggctggagtacagtggcatgatcatagatgaactcctgggctcaagcgatcctcctgcctcagcatcccaagtcactagaactacagggatgtgccactatacctccctaatttttaaatttttttcgtaaagatgagatctctccatgttgcccaggcttgtctccaactcctgacctcaagcaatcctcctggctcggcctcccaaagtgttgggattacaggcatgagccaccgtgccaggtctatttttaaaataaatttcatgttgcctaagtatacagtgtttataaggtctacagtactgtatagtaatgtcctatgccttccattcactcaccactcactcagtgacaccaaaagcaacttccagtcctgcaagctccattcatgataagtgccctaatgcaggtgtcccatttttatcttttatatcatattttaattgtaccctttctgtgtttagacagattcacaagtacttaacactgtgttacatttgcctgtagtatttagtacagtaatgtgctgtacagatttgtaaccacggaacaataggctatactctataacatagatgtttaaataccatctagatttgtgtaagtgcactctgtgatgtccgcacaatgacaaaattgaccatacatttctcagaacatacgcccattgttaagtggtgcatgactttataatatttttatattatgtgt

SEQ ID NO: 2394 - DNA, 1567 bp, Homo sapiens
acctgtaatcccagcaggcatgagggaggccaaggtgagtggatcacctgagctccggagttagagaccagcctgtccaacatggtgaaaccccatctttactaaaaatacaaaaattagccaggtgtggtggtgggtgcctgtaatcccagctacttgggaggctgaggcaggagaatcgctcgaacctgggaggcggagattgcagtgagtggagattgcgtcattgcactccagcctgggtgacagagtgagactgcctcaaaaaagaaaaaaaaaatcattttcttgtctttggtcgttcagtatctcttctctgcttctgtatttcctaggaacatgcttttgaaagcagccagaaatataaagaaggcaaatacatcattgaactagcacacatgatcaaggacaatggctgggactgattggacagcatctacccaacccagtgtccacgtgaacgccattcaaccgaacattcttcccaagcgtgagagagtgactgacacttggttccatccatttaggggccttgccatccggggcatcctcccaccctgacgccatctttctggtgaccggcctctaaatcgctgtctctctgtctctttgctttgtatctgtttgtgagttgatcctggcttctctctctgttctagttttggctgaaaacaaaacaacaaaaggaacagatccttgaccgcatggcggcagcccaccttggtaagggccccagggcccatgcgagagctgcctgatggcctcttgtcaggagagcagtggcacgggggcgtgaggaagagggaaaggggaaactctaagggtcctggcgcggggaaggggtggaagggtggaggtaggaacaaaattgcgccgctcctggagacctgataacttaggcttgaaataattgacttgtctaaaaggacaaagagaaaaaaaaaatacctcatgactgcattctctctgactagaagcttctgttcctgacaccaaatgtgccaggttagcaaatgagcacaagatgtggccctgattctagttggtggggcaagggcctggttctcctgggctgagtgggggagtgtcctggcagcagcgagtgacctgggcagtggccaggtgggtgcgatgactctgatgcctcactcagtctctgggcaatcatcatctttgcctctagccaccgtagataaggtgtgaagggactgctgtttgcaatgggcttaccatccaaatatcccaaaggctttgaccagcaaccaagtaaaatcagtaattgaggagagcagggcacaaaggggctgcagtttgggagctcctgaagaaatggctcagatattgagtcagagaaataaaaagtaggatcagttagcaattctaactgcccttccttctgacccctcataagaggagtgtggtgagggaggggactgggtaggggtcatcccaggaggaggggtttacattggaaccagttcaggttcggtgcatctttcctcttcggttttacagtggcttccgtgggatcgtcaatttcttgttcttagagtttcgggtgtttttc

SEQ ID NO: 2395 - DNA, 1199 bp, Homo sapiens
tgtgaccatttatttcagaaggctgaacataagaggtttctactcagcaatacttagatgtctaactgtttaattgctacagagctttatagatatttagagaaaagacttaatcaattagtaaataaaattgcctatggcaggattctttcttgaattaatattaatccttaaattgatttttctgggattatacaaattcctttttatataaaagtatattgtttaaaacagtagctatagccattaaccaaaggacagatgatatatatatatatgatatatatatatatataagttcttttttagctgtacctacgtacttatatcagcaccatgtatgtaggtgtgatagtactttcaaacagcgcctccacctggcctactctgttatttccacctgtttgggtagggccatttaacttccattatgccaaacttgggatgggattttcgaagcagacaacactatttcatcgtgtttcaaattggaaccttgaggctagttagtatcacactcaggccacactcagcacttgcccactcttgtttactgccttgtattctagttatttgtgtatttgtctccctcactagattatacgctccttgtgggcagggactgtgtcttttttcatctttgtatctttcatgcacctagcatagtgctttgcacatagtagtcactcagtgtttgttaaataaagctattagtgtcattaaaattcaaaagacagtataatgtgtgtttttagatattttgtgtaaaaattaagaatctaaattttttatcggtaactcttctagttatttcctttggaatctagttttatgttcaataatagaaacttgaaatctttatcaaaaatcacaaggacccaaattcatgtatttgtccctaaagtaaggtgagtgatgatggtttctctaaacctttccagtgttttaatttgttaatttttttttttttttttttgagacggagtctcactttgtcgcccaggctggagtacggtggcatgatcttggctcactgcaagctccgcctcccaggttcacgccattctcctgcctcagcctcccgagtagctgggactacaggcatccaccactatgcctggctaattttttgtattttttagtagagacggggtttcaccgtgttagccaggatggtcttgatctcctgacctcatgat

SEQ ID NO: 2396 - DNA, 1371 bp, Homo sapiens
cttctttttgtttctaactataaacttggatcacctatgttaaaaccttatttcacattccacatcattttagaatttattttcgaaggggaatagtttcaatgttttattcacttgggctttttttcttccccctctttctttaaagaactgctcaatattcaatctgttgtgaagaacctgatttgcactctgtagtgtttaaagaaacaaagaaactctaatattgaatctcttaaatttagtgtatgtaaacagcttacaaatacgtattgtctaaatgcatttaaatctgttttattcaaagaaaagctaaagcaaaaacactggcatatgaccatgcaagactgtcagtgccaacaaagacaacactaatcagcacatcgtacactggattgcagtgcttcccagattattgaaaaatgttacagacaacttgcctgatttttaaatgagcgtaaaaggccctctaacctatgcaggtttccccattatgcatatagaaaatgctagtatgttttgctcacttcatatgtaacaggtgcccttatgttgtgctgtatcctgtgctttttctgtgggaccattccattcaggagcaaagagcaccatgattccaatcttgtgtgtgtttactaacccttccctgaggtttgtgtatgttggatattgtggtgttttagatcactgagtgtacagaagagagaaattcaaacaaaatattgctgttcttcagttttgtttgtggaatttgaaattactcaaatttaaaataaattactggactgtggaaataacatagaattgaagttttaattaaataccactcaaacgaaaagaacagtagtttttgtagttttatattggatactgaggcattagggaggcatgaaaggaagaggaatgaggattgagacatgtgaagacattgtgcattatatcaatgtgcattcctgtagttcattaacaaggtacatgcaatagtctaaagaaccagagtcactactatagtggcttaacatttaatctgtctccaatattttaaccaagtgacaccgaggtttttatcgaagcatttcacttaaatgaacaaatcatggctgttatattaacttgaaataaaatatatttaaacatgtagttaacatgctctttctcatcatgaattataaaggtgcccaaattatgggtatcttgatttttttcaaaaattggttgtgtgaatccagctcttgcttatggctgagaatgttcctaaagttcatttcactatcccttaatcctcaatagctacacatacccccttgcctagttagtcttgcactgctttacaactctcttaggcaaattacctaacataagctccacaga

SEQ ID NO: 2397 - DNA, 1190 bp, Homo sapiens
cttagatttatgtatcaacagttgcagcatcttttgtagtatattctatttttatataataatgttaaagggaatatgaaagaaaactgtaaaaaggtaaaatgataagattaattttgagtacacagtagtatgatatttaattgtaaattagaaggagttagactttatagtgtgttaacatttggagttactagtgcttgatatcctccttctgtggacagattacctccaaatttcaatctggaagatccctgaaataactactaggaaaaggtttacaactatatggcttttatatttttactatttgtattagaatatctatataaattgttcaatagaataactaaattgttcaaattttggttataaaagaaaaaaagtgtaaacacatcatacatatcatgtggcttattactgtgatgttattcctgtattcagttttattcagtcacagctacacagcagaagtttgtaatgtattgctggattttattttgctgtattagctcctcaagagttactgatctatgaaatggcagagaatggaaaaaattgtgaccagagacgtgtagcaatgaacaaggaacatcataatggaaatttcacaggtaaattttgatggtttgcagggaggagtgctatgggtttaaatgatatacttttcattggaataaaatagagatatattacttcttttatttttaatcttatattatcttcttagtaaattaaattatgggtcagtcagggcctgtaaggtgatatttcacagtgatggcagaaggagcctggccacaatcacataaacagtgttccaagtacaagattattacttgttaatcttatagtatggtcagtgtttatttggctttgctcagtgctcaattttattgtgctattttgtaattctagaagtagattataaacttactacactgttcttaaatatacagttatcaaaaaagttagaatgtgaatattatttaaaaatttattttaaaattatcgtttgagatgaataaactcatattttaaccaaattggaatttgtggtaaatttcagtgtatttgactcctgtttatacagttaccctgaaaatgatgacttttattaatatggatgatttaagtagaaactttccttcatgcatttaaaggaaaatgaaaaaaaagttttacttttg

SEQ ID NO: 2398 - DNA, 1229 bp, Homo sapiens
ataaatgtttgaggtgatagatatcccatttaccctgatttgatcattacacatgtatacacatatccaaatatcacatgtacccccaaaataagtacagctatgaaaaccccaaatattaaagtatctgattaaaacctcaaaaataaagagaactttctatactctgtaaattccctctgctagcagtcctgttcgcctgttaacccatttatgccagaggttgcaattttttaaatttttgcatgagtgaaaaatccgaccttagcaataaccttgagcaataggatataaataactcccacatgcttagcgttccaataatggaacactaggcataagtgggttaaatatattcaacttatgtatttaaaattttgtcagtcagggtacctgtacctttcatgagagttccttcacttccgtagttttgaaaaaacctctctatcctgtatctttctctctgaattacatatctgtggttaaattgaaaagtgtttgtgtttgtttcttttgccattgcatagttactctgttcatggacccaggcatgaagaatctataatgaacataatccggaaggaagtggagaaatgtgactctttcagtggttttttcatcataatgagtatggctgggggcacaggatcaggattaggagctttcgttacacagaatttagaagatcagtactcaaactcattgaaaatgaatcagattatttggccttatggaactggtgaggtatggacatgttaattgaaaagtttatgttttatgttctttgcaatagaaataaatatgggtaaaagattgctctcaccacccaggtgcggtggcttatgcctgtaatcccagcactttgggaggccaaggcgggcggatcgtgaggtcaggatatcgagaccatcccggctaacatggtgaaaccccgtctctactaacaatacaaaaaattagccaggcgtggtggcgggcgcctctagtcccagctactcgggaggctgaggcaggagtatagcgtgaacccatgaggcggagcttgcagtgagccaagatcgcgctaccgtactccagcctgggcaatagagcaagactccgtctcaaaaaaaaataaataaataaaaataaagattgtgctcaccctttcattggaaatgttaagttatggcttccagaatggttatttaatatgagtaccatattatatatggtatatatatatcttc

SEQ ID NO: 2399 - DNA, 1162 bp, Homo sapiens
acgcctgactaatttttggtattttttgtagaaatggggtttcatcatgttgcccagggtggtctcaaactcctgagctcaattgatctgcctgccttggcctcccaaattgctgggattacaggcataacccaccttccccccagccagaatcagtttattcttgctgtttgtttgtaacaacaaacataaacatcagagagactgataatctatacaactatagatatagcacagtgagccttgactacaactgcatgctgctaaagacagctcaatttatgctaatctgggctgtaggtagacttggcaattcactcgtaccccaaaggagcaaccagctgacccagggtatctagaaggtggtagcagctgctaatccttagatgtctacagaataatccatgaggtagttaattgtttcaaactcttagaaaatgatgtatgaacaactgaggctcatataaacattccagattatactcctccacccaccttttttttttttttaaggagaaatgatatacttaactgaatatatcatgggaatcagtgtctcttccttcctctcatcaacacctcctcactccccaaaacgtggattctgatctgaattataagtcacaggatagaataggggagcgatagaatagttaacttctttgatttataaggttgagtgtatcagatggttctgtgaaaataaaggccatacttcttctgtatcagagtgtagtatatatttacatttgaatcaataggtcattgtgccttttctgtgaaatgaacctcaaatactagagtccctgagattgttgaaccacttgttatgacagtccagtaaagaaagctaaacttgaactgaaatgatctttgtgtaaggtggtaagttttttactttctggatcagtgatgattgattcatactatctagcaattttctttctttcccctaattggtagcattgggcagaatgagctaccttgttataatgagtttctgagaccattttaaggactcttcacagttcactgtgataaaagctatatatttgaagtactgtctcacacctttgttcaaaaggtacagagtatgtttattggggtctgtgtacgtaaactagacttcataaaacagttttcccaggatttttctttttca

SEQ ID NO: 2400 - DNA, 1236 bp, Homo sapiens
catctcaaaaaaaaaaaaaaaaaaaaaagaaaaagaaaattagtgttgacatgtcagataatttgatcttagagcttcatctgcctacctaagagagtacttagctttaattttttctcttcataaaatgacatatttacttacgaatattactaattgtgagggtagtatgtttcaaatactggcaagactaaatggaaagatcagagaccaagggatcaggaaaaatgagccatcctttcttagaagtggctaaccccagatttgctgattcactggagcatgaataatttgattgtgtctctgctcatggaatcttaccagtctttccccgctttaatgtgtcaagctttattcttctatgtgtaatctcctaaaaaaatgtaaatggggaagaatggtgaaatcttttctatcattattacattacataatgtgtatcttcctttttgagaactatgaaggagcagctattactattcacatgcagattttcctatttagttatcacgtaactttagagctagaagatactttaaatcacctttcgtgcctctctcccatgggctttggggggtccctgttctccttagccaaggctggaggccaagagcagccctcgaggatcgtcgtcaggactgccacgagtggggcagccttgttttcctgcctcagacatgtgtagttgagtgggaaataaaaggaatgaaacacctctcttctctgaatttacaaatgaagcctctgaggtccttaggttttataattgcccaaagctgtatcagacaattattttattactttatctagcactctagagctcagtgtcctgagtcctgccttagtacctaatctgttgctccatgctgccctctatttttccaaagctagcatttcagtcactagtgaaatatgaaattgacataactgttaattgattcttgtaacatacctatgtacagggcataaaaagtagtagtatcatcaatagagaaaaaggtgaatcttgacccatattttagaacacataaactatttatacaactcacagggaatcctaaaatctcaaaataaaattctcttatattaaaataagtacctagtccttttgtgaattgttgactcagaaaatgaggacatttctctctacaggtgaaactttacctatttagaaatctatcttctgaaaaccagggttctaggataattttgaatagttccagacccctgaagtca

SEQ ID NO: 2401 - DNA, 1130 bp, Homo sapiens
ttgtgtaagcacgctgatgtctgcacaatgatgaaatcacctaacgatgcattcctgtcatttgtgatgcataactgtagtttaaagtgttaatagcttgaccaggatttgttaaatgacaaccagctccttaattttccttggcattttccttctcttagaggagaccactttgtattcttttagttgatctttggtatttggtattgatttttcagtttcagcattatctgttgacttcccacttctgagcatgagaatttagttgtctctcccttccttccaccttagccacttccccttcccctctccctgttacttaatcctaccgcaatagttatatggtaattttagataactgttaaatgtttaccttatgagcatatgcgtaggattcacagctgaaattaggtagtaagttttgattacttttctagcacaatgtttgttttccttggagctgatgactgattttatttgtgtttgcttagtattctaagtatttatcactaattcaaccctgaacactgtcacttgcctaagtctcctttcaagactatgagttgttggcagtttattcttctaatgtctcatgtggcctttttacttacatgaaaggagcttgcaggactggtgcttcatattgtcagtctttcagtttagccatcctgattgttggaaagtagtatctcaatgtggattaatctgcatttccttgactaagtgatgttgaacaccctttatatgtgcatgttggccatttatacatgtgtttcatttaattttttttttttttgagacagaatcttgctctgttgcccaggctggagtgcagtagtgcagtcttggcttattgcaacctccacctcccaagttcaagcgattctcctgcctcagcttcctgagtagctgggattatataggcgtgtgccaccgcacctggctgatttttgtatttttagtagagacggggtttcaccacattggccaggctggtcttgaaatcctgacctcaggtgatccacccgccttggcctcccaaagtgctgggattatacgtgtgagccactgcgcccggccatttaatttttttttttttttttttttttttaatttttagagacagagtc

SEQ ID NO: 2402 - DNA, 1139 bp, Homo sapiens
cctttttaattgcttatatcacaatttaatgcctatttatttatttatttattgagacaagagtctcgctctgtcatccaggctggagtacagtggtgtgattctcggctcactgcagcctctgcctcccgagttcaagcagttctctctccacttagataaggccttctgtcaacccccaattgtttactaattaggtagtgttgctttttttttgacatggtatttatacttacttttcttcacattacattcatttggttatactgcctattccagtaatctcaaaattttccactttgaatctaccctaattcctctctgaacaggaattttggcttatgcatctttgtatttgaaacacataagacattattttgtaataatgtagtcttattttattagtgatttaatatactgagctatcttagttgttgtattttaatcatttagattatttatgtgaactctttatttttagtgtaatgaacaagtctggggtgaatcgtgtagtttggaaacgacctcgactcactcacaatggacctgttagaaggagcacagttattgaccagattccttttctggcagtagcaagagcacttggtaagtaggacttaatttggtgaaattatattgaattttctacaatatatggtggcaaaataaaagaggagacagaactaaacccttacttggcatatagtgagggtagagatatcatgatattctattaactgctttagaacctaatcgaagccatgcatggtggctcacgcttataatcccagcactttgggaggctgaggtgggcggatctcttgaggtcaggagtttgagaccagcctagccaacatggtgaaactgcatcttcactaaaaaatacaaaaattagctgggcatagtgatgtgtagctgtagtcctagctactcaagaggctgagtcaggagaattgcttgaaagcaggaggcagaggttgcagtgatcgcatcactgcactccagcctgggcgacagagcaagactctaaaaaaaagcctaattgaggggaaggtttaggtatataattcactgacagttgccctttgttcatgagtcacgttcaatgttttgctaatttctatctctgtttagggaag

SEQ ID NO: 2403 - DNA, 1148 bp, Homo sapiens
ttgttattgctattcctgcggtctttgattctgacccatttttagcttctgtgcatttacttttagttaatctgtttgatttgaatacactgttcagttagtctcaaacactttcttagcatttatcttcaaaccttaagtgtaaaaatgagacagaggcttagaggtgtcctcggaattttagaactaacggtttaatttcctgactcttagagtccaaatgttttcttagattgatgtggattggtttaacgtaattggaagtttgaaaggtacatgtttctaaagcttttaagataatgatacttagaaatcactgattgttccttgatgatgaatgcctttaatatatgtttacaagctccaaaacttttaatatatcttaccatactctgattactagaaatatataaatgaaaccaacatttctctatcctggaaaaaaagtgtccagtagagtctgtccttcctgagcttagttaaagcaattcttgtatctttgttttatattttttaaccttttccaatccttaatacatttgtggtcttactgggatatgccaggaagaaatttcttccttctatttcttctccctctttttagctgtctactgtataccatgtagaaccacaaaatgcatgtttttatctgttctgttgtgtagaatgtatatgctgccagccagccttactctttcctctctacactgccacagctacaactgcttccctgtcaaacattagaaaaacacaggtgggcacctagtgcatggtgttacagtaaagacaactcgacatcatactgactacaaattacctcccctagtttaaaggcaaatagtagctatcacaaccaaatttagaatgtgacaccattgtttaggtgtatgtgattcatttttattatctaatcacatatttttttcccttctaatttgtgccctgactgcaccttgtgaaaggttagaactgggataataactgtgatgaacaagttattcaagaaatacttgcaaggtggacaatgttaactttgaacagtgaacacaaagggtaatgaattactaataccatagttcccttctcaaacagcagtgacagcttaattttgataggatccctatgatctttgtaagcgtattcatgcc

SEQ ID NO: 2404 - DNA, 1241 bp, Homo sapiens
ttgtttttaattcaatttgcaaagcctctagcagatagttctgaaacctttgtgaacgctttctgtaacttatgaagcttttggaaatttggtctagtgatgagtaattctttctttctgacgttaatcatttgcattttatcagtggctccaagattaatataaaaagagaacttcatttactctgagtgatcatgtttcaatgtgttaatgttttaggagtagcagaggataacatgcaactgttaagatctagatcatgctaaaagtattaaagttggctttcagagattagttttttcctacttaaaattaagaacttaaagattttaatcaagataatcctaaaatgtcttaaggtgcaacttattctggagttgataccagttggaatagtaaagaccaaaggagaaattgtgagttaatgtttacttttttattactattttaatcaaatggctttacaacttgaccttttaaatgtgaatatatttttttaaaagaacactcaggtatgtgaagccataattgttgtgttggaagttctcagccctaaaagttctgcacttgaatgttaaatatatgtgtgataaaaatattttgattggggttttctgtgtgggcatttacattctcctggtgacaggtgttttggtgaagagaaaagcatcttgtagatgtttgagatctgtaaccatgctgtctcaacagcagcagcagcagcagcaggaggaggagctaccatttattgaatgcctgctctatcataggcactcctctaggcactctacagacataatttcttctacttacaaccatcctggcgggtagaatagtatttttatttcacagattcaaaaacagcctaagagaagataagtggtagggacaggctttgaactcaggtttctctgattccaaggtccatattcttttcactataccatgatattaaaaaggaacaagtggggccaagcacagtgggtcacacctgtaaccccagcactttgggaggctaaggcgggtggatcacttgaggccaggagtttgagaccagcctggccaacatggtgaaaccccatctctactaaaaatacaaaaaaaaatagccaggcgtggtggcgcacgcctgtaatcccagctactctggaggctgaggcaggagaatcgcttgaactcaggaagcagaggttgcagtgagctgagattgtgccactgcactccagcctaggcaacagaga

SEQ ID NO: 2405 - DNA, 1179 bp, Homo sapiens
cactgcaagacaaactatcctcggaaacctagcaattccttcaatggaaaaacaaggaactgaatctctcaagacagcaagcatacaaactgggttttctaggacagtcctcattccaaataattagtctgtggtcaggtatcaggaaaggtaagataactaacatttgtcgggtgtccactttgcatcaggcatagctactttatacacactattgcactgaaatcatcccaataacttatgaggtggatgttattgttccaatttgtacagttcaaggaactgtggcagagagaagtaagattgttgcttaagatgacaaggtcaagggtacagtcaggattaggatcctaggttcatttggctccaaagcctgtcatttctccactaaaactaccatgctgaatttttttttttgaaaatatggctggagtgccagcgagggggttttcagctcagtctttccattccagaatttttaagtgttcttgcagttgggtggtagggggtggagggagcaacccagctaaatcctgtgatttctgtgctccacaaataagtcaaacacgaggctctcaactgagaactttgaagtctgaaacctggggccaagaagtcttctgtttttattagtcaaagaagatgtttcaaaaaccagatttatcatgactggatttcagatgtgaaacccaatatacacacagacacgagtggcttgtcctcttggattatttctgaccttttactctcctctgaggatctgcgtttcctcagagtgcgaactctctgcctccccagctggcggaggtgtctggaggcccagctttgcaggcctgggccccctgctggccttgggaatttcaaagagcagggagggatgggtgggcacactggctctgatctggagccaggggctatttgttcctctaaggccctgggacagtagctgcggggaaaggaaaggaggagtccacctgccctgaaggggagggtcccggatgtgcctgccggtactggagttgacccgtttgatacctgacccatttttagctttgttattttggtagtctcctaactatgtgggctttaaaaatggtgttcccagcttgggcaataaacatgtgtatttggagtgtgtggtcaaccttccacctctctcaaccacctaaacccaagagc

SEQ ID NO: 2406 - DNA, 1164 bp, Homo sapiens
ctatcttttttcaatgcaggttattaatgatgatcaaatattcaaataatgagcttatctgcctatacacttagtaaaatgatcttaaatcatcttcatttgaagactatttaagaatattaagaaacttcaccttaggtttaaagagagaacttaaagtttgttaactttgacagaggttttttgttttttgcttttgcttttgaaattgccaagatagtagtagtagtagtagtagtggtggtggtggtagaaattgccaagataatagtagaagtagtagtagtaatagtagtagtagcagtagtagtggtagaaattgccaagataatagtagtagtagcagcagcagcagctaactgtgccagcaccattcagatctctctaaatctgttaataaatttaaccccataacagctctatgagatatattgttttcctcattttataaatgagaaaagacacagagagattaatatacttgccgtagtcacattggcttaaacaaatgaagttaagtttgtttagctagacacacaaaaaatcatttttttctttcccctctttagttattagaaaaattaaaagaacgttggctctctactggtttatggcataatctggagttggtgaagacagtcattgtagaaccacagggaggagaaaaaacaaattttgatgaattactgcaggtgtactatgacgcaatcaaatacaaaggagagaaaggtaactggaaattatttcatggtcggtgaaaaaatattttttattacaaagtaagaaggtacaattataattttatatttttagatgaattacacttaagagaaaaattataatcctgagtgaaaagaaaataaattgggtaaagaaattcttttaattgtacttgttctcctatgaatattttcacttgagtatgctgattcaactttaagaaaaacgatgccatcatctcacagtcttcagtgcactacctgaaatagtttgtgcaaaaaggcagttaggatatatataaatatattccttactagccaaatgagacctatattctgatgcatttagtacacttggtgcttgtattctattacataaggtaaacttgaattttcaaaacataactgaaaactcaattccaagttagagcatatccatgaagag

SEQ ID NO: 2407 - DNA, 1099 bp, Homo sapiens
tatatttttctcatttttggcaagaatttacagttgtgtaccagtggatctctagataaacactgctattctaacttgagtaatctacttttgagaataatttttatggaaattgcttctttcccctcaaggactctctgttacactcttttttaaggtgactttgagtcttaaatgccataattgaaaactgcttccaaaatctaggttggaaataaataaatgacttatgcagtttatttgcttttcaggtttgttttggaacagtacaatgcactctcctggctaacctgtgaccctgcaacccaggacagacgctcatgtctcccaattcattttgtggtgctgaatcagttatataactttattatgaatatgctgtgatcttcatttgatggaactgtgcaagaaaagaacaaggaaaaatggatgtttcgctgcaggattaagttacaattatcttctcagtgaaggtcatttgtgatggggtctaattcttattacttcaacaaatattgttttgacttggggggaggggctataaccctgctatttttcattgactctattgaactctttaggatgatgactgatcatacaaaacgtattataacattttcgtagcaaaattaaccttttttttttccagtcacagtatttgtgaaaagtaatgagccatagtacccagtcatgttaaatgaatattaaaagcatggagaggaaacatgaggaacaatgaatttcaacatatggcttcagaacatgaagatgttcttgtatggattatagtatctagtattcaaaaatgcctgcatctcttctcttatttattgtaagtttttaaatgtataaattgtcttatatttcttaacctcttttataaaaattttcctagaaggtttatactgccttcttgctttaaagcaattggtctaaaatatatgtaatcgtcttaattaaaaagttgcagtagggttgcttttagagtattatttttttgtaagggggtgggtgggacagtaaatttgtattgtctcgatgtacagtttaacggggatagagggggaataatgtccataccattgtgtgtggaggattt

SEQ ID NO: 2408 - DNA, 1099 bp, Homo sapiens
gttacagagtatgtattttttttaatagtcaccattataatttaagggtggaagtgatgcaagttcttaatactaggactcagtattggattcaaggtaggatttacaagaataaattcattgagtattaactttgcattattcctttactgtgttttttcctcagggaacttcttcattatgaaataactttagccacaaaaagtggagaaaataatgtgtaaacacttgtacatcagccaacttaaggattttacatacagttagaattcccatgtactgtttttcttcttccagtcttccttccactgtcctgaatttggtaccttttttttttttttgagacagagtctctgtcacccaggctagagtgtagaggcacgatctaggcccactgaaatttccgcctctgggttcaagcgaccctcctgcctcagcctcccgagtagctgggattacaggtgtgagccaccacacccagctaatttttgtatttttagtagagatggggtttcaccatgctggctaggctggtctcgaactcctgacctcaagtgatccacccacctcggcctcctgaagtgttgggattacaggcatgagccaccgcacctggcctcaatttggtacttattatttcagtacatgtttttatacgtgtagctctagttattcattttaattgctttatggtatttccttatgaatatatagtaaatacctaaactcttaaagatggatatgttggttattttcagtttttcaccctaacattttccattttgtttggtacacatttccttgtttacttgtataagaatttttttaggaaatacatctaaaagccattttcaacatggctatgtccattttcaacattaagggttgttgcccagttgcagttcagcaactggtatatagtttaaaccctcatgaaccagcagtgtatgagaatggctgttgcactatattttcctctatagttggtcttacaagatttaatttcagtaatttacagcatgcaaaatgtcatctcattgtctaaatatgtgtcttccagatttctagtgagattgagcatcatttaaaatgttttggg

SEQ ID NO: 2409 - DNA, 1152 bp, Homo sapiens
tttctttcccactagtggaatttttatcaaatagttctgttttagttcctaaactagacttttttattctttttgaaaaggtggattttaagtattttgtctaaaatggttttagaggaaggcattaaaatatgcatgttggcaacacaggtttaaattcttggtctttaagctgaacttttatttttaaaaagttgttttctcttgtccaggcgcagtggcttatgcctgtaatcccagcactttgggttgctgaggcaggtggatcacgtgaggtcaggagttcaagaccagcctggccaacatggtgaaataccatctctattaaaaatacaaaaattagccaggcatggtggcacacgcctgtaatcccagctactcaggaggctgaggcaggagaatcgcttgaacccggaaggcagaggttgcagtgagccaagatggcgttactgcactttggtgttggtggcagagcgagactccgtctcaaaaaaaaaaaagtcatttttaaaagtattttcagaaatttctcagaggcatatagagatttaatatgctaaaattttacataatcgatacgtgtgacttgctttggttagtttgctcctttagtaaatacagcatttctaataatttacttaaaaaaattagtattacattttgtactttaggtcttctgcccaccacaaatctagcttatttcttaagtgaaggtaagacagatagacagtgagctactacatgtgtatcctctttgccatagaatatataggaggttggggggcatacattgataactgactctgttaaatcggcctctagctcgctctcaaatccatttctgctttttctctgttctgttctgtattgcagggaattaaatttcctagactcgtttgctttctggagttggctaataggaggcactaacagaagattggagggtgagaggagggaagaagccagggtctttccccagtccctttttgagccaactccagcagcagctcccttgtgtcctattaacacagccccttcctcatggtcccagttactactgagcagatcctgctatggttctagcaccatcctgagcttctgggatatggtgagactacatcatcttattgtcctttcagtgctagaagtcat

SEQ ID NO: 2410 - DNA, 1215 bp, Homo sapiens
tgttccccttcctgtgtccgtgtgttctcattgttcaattcccacctatgagtgagaacacgcggtgttcggttttttgtccttgcgatagtttgctgagaatgatggtttccagcttcatccatgtgcctacaaaggacatgaactcatcattttttatggctgcatagtattccatggtgtatatgtgccacattttcttaatccagtctatcattgttggacatttggcttggttcaaataacaagagagggggaagccctaccaacccagcttctggtccataagccctgtttctcaaactatgccaagtggaaaggcgacggtaattcacaagttccttccggggtctagggtagcagaactgcattgtatcccacccccattcctactgttaaccaagaccacctgggcttttcctccctgactccaccaagatcgcacgcatggaggccttgccaccgcctccgtagacgcccgcccccagtgcgctcggtcacctccctcctgctggctgccctcgggggcagcacctccctcagagccaaagacatcaagaggatcctggacagcgtaggcatcgaggcggacgacgaccggctcaacgaggttatcagtgagctgaatggaaaaagcattgaagatgtcattgcccagggtattggcaaggttgccagtgtacctgccggtggggctgtggctgtctctgctgccccaggctgtgcagctcctgctgctggttccacccccgctgcagcagaggagaagatgaggaggaggaggaggtgtccaaagagtcagacgatgacatgggatttggtctcttttattaaattcctgctcccctgcaaataaagccttttacacatccaaaaacaaaaacaaacaaacaaacaacagttggtcccaagaagtgacagggcagggatgagtctccccaaaagaaaccctgggaaaatctacttactactaggcaggtatctaagatgtaaacaagtaggcaaatacattttattctttgtcaattatgacttgaaatgctctactgatttcataataaaatagcatctttaaataactttttccatatatttccagaatgctcattatctgtgtcacatggcaccatttttattatttaaggtgtacaacttgataatttgatatatgtatacattgttaaacaatcaccacaatcaatctaattaacatat

SEQ ID NO: 2411 - DNA, 1130 bp, Homo sapiens
agctgtaactacaggcctgcaccaccattcctggctgtggtaattttttatgacagccctaggaaactgactcacaaagggggaaactgttttaggcaaataccaggaggtgagagagcatggagtatttgaggacccgagttaaatgtaatctagggtgtgagaggggaagttacaagagatgagggctgggcacagctgctctcgcctataatcccagcactttgggaggctgatgggggtggatcacttgaggtcaggagttcaagaccagcttgagcaatgtggtgaaaccctgtctttacaaaaaaatacaaagattagccaggcatggtagtgcaggcttgtagtcccagctactccaggaagctgaaatgagaggattgcttgagtttgggaggtagaggctgcaatgagccttgatcgcaccactgcactccagcactctagcctgggagataagagagcaagactctgtggagagacagagagagatatatgagactggaggttaagcaaaggatatattatgaaggacctttgaaatgtcacgttaagttagaactttttcataggaaacctgagaggtcactgtaggctttttagaaggtaagtgatgtgatgatatgattagatttgtgcttggcattgtaggccacttaaatattttctaatatattcagttatgatctggctgcagtgtggaaagtggatggagatggcaaatatggaaacagagtgacaaggcaggatactacagttaagtccaagaagatagtgactttcttacactagggtgtttctgtggggatagagagaaatgcattgctttcatgttgaggaggtaagatagacagggcttagtgattggttggatgtagggaatgagagagcagtgacaactggggattatgctgcgcctttggctcagacagttgggtaaatacactgagatggcaaaaccatgcactgagatctgaaactcaagtggaagaactatagaagtatgtgtggacacagatatacaaactaccatcagagaatactataaacacctctacgcaaataaactagaaaatctagaagaaatggataaattcctggacacatataccctcccaagactaaac

SEQ ID NO: 2412 - DNA, 1109 bp, Homo sapiens
cggacaaaggccaagggaggcgcaggagggcccaggccgggccaggaggtgggggcccgctcggctgggggccactcgggtgcggcgcggagggcgggggggtcggaaccgctggtgcccaggacccgcctccggccccttaatccggatcggttcggtccggattagtagtgatcggtgtaaacacactagtgaaaccgcgtgtttcctcgcgagatttgcacggctgggaggcggggggggtcctgggggggtgggggaagcgccgacagtgggggagcagggggaggggacgaggaaggtgggggggggtccccgctgccccggcgccccgccttctccaatcagcggccgcgctgccgggcaggggttaaccaggggaccccgcgccggcggaggaagccgcgcctcgccggacggctgagggcgggcgacgggcggcgccggctgacgggccgcaacgcgaggggaggtccggcggcccggggcgccctgcgactgcccgaggccggaggcccggaggacccgccgccgcctttgtgtcgccggcccccgccccgctggactggcccgggccggggcggttgggccggcgctgaaggggcttggccgcccgggtccacccgttcccggatccgcctcgccggcccccgcgcccgcccaacccctgcccagcccctcggctccgcgagtttgggtgagaagtgcggcggcttttcccagggatggagtttagaggacgctaatcctatgtgtgagcggcggaccccgcccggacttcccggaggcgcccggttagtgaggcgacggcgcccacccgcgttcgcgggctcccggccgccactccccggagccgccggcccgccccagccccgcgcgtcgcccgggagggcgggctgcactccctccacgtacctggctggcagagcgtctccagggacaaaaggtgccctgggatcaaagccgagcccccgcccccgcggggatgctgccctccggaaggaggggcgctgcccccaaggtactctccccgggcacccagggggaggttccatttcaacctccgatgaaaaacacggccctcccgggtacttaggagggtctgaggg

SEQ ID NO: 2413 - DNA, 1227 bp, Homo sapiens
ttcccaggtcagaatatgatcatttaaaaatgtcatcacataaattgctagaaggttattagcagtttgagagtaccaattttttcacaccctgctaataatactgaattttatcattgtaacctttggcataaagaaaaataccttgttttaacttgcatttgttcattagttatgtatattaaacatcatatgtttaatggccttttggatttctcttttaatgcttgttcaggtcctttgcatatgtctcttttgaaatacttgtgtgttttggtttttgttttactgataggtaaagcattatttattaagatttaataaattatttatattattaatttgttatattgtaaatatttttgcttgtttgtaatcttgtcttttaactttatgttgacttttaccattcagatgcaaaaaaattgaagtagttaaatttatcagtgtttttcctttatgacttatgggatttgtcttattcttagatgttcccatatggtgtattcctatacggggtgtgtgtgtgtgtgtgtgtgtgtctgtgtgtgtgtgtgtaattttttttttttttgagacagggtcttgctgtgtagcccagtgtgtgtgtgtctgtgtgtgtgtgtgtaatttttttttttttttgagacagggtcttgctgtgtagcccaggctggagtgcagtggtgtgatcttggttcactgcagcctctgcctcccgcgttcaagtgattctcatgcctcagcttcccgagtagctgggactacaggcatgtgccaccatgcccagctaatttttgtatttttagtagaggcagggttttgccacgttggccaggctggtctcaaactcctgacctcaagtgatttgcccatcgcggcctcccaaagtgctgggattacaggcatgagccactgtgccccgcccatggtttatatttttaatgtcatgtttaaaaagtcctttaccactagaaaattctaaaagcatttgtttattttttcttcttgtaattttttatatatgataaaaggtaggaatcttcttttccctttttttctaatatctgcacaaacgtcctaccatctttttaataagttcccgctaatatgaaatgcacattaatcacaacttatatatctatattatatagatctgtttctgaattctgtattctgtgccactggtcaatctgtctgcttctgtatctgtatgatactgtttta

SEQ ID NO: 2414 - DNA, 1204 bp, Homo sapiens
gaatcgcttgaacccgggaggtggaggttgcagtgagccgagatcccaccactgcactccagcttgggcaacagagtgagacttcgtctcaaaaaaaaaaaaaaaaaaaaaaattatccggacgtggtggcatgcacctgtagtcccagctactcaggagactgaggcaggagaatcgcttgaacccgggaagaagaggctgcagtgagccgagatcatgactctgcactccagtctgggtgatagagcaagactctgtcttaaaaaaaaaaacaaacaaaaaaccaaccaaacaaacaaaaaaccccacacacacataggcagattgggaaagctttacctgtgaagaacttgtggttgtttcattattctatcttgtctactttgtttgaataggaatagttagtcatccgaggagtcattactgactgttctgagaagtgtatggttttcaataatatgtttcctgataatgttaaatgttttagtttctaagaagtgtctttatccatgctaattggtattgaattcctttttttgtctgtttcccctaagtcaaaacaagagaagatggcgtgtagagataagagcatgcaagaccgcttgagactgggccactttactactgtccgacacggagcctcatttactgaacagtggacagatggttatgcttttcagaatcttatcaagtaagtgaattgttatgattaaatggagaattgaaaagttcgtttgcattttttaggttttctgtaattgtagtcattaataatcctactattggtagtcatcttttcagttagttttttagtcaccacatgtggaaagaaatgtatcgaatgaggtgaagtcctgaaaaaaaacgacacaagtaaaatcaggagtacaaaatgagttccagaaaataaataaagtatgagttcaggccaggcgcggtggctcacgcctgtaatcccagcactttgggaggccgaggcgggtggatcatgaggtcaggagttcaagaccagcctggccaacatggtgagaccctgtctctactagaaatacaaaaattagccaggcgtggtggcaggcgcctgtaatcccagctacttgggaggctgaggcagagaactgattgaacctgggaggtggaggttgcagtgagccgagatcgtaccactgcactccagcctgggcgacagagcaagactccatc

SEQ ID NO: 2415 - DNA, 1205 bp, Homo sapiens
gccgttccccacccccaaactgtggaaggggcgggggcgcgcgcgctccaccacgcacgcgcccccacgcacgcgcgctccctccgcgctcgcgcccctccccaccccagcccggagggggcggggctgcgggcggcctcagagggtgcgacgcccccagcgcggcggcggcgctagcgagcggccggcggggcgcgggttgctgggcgcgctgctccggcggggcccgctggcacagccgcctcgcgcgagccgcccgcccggcgggggaagctgcgagcgctccgagcgcccggcctagggccgctggcgctgccctcccgccgccaccgccctccgcgcctccttcgggcggccccgcccccattcccatccccctcgcgctcacctcccggctgtgccgcgcgctaggcggagcgaggcgcccgccgccgccgagccgagccgaggggcgagagctggcccccgagccgccgctgacaggagcaccgccgcgggctgcgctcgccggctgcgaggccccgccgcgccgttccggggtgcagactcgccgcggggcgttggaggactgcgaggtgctccgggaatcgcgggcggcgccggcgggcggcgcggtcctcacaggagaccccggggactggggcttgacccggaggtgcagagagcccctcagagcggcaggtaaggggcccggggagcagggcgaggaaaggtcgcttcagtgacagggtcgttcgcctccacagcctcggctccggggagaggggcgggggcgagcggggagacggcgaaatgggcagcgaagtgcctcggtgtccaaggcgtggggaaggctggctccgaatatgacaccaaggcgggcttcagaggcgtgtggggtcgccacttggctgtcaccgaagatgtcatggaatttggtacctagagcgtctctggatgacggggaccaaggataagatgcgaggcggattgctaaacgtggcagggaatgtggtgcagaacgagttgcaaaatgtgcccccagaatgcagcataaaagtagttgcgaaatgtgccaggtaaggcacaggatgggctggcctctgtggcgttgaaattcatggtcgaagtgttattagcgatattaataattcctctgggaaaggaggtgtagcataataaaagattaataaggctcattgctagatattttgccataggaaatc

SEQ ID NO: 2416 - DNA, 1229 bp, Homo sapiens
cggcttgtggggcgggcaggctggcgcccccgacccgaaccccaccccgaccccggaccctcgccccgacagtcagccgcggggcccgagcgccgggctgcgcgcacggcctgcgctcccagcatgcacgagttggatggatgagggtggctgctcccaggccgcgcccgccttcgccgaaggtgctgggcttggctctggggcccccgcgctctcgggcagctgccttctcacctccggacgctgtcgctgtcaccgtcaccgcactgcactgtccatccaccctccactcgcccggcctcttttctggtcccaatttctgctccaccattcccatgaggcagattccctccagaaggaggaagcgcggcttccgcaaactaaggtctcccgcagggatctccccagggcccgggctctggaagcccttggccttcctcccctcccccagcaccgtggcttctcctttatggcctgcatctaagcagggtcctacaccctccctgccctcctggtgcccaataggaggaagcagccctgctcagccaggagtttgcggaggcctggggccagaaggccaaggagctgtatgaaccgatctggcagaacttcacggacccgcagctgcgcaggatcatcggagctgtgcgcaccctgggctctgccaacctgcccctggctaagcggcagcaggtgggctgagggctgaggcagagctcgggggcggcctcctagtgccccatcgtgggggtcgggggagagcagcccatcagggagggaggaaccctgggatccacatgggccctgacagaagggaaagcccaggtaagcacagaatggctttctgagcattgatttttcttggagatggggtggggagttactttctgttaaaggaagcattctggagtaggaagccaaattcaaatacacttctccctaggctggtttatgagcttctttggaagagttgagaagggctgggcgtggtggctcaagcctgtaatcccagcactttgggaggctgaggtgggcgcatcgcttgagcccaggagttcaagaccagcctggccaacatggcaaaacctcgtctctacaaaaaaaaaatagctgggcttggtggtgcgtgcacctacagtcccagctactcttgaaactgagggggaaggatcacctgagcccaggaggtcaaggctacagtgagctgtgattgcactactgcaccccag

SEQ ID NO: 2417 - DNA, 1087 bp, Homo sapiens
cttgcgctctgctcctacccgaaggtttttaagtccctctgaattgctcatctgagattagtagagtagcaggcctgaaggatgatggttttgtcctctttggttctcacctgcttgagaagtaaaacagtaactttgttcttctgggcccttaagcttttttggttaagtcttccttttcagaagtagatgtcattatatgccaaaagtctagctctttgctttaccatacagggacctgtcccaaagaaaaaggctctttttttagccagcatatttccccttctacccttttactttgttgttctgattttaggactctggctggccatgtgcttgtggttgcctctcctgcatttgccactggatttgcactgcatcgtttggagatacaaagcgagcagttcttggtcagaaccctcctctgcttttcattgtgtttgataatggttactgggtccttctctcaagggtagcaaggccaagctgatggctgcttgtttaggaggccatcagttccttcctgtggagaagggtctgaaatggaagtcagtggtagaaggggctggtctgctgggcagggcttacatccactgagttctaagattcctttcctgatctgcacctacgcctggtctgtatggtggaatttgtcagctggaactcagaaacaacaacttgaaaaaaaaataataattagaacatatttgcataagatagctatttactctggaaaccaacaacttttgagatttcccttgccctgtggacgcccagctcctgtcatccttccttaggtcctgcagtacagtcttcccctgaatgccaccggggacccagggggactccacccccctaagcaagcacacacatactcacagttgatgagttgctggtctttgagtcccagctctcttaccctccctttactccaccagcccgacgacccatgactgaggaggggatttctacagtctcaggatttagaaagtctgtaagccatccatgctccagaaagcaccgatctgttgtagttgcaaaaacaactctgtaatttgttgaggttctcaaactgacagccagcgag

SEQ ID NO: 2418 - DNA, 1213 bp, Homo sapiens
taggtaccataagaaataattcgtaggttttctgttgcttttaactcccacagcagctttgtgaaatgatgctttatctccattttacagatgaggaaattgaggtttggagagaataaatgatttgctcagggcctccttaccaaatttttctgactctgaagttcatattcctaactgcttcagtctaagaaagttgttatttgttgtttttttttttgagatggagtctcgccctgtcgccatgctggagttcagtagcgctatctcagctcacaccaacctccgcctcctgtgttcaggcaattctcctgcctcagcctcccaagtagctgggattacaggcgcacaccaccacgcgcagttaatttttttgtatttttagtagagacggggtttcaccatgttggccaggctggtttcgaactcctgacctcaagtgatccacgcatcttggcctcccaaagtgctagaattacaggcgtgagcctctgcgcccagcctgttatttgtttttaaaagttttgtttgtttttaaagaatgccacattggaggagtgctgataattcagttagtctcagtccataccacagagataactggcttgtggcagccaagtgtgcatagtgatgttgctttttagaaggaaaaaaaacaaaaacaaaacctcaatccaggaagaaatgcctaaaagagccacttgatttacttcctgtctttatacatgtcctctgaagtatcagttgaagaacctgtctacctctaggaatgtattttactttgacacaaaattagattctataaccctgattcacttgtgtcagttgtcccagatttcagatgacagtgccaaacttttccactagtgtgttctcagctctggaactactaaacaagtttgttcattaagtaatgccaggaattggttagcttcctggaaacagaatttgtcaacctgataaaccagctcttataatagcgtcatcttatacagaattagaaatgatttcttcagtcatacttgtggatctgacttgaaaagtggtgtgtgtatgtgtgtgcctgtatgtgtattcacatccatctttgttcaatatctgagttgaaagaactgaaaattctcaatacttagggtggttaatgttgttactgataactccttgcattccgcttttaggagtattgttggatgctcctcagaaaacacttaaa

SEQ ID NO: 2419 - DNA, 1110 bp, Homo sapiens
accttaaaaaacaaaagcaaaattaaaaagtataaaacagaacatttacttttttcattggtgaaagctgcaagattcttaccctgtttccttctcttctagtttattttacttaaataaatagcaccagatgtgcacagtgtaccaagctattttggaatatatgaatcagtgtcttataaggagagaggataagaacctttcctacctagacttctgactctgttcagattgcagacatttgcagcttctgcagcagccctaaggttgagtgaaggacagtgatgttgactgggaatttctgagtaaagctttggctgtgcttatgtcatctgctaatcaggagcacctctctatcagatccaaatgctttccaatctgaagaccaaaaacgttccctataggctcagttagctatttttctagaatacgatgccaattacataggatttttatatttttacagctgctgatgttatatcaaaagttatcctgtgtgaaacctgtgggaagttgaatgtgtttatttggtagcattttgtgaatattgtctttgtgtgctttactgtattttgttttaaactctttaaacacagttattttatggtcatttctggatatcagctgcttatttatttttcagatgcttcaaaatgaataaaatgcatttcatggtgggggaaactaagaaaacactttgacagaattagttcctttctatgagcaattggagattattacattgcactaattaaactatgccatgctgcatttaaagagaatgggctaaatagttcattctttttatctgagtttagacctgttctaaaactgaaacagtgtgatgaactaacctgcgtttcttgtggcaatgtcagatgatctagacttcttcctttcaaaatattgcctgtttccttgtttgtttgtttgttttcctaaatgaagtttggtctctctttgagttcggacctatacaatatccacaaagtagaaggcctccattttagaatcattcctagtaagctggggacagagcagttgctatcactggactagttcattttatgcaattccagattgcctgtgagctcatattgccagtttcat

SEQ ID NO: 2420 - DNA, 1234 bp, Homo sapiens
cttaatttgaattctctcgtccccactccctttctctatttattaccccttctttctctaggaggctgcattgaggcgtgagcaaaagaagttggaaaagaagcaaatgaaaatgaaacaaatcaaagtgaaagccatgtaaagccatcccagagatttgagttctgatgccacctgtaagctctgaattcacaggaaacatgaaaaacgccagtccatttctcaaccttaaatttcagacagtcttgggcaactgagaaatccttatttcatcatctactctgtttggggtttggggttttacagagattgaagatacctggaaagggctctgtttcaagaatttttttttccagataatcaaattattttgattattttataaaaggaatgatctatgaaatctgtgtaggttttaaatattttaaaaattataatacaaatcatcagtgcttttagtacttcagtgtttaaagaaataccgtgaaatttataggtagataaccagattgttgctttttgtttaaaccaagcagttgaaatggctataaagactgactctaaaccaagattctgcaaataatgattggaattgcacaataaacattgcttgatgttttcttgtatgtctacattaaacttgagaaaaagtaaaaattagaacactgtatgtagtaatgaaatttcagggacccagaacataatgtagtatatgtttttaggtgggagatgctgataacaaaattaataggaagtctgtaggcattaggatactgacatgtacatggaaaattctagggacaggagcatcattttttccttacctgataccacgaaccagtgacaacgtgaatgctgtattttaagtggttgtatgtttattttcttgagtaacaaatgcatgaaaaattaatgcttcacctaggtaagatcattggtctgtgtgaaatcacaaatgttttttccttcttggttgctgcagcctggtggatgttcatggagaagctctgttctctatattatggctgtgtgccgttgcttctccctctgcttttatcttttccacagttgaggctgggtatgttctttcaaagaaatggccatgaatatgtgtaagtatacttttgaaaatgagctttcctaaactattgagagttctttccacctcttgcggaaccaactcttggaggagaggcccatgtatctgcacgagcacttagcttgttcagatctc

SEQ ID NO: 2421 - DNA, 1205 bp, Homo sapiens
tcccgaggggactcctatgtaaagctctgggtgatttttacccacagcagttcccagggtggattagcccaggggtggggattatgctatggctttcctcctggctctttgcagatcatcactgatgtgattggaaatcctgaggaggagagacgagctgctttctaccaccagccctgggcccaggaagcagtaggcaggcacatctttgccaaggtgaggctctgccctgttttccctcctttggccgtgagtagcaaaggcctgagccacttggtttctcccttctccaggtgcagcagcgaaggcaggaactggaacaggtgctgggaattcgcctgacctaactgctcagggatctttcttcccagccctggagcctggagggagaccaccctctgggtccttgctggggccgcagacacgtaggctggggtgaggagtgtctgctgtcaccctctactctccagctttagtcttataaatgtagtgataggattccttgttgcttggtccccaaagccttatactttttgcattggctttaattgggttcagcagatgcctcctctgcccccctgcaggcaggcccaagtaggactgctggaggctgtgctttgacattgtaagacatttccgaaccaaaggctgctgggtttgcatgtttacagactccccctggggcgagggtcagagctggctctggggagctgggctaggaagaggaggtgcagcccagactcttcctagcctttctaaaccaaagttctttgccattcctacaagcccagccttgctgctggttttttcctttcctttgggtatttgcactattttgggagcaagttttctatgtgggagccactttttttgtacaggggtaagttgggggttttcagggagcctgttaggtgcctccttcttttctttcctcaatctatgcaagcggctctggccgccatcatctcctgggatgccagagggctgcctctccagcggcttgggccggggaggggacactccagttctctagcatggcctgaggtatggggtatgtgcatgtggaggccagggtaaggtgaatggggaggctgggaggactggtgttgccctttggagcttggtgaggagggtgggcctagggcttggcgagtgccacatctggcaggtttggaaatttccaaataaatccttttgtctattgg

SEQ ID NO: 2422 - DNA, 1135 bp, Homo sapiens
gttttcctggatactgaacctaccatcaaaggaggaagtgtttgcctttttgaggatttttgaaaaaaatatgtagggtctgaagacacctgccaaaagtattgctccaaaaactatttttgaataatgataacctcactgcaaagatgcatggcctctcaaagcaattgctttgaaagaggcaacagttatctggctacatgatctttggtgagcttaaaacaaataaaaccccctgcagtacagtcatatccttgtaaacagtgattgcttctcttgattgctggcctcatctgtatctggctagaaattttgcagtgatgtcgcaactctctcccatgcaaggttatcaacctggttgaccagacttcagaaaacgcacctaccaccgtgtctcgggatgtggaggagaagcccgcccatgcccctgcccggcccgaggcccccgtggactccatgcttaaggacatggctaccatcatcctgagcaccttcctgctgattggctgggtggccttcatcatcacctatcccctggtaaagctcaacaattcccctttgccatccacctatttctggggcttctctgcctgtcgcctcatgtcagtgagatccagacaaaaacaaccagcacatttctttccccatttaaaagtcagtgtttgttggccgggcgggcacagtggctcacgcctgtaatcccagcactttgggaggccgaggcgggtggatcacaaggtcaggagatcaagaccatcctggctaacacagtgaaaccctgtctctactaaaaatacaaaaaattagccgggcatggtggcaggggcctgtagtcccagccactctggaggctgaggcaggagaatggcgtgaacccgtgaggcggagcttatagtgagctgagatcacaccactgcactccagcctgggcgacagagcaaggcgacagagcaagactccatctcaaaaaaaaagaaaaaaaaagtcagtgtttgtttatcttcaaaaacataattaaagagacactagcctcccagaaaaggacaattttgttcctaaatcttagtgtttttcagctaagagctgatttataagccttgctcaaagatgattttgaatagttatctgtattttt

SEQ ID NO: 2423 - DNA, 1454 bp, Homo sapiens
agcgaacgcatcacaaagtcaggatgtggtgcagatcggtccattttcaatacaagctctttctaccacgacaggttattttgcacttggggacagtttttaactttccattctcaactcctatcctagctcctggcacagaacatgtcatccaagttaggcatcatcgtcgcctgctcttggtgaagttttcttttgcgtactgcggagagatgcgctcattaccagctggcggtggagtcgctgaaacgcaaatggatttgagactgagcgactcccatctctatggttggtatgtgacccatctatcctctggaggactcagcaaggactaccagtcaccagacaactttacgcgcacgtggtcgcaaggtgaacttgctattggttaatggcagtaaagcccgcccatcagcgctggtctgctcctttaaaagaacgccatcgacgctcccctgtctttcagcgcctgcaggttccgggaggtcaggttgtattcctggcgggtcgtctggctgggtgggccccggaggtcgtggctcgggagcagggaggcgtaggggggccggcctgctgtgatgacattccaattaaagcacgtgttagactgctgacgcgggtgatgcgaactggagtctgagcctgcccgagcggagctgggagggggctggcgggcgggcgcgcgcacacccgctgatctatcactctcgttcttgtagctcccagccgaggacgtcggatgtcatcgtccttgctgctttgccaccccattcccgtcaataaagtggtttgaacccaaccctggtgtcggtgtgtgtcgttggcgacgcgctgtctttgagcccccgccgagcttcctcgtggcgccgggggtcaatctgcagcgctagagcatgtgcttgcgcataactggggccgcctggcctcccgcgggcggcctttttaaccgcgagcgacaagaagtaacctgactgtccggctgctaggctgggcaattttccagctgttttgccacgacaggcctcaatccgtaataccaaggctggaatggcgtgttaggggggcggtggctgacggggatacgcggactcttgatgcgtaaggagtgcccctctgctcccatacgttccccagcccagccttccctgagtgtatcgcgcgcgctgtgccttcgccgtgagttcgacataagtcccaggctgtcgcgtctgccatcagacgcgcagatttagttgaaggcagcgtggaatggcgtctgcagggctgttgtgtacttgacataaacagattcggtgtggaactgcattgagttaactcctgactaaagggtaatcgacctgtttacaaataaccatgcaggagtactgacaagcatgggactaaagctttgggcaggttaatctgtcactcctaaacagttcaaaattatagggcggttgtgaaggtgaattaga

SEQ ID NO: 2424 - DNA, 1454 bp, Homo sapiens; identical to SEQ ID NO: 2423

SEQ ID NO: 2425 - DNA, 1159 bp, Homo sapiens
aaagtgttgggattacagacatgagccaccgcacctgaccttgttgtagcagtttcttactacccactgagagtctgagagaggtctgttttcccatacttcagcaaatgtggggtactgttaaccagcatggctggctccttctccataggtggcctctgctcaaatgccactcctcagggaagccatccctgacctcctcagccaaaacagccacccccgtgttccctctgcccattacctgcttgatgttctttgcagcactaatcactctctggaagtatattgtctatgtatttacctgtttctgcctttctattataaaccccgtgagagccaggccctggcctgacctcttcatggctctgtctggagtacgaagcctagtacatgatgtgtgcacattacgttttcgttacataaatgatatgtccccaaaaccttggccaccatcctctccggaagcatgttgacttgcaacagcatgttttgtaggttgctcatgggtctcactcattgtttgcttgtttcctctagctcccctactttatgaatgagctcactctgacggaacttgacatgggcgtggctgtgccaaaaatcctccaggccttcaagccttacgttgatcaccaaggtaactcctaactgaccattctatgagtgttaaaatatatcctttgctgcagattcagtaccatgatggctttgtgtttggagggtgttgaggactttttaaatcatctgtttcatgttgagtgtctttctgttcttaccagtcatggccttaaaactgatttggggccgggcatggtggcttacgcctgtaatcccagcattttgggaggccaaggcaggcggatcacctgaggtcaggaattcgaggccagcctggccaacatggcaaaacaccgtctctactaaaaaagtacaaaaattagtcgggcgtggtggcgggtgcctgtaatcccagctactcaggaggctgaggcaggagaatcgcttgaacccaggagacggaggttgcagtgagccaagatcgtgccactggactccagcctggatgacaagagcgagactctgtctcacaaaaaaaaaaaaaaaaaaaaaaaaagatttggaatagatccaagctcccatcctaagtcttttagtctct

SEQ ID NO: 2426 - DNA, 1879 bp, Homo sapiens
cagtggatttttttcatatctgatagtgaatttaactttttcatttctggcgaaattaaagagatctgtgaccaaaagtggtcaagcactggagtctgaggttttcaatgtgagtttaataacacaacttgtcttttaacttaggtggcctgccatgggtatccatggtgacaagagtcaacaagagcgtgactgggttctaaatggtaaatatttcaaatgaagtatttttcccccttacttaacctagctagaattctgctcagataattgatcatgtatatgccttcctttgtagaattcaaacatggaaaagctcctattctgattgctacagatgtggcctccagagggctaggttagtacaaactcgcattcatggcttggtttcccagaagatctccatttaacttttttaaagaaagtttattgctttctttaacctgcattttttctaagttttttttcacataaaggtgctgtctttgtggcaaggcctaggcatgacaatcggaggactcgagggggatggaggactagtgatcggctggctgcttccagtcgattagagaggtgaaaaagctgaacgtgtgccagtaatcttcaaaaggcagaacatatcacctctgccccgtaaactgttctctccgagggaaaaaatggaagttatcctcacagttcactgccgtggtatttcttctgtcccatgctttgcatgactgccatggtacagccttgtttcaaactgttcactgtgatctgtgggtctttgagtttcagtgagtttgctgaaatgtcgaagaagtagttccaaacttcaatgttcaatgaaatttttgttcaagtttgaaatggagagagcagctttaaaaggtactaagccttttacaaattggtgagtactggcacatgagatctagagcaggagcaacttctcacacatagtaagtgggaaaagaaagtgctttgaaagttcctccctcacctacacagtagtcgtcatgtcgagacctgccagagagagacacattctcaagtgaatcctggcttcttggaagcgcttgcctagacgagacacagtgcataaaaacaacttttgggggacaggtatgttttcttgcagctgcggttgtaaggtcttggcaagacaagcagtgtggccagaattttgaacttctgatgaatgtgtaatgcaaaggaccttgtacatttttttgtttcaaggtcctcaaaatgagcacatgaagaggttgctgtgaaactttaagtggccctactgcgcagaagcattcagatgtcacttgatgatctgtaagggaacttgctgatttgggaatgtgcttagggaacacacattccttttgacagggtctgtcactgggtgggtgatgaattatacagatgacatgtgcttttttttcttttttcaacctcaatggtattcctacaggaaatggataaccattttaactgtattttttgcagcccgtaccttcttgggaatacaattgtctaactttttatttttggtctggctgttgtggtgtgcaaaactccgtacattgctattttgccacactgcaacaccttacagatgtggaagatgtgaaatttgtcatcaattatgactaccctaactcctcagaggattatattcatcgaattggaagaactgctcgcagtaccaaaacaggcacagcatacactttctttacacctaataacataaagcaagtgagcgaccttatctctgtgcttcgtgaagctaatcaagcaattaatcccaagttgcttcagttggtcgaagacagaggttcaggtaaggatgactgataggaaatgttggtagttacgagtcacatcgttgtctacaaatcca

SEQ ID NO: 2427 - DNA, 1879 bp, Homo sapiens; identical to SEQ ID NO: 2426

SEQ ID NO: 2428 - DNA, 1879 bp, Homo sapiens; identical to SEQ ID NO: 2426

SEQ ID NO: 2429 - DNA, 1185 bp, Homo sapiens
ggtgctggcaccaactcgggaactggcccaacaggtgcagcaagtagctgctgaatattgtagagcatgtcgcttgaagtctacttgtatctacggtggtgctcctaagggaccacaaatacgtgatttggagagaggtatgtaatgaaaagggttttatttgtcattggtgctaaatatcctaggtattgtagttacacttacgtatttaattaaaggtgtggaaatctgtattgcaacacctggaagactgattgactttttagagtgtggaaaaaccaatctgagaagaacaacctaccttgtccttgatgaagcagatagaatgcttgatatgggctttgaaccccaaataaggaagattgtggatcaaataagagtaagtgtcctttgaaatatgtgatcaaactgaattgtgttttcactcttaagagtctgatactaatttttccccccaaaatccattagcctgataggcaaactctaatgtggagtgcgacttggccaaaagaagtaagacagcttgctgaagatttcctgaaagactatattcatataaacattggtgcacttgaactgagtgcaaaccacaacattcttcagattgtggatgtgtgtcatgacgtagaaaaggatgaaaagtaagttttattaactctgttatatttgcttcctaacaactttgctgtaaaattgagggatcattgtttggtgagttgttttaggttatttcagttggtgtgatttcatttagttagcctactaatcctgaaaatttcttgaatccttcaaataatggctgtcaccatttatagctttcctatagaaggaattcatgtgtcccctggttgacttaaggaccaagggtcgaactgctcgataagtggattagcaggcgtttcctctttgacttccagccatgtaaattgaacttaatgttttgctgaccataaatgtgtggccctagcaatggtcttttaaaactcaggatttttcctttctctctcctattattagacttattcgtctaatggaagagatcatgagtgagaaggagaataaaaccattgtttttgtggaaaccaaaagaagatgtgatgagcttaccagaaaaatgaggagagatgggtatgtgtgagctcctccattgaagcagattgattaaaacagcttaggaaagggcaa

SEQ ID NO: 2430 - DNA, 1180 bp, Homo sapiens
tccgaatattctagccctggcagacctcttagctgctttgttgatgagaacactccaattagtggaacaaatggtgcaacatgtggacagtcttcagatcccaggctggcagagaggagagtcaggtcacaacgacatagaaattacatgagcagaacacatttacatactcctccagacctaccagaaggctatggtatgacaactacaaaggaaaaataaaatgtggtttactgatttcagtttgctgaggaagtcagaaaatatattttgaaaaagttattaatctgagcttagggattctgcatgaaaataaatataaaacctcccaactttgaaaagtctttgaagtggtagatgactacctaaccaacagtttgaccttgtgctcatcattcagcctcagcgtttgtgctcttctataatgaagtgagatgactagtttataacaaaggtagtgtgagaagcatacgaaatgaagtgagactgttttgtaaataggcactgtatagaaaggtaagatggtattgttactgataacggtaatctgaagttcaacctatgacataattttttagacatatatatttagaaataattttaaaggcatatttctgatcatatatttgtattgtctgtaattttggattatctgattggattgttgtaaatgactgagtcacttctatgtttgtataaaatgattacaatcttatataaaatcctagattataaagtttcatgtggaagataacatgagtcttctcctaatagaatacggaagtttctaatttaataccatcttgtgaatccttgtatatagtctgaacttgacttcctcttcttgccaaaagctcaccaaggttacttacatctttgccctcttaacagactatagataaaccactttggattgatgttgacatctaatgaccaacactgggaattgccacatctaagttttattttactcaagaatatattttaaaactcttctgcaaatgcatgattcttattttagttttaaatgtattttagctctttaatttgaaaaaacttgtccattaactgtgctatgactcaaaggttaacttttagcacaatcattaaattataggcttgagtgacagacagacttaggacctaggttcgtatcctggctttgccatgtaacaccgag

SEQ ID NO: 2431 - DNA, 1169 bp, Homo sapiens
cctcctgggttcaagcaattctcctacctcagcctcccgagtagctgggactacaggcacgcgccaccacgcccagctaatttttttttcttgtctttttagtagagacggggtttcgtcatgttggccaggatggtcttggtctcctgacctcatgatctgcccgcctcagcctcccaaagtgctgggattacaggtgtgagccactgtgcccggccacctttttatttttttttcatgtattttgataagcaaaagttttcaatgttaataaaatcaatttatcgttttaaaacacattttgtaggtgttgtgccttctttaggaaacatttgcattttccaaagtcacaagtaatttcttcaatgtgttcttctagaatacatacagttatttagccctctgttaaggtttattatccactcagttaatttttgcatttcatggaaggttggtttattttttttaatatatggaaatacagttcagcaccatgtggcaactctttcttttacccatagatttgcttggcatcttatcaaaaataaattaaacacatatgtgtgtatgtctagttctgtaatctctattctatgctattggtctgtttttctttccttggccaataccagtgtctcttgatagtgtatatttatattaaaacttgaggttctatgaaacaaatcctccagtttcttagtctttatcaaaattgttctgactattctagatcctttgcatatacatataaatcttagaattcacctgtcaatttattttaaaaattctaccagaattttaattcagcctcttttgatatttgccaaatatttgccaaggagttatttgccaaaatatctctatcccttccttctacagttacacatatggtagactcagaattctcctactggtcactgaggctctgttcattttagttcaaccatttgtggtcctctcactattcttcagattagataatttctttggataagtttttgagtttactcatgcattctatttctgcctggttttgttcgttcttaaaggactttgtgcagatttctgtgtgtttttatacagaacttttgtagttttcagtgagagagttcatctgaaaaaaagctacaccaccgacacagaacagcaaatgtcaatgtggctttctc

SEQ ID NO: 2432 - DNA, 1238 bp, Homo sapiens
agttcgagaccagcctggccaacatgacgaaagcttgtctctactaaaaaatacaaaaattagccaggagtggtggcacatgcctgtagtcccagctactcgggaggctgaggcagaagaatcacttgagcccaggaggcagaggttgcagtgagccaggatagtgccactgcactccagcctgggcgacagagcaagactctatctcaaaacaaaaacaaaaacaaaaaacatgtaacatagctccactgtacagcgtttgcttacagaggttgcttctgcaatgaagagaattaggcatctgacttgaggtatgattacagactgcagtgaaagctggaagttgaaaagtggaagagttatgtgctgagtataaattctggtgcaccaaaggttctattactttctatctcaaaatcaaatttcaattgctctgggctcctacccaatgactagcagaaagttcaatcctcatagattcctgagtctgtcactcactcctcctccacttggtcagaaagtccctgggctcctgtggccttagaaaagtggcccagctgtctatggccatgtcaccctgaacattctccgtctgtctgatcttggaagctaggcagggtcgggcctggttagtacttggatgggagaaaagtggggcaggggctgagctaaggccttcgtccatgatcccagcatctctcaagttgatccttgggttccaggatgctacggataagctctggtccctgccaagacatggtctctgtatgtcaggctttgctgctctgggggtgacaatgatagccccatagaggttctcttcattgactgaaaggacctcatgcacagggtgtgctcatacatgcttgaggggcagtcaattcccctctggtcagtttctgcctcccacactccttctaactgctcccatttggttatttccacagaactgccccacctgcccctgcaatgagtcttcacacataccatactggcctctccttctcagggatgggagcgagtggagaatggcgagtataacttaggttggcaactctttttttttttctccttttaataaatctccctgatcctgctgtgaagccccagggttggtttaggtgggagggtcggaggctgagatggctcctttcctttttattaccatcagcatatttgggtaaaagacagagctgccaaccaatgatggctatggtagccttgcagtcagagagaat

SEQ ID NO: 2433 - DNA, 1179 bp, Homo sapiens
gccgggaaccccagcactttgggaggctgagatgggaggattgcttgagcccaggagtttgagaccagccctggcaacaccgtaagaccccatctcaatgaaaagtaaattagtcagggccgggtatggtggctcatgcctgtaatcccagcattttgggaggctgaggcgggtggattgcctgagcttaggagtttgagatcagcctggcaacatggtgaaccctgtctctactaaaaatacaaaaaattagccgggcgtggtagcaggcacctgtaatcccagctactcaagaggctgaggcatgagaattccttggacccgggagacggatgttgcattgagcccagatcgcggcactgcactccagcctgggagacaaagcgaaactctgtctccaaaaaaaaaaaaaaaaaaaaaaaaaagtaaattagctaggcatgatggtacgtgcctgtggtgccaagctcctcaggaggctgaggcagaaggatggcctgaggccaggagttcgagattgcagtgagctgtgatcacacctctgcattccagcttggacgacagaacaacgccctgtttccaaaaaaaaaaaaagattggggtgctcttaagctcacagttctggccatctcctctttcctaagtggagggagatcgtggatccctgagggggaacctacttcccctttcacttcaaagtctgcttctgtttctaaaaatgaactgaaaccccatctgtttgctcatgtatttgaaaacccttgaaaatgtttatttttgtacatcttcatacgactctcgtctcagagctgcttctcctcttcaggtggtttctgggcacactggggacgtctgtgcacctcctctgagtggaagtcaatgcctgtgatcccctttctaaaggaggcacggatagctgctgtgcggttttttcaacctgtagccagttttcatgtttttgttctcaaaataatactttttttttcaggtgaagacaaggaacatttaatttacactgaaatgatttttcctcttagaccttctgaaagctatgacgtatgtatatttataccataatagatgctaatggtgtcctctctgggtgatggtcccagagatgtttataccacggcatttcactccactaataaatgtgggtggatggatggacgggcggac

SEQ ID NO: 2434 - DNA, 1179 bp, Homo sapiens
tgaaggtcgattcttatccctaattgacttcctcttgggttttgtagtctgagtatttgaaatcacatgttgattgggctgggtgtggtagcacaagcttgtaatcccagcactttgggaggccgaggtgggcggatcacgaggtcaagagatcaagaccatcctggctaacatggtgaaaccccatctctactaaaaatacaaaaaattagccgggcgtggtggcgggcgcctgtagtcccagctactcgggaggctgaggcaggagaatggcgtgaacccgggaggcggagcttgcagtgagccgagatcacgccactgcactccagcctgggtgacagagcaagactctgtctcaaaaaagaaaagaaaaagaaatcacaagttgatctttctgaatgttggggcccaatgtatttgagtaataaacttgtaacatgagggaaatggacaagtgaaccttcttaaggactcatggtaatttgactctctcctgtatgattctttactgacagtgacatgaaggggaattgcctggggtagacttaggctgtctagtgtcatatgctgcttttattaatccggagatttctgattggaatatatttccatttcaatgggattagagtataaagaatgctttgttacaattatttacttacaccgccaccaccgtaagtaataatagtagttagcatttaccctgtgtgtgttacctataaggtgctgttctcagcacttcatgtgaattattcctcaaattatccccaaactctctgagactgcgctgttaccattttgctttgtagctaaagaaacagcttagagaggttgagtaactcctccaaggcatactcagcagtaggcaggacttgaacctgcgttgtgatttgtgaattcccacttttaaccacccttcactgcccatctacactgcctcttgcacatctcatattttgccagatgggaaaactcaccaaggatgaagcttccttaagatctttttgagtataaataggccatctgttgatctgtgtgtccatcaggttaggggctcttacctcaagccaacatatggcagaaaagatatgtattgatgtcttgtgggatagttaataaaacacaaatgtgcagtgcagcttctttaacctgctccatcttggacccaaattcccccac

SEQ ID NO: 2435 - DNA, 1169 bp, Homo sapiens
ctgttggtgacaggtctagtgtggggtgcacatttcatcattagatgggtgctgcttctattggtgacacctcagttctgtcgctctgctttagtaaactcagggattgttttattactttgttagatttttattgttcatatagtcagaaatcacatgaaatgaaaaccctatataggtttgaaattttttgaaagttgcactcaagagatggaattgttactaaggttgatagagccatatttctcattagcatggaagtatctttttcagtctattgagtgttcagttggctgtaattctgtcattccctaaaaggttagggaattatgtaaactttaaggatgattttaaaatgtagcatgcaacaatggaaagatggtttttcttcttattaagaaatatctttcttaattgtaggatatattttctagtttaggtatttctgagttactaaatttcaaaaagtacatattttaatatttaagattactaacataattttagttttagcctgttaatcttttatacaaattaattattagtatagctataacctttactagaaagtctataatgtctgcatcttgaacatgtgatgaattttctgtgggaaaagctgcatttcttaggacttttattttattttatttcttagcacttctggtgcctctacctcaagaattttgttgcaagacacaaccaatgtcacaagaggattctcttgttgctctaaactgtgagattaacttttcatgcctgctaaattgtgatcaagtgttttgggatggtgattctcaaatagacatgagtgaaactttaatatatggcctaaggcctgggcgcagtggctcacacctataatcttagcacttcgggaggcccaggtgggcaggtcttttgagcccaggagtttgagaccagcctcggcaacatggcgagaccccatctctacaaaaaatacaaaaattagctgggcgtgatggtgtgcacctgtggtccctgctactcaggaggctgaggggaggatcgcttgagctcaggaggtcaaggctgcagtgagctaagattgtgctactgcactccagcctgggtgacagtgagaccctgtctcaaaaaacaaaacaaaacaaaaaactattaaaaaatatatgtggcccaagatagtt

SEQ ID NO: 2436 - DNA, 1177 bp, Homo sapiens
ctcaaagggtagcaagaaacagctgcagcctcctttctgtggtcaccagtggtccagttgacccgtatgttgttagccgttcaggaccctggggcaggcccagaagcttcagccccaggaagggacgcaggcctgcagaagagggagggggcgagccctagggaattttcctttgtgaccccggaggatagggcaatgtttctctggcctttttttcattacatgtatgatttttattcttttgcccagggagtgagggtcactaaagagcttattgatagtgagaaacaaaaatcatctgtgtctcccctctgcgtctcatgggcttggagggtgtcagagccctcaggagcgactcaccttgtcccatctcctccttttacaaatgagatagacataggctccaggaggtataggggcttgtccaaggctcacggataaaccactacaaagccactggaggtggtcacggcgatgtctcaggagggatctgagacatgaaggactgaatttgcggtgagttcattggaatgggtggccgggtgcggtggctcacgcctacaatcccagcactttggaaggctgaggcgggcggatcatgaggtcaggagtttgagaccagcctggccaatatggtgaaaccccgtctctactaaaaatacaaaaaaaattagccagacgtgatggcaggtgcatgtaatccgttacttgggaggctgaggcagacgaattgcttgaacctgggaggcggaggctgtagtgagctgagattgcaccatttcactccagcctgggcggcagggtgagactccatctcaaaatatatatatatatatatataaaatatataaaaatatgtaattttatataacatatagatgtatataaatatatatttggtttggagacagggtctcactctgtcacctaggctgcagcagcatcgaacacttaggctcaagtgatcctggagcccctttagtagctgtgattgcaggcatgtcccaccatggtggctggttttaaaatgtttattttatagagacgaggttttgctatgttgcccagctacaaaacacttttctagggccaggcactgggttacaatggtaatctcagcactttgggaggctgaggtgggtggattccttgagcacaggagtttgaagccagcgtg

SEQ ID NO: 2437 - DNA, 1205 bp, Homo sapiens
gatggggtttcaccatgttgctcaggctggtcttgaactcctgacctcaagtgattcacccaattcagcctcccaaagtgctgggattacaggtgtgagccaccacacccagctgagtgttactaactcttaagaatgaattcccctgcatattcttggatgaagagttcagaaaatgcttttctgaagttttgtttattgtctgtaatttatcctgtcttaatccaatttatctttctctcttgcaggagtccgaagcctttctctcaaatctagtagttaacaagaccatctttgctaaagtagacagattagcaggaattatcaacttccagagacccaaggatccaaataatttattaaatgactggtctcagaaactgaactcattaatgtctctggttaacaaaactacgcatctcatagccaaagaggagatgatacataatctacaataagggtcttagtgctttagaaaaaagttaaaattggaagtcattaaaaaaagactgttataatggtgtatatgttggggttttttttctaagcttctttgtcttaaattttaaaatagtgaatatgtttgagactccctttgacctttcagttccccaagttcattgttaactttgcatttgcaattggtgcaaaaatacagatttctgtcgtctgaatacacaaaaagttgtgtcataacttacccagatatgtttttctatcatttgaaacctttttagctactgtttgttttcattcaactaacaaacatattccaataataaaagcagtatatacatatttcctttctacagttacctctgattctcaacattttgtggggtagtgatttggcaagtgttttttaaataaaacaaatctcattgtaaagctatcagtcatttagtagaatagaaaagcaacatagagcatacaagaacatttgggatagagttgtgatttgtgaagaatttgtactttgatattgtggcggaaagtctagactgagtgtgtatgctggtaaactgtagacttttttttttttttttttgagtccggctggttccaatcacagtagcttgattgctttcagccctcatcctctcacttgatcagttgttcaacagaatcagctgacataattgacacagtttattgggtgttaagtccgctctatagggatagtgactactttttttttttttttt

SEQ ID NO: 2438 - DNA, 1219 bp, Homo sapiens
ctcgctatgctcagcctgtgtgtcatcattactgtcatgctggccattgttctctgctgctgtgcccgggccctgaggcctccttcacctctatccccaccaccactatccagtcagtttgctgctgcttccgtggttcacatgaggcagatgaggagtttgatgcatgctgggtgacatgcttcaacaagccagagatagatgcctgggaattgcataaagaattgaacacacttgctggctatgacctggttccagaaccccaaatcattgatgttgcttcgcaggcatgcagacagttcgatgcttttcctagggcagtttgcatcctagaggttgttaaggacaaggcaggacctcataagaaaatgtcatccaagaactcagaccaactttaaatgaattgggaatccccactccagaggacctaggcttagacaaagtgtgaaccccagggacaagcgttccagggatttattggtattgctacttgattgtaaacactcccctggaaatgctgatgataacatgttaccttatttgaacacctttttctttattgaataccaaaccatgttatggtaacttggactttaataaaagggaaatgagtttgaactgaaaaaaaaaaaaatagagagaatggtgtgttggactcccatgtaccctcaacccagccttatcagttttcaaaccatggccaagtaagaggcacttttgaaagagaacataggaggagttaccaaacagtaaaggcagaaattaaaagcaactgtgcctgctttgtttagaatacccaaaacctggaaacaatccagatgcccaccaataggtgaatgcatcaaccaattgtggtatatcttttcactggaatactattcagcagtgaaaaggaaatgaactatttatacatacaacatgcaagaagttaaaaataattatgccgaatgaaaaaagccccacccccccatatatactgtatgcatctatgcatataaaattctggaaaactatacatatgtaaaattctaaaggtctgcaacctgcattccaagggccaattccagcccatcacctcttcttgtaaataaggttttattggaacacgggcacactcaaggtattgcctatggatgcttttgtgttacaatggcagagttgagtagtggccatatggtgtgcaaagccaaaaatatttgtcaacccgcaggggttgaaa

SEQ ID NO: 2439 - DNA, 1223 bp, Homo sapiens
gggaggctgaggcaggagaactgtttgaacccaggaggcggacgttgcagtgagctgagatcgcgccactgcactccagtctgggcaacaagcaaaactctgtcccaaaaaaaaaaagcggggggaataagagaatacagattagtgaaaaaatattcccagagaatcccatggtagtccctctttaaaaataatacttatgctgggtgcggtggctcatgcctgtaatcccaacactttgagaggctgaggcgggtggatcacctgaggtcgggagttcaagaccagcctgaccaacatggagaaaccccgtctctactaaaaatacaaaattagccaggtgtggtggcatatgcctgtaatctcagctacctgggaggctgaggcaggagaatcacttgaacccgggagttggaggttgcggtgagccaagatggcaccattgcactccagcctgggcgacaagagtgatactccgtctcaaaaaaaaaaaaaaacttatttaaaaaacagtaagaaacatttaaaaataatgtatttaccctcctacaaaggcatgtctatagttccttgtctttggacatgtaagaattggaggcaaagaaatgtggacttggagaaatctggggccagcttgctctccgcaggctcaagatcaaccatcccacatagaagcagtaaaaacaataaattgttttggtttggtaatatgttattctaacgaaggattttaaacacttaagttggctattcttcatataaaaaataacttctttttttttttccttttcaagaaggcaaggtctcgctcaaccacactggagtgcagtgggaatcatagtttggggcagacatgaatcctgccctgaagcagtcctccccacttaccctcccaagtagctgggactgctggtacatgccaccacaccacatgaaaatacaatttttttttccttttttgagacggagtctcgctctgtctcccaggctagaatgcagtggcacgatctcggctcactgcaacctccgcctccagggttcaagtgattctcctgcctcagcctcctgagtagctgggactacaggcacaagccaccacacctggctaatttttgtgtttttagtagagatggggttttaccgtattgaccaggctcatctcaaactcctgacctcaggtgatctacccatctcagcctcccaaagtgctaggattacaggtg

SEQ ID NO: 2440 - DNA, 1199 bp, Homo sapiens
gccttctccctccacccgcttccgtcggccgggcccctcccgcccggccccgcgggcctccccacccggccccggcgctccccaccgccccccctgcgcccgcccctcccccttcgctttccttctccccccgcctcggctccgacatgaggggccggcggggcaggccgcccaagcagcccgcggctcccgctgcggagcgctgcgccccggccccgccgccaccgccgccgccgcccacgtccggacccatcggggggctccgctcgcggcaccgcggcagcagccggggcaggtgggccgccgcccaggctgaggtggcgcccaagacgcggctgagctcgcccagggggggcagcagtagccggaggaagccgccgccgccgccgccggccccccccagcaccagcgccccgggccggggggggcgaggaggcgggggcggcaggacggggggcgggggcggcggcggccacctggcccggaccaccgcggcccggagggccgtcaacaaagtggtgtacgatgaccacgagagcgaggaggaggaggaagaggaggacatggtctccgaggaggaggaggaggaggacggcgacgccgaggagacccaggattctgaggacgacgaggaggatgagatggaagaggacgacgatgactccgattatccggaggagatggaagacgacgacgacgacgccagttactgcacggaaagcagcttcaggagccatagtacctacagcagcactccaggtacccacccagcccagttgctgcagactccttccccacctcctctgccctccccccttgctcactcgtgtgctgtgcatcctgctccgatctccccccaaccccgcctcccccccaaacagaggggaaatgcgacggcacatcaagtggcaaaaaactagatttacaagaggaaagaggcgcattgttcaaaatggagattgcattgttgcagtttgcaggccacactcgctcgctctctctcccccccccaaccccctttttttcctcttcaaaatttgtgccagtgcagtgtctccaccgggcaggattgaaactttggcaaacacatatccattgcattcatttttctccccttgttttggtgtggttttctggaatgaaagaagcctcttgttttgcaaacctctttgcatttctaatgtggtttctttcggatt

SEQ ID NO: 2441 - DNA, 1196 bp, Homo sapiens
agaactgattataatttataatttttttacttctggtttataatctaatgggaaaactttgcatttagattttctatagatttaaaaattagagctgaatcattgcttcttcgtattattttaacttgacaattattaaagaaatgtacttatgtattttaggggggtatatgttcaaataggaaatttgtagaaatgatgtaatgtattgatttgtaatgatgtcacgtctttatctacaggtaggcgaaaaccaagagtacatcggcctcgttctcctatattggaagaaaaagacatcccgccccttgaatttcccaagtcctctgaggatttaatggtgcctaatgagcatataatgaatgtcattgccatttacgaggtactgcggaactttggcactgttttgagattatctccttttcgctttgaggacttttgtgcagctctggtgagccaagagcagtgcacactcatggcagagatgcatgttgtgcttttgaaagcagttctgcgtgaagaagacacttccaatactacctttggacctgctgatctgaaagatagcgttaattccacactgtatttcatagatgggatgacgtggccagaggtgctgcgggtgtactgtgagagtgataaggagtaccatcacgttcttccttaccaagaggcagaggactacccatatggaccagtagagaacaagatcaaagttctacagtttctagtcgatcagtttcttacaacaaatattgctcgagaggaattgatgtctgaaggggtgatacagtatgatgaccattgtagggtttgtcacaaacttggggatttgctttgctgtgagacatgttcagcagtataccatttggaatgtgtgaagccacctcttgaggaggtgccagaggacgagtggcagtgtgaagtctgtgtagcacacaaggtgcctggtgtgactgactgtgttgctgaaatccaaaaaaataaaccatatattcgacatgaacctattggatatgatagaagtcggaggaaatactggttcttgaaccgaagactcataatgtaagtaaatctggtcttaattttttgtatgcatttaaaattagactagtttccttcgtgattgatgtagcagagctatgctgttgatgtggtataaacctttgtaacttaatagttatacagttaaataa

SEQ ID NO: 2442 - DNA, 1218 bp, Homo sapiens
tttttctctttttccctttttacctacccttcaaaatttatcttgcttcatagtgaatgtttgagacacattggggaaaatgtggtttaatggtagatttgattcttcaatatgtaacatagaaattaatgagattaaaatagcctgacttgtttggactttatcagtgtttgaaatggtgctttattgtaggttagaaaaacactaatttgggtacaagctctgagactctgttattagcttataggattttgaacacccatatggtacagtactagttgaaagatttttggctttgttttcagctttaaaatcaattgaatgtttcatatttatctttaaattggttctccagtattacacagtgttcttataaatttttttactgcttgttcttaacatcaaaaatactaaattaatgaactggaatgtcaatcttgaaagtattaaaaccataatactaaaactattttatatcccagggtttagcaaattttcaggtgcatgctttattataagtaacatcatcccatgtgttttgaactcacatttccatttcggatcttgcagattttatattggctgtgatcggtgtcagaattggtaccatgggcgctgcgttggcatcttgcaaagtgaggcagagctcattgatgagtatgtctgtccacagtgccagtcaacagaggatgccatgacagtgctcacgccactaacagagaaggattatgaggggttgaagagggtgctccgttccttacaggtgagacccctctgtgtgcagcatttcaaaatgaaatcagccagcataattttggaagcatttctaggatttcaagtttccaatcttagaatgattatttactgactcccagctagtctagtgaagtgcctaacaaactgcagtccttcacgtaccagtgccatgagctttaccatatccccacaccacgtcagcttatctcacactcacaagagtgttaacatgactcacttctttatacattttatttttaaggagacttcctctcacccccatggattgagaagcagtatgattagattatagttgttcttggccgggcatggtggctcatgcctgtaatcccagcactttgggaggccaaggtgggcggatcacaaggtcaggagatcagaccatcctggctaacacggtgaaaccccgtctctactaaaaatacaaaaaattagctgggc

SEQ ID NO: 2443 - DNA, 1177 bp, Homo sapiens
acaagaaggttggcgggagagggaagctgcgggaggatttcgcgatctgcagtggctcccaacgccgcctgccctgcagagggtcccggggagctttgtaaaatgaagacgcccaggtccgccccagtcaactgaactagaatgggatggggcaggcactggaaccttgtttaaaattccccaggtgagcccaatggacaactggagttaagaacgcttgaagaacccgacaggaaggatagcacccaaacccggcggggtggatgccatgcagttaccgggcaggagagctcggagggtcacgcgcaggccctccggggcccttgcggccgctccgggcccatggcgcagcgcgcgggaagtccaggcggccgacagggacgcagaaaagcgcaggcgcgcgccgccgccgctgggggcggctgccaaatcacttgcctctcggcgcgagaccgcgatgcgcgggggcgggagcgtgatgatggcatcgcgtaaggagagggtgtgagaagccggatcctgtggtgacccagtggcctaatggataaggcatcagcctccggagctggggattgtgggttcgagtcccatctgggtcgcgtgagattagttttggtggaagagagggcgatcattggacagttgattaagagatggttcttggcagctatcgttatcacaaataaagaggtgcttttgagagttttaaaaacactgtcagcgaatgggtactaaaatacggtcagacctagtgttcggtagcacagtagggtaattatagctaacggtaatttactgtatatttcaaagtagctagaagaaaatatttgaaatgctcctaacacaaagaaatgatcagtgtttgaggtgacagctatcccagttaccctgatttgatcattacacattatacgaatgtaacacaatatcacttgttattcggggtggggtggctcacgcctgtaattccagctctttaggaggccaaggcgagagaatcacttgagtccgggagtttgagaccagcctgggcgacataaggagacgacaccacccccaaccccaacctccccagaaaaaaattttaaaattagcagtaagttataatatgattgggccactgcactccagcctgggtaacggagcgagaccctgtctcaaaaaacaaaaacaaaaa

SEQ ID NO: 2444 - DNA, 1205 bp, Homo sapiens
tagtttggcttgatggtaataaaatctttttaaactgagattttaaaagccaccagattagtttcaaatgaacaaccttgagaatcttagaatatcttgagggtaagttaacgggtgtcattgtaggaggtgatagagaagtaggccaaactcatcaccatgctctgggcctaatacagtcttttcctattgaaaagtgacggttggggaagaaaaaaatctcggcctgtttgtgttactgtagtagctagcatttatgaattggcaaagtttcagagaccctccctcctctatgtcaaatactataatatcatacaggattaaaggtgtaatatgcagatcaagacctagagattaaatacagacttcaggtaggctgctgcttggaatacttatatcatttttatacttattttttaatatatttccaggaagaggaagatcaaaacgttgtaccagaaactacctctgaaggctacactttccaagttcaggatggggctcctgggacctttaacttttagatcatgtagctgagacataaatttgttgtgtactacgtttggtattttgtcttattgtttctctactaagaactctttcttaaatgtggtttgttactgtagcactttttacactgaaactatacttgaacagttccaactgtacatacatactgtatgaagcttgtcctctgactaggtttctaatttctatgtggaatttcctatcttgcagcatcctgtaaataaacattcaagtccacccttttcttgacttcaccatgcctatgtgttgctttctaatttggggcctttaatgttgctagtgaaaggtaacctgtccaaactgatgggattaaccagaggtagtcctggctgcagtttttgcagaagaatgaataacattttctggaaaccctcagccagtgtctccttaagtctccttggccagggagatgggctaaacaccgtaaatttaatcataaatctctgctggagctacaaatggaattctttcctcccaaacttcaaggccgaatggggttccaaggtaaatcacggctgcacatgggcctcatctgggaaagtacccagttctgtttcgttgatgaggggcatgagggtccaccatgtgtcttttttaaaaatgtaattcccaagggctcctgtacagtgtaggttgatagccactactctttgaga

SEQ ID NO: 2445 - DNA, 1148 bp, Homo sapiens
gagtgaaagctaacttttcaaaaccccagtattctagttgagtagcttacaggttcttttttttttttttttgagacagggtctcactctgtcacccaggctggagtacagtggtgtgatcacagttcactgcagactcgacctccctgggctcaggtgatcctcccacctcagcctctagagtagctggaattataggcacaagtcaccacacccaactaatttttgtattttttgtgaagatagggtttcactatattggtcaagctggtctcaaactcctctgacttcaagtgatctacccacctcggcctcccaaagtgctgggtttacaggcgtgagctaccatgcccagcctacagttcatcctgtgcactaatctgtttcactctctaaatgaacaaagtgggagatcactgtcatggccaaagttacatggccaagacaaactatggcctgggagtcccaggttctcctgtgtgggcactttcctggcatatgctaaatgatgggaaagtctgggtctcatgtttctgtgtggtcctcacctcactcgacttctgctctttctgttcactctgggcttctgtgctttcattaatatagttcttagttttccactggtctgtatcccattctgccttggacgcctttacttcctgctgctcactgagaagcctcatcaggaggcctgtcctggagatgagcttggcacaggtcacttgcacataggtctcggagcagtccgtcttcaaggtccagataacatgagaaatgaagcttctcacatcgttgttggggatgacggactgtagttgatgggttagcggaatttcaaactgatcacctggggatgagagcaatgggtaactgaagcttttgggctcgggggacaggtcagtgcccacgttgttgtattcccattttgtctcagtttgtttaacagttggctctaagttgaatgcagtcctagtgggaatctgcctcaggaagatgattgtagtttgtgttttcagagatggtgccttctggcatagtagtgttttccataaaaacgttttcttcagaggcatttcttgcagttgtgttttttacagtagtgttttctataaaacattctgaaggagcaaatacttctggaaaagggt

SEQ ID NO: 2446 - DNA, 1424 bp, Homo sapiens
tctgcctggttttatttatatcttgttattaatgtttcttctccaattctgaaatacttttgagtatggctatctatacctgccttttaagtttgaaactaactcatagattgcaaatattggttagtatttaactacatctgcctcggctcacaaattccgattagacctttatccagctagtgccaaataattgatcagatgctgaattgagaataagaatttgaggtctacattcttggttgttaatttagagcgtttggttaaagtatgtccttcagctgactccagtataatctcctctgctcattaaactgattccaggagattggatttgctgtgactagatacagatggagcaaatgtcctaacagagaaatagaggtgatgctgctaaagggagaaatgccaggcggacaaagttcagtgtcgggaattttccccgtgacattcactggggcatgagattttggaagaagttttttactttggtttagtctttttttccttcctttttattcagctagaatttctggtgggttgatggtagggtataatgtgtctgtgttgcttcaaattggtctgaaaggctatcctgctgaaagtcctgctttcctatctagcatttatttctctggcaaacttttctttcttttcttttttaaagtaaacttgtgtattgagtcttaactgtatttcagtattttccagccttatgtgttacattattccaatgatacccaacagtttatttttattatttttttaaacaaaatttcacagttctgtaatgtaggcacttttattttcattgtgatttatatataaggtaatgtagggttatatttgggagtgactgcaagcatttttccatctgtgtgcaactaactgactctgttattgatcccttctcctgccctttcccaggtaatttaaattggtcatggtagatttttttcatagatttgaaaaacttttaggttgttaccaagtatgaagtataaatctggggaagaggttttatttacattttagggtgggtaagaaagccaccttgttacaaattttttaatttccaaaataatctatattaaatgagggtttctgatctgtactttgtgtttagctacctttttatatttaaaaaattaaaaatgaaaattacgttcttacaagcttaaagcttgatttgatctttgtttaaatgccaaaatgtacttaaatgagttacttagaatgccataaaattgcagtttcatgtatgtatataatcatgctcatgtatatttagttacgtataatgctttctgagtgagttttactcttaaatcatttggttaaatcatttggcttgctgtttactcccttctgtagtttttaattaaaaactttaaagataagtctacattaaacaatgatcacat

SEQ ID NO: 2447 - DNA, 1192 bp, Homo sapiens
gggaattggaagcagcaagcaggaacgctccctcttatggaaagaagagcccagggccctggtcatgacaggttcaggtgccaaaaaggagacgggaagaaaacgtgaggcgccagaacaacaggttctacaaggtgcacacgagggtccctgccattgaatgaagaattttctgtgtggatgcccctgcgcaggtccaatgaaagccgtggagaataagcgttagctcttcaaactgaatctgagctaaaacctagcaaagccaggctggggtctgaggggttgcgggggaagacaggaaggggtggacggggaagaggcgggggtcctaggaggaagggatggggaggagcgagaggagggaggcggagggagggcggcagccaggatggtccattccattcttggagctgcactgttgacttcgaccacaagggggcagggctgctgaaattggaagtgcgaacgcctacatgagtcttgatcctcggcaggcaccgtacccagtttcctccgttgggagggtttaactgcccggaaacggaagtctcgttctttttcgtccttttccccggttgctgcttgctgtgagtgtctctagggtgatacgtgggtgagaaaggtaatctggggcaatccactgccaggtgaaatctggggaccccaggtccgcgtggagggtgtcggggaggagaaggggagtgcgatggggccgatatttcgggggagagcgggaaaacggggttcgctgccagcccccgcgccgtgttaacgccgaggactgtttcccgcaggtcctggtccgcgccagagcccagcgcgcctcgtcgccatggtgagtacagtccctgcctggcgccttcccggggtgggctcgtggggccccggggcgagggcgagagagcctcccaaggatctcctgaggccgggagaagctggtggactgggccatcgccgggagacgtgtctctttcctctctgttcacccgcttcctttgtgttgcagcctcggaaaattgaggaaatcaaggacttcctgctcacagcccgacgaaaggatgccaaatgtaagtggttgctccgaaggttcaagaagagcggtgcctagcctggcaccgctccgggagcgtcttccccggaatgtcaggcaggagacggttaggccgtctgggtgtgtgcctggccctctggg

SEQ ID NO: 2448 - DNA, 1198 bp, Homo sapiens
gtaggtgccacctcagagagggcctggctggccccatgacaagaacaagaagtgctaactggtaccagagtccccagatagagctgcgagggccctcgctgtgggcgcgagctccggagtagcaggctggatggagcatcccttctacagggacacagccgcctgccagctgggcctaaagtctggagcttgtctctgaaagggaccgtctgctgccctcgctgccccactggagccctcagggcctcctacagtgcaggtggtcctactagagggaagccatccccacctggcacctcagcggcttggcagtgacatggcagtgggagggctctgaggttcccaccctgacaatggtcaggctgcccgtgctcccactccaacactaaaagcggctcccttaggggctgagcgtgggtgctcagtgttcacgctatatcccttgggcaatgtggggttggatggggcccccacttccattcccatggaaggaggccaggtccccagccacctcccactcagccatgcacgcacttgctgggctggcctcctgggaaacacaggtgactcgaatgaactctgcattttcaacgtgccttctactgcttcaggacctgggggtccccctgaccctcactggcttgcccccagccctgggcctggccccacctgtcctggagcccagagcccctggcctggagctacctctctggggtgggtctcaggccccacccctccctcttttgagttcagtgccttgctcagcccctcccctgtatctcagcgtcttcagacctctgacagagcgacgatgtagggtctcccggggcccaaggtggtctcagggtcaggggtgggatttgcagggaactcggggagcccacgggctgcgccacctctgccctggcagctgaagcctgggagagtccctgcgtggtgtaattggcctcagcccgctttctctgtgccgtcgcacctcagtgtttctcatagcttgtccccacgtgtcactttccatccacgggaaaaacaaatgccccttctccatctatcattgcgacttcctcccaggaggcctctcaggttgggtagagcaggggcctgcagtggtcaggccaagagcaaggaagacctggctgccccactgtggctgaaaactcaaaacatctggaactacccttctccaattacgttccct

SEQ ID NO: 2449 - DNA, 1191 bp, Homo sapiens
ctgttgagcgaagcgctcacccttcctctggccccagccgcccgcctagtcacccccgagcggagcggcacctggactagtctctgagcctccctgggaattgcgaccgcgtggcctaagggatgaggcgtctgacgtcagatcataagattgagggttcctttgtggtcgggctcttttggagcgagcagcccttgcccgaatcccagcatagtttgagggtttgttcttccctccgccctcgtccatccctattcctcccagctatgctccaccggcctctgcgctcgccgagcacttcttctcggggttacagggcaccgcgggctcctggtccccgcgcgtcgtcaccgcatggagctcttgtgtagcccggtggggacgccgcgcccagccagcggttcatcctgtcgtccccatggcttctcaggcttggagcgcggtgacccacagcagggccgtgtttgggcactatggttgaacacctatcaaggagcacgtgggtttagcgtcttaccgcgccccagtggcctaatggataaggcactggcctcctaagccagggattgtgggttcgagtcccacctggggtgtcgagaggggctgtgctcgcaaggtttcttttggtgccggcagccagagacctcagaatccaccaccacctgcccgctacctgcttgcctctgccctgtttgcgcccctcgccttctcttgcaggaccctctgtttgcagtcgcggtggtcatttacctctggttctccggggctgccccgccaggtggagctggggtgtcctgggaaccctttgggcaactttattcttacgagtttccccagcttcgaaattgtggggccctacccggacgaaagctgttcattcaagggcttggcaagacccgagcttaccggctttaggcgcttggaggaggtggctcctcctcaacacgttgcacgggagtcgaactagagaccaaggtcgattccagcatccctgagaagggaagagaaaagaaataaaaaattccgtaaaaggaactttcacctctaccccaggtgggactcgaacccacaatccctggcttaggaggccagtgccttatccattaggccactggggcttggggcacgtggccgtgccatcccttcccctcataagcgagtgtccccttttcctagagaaggcctgacaga

SEQ ID NO: 2450 - DNA, 1089 bp, Homo sapiens
cgccactgcactccaacctgagtgacagagtgagactccaactcaaaaaaaaaaaaaaaagaagagcagagaggtggattgcctgagcccagagtttgagaccagcctgagcaatatgacaaaaacctgtctctaccaaaaaaaaaaaaaaaacaaaacgaaaatttatcaggtgtggtggtggcatgcacctgtagtcccagctactcaggaggctaagacagaaggatggcttgagcttgggaggcagaggctgcagtaagctgagattgcgccactgcactccaccctgggtgacagagcaaaactccgtctcaaaagaaaaaggacaggaaaagagtagaaaaaaagtcagtttgttccaaagggagacaggaaggaagctaaaaggaacccaggaggtgggcaaacatttaacttgaaagccccctggggcgtggtggcgcatgcctggctgaggcacgtggattgcttgagcccaagagttctgggctgtagcgcgttatgccgatcgggtgtcttcaccaagttcagcatcaatatggtgacctcccaggagcgggggaccaccaggttgcctaagaaggggtgaaccggcccaggtcagaaacagagcaggtcaaaactcctgtgctgatcagaaagccctctggctcccagattaaggctacactctactgctgaatgaacagagcctaaattcctgcacctatttacagttcaatcgaccacaaggcctttggccatacgcatccttcctaagcttccttagggatctggctgtcatgctgtgtatgtaattatccctgttcctgctccctacccacaggcatgttacaagctcagtgctttagaggtgtgaagtctcaccttcttctcaaagtcatccaccaagccagccttggccacattggccttgtagtaagcccagtcgatagctggtggattctcaggtaaagcagccaacctgcccacaaggaaaggcaaaagttaggattgttcataagcagtagaaaattcacatggtaattttcctatcccttcttcctatggcctggagggtcaccacactttcctctcctaagatca

SEQ ID NO: 2451 - DNA, 1137 bp, Homo sapiens
gaattgcttgaacctgggaagtggaggttgcagtgagccaagactgcaccattgcactccagcctgggcaacagcgagactccgtcaaaaaacaaaacaaaacaaaaaaaaacttcatgtccttatatatttgtgtaatttagaaaagaacataaacaacaaatatgggaaaagatgaacaatggttaattctgtggagtgggagcatggtgggtgattattttgtttatgcttttaggtatgtttccaaccatcaaaccaaaaaaaaaagaaaaagagaaacagatccttgatcttaacaggaaatggctgtcattatgagtattatttctattccctgttttcatagaaaatgtggacacagacttgccaggcagcctggggcagagtgaagagaagcccgtgcctgctgcgcctgtgcccagcccggtggccccggccccagtgccatccagaagaaatccccctggcggcaagtccagcctcgtcttgggttagctctgactgtcctgaacgctgtcgttctgtctgtttcctccatgcttgtgaactgcacaacttgagcctgactgtacatctcttggatttgtttcattaaaaagaagcactttatgtactgctgtcttttttttttttcttttgaagaacaggtttctctctgtccttgactcttgggtctgtgggccatggcatgagtgttttctagtagtagattggagggaaagctttgtgacacttagtactgtgtttttaagaagaaataatttggttccagatgtgttagaggatcttttgtactgaggtttttaacactttacttgggtttaccaagcctcaactggacagaccataaacagtccacaggcaccgttcctgccaggccccaacccacagggagtctctccgcagagccttcttggtgttgccctaacttgccagtggcctttgctcagagcctcctcctgtgacatgtgaacaatgaagaggcctgcgcctcctgccttgccgcctgcaaagcaaagaaactgccttttattttttaaccttaaaaagtagccagatagtaacaagactggctggctgatgagcaaagcctttgctctcacgcagaggaaggcttggatgtacaatgaaact

SEQ ID NO: 2452 - DNA, 1179 bp, Homo sapiens
gcgactgagcgagactccgtctcaaaaaaaagaagaagaagaagaagaagaagacactgcattttaggcaagagtccggtgggaagcaggttgagattgactgagaggaagtaaccatgggagggctgctggtccactgaatgagagagatttttccagaacctcatgctggggctttgatttaggaatccccttcctcctctagtaagtctgccttccctggcctatggcttacgtctaaagcctcgagcctcatcgttcccaccgaggaccagctggaagccattttgattatgctccaccacgaaggaggacaatacagccccgcccagagccaggcgcgcccccgcggcgggccgggtgcgcgtgtccgcgcctcttcccgccggccgggcgggcgcctggcccaggacgcggtggcgtgggacggggggtgggggtggttatgtaagcgttgcgcgctcccgcgaggcgccagccaatgggaggcttcggctactcgtgctcgcgcacgcagggtggggggagggagcgcacgacgtgcgcgcaccctctcccctcgtccaccgctgccgcctccttcttctgccgctcctggtgctgcttgtgtgctcgtttggtgcggacctggtacctcttttgtgaagcggcagctgaggagactccggcgctcgccatggccgacgaaaagcccaaggtgagctcgccgccggccccttcgcctcgccgcgcggtgggggtcatggcgcgggccggggtccggccagagcccgccgctggctcccagcgctttcccgggccccccacggggccggccgcggctcaggcccgggcgctccgcgccattttcctccctccctctcttcctccctcccgcgccgaaggaggccccgccgctctctcccgcccccggcggcctccgagtgcgcgccgggcgcgagttgggcgggcagaaagcggacgcccgcggacccaccagccccgaacggggattcttggcccagccggccggcgcgcgtgaggaggggcgttagggcgcgcggggtctccaccttctgtcgaccccgcgtcgggtgttgcagtctccgaggcggcgaggagtcctctgggctcgggcttcacctctcgggtaggaaccgcgggcatctggggacccctgcctggggccgcggcggcggg

SEQ ID NO: 2453 - DNA, 1196 bp, Homo sapiens
tggatatacaaagctggaattcagacaaggaagtttgggctagagaggaaaagttgggagttatcagtatgtatatgtttatatatttgtgatttttttttttttttttttttttttttttgagatagagttttgctcttgttgcccaggctggagtgcagtgccttgaatactgaattagtgaatattgaaccattgctcctaggggaaatacagggttaggttcctgcaagcctctggtcatattttgttcaaccaatcaatatataaccgatcacttgttttatgtgtgtatctgtttggagacaacttacttgacataatattgttgaatcattaacagtgaagtcagccaggcgcagtggctcacgcctgtaatcccagcactttgggaggccgaggcgggcggatcatgaagtcaggagatcaagaccatcctggctaacacagtgaaaccccgtctctactaaaaatacaaaaaattagccaggcatggtggcaggcgcctgtagtcccagctactcgggaggctgaggcaggagaatggcgtgaacctgggaagtggagcttgcagtgagccgagatcgcgccactgcactccagcctgggcgacagcaagactctgtctcaaaaaaaaaaaaaaaaaaaaaactcagggccaacagcactataattcgtgtctgaatgaagcttatctaacacctcccatagttcttgcacttagcaacactagaaagcacttcagtactacacgtggggacccaagaaaatgtacaaaaatgaaaaaaatgtggcactaactgcatcacgagaaagccttgtttagtgtgtgtcaagcaactcaatattcttgccactcttaattttgatttgaaagtaccacaaatactgatttgggggttacagataaattttagtgagtaggcagattcacagataaagactgaacagtgaagactatttgcattgagtgtatattttatgttatgttatgttatttttgagatggagtctcactctgtcacccaggctggggtgcagtggcgtgatcttggctcactgcaacctctgcctcccgggttcaaatgattcttgttcctcagcctcccgagtagctgggactacaggcatgcaccatcacgcccggctaatttttgtatttttagtagaaacagggtttcaccatgttgaccagg

SEQ ID NO: 2454 - DNA, 1197 bp, Homo sapiens
tgtgccctgattttccttcttgccttggtgtctgaatctgcagcatcgccctgagcaactggtggtttgtggcccacctgacagacctgctggaccactgcaagctcctccagtcacacaacctctagtaagtggccgggaggcaccgatcctcctcttcttaccaccaggcccccgagggtggtgtgaactgaatgcctgaaagggaggttgggctaagggggccctgaacagggcaggccaggagtcttggtcttttgttatgttttattccagtttcggttccaacatgagagagttcctcctgctggagtacgcctcgggactgtttgctcatcccaggtaggaaggaccccatgggtgtgggctatgcgggtgctcttcagcatgcgggtgccattggagcttggactgttctctcccagttggctccttgaaggcttcggaagggtcagtgaaagggagctgtaggtgccagtcctcggagccatgaggcagcacctcatgtctgtcctcctcgaacctttgcagcctgtggcagctgggggtcgattactttgattactgccccgagctgggccgagtctccctggagctgcacattgagcggatacctctgaacaccgagcagaaagccctgaaggtgctgcggatctgtgagcagcggcagatgactgaacaaggtgagctggccctgctcccagcctactgtctgtgggacgcaggagtcaggggatcctgaggtcacactttatgcctaccccagccatcctcctcctcacgagccacactggagacgtggggctgtggacgccaagaggtaaactaagagatgggataattacttgggagggacaggaaagctagggatccactggaacccagacaaaatctacacgccatctggaaaggcctgagccgccccttttctcacacacttgattccacgaggtcagggctggggttggcgctgtttccctgtccaggtgggttgctattgctagctcagcctggctcaatggggaagcagtgctggaggtggctccagaaaagcagagagagtggaatgaggatgaccaagtctgccccttcatttctcccctcactgttgagtaatgtaaacatgagttattaccctgcagagaggcagttgcatgttcacgaccatttctgaaagcatatggtattcacgatcca

SEQ ID NO: 2455 - DNA, 1075 bp, Homo sapiens
tcttgctcttagattgggccatggctttcatcctgtgtcccctgacctgtccaggtgagtgtgagggcagcactgggaagctggagtgctgcttgtgcctcccttcccagtgggctgtgttgactgctgctccccacccctaccgatggtcccaggaagcagggagagttggggaaggcaagattggaaagacaggaagaccaaggcctcggcagaactctctgtcttctctccacttctggtcccctgtggtgatgtgcctgtaatctttttctccacccaaaccccttcccacgacaaaaacaagactgcctccctctcttccgggagctggtgacagccttgggcctttcagtcccaaagcggccgatgggagtctccctccgactccagatatgaacagggcccaggcctggagcgtttgctgtgccaggaggcggcagctcttctgggcagagcctgtccccgccttccctcactcttcctcatcctgcttctcttttcctcgcagatgataaaaggaatctggcattctacacctggaccatttgattgttttattttggaattggtgtatatcatgaagccttgctgaactaagttttgtgtgtatatatttaaaaaaaaaatcagtgtttaaataaagacctatgtacttaatcctttaactctgcggatagcatttggtaggtagtgattaactgtgaataataaatacacaatgaattcttcacttggtatctttttttccccttgcctgccttaaaaatttaaaaaccgcatcggggagtcaggaatcttgggtccttatttcagacgtgatcacccagcttacatccccctaggggagcatgtggggctcacaggccttcctgggagcgatgcctgcagttggctgtcaggaactcctggggagcctgttaacaatacagaatcgcaaaccccgccccacatcctcggacattgcctttgaggacacagacacgcccgctgtttctgatgtagagaaaccactgaccacgctttgggaactctggtctagaccaagggctttgggaagataaagagcttggct

SEQ ID NO: 2456 - DNA, 1197 bp, Homo sapiens
tatgtatttagcttaatctgatgaatcaggttgaactcgtaccttagcagtctaagcctgaacgccataaagcctttaagtccattcctggtgttcaagtgagaaggttctgggtcaggcgtggcactggttggtaaatatgtgtcaatatttcttatcttactattgtgttagtgttgtttttacgatggtgtctttctttacccaaatgataggatttaaaaatattgtttaaagcccgtttccaagcaggcctgggtttgtttatagcagcacaggtgaactagagggtaggccatggctgaaacaggaatgcttttcttccgagcagacccgccagccagaatgtgtggtttggtgatcaggggtttgtgtaataataagctttgcctgtggccactgagacggtagtaaacagtatgggtcacatggcatgacaagtaggttaagggccagatttagacactgatggcctgcgtaaggaggagcaaaccacacactgcttgctttgggtttctctagctcccaaggccagaagtgatgggagaggggtgaggggtgtcagagagaagaaccttgaaaggcttagagtggtatttgaggaaccataaattttagtgtactataattaaatgaacccaattttcataacttcaagggcttcttgaaaaaggggttcatggtaccagtcttgcttggtagggaggtgaatagaaaaatactgggaaacacttaaaaaagatgtatgctggacaaagactcaggtgtactgaaagagcgtaaaccttcattatgttgacgtgaaagccaagtagggaatgttgcttagctataaggcagagcctattgcaaaatcagaatcaggagctgctgatttttttttttttttttgagacagaacttgctctgtagcccatgttggagtgcagtggtgtgattacggcttacggcagccttgatcttctgggctcaggtgatccttccaccttaccccctgagtagctgggaccacaggcacatgccaccacacctggctaatttttgtattttttacagagacggttcttgccctgttgcccaggctggtctcaaactcctgtgctcaagggatctgcctgcctcggcctcccaaagtgctggaattacaggtggccagaagttgccgatttttaaaattaaggaaaaaaatacatagta

SEQ ID NO: 2457 - DNA, 1087 bp, Homo sapiens
gcccgggaccgtggcgcttcgagagattcgtcgttatcagaagtcgaccgagctgctcatccggaagctgcccttccagaggttggtgagggagatcgcgcaggatttcaaaaccgacctgaggtttcagagcgcagccatcggtgcgctgcaggtaagacaaaggcctggagccgggggagggctgggcggtttccgctccccgagtgggattaatagtgcggctctcgtcctcaacaggaggctagcgaagcgtacctggtgggtctgttcgaagataccaacctgtgtgccatccacgctaagagagtcaccatcatgcccaaagacatccagttggctcgccggatacggggagagagagcttaagtgaaggcagtttttatggcgttttgtagtaaattctgtaaaatactttggtttaatttgtgactttttttgtaagaaattgtttataatatgttgcatttgtacttaagtcattccatctttcactcaggatgaatgcgaaaagtgactgttcacagacctcagtgatgtgagcactgttgctcaggagtgacaagttgctaatatgcagaagggatgggtgatacttcttgcttctcatgatgcatgtttctgtatgttaatgacttgttgggtagctattaaggtactagagttgataaatgtgtacagggtccttttgcaataaaactggttatgacttgatccaagtgtttaacaattggggctgttaagtctgaccatacatcactgtgatagaatgtgggctttttcaagggtgaagatacaagtcttaaccacagtgtaacttacagtttcctttaaaaaaaaaaaaagtaaacctggcagctatagaatacactatgtgcatttataatagctattttatatattgtagtatcaacatttttaaattaaatgttttacattcacaagtggtggggagtcttgtcattaaggtgtgtgtaatttagagtccagttggttttcttctgactgcacttgttctcatagtagtaaaatgctatgcgcatttataccttgcataagtcctcattctaccacatgttaaccctct

SEQ ID NO: 2458 - DNA, 1200 bp, Homo sapiens
tcatcattgccttcttcctagtgcaccttccaggccatagtgaaagctgttcaatggttggggaaaggccaggcgcagtggctcatgcttgtaatcctagcactttgggaggttgaggtgggcagatcatgaggtcaggagatcgagaccatcctggccaacatggtgaaaccccgtctctactaaaaatacaaaaattagctgggcatagtggtgtgtgcctgtagtcccagctactcgggaggctgaggcaggagaatcacttgaaccagggagtcagagttgcagtgagccaagatcgcgccgctgcactccagcctggcgacagagcaagactccgtctcaaaaacaaaacaaaacaaacaaacaacaacaacaacaacaaaaacagttggggtaagggcagggggtaggcagggaagcctaggctgcaggcagcaaagttgagtgacccccactaccgtgttccaggtgcccattcctgcacagaaccacaggggacactgagcgcaggtaccaccttcgttactacaaaactggaatctgcatccacgagacagactcgaaaggcaactgcaccaaaaacggcctgcactgcgcttttgcccacgggccccatgacctccgctcccctgtctacgacatcaggtgggctgggtgctgggctgggctgatggcagtaggctggggtccagggcaggggcctggcggctaatgatggtgagtacctcagactgcagtggagggctggcactctggttcttgccccctcatgccccctctccaccctctctgttctttcctctcctcccagggagcttcaggccatggaggccttgcagaatggccagaccacggtagaggggagcatagagggccagtcggctggggctgcgagccatgccatgatagaaaagatcctcagcgaggagcctcggtggcaaggtacaggcatccacacctcggccgcgccctccctataatcctgctcatagctgccctggggatttggctcaccaccacctactgcctgctctagccgaggccccgacctggcccgcatcccaccctacacccaccattcaaaaggcgcctctaggggcgttttccctgacacatcatgttcccaagatccctccaggctttcacatgtgcacaggcacgtacataagcgcacatgcaaatgttttccgccctgca

SEQ ID NO: 2459 - DNA, 1153 bp, Homo sapiens
gactgggaggctggtttccgtcatttttattcaactgttaccagcctatgcggcaggaccctctggggatttgtgcctgaggcgttggccgcccctgtgccaggctgggcacacactccctgacgaggtcctggagacttcaggacgcagagggaaaagcagccaaaagtggcctggctttctagcctcagtgactgtggcggacccaccggctcccggggcctggaagcggctgcatggccttgctgtcaagctgatgctctctggagccctgtcccccactcggagctcctccagcccgcttcccgtatttgcagcatgtcccggcgttcacagagcttggctgcctcctctgtcccaggagagagatgcttagagctgtcctcccagggagtcatgtcagcctctagggtgtgcatggagctgaggggacactcctgctgcctccctggagtggtaattaaccgggactttcctcctcccagaaccaacatcccgggtaaccgggtggctgaaggacaggtgacgtgtccctacctcccccccttccctgcccgaggctccggcatccaccgtcttgccttcctgctcttcaagcaggaccagccgattgacttctctgaggacgcacgcccctcaccctggtaatctacaccacccacacataacccggcctcaggccagctcccctggaacggtcactcttgctcagttctctcttgacctcagccttgagactggcagaagagcaggatagggtgctagcagactcccaggggcctctcagggttacctgttggggtggcggggtgaggggctctggtgccccactccacactctcatacgctctctatcttctcatagctatcagctggcccagcggaccttccgcacttttgatttctacaagaaacaccaagaaaccatgactccagccggcttgtccttcttccagtgccgctgggatgactccgtcacctacatcttccaccagcttctgggtaagggccatggggctggggcactgggtgggcctgagctcccaggcctcgcctgccctgccagggagaagctttgttaggggaaggctgcggcaggtccctggtgggcaggcctcagcctgagggggcgcaggccagcagaccaccccgt

SEQ ID NO: 2460 - DNA, 1160 bp, Homo sapiens
caagtcacactgtaattgactaaaacgactttttattttaaaatattgatggtggggttttgcttttttttttttttttttttttgagacgttgtcttgctctttcacccagggtagagtgcagtggcgaaatcttggctcactgcaacctctgcctcccgggttcaagcaattctctgcctcagcctcctgagaagctgggattacagcgcctgccaccatgcctgtctagtttttttgtatttttagtagagacaggggtttcaccaagttggccaggctggtcttgaactcctgacctcgtgatccacccacctcggcctcccaaagtgctgggattacaggcgtgagccaccgtgccgggccagtgtttttaactgtccacacttactaaattttccagtacttcttcctatggttcatgatagtaaacacagaaacatataaggaacattattagagttaccagatgttagctgttgcatatgtgcacattcctagattcaagggtgtttttgccttaaatttaagtgggtcattggttgtcttgggaagatcatggaaaattcgggattttttagaattctgaaccaaaatatgttttgagtgtttcttagtaaatgtgtgatcttccaccttccacattcagactgcggactacacttcataaatgcctttttatttccagttatggattcaactaaatgactgccttgggagcacataattactttgctacctttttccccctttgctgttgtggctcgagtttggttctcacctgagaagatgcattgagcatatgttgttacccagccctggcttaatggtgtcctgtggggtaggggtgggaggacgaggggcacggggccagagcatgtgaatggatcatggttggacagctgtgacctgccagcactgcgggtaagcaaaactacaaaccgttctttcctctgtgacattgaataaaccttaataaaattcataattagcacatactagaaaaaatgtgacttaatctttttgtggggcgacagtattgggtttcattctggctatacagctttgattggatcattaaacaggtcagtcacttccctcaagctttggggtgtggaataaacaccggtgaatttgtggattcacccgtcaacctccca

SEQ ID NO: 2461 - DNA, 1365 bp, Homo sapiens
acaccctcttaggctgtgcaaggcatgggttatcaggggattgaggtcacctgggacttcagggaggctcagcttgctccctgccccagacctgtttcttctaagggaggaggacatggtggagaccagggacaggagagccagcagggtggatgcaaggggcctctacccacacctggacctccgtgccctcaccccagccctaggtgtgcacctaggcctcattccttaccccccagcccctgcccaccttcagcaggatgaggccctgggttgccgtgctctcgctgttcccctctcggggctgggctggggccgctcttggccccaaggttgccccgggccagcagcccagccagcagcacagtctctatggtgctgaggaagagcagcagcagcaggatggtgaagtagtaaactgggggaggcagggcacagggagatgctcaggggccagtccctgtgtctctggtgcccagcgagctgagcaccagtgggtgaccggggagaaacagggcagactgggtaagggagcagggcttactgagcagtgggttgcaggaggaggagctgggcagggcctgcaccagggaggagtggaggacgaggtaactcagcagcaatgtcaccttgtagcctatgcgctcaatggcccggaggggcagcaaccccccgcacacgtcagccaacagcagtgcctctgcaggcaccaagagagcgatgatggacttgagcgccgtgttcttcagcctcagctggaaggggaaaagtcagggccttcccggcgggggggaaggaggtgggcatcgggggcatggggcctggcctctggccgtgcatcctcactcccacccgcctccagcagccctctgtcggcctcctcccgacttgactcaccgtcacctggaagcagggcaccagctgctggggtgggacttgggtcttcagatcataaactacgtattccctcttgacactcacaatctcgttcaccacgtgggcctggaactctaactccatcgctgaggggtgggaatgagaactatgaaccaggaaggagagatcccagctgccaagtctgggggtagcagactggagcccaggggtgatggagacttttgatggcttttggcagggacagacttggacacaaaaccgatccatagaagggcttcccaaaccttgttttgcaacatcccaaattgtctccagttgaaggaaggcctttatcagattcatagatgagctttcattgtaaaaataaatgtactttgcaccacttcatgatggagggagaagtggtcacaggctcgtcagtctatcatctcacagctgaagcaggatccccagggctaccgctgtggt

SEQ ID NO: 2462 - DNA, 1099 bp, Homo sapiens
catcccttggcacataggaccaggcagttctgccgccggttttgcctgcaggcgcccccgccgtggcctccagtaatagggtctggcctcctcctggggcagctggcaacccctcctctctgggacttaccagcctcttagattttgaccccatgccagccagcctcagaagctgcagccaaccaccctcttagatgttccagaagccctgactgggctggtcacttccttcacaggccccgcatttgcccacatggatgaccccagtgccagcctccttgaggtggcacagccacctgcccaccctgggctgccctctttcaggtacaactcagaatgctcagtcctggggtcaaaccaccttatccaggacgctgattcaggaatcttccctccttatctttccatccgtcactctcctgcctctggtgtctgatcccactgtctgcgcagagccgagaatgaagccagaacaaaggctgggctcagctccttttattcccctcgaacctggcggggcctgctggctcccttgcagctttctgccagaacagtcagcctcttccccatcctctgccagtgtggggtacaggccaggagctgggggacccacgccgcccccagccaggagtgtggctggccccagaccagcagctcaagagttgtgccatcccccagggagagatgacatgctggacgtggagaccgatgcctacatccactgcgtcagtgccttcgtcaagctggcgcagagcgagtaccagctgctggccgacatcatccccgagcaccaccagaagaagaccttcgactccctgatacaggtcccgccccgccccgggggctctgcagccagccccagcaagagctgtcacaacagactcttgcagccctcaactccacccaccaccaccacctcgtgccctggggaccggtcctgggtggacgctcaccacctccccgtcacccctcttcctgcacactggcccccctacatactgcaaggatcccccactagcccagaactagctcccaccgccccacccttccctgaactgtctccctgccccctcaggatgccctggatgggctgatgctt

SEQ ID NO: 2463 - DNA, 1099 bp, Homo sapiens
aacaaggagggtcggtagtagaatcaaggctccatttggagaaggaaatgactcctttccttcatccttgtccccagcgtctctggtggtctcagggaaaggcctgctcactgttggggagctgggtgcggggcctggggggcaggtggagggccgctgctgttttctctcactcatttcctaggtcttcttatctcctctctgtgtggctctggtgacagggacgatccgtaaggctcagaaccttctgaaacagtattcccagcatggtctagatgggaaaaaggggggctctaacctcattcctctggaaggtaatcaccctgtgttcccctcctgtcccttcctcctccactgtgtgtccacgcacttggcagggcagagcctcccccaggagggcctcgggagaaaccctgaggggagcagggtgggaacggcaggtccccgatgccactcgggcttcagcgggcacagggacagtttcgcagccctcggcctggtcctctctggctgatggcagctctgccctccctgaggcttccctcctcccttccctgtctctgtccttgtctcctgtgtgaactcagaaaaagttatttgtcttggggcagccctttcacgctcagaccagcagtggcaggccccagctggccgaggcctcccggccttcccatctttagaaaggggagtgtgtgcagcagaggacaggcaaactggggctttccccaaatacagcgaggtggggaacccccctggggccaagcatcagctcttcagcccctccttggtccttctccgctttccctgggcctccaggctcggggaaatgagcagctaaggacggtcctgggtgctcactgaagtcaggcttgaaacggctgttcccaaggtggcttgaggtagaggaggggctcagggccctctccgatgcccccttccccatccccatctgacgtccccctcctggagatgaagggcttcttccctgtaccccaaggggcggcctgcctggcccctggataaacgctgcttgtgtttgtgcggccgacatctcgccaggtcacgagcatgatttccgagttaagcacctgtccgaggc

SEQ ID NO: 2464 - DNA, 1176 bp, Homo sapiens
gtttctgtgtggctgcagaggccaggagtgcagtgactgtctcactgcctagtggttgtggctcacatcctgccctgatggagaggggggcctgtcgtccaaccctctctgaaaaactgcagtagactttaccatttcaggccccacctaatgttctttccttccttccccctacattcttcccgcccctttcatagttaagatgcataagctgagcaataaccccacttcctgatttccctgaaatatgagcccagaagcagcaggtgacagggagcttcccttaccctggggtggtggcacacagaccacctcctgtcctgtcccctgcaggtagtattcacagtgtggtgttacctgggaggagggaggaaggagctgagatgaaggagattcaggtaaacagtagccacagtggccaggacccccttcctgaggatccctgtccttcctcgcagcaggtgcttagtcctctcctagggagaagcacggaaagattcctcaaggcctcagtcccatgtccaaggcatacctaggttagaaatgtcctttacttgtttctcagttactatttctcctcttcctccctccccctgccttctcttggctgtcatttagctctctggcccacagaaatactccatccaaggagctggtcctcagtcagcctgatgaggacaggtcagtggccaacccttttgccccagtccttcatctggagacagtcacatagtcacgtcaacagttcacccaaagagaagaggtggggcctggcttctcccacagggcacagcctaactatggagacccagggctccttcctgctgcactaggcctgtgctctccctattgccttcaggtggtgtgatcccggcttcctcacagagcccttttttccttctgcccagctccatcccaccagagtttctacccccgctgaggcatctcctgggcacagaccaccacactctaagccggctggcctgggagttagggtcctgcccacctcacctgggagttggggtcctgcccacctggagtttagcacgctggtcgctcactttgctttggtctgcacacctggtgtgtgcatgtgtatactgcttgtgccatctgtgtacccctctccctggagtacacttgtggtcacactacagtggggacatcaagaatgca

SEQ ID NO: 2465 - DNA, 1477 bp, Homo sapiens
ctcctgggctgccctgctggagacaccatctggatttggccaaaggtctggctcctgtaatgttcattttctcttccccaggtgcctggcaggctgatgacaatgccgtcagtcggaatgcccagcgccggcgcttgtcatccagcagcctggaggactctgagacgaggccctgtgtgtggggccctttggctgtctgagccccagcctctgcacttgggctcccctcctgccctgcattccatccatcctcactcagctgctgcctactgggcatcctcagcaagatgctggagactttttaccctcctgtgacagctgttacaacctgtaaccacaatccctcacctctcagagggaactggaaccctcctttctccgtgtgacctaaagccactcaatgaactgcagctcacgagaccttttgcagggactctggaatgtcctcacggtatattgatgttcaggtggagctggggtccatgggctaatttcttacacatcttttttctccttagggggtagaacaagaaggcttagagtttggcagctttgttacaaacatccctctggcatttcctggtctctggcacatcataaccaattggaaacctgcagtttggggtagggctggaggatcgctcctgtggaaagggagagccatactgcacggacgtagcgtttccctctacaagcactaggagcacctttctcaaggacaagaaatggtagcaaccaaaaggttggttgaaggaaacaatccttccttctggtggcagagccagtcttctgggcctcacatgcctgtgcggttaagaaggagctcttggccgggcgcggtggctcacgcctgtaatcccagcactttgggaggccgaggcgggtggatcatgagatcaggagatcgagaccatcctggctaacacggcgaaaccccgtctctactaaaaatacaaaaaattagctgggcatggttgcaggcgcctgtagtcccagctacttgggaggctgaggcaggagaatggcctgaacccgggaggcggagcttgcagtgagccgagatcgcgccaatgcactccagcctgggcgacagagaaaaaaaaaaaaaaagaaggagcccttgaatctgagaatcccccagttaagatgatttcccttaaggagcatttctcctgatcaggtgcattcagggaggcctgcaactccatcctaaggtgacatttcaagaaacacatgtgttgaccacctctgtgtgccaagcactgggtgaggagtggtcgtatattaccataattcatcctcactcaattgggaggtggcattcttgtccctgttgcccccatctctacccccttttgttaatggttgagagaaatgtggaccagtgattctcagtttggtgcccaggtccccaaaggaagtgatggagagccttgagctaagttcaggcagcagcatgtggccagcagcagtgtgc

SEQ ID NO: 2466 - DNA, 1140 bp, Homo sapiens
cagcaaggttttgtgcagcccagtttggaagcaactggcttcatacaacctggcacagagcagcatgatttgatccagtctggcagatttcagcgtgctttggtgcagcgtggtgcatatcagcctggcttggtccaacctggtgcagatcagcgtggtttggtccggcctggaatggatcagtctggtttggcccaacctggtgcagatcagcgtggtttggtctggcctggaatggatcagtctggtttggcccaacctggtagagatcagcatggtttgatccagcctggcacaggtcagcatgatttggtccaatctggcacaggtcagggtgtcttggtacagcctggtgtagatcagcctggcatggtccaacctggcagatttcagcgtgctttggtgcagcctggtgcatatcagcctggcttggtccaacctggtgcagatcagattgatgtggtgcaacctggtgcagatcagcatggtttggtacaatctggtgcagatcagagtgatttggctcaacctggtgcagttcagcatggtttggtccaacctggagtagatcagcgtggtttggcacaacctcgtgcagatcatcagcgtggtttggtcccacctggtgcagatcagcgtggtttggtccaacctggtgcagatcagcatggtttggtccaacctggagtggatcagcatggtttggcacaacctggtgaagttcagcgtagtttggtgcaacctggtatagttcagcgtggtttggtgcaacctggtgcagttcagcgtggtttggtgcaacctggtgcagttcagcgtggtttggtccaacctggagtggatcagcgtggtttggttcaacctggtgcagttcagcgtggtttggtccaacctggtgcagttcagcatggtttggtccaacctggtgcagatcagcgtggtttggtccaacctggagtggatcagcgtggtttggtgcaacctggagtggatcagcgtggtttggtccaacctggaatggaccagcgtggtttgatccaacctggtgcagatcagcctggtttggtccagcctggtgcaggtcagctgggtatggtgcagcctggaataggtcagcaaggtatggtgcaacctcaggca

SEQ ID NO: 2467 - DNA, 1120 bp, Homo sapiens
atccacacgtggaacccatagatccagatggtcaactgtatgtgaatttcatcctctccaaaaaactatagtgtttctggaaagaacaagtaatactggttctacaccctggaagttttgctgtgacctttgaccatttgcaatgtgtttatatatatgtaccttttcctcttcagtactcttgattataagagtatctcttcattgtttttctataagaatacttgaaacattctttgttacatacagaaattattctaagcttcaatatctttgtgttatatgagtttcttttcttctaatatgtatattactttgcgtttgtgttcttgctactttttgccttcgctacagttctttatcctttcttttaagattctgtaatcaaggccttactgttttttccatctcttcggtattaattccatattcatatttttgcttctgccacattattcttttctcaattttctggaccaagccaaaagtcaataattcccactttcttagctttagttctttgtccatgtggaaggttgtagccttctctacattaaggctttattaaggttaacaatcaagcctgtgactgcagtgcttaatcacagtaccccgtcttcagtctgctggtaggaagcaggagttgagcatctagtttaggtccactgtagccatttacctgtaggggtgaactttgtaattttttgttttaaaatttcaggtttaactcacattatcactatggatcttcatcaaaaggaaatacaaggctttttcagctttcctgtggacaaccttagagcctcacctttcctgcttcagtatatccaggaagaagtgaggaaccaccagcaaacaccccattgtcctcaaaagagatcttatttagtttttctctggtatcagatttcgttactggaaggcacatcaaatgagctctcccttaagtcacaatgcctgaggcagcagacagggtcagctttagtcgtggacgatcatagctttaaaagacactaaaaacagattttttttctacgtatctttagcaatttgcttatgttttctaaaatgaatgttttaagaattatttttaaaaaattcttgacgtaggagtgctttt

SEQ ID NO: 2468 - DNA, 1138 bp, Homo sapiens
agtctgagattgaggagtcagactacgattcggtagaaggcagcaccagcggggcatcctcggatgaatgggaagatgatagtgacagctgggagacggacaatgggctggtggaggacgagcaccccaagatagaggagccccccatcccacccctggagcagccggtggcccctgaggacaagggagtggtgatcagtgaagaggcagccacagctgccgtccagggggctgtggccatggctgcccccatggccgggctgatggagaaggctggcaaggacgggccacccaagagcttccgggagttgaaagaggccatcaagatcctggagagcctcaagaacatgactgtggagcagctgctgacgggctcgcccacctctccgactgtggagcctgagaagccaactcgggagaagaagtttctggatgacatcaagaagctacaggaaaacctcaagaagaccctggacaatgtggccattgtagaggaggagaagatggaagcagtgcccgacgtagagcgcaaggaggacaagcccgaggggcagtcacctgtgaaggctgagtggcccagcgaaaccccggtgctgtgccagcagtgtggcggcaagcctggcgtcaccttcaccagcgccaagggcgaggtcttctccgtactggagtttgcaccctgtgagtcagcccttgcctggtcttcgccttcccccgccttctcggggctcctgtttgtgtcaccagatctgggtgcagggtggttagtcccctcgccagaccccagctactgccccagggcaaaccatttccctgtgtggtcacagtgctgaggccagcagcggcgagtgggaagtctgtgggtgtgctcacctgtccagccaggttggcagatggagctccagggcctctccatgagggactgactattctcttcccccctctagcaaatcattcttttaagaaaattgagttccagcctccagaagccaagaagttcttcagcacagtgcggaaggagatggcgctgctggctacctcactgcctgagggcatcatggtcaagacttttgaagatagaatggcaagtaggcttggcatgggcaggtgcagatgtgctgtgtgggcacccagtgcccaa

SEQ ID NO: 2469 - DNA, 1189 bp, Homo sapiens
ggagtgtcttgaggacggccccaatcggtagttcatatttagctttacagataggagtcaataggattgtaaacttctggaaagccgtagttttaacaacgagccttttttcctcccccagaggcctttctttgtttggcatctgcagagacggtgaaaagcagagctccaggttgaaggatcagagtaatagatggagcccttaacatgagtaagagtgggtgcaggcagggcctgagtggtcactagaaatgagaaagcacagttggtgccatcacatacattcacctcctgctttattctgaagttcaagtatgagaatacgtgttgacatacaagccagctatggtaagaaattactcaaaattcagaatgctaattattttaatgataaaaatgagtagcgtctttgcccgtgtgatttggggccactaggtgtcattgtaaccagcgtggatcctcgttagggcatgcagggatgaaagagacatggcaaatgaattttggatcgctaggatttaggaatctttgttattggctgagctgaggatgatttaaagttatccctgtctgaaatggtatcttttgtgaggaggtctgacttgctgaggctcagctgtttaatacaaatctggagaataaaccttaaggtggtttctgttagaatgaagcctgttatccttctcttttagattaaaggtggtggctgtggccttgaaaacagtcatgtgaaaactcatcaccttaaggtgttaagtgtaaggatcttcatgatgaaatttctgtaaatggtgagatttttagtactttcatagacttgaatatgcttatggtcctctttaagtattggtttgttagttttggggatgtgttggtcttccagggttacgattgcccagataatggaagtagtatggaattccttttgatagggtccttgccaagcactctcataaagagcattttttgtttgtttgttttgagacagagttttgctcttgttgcccaggctggagtgcgatggtgcgatcttggctcagcgcaacctctgcctcctgggttcaagctagtctcctgcctcagcctcccaagtagctgggattacaggcatgcaccaccacgcctagctaattttgtgtttttagtagagacggggtttctccatgttggtcaggctggtcttgaactc

SEQ ID NO: 2470 - DNA, 1189 bp, Homo sapiens; identical to SEQ ID NO: 2469

SEQ ID NO: 2471 - DNA, 1996 bp, Homo sapiens
ataaaagttctcctggtgtctccgcagagtgccttccaggaacagatctttgcatagaatatcagtggtttccttttttgtttcaaatagtggtcagaaaatacccagtgttgactcaccaaggcaatcagcttcctttttccctttttttgttttttttttaacattttatatttttgctttattttattttattttattttattttattttattttattttattttttgagacggagttccactctgtcgccaggctggagtgaagtggtacaatcttggctcactgcaacctccacctcccgggttcaagcaattctcctggctcagcctcctgagtgctgggactacaggcgcgtaccttctttagtagagactgggtttcaccatgttggccaggatggtctctatctcctgaccttgtgatctgcctgcctcagcttcccaaagtgctgagatgacaggtgtgagccatcagacccagcatttttttttttaatttaaatttaaattttttttcatttttttgagaggttttttttgttttgttttgttgttgttgttgttgttgtttttgagacagtcttgctctgtcacccaggctgggagtgcagtggcatgatctctgcaacctctacctcccaggttcaagcaattcttgtgcctcagcctcccaagtaactgggactacaggtgcacgctaccacacctggctgattttttttgttttagtagagacagggtttcaaccatgttgcccaggttggtctcaaactcctgagctcaggcaatccacccgccttggcctcccaaagtgctaggattacaggtgtgagccaccacacccagctattttttctttcgttttttaattttaaagttgggggggggtctcaatttgttaccctggctggtctcgaactcccggacttaagcgatcctctggctccaagcccactaccagtctcaggtttctttactaaaagatcactacctttttttctcttatctgctgccatgtgagatgtggctttcaccttccgccatgattgtgaggccttcccagccatgtagaactgtaagtccaataaacctcttttgtaaattaaaaaaaaaaaatcactatttaagatactaggatggattgtgactgttgaggagtacttacatatcctacatttgactacattatttccaaaccaagtattccatccaaaggaacatactgctatcatagagaccaaggagggactgtttaaggttgccaaggtgaagcgagctgagaggctttgtcctcgtgccagtaactctgaaatctctcttaattcctgctgtccaggcagcagaatgccatggtttccccaagtaggtagctgctttagcagttaaagcccaaatgtctgttctgttgatcagaggtctctgaatttctgaagtggtgtttcgtttctggtgactgagttaatcctttacaatccctcttgtaaagtgtgctaatagaaagaatccacctttcaaagctgcagaaccagaccgtgccctaaattgaccaacgtaactgatgtgcctcaggaagtctcttgccagctgtccctgtgaagacccccctcctcccccccagctgctgccttgcacactgaagcatctcagactgtgcaaagccgtgtagtcatcaagacagtaaatcccagggcttggttaagtgctgtgtgataacttgtttggatgagacttaacttaaaaccacttacaataaacttgggaaactaccgtcagctgagttcaaatttactgacgccatgatatgaggatgaaggtttattacctggtgacatcatcctgttggtgacaaggtggtgatacatctctaatgggacttccctcagtggcaggcaggctgccaagcaactaacccccatcaagtgccagaccctcccagtgttctgagagtcatctccatgctaaacagcctgcgttttatatgatttctctaccc

SEQ ID NO: 2472 - DNA, 1075 bp, Homo sapiens
tcaaaatcctgatggcattgggaaaagtaaactgaaggaatttttgtacacttgtaccagctaagatgttctgactgcaacgacagaaaactccagctcaactggcttaaacaagaacagggctctctcacgtgagaagccaagagttagaacaactccaggcccagaatggtcggagctcaagctgcagttctcttagctcagtcttcctcgtactgtgggcttttattggagactagctctcctcatggtggcaagatggctgcaggagttcaggtatctcatccagaagcaagaaaagggcatgtcttgcttgcgtctctaggcgtaagggaactggtccagatgtccccgccccacatcccttcagatcccaattggccagaatatggcacgtgcccatgtttcaaccaatcatgggcaaggacatgggaccagcatgattggcctagacccctggagcctggggctgggcccagcatcccctgaatacatggccatctggaggagaaggtaactgaatttcactggggatctgtgataaaagggagcatgggtgttggggagacacctgttccagttgggtttcctatgaggtccaggacagggcttggtgggcactcggaagccagtgtctgaagtgctcagcatcctcctcttcctcggtggtgggtgtccaccgcccaggccccacccctggccttggacacttcatggaaacactgctgatttgctgtggtgttgggtggctcctatctattccccgtaagtgctggcctctgttgacaccatttctgctacctcatctgagattgttctcatcagctcacagagattcatttcagtgaatgaaccaaatctaagctaaaaagcataaaggagggcagaaagaaacagcagtgtgggagaaagagcgcaaacaccgagagaaagatgtctacctggcagccatgtcagagaatcaccagtatgtatgtcactgccaccaagaacctaagagccacagaggcctacagaagccaatcccaatggaactctctctgggtgtgggggttgagagaacctaaagcattca

SEQ ID NO: 2473 - DNA, 1098 bp, Homo sapiens
cctgagtaactgggactacaggtgtgtaccactacatccagctaaaggagagcgtttttttctttttctttttgagacagagtctcactctggcgcctggtcactgtgcccttcaccttctgggttcaagtgattctcctgcctcagcctccctagtagctgggattacaggcatgcaccaccatacccagctaatttctgtatttttagtagagatggagtttcaccatgttggccaggctggtctcgaactcctgacctcaggtgatccacctgcctcggcctcccaaagtgctaggattacaggcgtgagccaccatgcccagctgggagcgttctttcagcaaaaagtctaattcagagactcaccttccatcctggcactaaacaatagtactagaggtaagatctgccaagaatttctctcacttaagcaggatacttactttaaatataattaggcaagacttatttgagtacttgcctaattgtatttaattagaactatgctggatgctgtagacagaagaaataaaatactcaacttggtccctatcttccagcaggttagaggcctttagggaagaaaagcctgtgtgcagggaaagagaacctcaccagaaagtattcaataaaatgccaaagtgatcttacagaacagtgcctgtgacaccggaggggattgttctgtctttgtgagtgaacatacaatgatggggataactggtcctcataccatgcaggtcccatttctgatcaccccactggcaggacaattcacagttcttgagcaaactgagttagggagggtatgctaacgacagaacctatgcaagttcttagaaatattttttgtttgctgaaataaagctcaatcaacacactaccttaaaaaaaaagtggagcagtggcatttccatgcctcatgctcaccatcatgaggttaacttcccgccgtcgcctcttgcctgccaggggtttttcgggagcccctctctgttccactctgattccttttgtttcttgctgaccattcactctctgtgtctgttgttggatccaaatacgagtgtttttctttctttttgtggtcagtgc

SEQ ID NO: 2474 - DNA, 1108 bp, Homo sapiens
gcggggccggccccgctgcctggaattaaccccgctgtgcttgctcgtcccgcccgcagccctaggcggcgtcgccgcagccgatcccggagtcggagtcgttccaggtctcgcagccgatctcgctacagccgctcgaagtctcggtcccgcactcgttctcgatctcggtcgacctccaagtccagatccgcacgaaggtccaagtccaagtcctcgtcggtctccagatctcgttcgcggtccaggtcccggtctcggtccaggagtcctcccccagtgtccaagagggaatccaaatccaggtcgcgatcgaagagtccccccaagtctcctgaagaggaaggagcggtgtcctcttaagaaaatggtaatgtctgggaatccgagacacataaccctaattcataaatgggatttggggtaggtctttttgagtcgtgttaatgtaagaatgactcctatcattaggagtgctgctcggaggttactcacctttgggagtaatactgaagagaggggtctgcagaaaggatgtgtatgaagcttagataataatggctgtttcgtaaactgtttgagacctattaatgaaaatgactatttcttgctgtttttatccaacgtctgcattttccccctttaaagctgcggtctcctgtttgataaaagaatattggccagtattgcagattttaactgatttggctgatcctccagggaccagtttctgtgggcgtgtattggagcaggtttgtctttaaatgttaaagatgcactatcctcttagagaaacaatcagttcaactattgttgtactgactgggacttcatattctaatggatgtggcaaaagaattgcaataagaagcagtgaacatttggaaccccaaaagaaagttacaggtattgcactgggtggggaaaggatagtgtgtctttaactcttaaattgtttggtcctattttttaaaaaggaaagggccctaagtagctcagatattaaagtagtattctcaattaccaaatgtttcatttgaaacaatttatcttaatgaaatatagaccaattctctgatctcgagttgtttttgtttggatacagccc

SEQ ID NO: 2475 - DNA, 1108 bp, Homo sapiens; identical to SEQ ID NO: 2474

SEQ ID NO: 2476 - DNA, 1307 bp, Homo sapiens
tggtggtcgccgactcgcagtccgcaggatgactcagggcagccctgaccacagttccgccgccatcggccctagcctgcggaattgggctcgccccgggacgataacagagctctgccgggggctggaggcactgaccgggtgaccagagacccagagaccagaccccctccacggcgcccgggatttcggggacggcttctcccatcgcaagtagggcttggacgggaggcgacaaaagagaacttggtccgcacacagccaccgaaattggaatgaggagctgtagggaggccccgtagccagcagaaaagcattggggtccctggctgggttagcccaggtttctaggagtgtggtaagcgtcgaatgacttttgtccttttaaagcacattatgttactttttcccccaaggtttcaacagaaaatgagaaatatcccccgacgattggctgaaaacatgcagcaaccactattttcttcctgcccctcgttgatgagagcattcgaagtgacctcagcagggcatccaggtatgtcaagcatggtgacaaagtgttcaggtcagacggtctggggaaaggctcctgtgttgttgagcctgccaagttgtgggtgcagcatggtaccaggcagcccaaccctgacctaaagtaaattcccggaagaagtctttcctgggttttgaatttgcagtaacaggtgtgagcattctagcagcagtttgatgatcatgtatgatactgcaaacaggacctacgtttaaagaaaatggttgtagttagtatcagagagcccttgcttttcaaaacttcataaacaatgttactgtcatgtctttcattcaataaacatttgttgatacattggcctgacatcatgttaaatgttacggatacagagatgaagaaaacagtcatggcccttgttctctgggaactacaacccagttagggagacaaggttaaatgatcacacttaagagggcataattcagccaggtgcagtggctcatgcctgtaatcccagcactttgggaggccgaggcgggtggatcacctgatgtcaggagttcgagaccagtctggccaacatgatgaaaccccatttctactaaaaatacaaaaaattagctgggcatggtggcatgtgcctgtaatcccagctactcaggaggctgaggcaggagaatcgcttgaacccaggaggtggagaggttgcagggagccgagatcacacacaccactgcactccagcctgggcaacaagagcaaaactccgagaaaaaaaaaaaaaagtcataat

SEQ ID NO: 2477 - DNA, 1307 bp, Homo sapiens; identical to SEQ ID NO: 2476

SEQ ID NO: 2478 - DNA, 1307 bp, Homo sapiens; identical to SEQ ID NO: 2476

SEQ ID NO: 2479 - DNA, 1379 bp, Homo sapiens
acacattttttttttttgagacagagtttcgctcttgttgccctggctggagtgcaatggtaccatctcggctcaccgacacctccacctccccggttcaagcgattctcctgcctcaacctcccgagtagctgcgattacaggcacgtaccaccacgccagttcattttgtatttttagtagagacgggtttctccatgttggtcatgctgctctcgaactcccgacctcaggtgatccacctgcctcggcctcccaaagtgctgggattacaggtgtgagccaccgcacctggtccacaacacatttttttaacctttccaccatgtggtaataatgcagtcaaaatatacatcatgttactttgcacagatctaaattacacccagaagaaattgaagacactgtcattcctattttccattctcatctcagccttaccagtcaatatcaacttcaattaaaatggctgtcaaatcagtactaatttgattccttgcactgaagggttgcccatatttaaaaatacttgagccacaataaggagccaatggggcgaagctaccatctgtgggattatgactgaacgcctttaagtcagaatcccacccaggcagacggatacagcagtgcccgtggggcctcggttggcctccaatggcctcagagagccggtccctcccccgccgagcgccaggactggggtccggtgcagaaagcccctcgtcctgggaaaggcagtcgcccccttgcccgttgggccacccatgttcgtggggaacctggctctaaaccattcatagacgacctgcagaattctgggtcggggatttgtatgtagcagagcacctccctcactgcgatctattgaaagtcagccctcaacacaagggtttgtttaaaaaaaaaaaaagaagaagaagaaagaagaaaagaagagaaagaaagagagaaagagaggaaggaaggaagggaggggaggggaggggagggaagggaaacaaacaaaaattaaaatatagtacttgagccaaccaggcactcatgttaaacacaaacaggaaaatacaaggatgtttattcccctcccttccttaacctctggttgtttaaaaaaaaaaaaaaaaaaaaaaaagaaccaatttaaggacccagctgatttggattcatgaaagtaaagcaaaatctctatggcaaagaaatccttcatgaagcctgagtcatgtacaaaccctccttttaaaagagaaacgtgtccttgaacctttaatgttgaccagttactttttcccccttgcagaactcagtctattgaccagttatttttattttttaattaactttttttttgagatagagtatcattttattgcccaggc

SEQ ID NO: 2480 - DNA, 1181 bp, Homo sapiens
gcaacagcctgtcaagcacccatacagcaggtggtttcattgccctccatttacagacaagtaaactgagcttcagggtggctaccgcttgtctcccaagccacccagccatttagccacggaagaggtcatgactttttacaccccagtgaagctgaagatttttctttccgtttttaaaaatgtttactccccagggcagtgaacacctggtgcctctgtctagcgcaagaggtgaacgtttgccacttccgtttctttcctcctaccagacctgaccctccttttgtgacgggaacatcctgcaggcagtctgtcctgctttcatagactttgagaaacggggtccaaattgccggctgtgggtgggacaggcgacactgcagtgaagaggtggagtatttttgtagcggggaagaaatacatttcctctaccctcttaggttcagtgtttgggggtctgtgaattaaactcactcaagataaattaatgagagaaaagacagatttaatcacatacgtatgggatttcactgaaaaacgtgactcaaaagagcaggtagaaggtggggcccgtgactggtccgaaggtagtgagttatctcagttgattgttcacagtcagttacagattagactccttgttccactgtctcccctcttcccacttgttttgttttttttgagtcagagtcttgcactgttgcctgggctggagtgcaatggcacgatctcggctcactctaacctccgcctcccgggttcaagcgattcccctgcctcagcctcccgagtagctaggattacaggcacccaccaccacgcctggctaattttttgtatttttagtagagacagggtttcactatgttggccaggctggtctcaaactcctgacctcgtgatctgcctacctcggcctcccaaagtggtgggattacaggcatgagccactgcacccagccaactagtcttaaaaaaaaaaaaaaaaaaaaaagaacttagggcccgtatactatcttaataggaaaaaaggaaggggtgaaagcacatattatgggccgggtgcgatggctcacgcctgtaatcccggcacttcgggaggccgaggcaggtggatcacctgaggtcgggaattcaagaccagcctggccaacatggtgaaaccccgtctctactaa

SEQ ID NO: 2481 - DNA, 1692 bp, Homo sapiens
cagtgggctgcacgctcccctccatccccatcggccctgtcccctggagtgtgtcagagcccaggggagaatgcagcccaccaggagcacctggaccccctgcccgccacatggtgtggccatcactcagcccctacccctgccctgctcctaagggtagaaaactccagggtcccctgccaccgactgcccagccactccaagccccctggcagctgcccctcctggagcagaaagtgcctttatctcagccatccgcagactgcttggccagatgcggggacaggctggaatgagggaggcgtcttcatctccctgccatccccctctcacgccacccccgcccccaccgggctgcaggtgctgctgatgcgctgggatctgattgaggataaaaaggaaggagagatgacccctaccccctcatcccccagttttgaaaaggtctaagcaagtgagtctggtggaggagctgagggagggagccatggaaggtgccagaaggaaggttggcgggggcacgtgtgggccgtggcttgggctggtcagagtggcgtgagctgcccggcgcctgccctgcccaagtgaccagggaagtgtgtgtgtgtccatgtgtatgcgtgtccgtctgtctgtctagtgtctgggtttggcccaagactgggctgtagttacattaatgcccagccagccacccctgccactcacccttcctggcccaggccttgctgactctctgagctggggaggtgggaggccaggcgagcctgactctgttgatctacccgtgcctgggcccctcccctcagagcccatggtaacgaacccctagaaaggagagaacgggcgtcaggggtgcacagtccacagctgaagagcaaggtttcgtggcagcacggcccggcccctcaccctctgtccccacgaggggacccatgggggctgtctttgcagggcacagatgaccaaagtcccttcctgcttcctgttacctgtcttgctcctggggagaaagaggggcctgatgagactccactcaggtgcacacatcaccaggtgcatctgcaggcaccgggctggctgcttgcagccaggagaaggtcagcgagaaggagtgtatgagtgtgagtgtgtgtgcatggaagttggggcactgggcgtctgactccctccccacccaagagaggaaggacccctcaccacccccactggtgagacagtttactttgccaacttgccatgtttttgccaaaaccaagattttgaaggaaatgagtggccagcgccagggcccaggccatgtggcctgcccagcctcaatgtcacttggtggcggggtggggtgggggtgggcagcagcatcccagccttgagatgcttcactttccttctctgtaaccagactttgaaaaattgttcgtttcatcaggctctgttcctcaatggccttttgctacgtgcctcccgagaaatttgtctttttgtataaatgacaaagtgttgaaaatgtatttcctgaaataaatgtttcaaatgcagaaacccagaaggctcctgagtgagaatgttttttctgcccctgaagtgcagttctttgggcctcgggacaggttggggtcagctgcaggtgggcaagaagcatgggcaagaaaaggtaggccgggcgcggtggctcacgcctgtaatcccagc

SEQ ID NO: 2482 - DNA, 1102 bp, Homo sapiens
gtgtggtgtgccttggcgatgaaatgtgaatacagcaatgctggccacatcctctagggagcattgaatgcttgcgtgacactcaccaaggtcgtggaggcccagtcatgccccagaggtcacccagagcctggtgccccttacaggagccagaaataaacctgtgctgttttccatcctttgactttcagcatttctgtgatatcataaggagcatatagtttgattaaaaaaaatcgagtctgaaaatcttcatctttgaattggagtattcagtccaattttcgccatattagtccaacctttaacacttgttatatattgtttaataaatgttggcatgttggttgaacatttaatccaataactgatttgtttgggtttaaacataccatcttactgtgggttttatatttatcccatctattctatgttcatttttttctttccttccttgccttttttttgggatgaaatgagtaaatcctattatttcatttcctctgtcattagcttgttagtgagactgtcttttactattcttgcagtggtgattctacttgaggttatagcatgcatctttgatttactgaagactaatatagagcaaaacttttaccacttcccagacaaggccagaactttggaaagcttttacactatttacccctcctgcctttttatgctattgtttccttgtcatttaatcctttttatgttttaacctgaatttttattgcctattcattttgttttatgtagtaaaaattcatttatatttgcccaaatgtttaccttttccagggattttctttattgccttatttttttagtttccatctgggattacactcctttgctcaaaaatctcctctttacctatcttttagtgtgagttgttggcaataaattctttcctttttttttttgaggggaagtctggaaatgtctttatcttaccctcacttttatttctttacttcattataacaaagaaaagtgtttattgcatgctgctaaatgaataaggtaaaaacacacacttacacaacattagtgtacaagtgtgcaaaaagatgatcagaaataaaaacactttaca

SEQ ID NO: 2483 - DNA, 1210 bp, Homo sapiens
aaagtctggaggttggcaccaggtgtctgggctctgataagccctctaggtgattgtgatgcaaaccaagggtgagaactgctgctccagtcttaatgtatcaccttgattttacagatgaggaatccaaggcccaggaatagctggctcagactctcaagattagtttgtgtgtagcaaaactaggtctcaaacttggaactctagactttagtccagttctgtttccaaagcactacattgtcattttttctcagtttttggttatggtttccttggtttgggttgggttttaaaggggtctagctaaagttttgggttcttttgcctttcattcattttagtgccagaacctactaagacctgttcaagccagccccaacctgccggtaccagtaccagtacttccaccagcactatctcaagcagcaacaatggcaaacgtgcatctgccagtggccagcagccagctgcatcccgttacctgcctcgtgaggtgcctccacgcttccgccagcaagaacagaagcagctattaaagagaggccagccattgcctacggggactctaaccagtgtgagcccaacccagggtgctgggcctgcaggggtaagcccacctcccctacctggagccggaacacagcatcatcccagtaagctccaaccaggtaaaaaccacataggatgagacattgttttgatctgaaaactttgctattttcaactttgctgctgagcaatagaaatagacatattttggtccatactcacaacatacacagagacagacaaattcatttcattttaagtgggttttaaaatttaattgtgttttccctctatttatttacattattggtcatgagtttgcagatggcatgagctacttcagctgagcttatttttcatcagaaactaaaggtctgtacattggtccatacgaacccatcaaggcagttactttagaacccagaagtgaaaacttttcagtaaaacccttttctctcaatttcctagtctgtcttatgagtgcacacaagcattttttgcagggaggtacagatccttccactaggcgtttctaactgtaacttagtcatacacattgagccaagcctatctgatacctcctcatcctaagccctgcttcttgttgcttccttgcctgtaactagttgttagctttcttttggctcctaagaaaaat

SEQ ID NO: 2484 - DNA, 1149 bp, Homo sapiens
agctgggaccacaggcatgcatgcgccaccccacccagctcatttcattttttatttttgtagagatagggtctcaccatgttgcccaggctgatctcgaactgctgggaatacaggcatgagccaggtgcccagcctttgttgttgttgttgttgctgctattttggcaacatcacggcagaacggtaaaggcagaaagcacagtgcccagcagctagcagtgtggcgtgccaagaaggctgttccaatgggggagaagccagcagacacagaggcatcatggcgagccccgactgagtgttcagtgaagagggaaaacagagacagtggggcatcccgagaagatcctctgcaggagtgcggtgtctacggatggaccaagaaaacctacgcaggatccacgtggaaacaaagctgcttagctctgcatatcagtgcttctcggcggagctgtggctgatgggctcctggtgcaggactggcccctgaacagcacaagtgtagtatgcctgggccccaggtcatcatgaaaaccagaagcagacactcaggaggctgaggcgggaggatcacctgagcccaggaggtcgaggctgcagtgagctgtgatcgtgccactgtgctccgggatgggcaacagaaagaccccatctcaaaaaagcagaagcacatttccgaagccccccaagcccacgggcgtgagtgcatgcatgcgtttgtgacagcctggtgctcggatgggcccagagcaggggttctcaaccttggcccattagaattacctgaaaatttttaagataattcacatccggccaggcatggtggctcatgcctgtaatcccagcactttgggagtccgaggcgggcggatcacctgaggtcaggagttcaagaccagcctgagcaacatggagaaaccctgtctctactaaaaatacaaaattagctgggcatggtagcacatgcctgtaatcccagctacttgggaagctgaggcaggagaatggcttgaacccagtaggcggaggttgcggtgagccaagatcgtcccgttgcactccagcctggggaacaagagtgaaactccattccaagaaaaaaaaaaaaaattcacatccaaaattttaaagataattcaaatccaaatc

SEQ ID NO: 2485 - DNA, 1835 bp, Homo sapiens
aatggaggaagcaggtagagtggtgctgggtgcataccaagcactccgtcagtgtttcctgttattcgatgattaggaggcagcttaaactagagggagttgagctgaatcaggatgtttgtcccaggtagctgggaatctgcctagcccagtgcccagtttatttaggtgctctctcagtgttccctgattgttttttcctttgtcatcttatctacaggatgtgactgggaagctctggtttcagtgtcatgtgtctattctttatttccaggcaaaggaaaccaacaataagaagaaagaatttgaggaaactgcggagaaagtgcgccgtgccatcgagcagctggctgccatggattgaggcctctggccggagctgcctggtcccagagtggctgcaccacttccagggtttattccctggtgccaccagccttcctgtgggccccttagcaatgtcttaggaaaggagatcaacattttcaaattagatgtttcaactgtgctcttgttttgtcttgaaagtggcaccagaggtgcttctgcctgtgcagcgggtgctgctggtaacagtggctgcttctctctctctctctcttttttgggggctcatttttgctgttttgattcccgggcttaccaggtgagaagtgagggaggaagaaggcagtgtcccttttgctagagctgacagctttgttcgcgtgggcagagccttccacagtgaatgtgtctggacctcatgttgttgaggctgtcacagtcctgagtgtggacttggcaggtgcctgttgaatctgagctgcaggttccttatctgtcacacctgtgcctcctcagaggacagtttttttgttgttgtgtttttttgtttttttttttttggtagatgcatgacttgtgtgtgatgagagaatggagacagagtccctggctcctctactgtttaacaacatggctttcttattttgtttgaattgttaattcacagaatagcacaaactacaattaaaactaagcacaaagccattctaagtcattggggaaacggggtgaacttcaggtggatgaggagacagaatagagtgataggaagcgtctggcagatactccttttgccactgctgtgtgattagacaggcccagtgagccgcggggcacatgctggccgctcctccctcagaaaaaggcagtggcctaaatcctttttaaatgacttggctcgatgctgtgggggactggctgggctgctgcaggccgtgtgtctgtcagcccaaccttcacatctgtcacgttctccacacgggggagagacgcagtccgcccaggtccccgctttctttggaggcagcagctcccgcagggctgaagtctggcgtaagatgatggatttgattcgccctcctccctgtcatagagctgcagggtggattgttacagcttcgctggaaacctctggaggtcatctcggctgttcctgagaaataaaaagcctgtcatttcaaacactgctgtggaccctactgggtttttaaaatattgtcagtttttcatcgtcgtccctagcctgccaacagccatctgcccagacagccgcagtgaggatgagcgtcctggcagagacgcagttgtctctgggcgcttgccagagccacgaaccccagacctgtttgtatcatccgggctccttccgggcagaaacaactgaaaatgcacttcagacccacttatttctgccacatctgagtcggcctgagatagacttttccctctaaactgggagaatatcacagtggtttttgttagcagaaaatgcactccagcctctgtac

SEQ ID NO: 2486 - DNA, 1198 bp, Homo sapiens
agggatcacctgacgttagaagttcaagaccagcctggacaacatggtgaagccccgtctctactaaaaatacaaaaattagctgggtgtggtggcacacacctgtaatcccagctactcgggaggctgaggcaggaggatcacttgaacctgggaggcggaggctgcagggagccaagatcatgccactgcactccagcctgggcgacagaatgagattgtctcaaaaaaaaaaaaagccctgtgtggttagttgactttctgtgtctgcatctcctcttctcagctacactgtcggctccttgagaggaggaggctgtgggtcactttgctgtgtcaccttggatcaactctggctttgtcttttgcacgtgttcattgctgagtagctatttgttaactgcatcttgacctgagtttgtcacccccctgctagttcacctgagacctgggtcaccaggacacgctgctgcatacccttgcctgagtcctcctcacctgcatcttccctccctgtagtgcaaacctgagtgactcctacttcaccaaccgccaggaccgctacgtgttcctgcaggactgtgcggagattgccgacttcttcacggagctggtggacgcggtgggggatgtgtccctgcagctgcagggggacgacacggtgcaggtggtggatgggatggtgcatccttacaaaggtaggggctgccgctgacacccttctatggctgtgggtggggtggagtgagggcccgggagagcacaactctaggtggttctgccacaggcataggggacttgggtggcaaggcttcattctgcttttgtccttgaagccagacagatgtgactcactgaccatcagtcatgctctgtgggtgagagagccagcccagaaaggtgggagcttgggcttgggactcctactccttgaggcggagtcactcaggtttgcactacagggagggaagacgcaggtgaggaggactcaggcaagggtatgcagcagcgtgtcctagtgacccaggtctcaggtgaactagcaggggggtgacaaactcaggtcaggacgcagttaacaaatagctactcagcaatgaacacgtgtgcctgggcgagtgacccagaagcctgccctgcatcacaggaagcaaccaggccagcagctgttcgcctagggcccatttccccaagccta

SEQ ID NO: 2487 - DNA, 1175 bp, Homo sapiens
cttttccatcccaagtgcctgcggagcgccgaggagaggagagagctgactggacgcttacgttattttcctccttcagaatccaagttcttgttgggctttaaagtagaaagtcagcattttccttgagctaaatacctaataaccaaaactgtgaggaaggttatcgggacagaggttccggataacctgtttcattttgggttttcttcctcttccccagactccagtcctcgttctagaggaaggagtaggacttccccgatccccgtagggcttcagctttttctgcctcaaaaccagccctaactggactactctggatgcattttgtggtgggccccctagaggggaagatgggcctttatctgctccgtggggtgcactggagtgaggggggtggccgggctgcctctcgcatctctgtcttcccctgcaggcgctgtgtgagctggccctgcccctcctcattacagtatgaagggagccgtgacacgcagcattttcctgccgttctctcagggactctcagggcagctcctgccactccgccagggccagcatgccagtccaggcagagcaggtggctggctgtctggccgtctcgccccgcccctccacaggaccctggaccagggcggtgcagggcgcagccctgaggaggcaggtggaggagctgcgggttttcacagggccgcgtcgccacggctcctctgatcctttagggttggcgagcatctctggaaatagcttttgcagaggagtggtgggaggaatagagggggacagtctgtcacctccctccccgccactttgtgtagatcctacctggagggaatggctttaggcacttttgtgccagagcttgtgagggtgacagaagagggtccaggctggaaacctgaactttctgggtgggagaaccaggtggtgcctgccgaggtctgggcgtgtttgggccggtgctggagcctgtccagctggcccgggccctggcctggttctcaagtgtttcctagacagagaggcacctgggtcagtattagtctatttatcagaggtgtaaataatctatgtatagtttttctccttttagattattttgtatttgtttaaaagaagttttgtcaaaatacaaaaatataaagaaatgactgaaagttgttgacagggtt

SEQ ID NO: 2488 - DNA, 1155 bp, Homo sapiens
ggaaagtaactgctctgtgaatgtagtagattaagttttaatgccatgggcagaaggaaagtatgtgtatcctaactgtgctctcaagcagagatgttaattccaactctatgctgtctagaaatataatatgagccatagatgcacttttatttcatactagttcctttgagatcaattaaaataatacatttcattaagttatatcaatgtgcaatcaatataaaatattattaaaaagtcattttcctttgtttttatagaaagtctggtgtgtgtgtgtgtgtgtgtgtgtatatatatatattatttatttatttatttatttatttatttatttatttatttgagatggagtcttgtactgtctcccaggctggagggcaatggcgggatctcggctcactgcaacctccacctcccgggtttacgccattctcctgcctcagcctcccgagtagctgggactacaggcacctgccaccacgcccagctaattttttgtatttttagtagtgacggggtttcaccatgttagccaggatggtctcggtctcctgacctcgtgatctgcccgccccggcctctcaaagtgctgggattacaggcatgagccactgtgcccggcctcggtgtatattttttacctacagcacatctcaaactgggtggtgacatttcaagtggttaatgtcacgtggggctcctggccgccatattgtacagtgcagctcaggctcacataggcacccactgaaggatagaaggaccctcaaaccacccctacccttgagagtgtgggtgccctttgctgtgccatggagggaacaagagccaacacttctgagcttctgctcagcaccaggcagggtttgaggcactttaattactctacatcatcttcacagcagccttatcaagtgggtgatggtgggaccacttcattgatgatgaaatgtgacccaagtgggttacataacttgtctgaagtgacctaatttgatatttggtagattggagctaggatttgaacctggtttgtttgattctaatgcttgttcttctcatttgcccacatggcttcccatagcatgcttgaagggtcattttagagggtgtctgtccaaatctcctgttggtataggtgggggagat

SEQ ID NO: 2489 - DNA, 1132 bp, Homo sapiens
cacctggccagcatcttggtttttaatcattgcctgggggagctcctgcacagcgttgctgcacacccattcgccccaaattgtctttttcttgtttgtggcggggcagttttgagacagtctcgctctgtcgcccaggctgagtgcagtggctcgatctcggctcactgcaacctctgcctcgcgggttcaagtgattcttgttcctcagcctcctgagtagctgggattacaggcagtgcaccaccatgcccagctaattttttgtatttttattagaagtggggtttcgctatattggtcaggctgatctcgaactcctcgaggtgatccccctgcctcagcctcccaaagtgctgggattacaggcgtgagccactgtgcccggcccccaaattgttaaagaccagacaagctgggcattttgtgtggttgtggatggaaagggcaaattgatctttactctcaaagtgaattttatttgtcttttccttgatttttcaaacaggatgtaggctatccggaattcctcaacatacgtccgtatatgtcccagaataatggtgatcctgtcatgtatggactctatgctgtcctggtgcactcgggctacagctgccatgccgggcactattactgctacgtgaaggtgagaggcttgtgtcagtgcagctgcctcctgggacaggtttcagcacccatgcacatccagatgcggcctctgtagagcacttactttgtgaaaagtgtgatgttttgtggttgtattcaagtcctcgttgttgcctctctgcgtggagtgaaaagatgccctttacagaagtgttgcaccagaatctagtgttctcagacttgcagggagacacggaagaggcagccgcttctggtgccatccttagaaccctggcaaaatcggccatggtgatgacactgcctgaatgtcctttagaagggacagttcctatctgttggggcactaggaaggaactgggacgcagagcacactttggggtcacattccgagttatgaaaatattacacgttttaatagaagttgttacctgttgattattaatagtgtttggaaatgtagcaactaacagattttttattccctttttaaaaagtgagg

SEQ ID NO: 2490 - DNA, 1194 bp, Homo sapiens
cattcctgtgctgtgttttttattacccttggtaggtattagacttgcacttttttaaaaaaaggtttctgcatcgtggaagcatttgacccagagtggaacgcgtggcctatgcaggtggattccttcaggtctttcctttggttctttgagcatctttgctttcattcgtctcccgtctttggttctccagttcaaattattgcaaagtaaaggatctttgagtaggttcggtctgaaaggtgtggcctttatatttgatccacacacgttggtcttttaaccgtgctgagcagaaaacaaaacaggttaagaagagccgggtggcagctgacagaggaagccgctcaaataccttcacaataaatagtggcaatatatatatagtttaagaaggctctccatttggcatcgtttaatttatatgttatgttctaagcacagctctcttctcctattttcatcctgcaagcaactcaaaatatttaaaataaagtttacattgtagttattttcaaatctttgcttgataagtattaagaaatattggacttgctgccgtaatttaaagctctgttgattttgtttccgtttggatttttgggggaggggagcactgtgtttatgctggaatatgaagtctgagaccttccggtgctgggaacacacaagagttgttgaaagttgacaagcagactgcgcatgtctctgatgctttgtatcattcttgagcaatcgctcggtccgtggacaataaacagtattatcaaagagaacgtgggctctctccgtgtggctgtatccgatgttcagaacggccacttcctagctcaagaatgggaatcagcctctgcaaggagcctctcctgtccggcgggagggggcgccctgtgtcctccagagaaacaaggccagtgagctctgagtcaaatatgggatgcagaccaggtgtggtggctcacgcctgtcatcccagcactttgggaggccaaggcgggtggattgtttgtgcccaggagttcgagactagcctggccaacttcgcaaaaccctgtctctgcaaaaaataggcgtggtggcatgtacctgtggtcccagctattcaaaaggctgagataggaggattacttgaacctcggaggcagaggttgcagtgagctataattgcaccactgcattccagcctgggcaaga

SEQ ID NO: 2491 - DNA, 1168 bp, Homo sapiens
cccaggagccttccagagtgaatgaggcagccacaaatccctcactttcagatgaagacactgaccccagagagtggcagtgccccggctcctaacgcagcccacttccctcccgccccttcttagaaaccaggagcacccacaccctggacctctccagggagctctcggaggcccttggccagatctttgacagccagcggggctgcgacctgtccatcagcgtgaatgtgcagggcgaggacgccctgggcttctgtggccacacggtcatcctgactgccaacctggaggcccaggccctgtggaaggagccgggcagcaatgtcaccatgagtgtggatgctgagtgtgtgcccatggtcagggaccttctcaggtgagccgtctcgtcctcaggctctggggccgccaggggctttgtcctcctcccctcttcaaaagcacagccccccacacacacacctgcacatactcatgcatgcacatgtacacacgcagtcacacatgcactcacgcagttgcacacacacgcatgctcactcccacactgtgtgcactcaggtggctgtgttggacagttgggcccagggctcccctgctgtcctgtggggccggcatctgctctccttctttctccccaggtacttctactcccgaaggattgacatcaccctgtcgtcagtcaagtgcttccacaagctggcctctgcctatggggccaggcagctgcagggctactgcgcaagcctctttgccatcctcctcccccaggacccctcgttccagatgcccctggacctgtatgcctatgcagtggccacaggggacgccctgctggagaagctctgcctacagttcctggcctggaacttcgaggccttgacgcaggccgaggcctggcccagtgtccccacagacctgctccaactgctgctgcccaggagcgacctggcggtgcccagcgagctggccctactgaaggccgtggacacctggagctggggggagcgtgcctcccatgaggaggtggagggcttggtggagaagatccgcttccccatgatgctccctgaggagctctttgagctgcagttcaacctgtccctgtactggagccacgaggccctgttccagaagaagactctgcaggccctggaattccaca

SEQ ID NO: 2492 - DNA, 1127 bp, Homo sapiens
caagacttctgtgaatgacttgaattttttattccctgcctagggtctgtgaacgaggcctgtctcttccctggggtttctttccatggcctttatttctcctcttccagtgggagttttgcaggctcttctctgtggaaacttcacgagcgttggctgggcctcggcttcgctggagtgtactccagggtgaaggcagagtgggatttgagacccaggttaggcacgacccaggctgagaagggacgtttccatcattcacagtgccctccccacagcactacctcaccccgacccccaccctcactcctaccccaccccgcgatcgtcaggggtgccacggtgggccggagggtgccggctctggctgtccctgtgccggtccctcacaaacctctccccctttgaaactcaagcacagctgcgaggagggcagcgaggagggacccctctctcatggttgtctctttcccccgctatgtcataggtagtggaggaagcgaaggaagtgaacgctgaatgtgacgcatttctgaagagctcagctgtcaccgggcatagcctggaagccccaagtctgttctgactttgcctggctgtctccttgacccgcctcctagatcattgtccttgatgtccaggctgggtcatttaaaatagagatgcaatcaggaaggttgggggacttgggactgtggctgaattgagaccttgctgatgtattcatgtcagcacctgagtcacagcccaggtgcccggaagcagcctcttcgcataggcagtgatttgcgattactttaaagctcaccttttttcttcccctctctgttcgctgctgtcagcataatgattgtgttccttccctatgggatccatctgttttgtaaacaataaagcgtctgagggagtgtagttttctgtctcccggtctgtgctgactgtttgcagaggcctggccacgagagcgcctgcgcaggatgctgggcatgcgcacgggagtcgcccgccagggcatcccatctggaaactgcgtcctccagtccgccttgtcccactatctcaaggcgctccaagagcacgagcgctgtggtcagaaaggtggggtctgaagccactgcaagcccgat

SEQ ID NO: 2493 - DNA, 1216 bp, Homo sapiens
ccgtagctgctacgaggtgagcctgcgtgggtgcctgctgctagacctcctcgtttgcttctcacggccgccgggtagtcgggaggaggagagcttcacctgtcggcttggagagatccaggtgatgcttcccagaggggctcgggctgggctggctgtttgtccagctggagtgggggtggaggccgccccaggccgcccccttcttgggttcagcggggaactggggtggaggagtcagggaggggaaatgtgtgcgtgggggcaccctctccccgcccccgggcgtccagccgtgctgagccttctctcctgccaggtggtggacgctgccagcctgctggcccctctgccccaggtgcaggccgtcaccatctctcacatccgctggcagccatccgcctctgagcgggaggggccccctgctctgctccagctcagctgcaccctgcactggtccttcctcctctcacaagtccgttgcttccgaatccactgctggggagggatgagtgatgactctccgggcagggagctgccgaggccagagatgcccatgttcctggggttggcttttgccacccagtaccggatagtggacctgctggtggaagccgccgggcccggccaggatcgtcgcatggaatttctggtggagcctgtccccaaggaagggttccgggtacctcaggccgagtggggcagggcagttctgctttattcagcccctgcatgagcggatgctaaggccgggtggtctcctggcctcgggctgaggcctcttcccggctgtctgcccctggcctgcgctggacctgctaagtgcccacagtggcagcgaggtcccggtcccggggctggggtgggagaccccgggctgagtgctgtggctttctggtggggggcgatggaaacaggaaaccaagcagtgggatcgcagcgttggtcactgcgaggcgagtggcgggctttctgtttctgccttgtccctccccacggtacctggttcccaggtgaaaatgaaaggaggggagaagttgagaacagaacattccataaaggatatttcctaataggctgcaagatgctgatgccgagaatgatgattttctttcctgcagatgaaactattagaaagggtcttagattgtggcaggtaggctttggagcaggcgccgagacatttctgagcatgaggacgagctacagcagctcc

SEQ ID NO: 2494 - DNA, 1112 bp, Homo sapiens
cccgctgccgaggaaaagccagttcaagaagccgggggaagggtggggccccgcgtgccccggagcagcgcccctcgaaggcgggggcaggaagcagccgccgcgccccgtcccgcttccctcccttcgggccagaacaatggctttttgcccggaaaacggagttgggagcaagggcgggcgcgccccgggaatcacgcgggactcggtgggcgccccaggcccgaagtccctaggcacctcctcccccagccaggggcccgcccgcgcccccacccccgcccccgcccccgcccggggccccgcgcgggaccccccgccggagcgcgaggcccagcccgccgcggacaatgcgcgccccgccccgccccgcacccgccccccctcgctgattggcccgcacgggatttgggcagcgcgcgggggcgggcggcgggccggggcgcgggcgcggagcggcggtgcgcgtgcgcggggcgggccggcgccgggcgggggcggtgctttgtgtgctgccggcggggcgcgcggcggtccgggcgggtgactggcggcgggcgccgcggtcgggctggctgccgggcagcatggaggagctgagcagcgtgggcgagcaggtcttcgccgccgagtgcatcctgagcaagcggctccgcaaggtgcgtgcggcccgccgggccccccgcccgccgcccgctgtccgtctggctcacggcccctcttctctccccgcagggcaagctggagtacctggtcaagtggcgcggctggtcctccaagtgagtcccccgcgacgccgcgcccccctcccgccccctcgcccgggggtggggacgtggagcccctcggccgcgccgtccggtggcctgggggcgcccgcgggcagagcgggaagttcgcggggtccccgcgggctcctccggctctgaggggggcgggggccgcccggcccgaggttgccctttgtttacacgcccgcgggtgcagagctgggcggccccccgcgccagaacctcctcggctgccgcgccgcgctccccccaacccccgtcccggccgggagggaggcgcgggatgcaagcccccctcctcttggccagattctccccgct

SEQ ID NO: 2495 - DNA, 1681 bp, Homo sapiens
tcttggagtccccagggaatgagcctcaggatccacttcgtcccttgtttctaagccaggctgcacggccgttcctgggtgtgaaagcattctgtcctgtctccagtcagagggaaccgcccccaaactagaaagctaatttcccccgaaggttcatgaagccagaggcatgcccttgggggttggtcgggagaagggtgagaggcagtgctgtggaaggggcctggcccctgctgcctgcgattctccccgggtatgtggccttctgcctccttcagcctcagtttcctcacctgtaacatgagaataatgatgcctgcctgcccaggccacctcctgggagtgcattggggactctaagtgtaaaactgtcatgaggatggtttatgaagtcccagggaccacacctgccactcagggaagagaccgctgacctcagccatcagccgtgtgcatcgtgaggggcagcgagctcaggacggagagctctcccttggttcggagtcagcacacctgcactcccacacgcccacccagctgtgtgtcctccgccgagggcgagcctctctgtgactcttctgtaaaatgcaccccattctgcccactcctgccacgagacccatcctctgcgatcccgccaggcatgtgtgtgtgaatgcatgtgcaaagctctccatcagaagggtggtgtgggccctgcaggtcctacccctcggccttgaagctccctcgggctgcggactctgcctcctgggtctgagcattagaaccaggagaggggtgtccctgggcagagccaggggtgcaaacagcctgcagccatctggccttttaagtatagtgtgtcgcatttccgggtaggaaggtagcatttcaagttcaaagagaggtcaagtcatgcaaccatctttcctccagcacttttggggtaaggaggacagtttttgttatggtttaggggaaattttcatgaaatttccaccattaccaatagattactgatgtccatggcaagtgatctgttcttggtattttgttttgttttgttttggtttttaaatgtaatcacccattggtcaggcccaggactggtcaccatgagctctgctagccacggccccaacgatgcttccggctctcatggattccacagcaaataaaactgtactgacaacagatgcacgctgtacagtgcctctggaaggtgcggtgggacttgctgggtcaaagcacggcaggctctgtgctgggcaaacagggccccgtggcagcccaagggcagcctgcagacgccagtgtgcccggcttctcccatgttctgagatgggggaggggaaggtgtaaaagagagctggatgggggctgtggggactgagggtcctgggaggctggccaggggctcagcaagcgcccactttgggaggccttgccctctgggctgtggttggacagcactaggcctgcaggctgggctgccaggaggaagagcagctccggacctcaggcccccccagcaggcggcgatggagggtgatgggagaattgacgagtgctcgcggggtctcactcgggaaagggccggttaactctgagcaactgggagcctcgctcccaccccagtgcctggaaacacaaacagtattttattgagccttggctgccggggctctggtttcaggaa

SEQ ID NO: 2496 - DNA, 1166 bp, Homo sapiens
ccccaagacctgacccggaccaatcagctgcatctctgcaccaagtgccacccccaccgtgcactgctcgcacctcacgctccccatgggctggcccggaccccagtgaggtctgcacctctcggaccagccaggacctcggaagccatgagctgggtgttcagggcttggcggaggagacgctgctccgcgggggatggagaagccccgcccctccacaactcccttaatctggatgcaattagaggaaaccagccaaaaaccccgcggcagctgttgccccgggattattcccagccagcgagaggcattagggcgataattcagtcattagacttctagccttcccaccgccagaacgtgcaaataggggataatcagccctgcacggccatcctcagcaatgctgcttatttaacccattttttaaaatgacacttaatgttattggctggcgtacgtgtgtgcgcatacttaaaagttgatgcgtggtgcagctctgctgctaatgtctgctgacagcgtcgcccgatgttgctcagggcctctgggaagaggggacacctttgatgtgggcgtgctggcacccaagaggcaacgtggtcaggctcgatgcttgccagccctggaaggtcccgccagggttggggggtcgggtgagcactcagagatctggggaggaagcgaggagcctggtgtcctcaccaggtgcagaggggaaatgcgtactgctccagaaggttctgactcaagtctcggccctgaggactcagaactcacaagtcatggatcaagtacagagggagggagggccccagcccacccctgcgggggaggaggagggtctgaaggtgggagggcagctccatgagcagccactgttcctgaccagccgaagtgccaggcagggggaggtttccatgtccaggagggagaggacctccaccctctgacctttcagttttccatagcagcccagtgtgaagctcggcgggggtgggcagggcatcaggacaagatgaagatgctggctctggaatgaggactccccttgggctaaggggtagtggctggcagaggttgcccagctcttttggaggccacagggaatagaggtggggtggtgcttccgttcctgtgaggcccgcccccctgagccccctcgt

SEQ ID NO: 2497 - DNA, 1099 bp, Homo sapiens
tcattcatctttatgaaaaggtgggtcaggtagagtagggctgccagaggttgcgaatgaaaacaggatgcccagtaaacccgaattgcagataccccaggcatgactttgtttttttgtgtaaggatgcaaaatttgggatgtatttatactagaaaagctgcttgttgtttatctgaaattcagagttatcaggtgttctgtattttacctccatcctgggggaggcgtcctcctcctggctctgcagatgagggagccgaggctcagagaggctgaatgtgctgcccatggtcccacatccatgtgtggctgcaccaggacctgacctgtccttggcgtgcgggttgttctctggagagtaaggtggctgtggggaacatcaataaacccccatctcttctagatcaaagatccagctaacaggcgctacgaggtgcccttggagaccccgcatgtccacagccgggcaccgtccccactctacagcgtggagttctccgaggagcccttcggggtgatcgtgcgccggcagctggacggccgcgtgctgtgagttctgggctctgtgccagcatgatggggagggcgacgcgcatttctcacacggcagggagggccacacgcgtttgtttctcacacgatgggcagggcgacacatgtttgtttctcacacggcggggagggcgacgggcatttctcacagggcgctccctgggtcttttactcacataggtctaaatcccatgtaaacacgtgttcaggactcaccaagcccctgcttgtcatttaactcaggaaaactctcaggaacgacagcacttggatttgccttaatcttaagagaagttgccttcggaaatgcgtttttctttttttgctcattcatttactcagtgtccacgcactgaccctccgtgccgggtggtttggatcctgctcccggggacagacacacagtgaggggaagccataagcaagtccatgcagacacagcgtcagggagtggtcatgcagagagcacgctagaagccagctgtgcagacacggggcagggaggtcccctctagaagccagctgtgcagacgcaggggacagg

SEQ ID NO: 2498 - DNA, 3097 bp, Homo sapiens
ctcccttttccccaggaatgaaccgaggccgtcgcccctgcacacgcacacgcacacagcctggttttgtcctcatgcacacgaagcagcccctgctcccatctgtccctgaggaagccccacttctctgtaggagcccggactctctcaggcatgccccattcacagctgaagtgggtgctgcaacgtcttgaacaaggcagaagttggtgagaggatctgtgtgtgcgtgtctacatgtgtgtgtctacgtgtgtgcgtgcgtggctgggggaggccttttctttgaggacgtacctcatttccttctttcttctggctttggaaaaatctcatgatgaaaattcatatttgccaactttgttagctgcgtgcgtgctttggggttggtgcaacctcagtacacgcatttgtctttgtttgcaaacctttctcagagcgacatatctttatattgatgtaataaatgtcttttagtggtttgtcaaaggccgggggcgggggctctctacagagaatttttattttgtaatagaagtgaactgtctctgaagggtgaaggcaggccgtcctgggatggtaccctgtgctctcccgtggaggagaggggatggctgaggacactggcccttaccccagggccagacagcatccatccctgctgtttgcatctgagagcagcatggggcctgggaggtcggcctgtgtgcccagctcagctagctctgccccaggacggccctgccctcgaccttcccacctcctcagatcctgcaaggctggggtctgcccctcccttctcacctctggagctgtgctgcactgcttcagcccagagggccctgagagaggagcgtgccacccacagcccgggaagccgggccccagcacccctctcctttggcctccggcagtgcagaccagaggggaccttttaaggaaagaagccgtgtttcgatgaagacctggccacatggggccactgggacttcaacccagcccatcggtgggaaggtcctttttgggggactttgacagccatatccctcccagcacaccaggcgccaggtgagctggttcagacccctccaggggtactccagagacctcacgtgtggagccaggcctggccagggcaggggcctgaaacccactcctccatctcatggggctcacggcctacagcagcccacaagctgccactggccggcgacactgacacctgagcagtgtccagaacctttttgcctttttttgttccccgtgaaaagcaacatggacatttccttctagtccttccaaggaggggagagaagtgtatgtgcatttgtgtgtgtgtgtgtgtgttgtgtgtgtgtgtgcgctaagtgagaaagagagcaggctcgggaggccctgcccagggtaggaggagcttcctgctttgcaccatctggtggtcgcacgccctgagggcaccccgactctgtctccaggagtctcatcagcaaaccgctgacaagtctttctagaaattctactgcactgcctggctcagctgcagctgcagacatttctgcaggaggagcaggtgtttctgtcttctgttccttctagggccacctgtccccttaaacacaggtccacgttgtgtcaagaacctagtgcatctgtgtgtgtctgtcagtgtctctgtgtcagtgttctcgtgggtgtctgcacggtacccggccgccgttctgcaatgcatcactcccgcagaggggggtgcagatcaggcgccgtgctgcgcgttgttgttcaacagtggctttttcttagataatcgtgcttcctcagcgcccgtcgggttgtggcatccttggatctgcagggatcttctccgtttgcatgttcctcggggtggcgtgttccttgctccctgggtccgacatgtgttcccgcacctgcatggactgccccggttctgtgttgtgtgccgagtgccgcccagtgttctgtgaccacccgtgtagctactgaaaatggctgggtaagcaagtcaagggtgttggaggaggtcaagagagagctcagtttccctctccccctccccaaacacaccaagaagcatttttaacgtgtaggttgagaacaagcctaaaggattcccacagctgggagccagcaagagagcttggagtcgcctctctagaccagatctagccccaccctcactccagccatctcggagcccttgtgtaggcaacgcccggtgcgggctgtgtggggtgctcccctgccagcacctccggccagccccgcccctgccgatctactggaccgcagaccaccttctgcccccgtgggccaggtgggagctgtccgttcaggaccatgagccatcctctgccctgactagcgaggggcagagcacaccccagtgcttacgcctccacccctgcagcctcctggcccgctcaccttcctcacccctcctctgacccacccatggtgccagggccgaagctgacctttagctccctcctgccccttgctagggtctgagccaagcccctcgactccctcactgtgttgacacttggcactttgctggccccgagaaaggtcgatgacacagccgcaaatctaatccacgtagttcccatttactccttaatctgattgatgttccctcttgcactgaataatacatgcctctctcaggtaagccattttataaaacaagaagataaaaagcactgttgaggcagtgtttgcttttgccgagctggtgtccgacagctccctgggtgtccggggtgggagagctgttgacagaagctctccgggccctcaggggcttagatcccacttgagtcgtaagccttcttgcttttgataacacagtattatttctcttactgtagaagaaaaagtttattaccaaacaagagtatttttatgaaagaaaaggacaaacctataaattaactcaacctatatctcccttgaaaatactttcaggctccaccaaaacgtagaactgaaagcatgtattttggaagaaagagatacattttgtatgctttcttttccttttgtagattcccagtttattttctaagactgcaaagat

SEQ ID NO: 2499 - DNA, 1205 bp, Homo sapiens
caaaatctggaagaaacaaggcggttgattcctttaatttcaggagcatgtaacttcatttataatgacaatgtttttgaaaaaataaattaaaccgacagtttcatttgtaggattgactttaataacacgcctctactgaacaaatggcgattaactggggaaaacggaattatggtaaccgaggtaacggggtcggggactctttctccttcgctgcatgctgggtggcggggagagaccgctctgaggaggtttggtctgtcggccacgccgtaggccgcggtgcattctgggtcctggcaatatggcgtcctccttgatgggctgatgagatgagtttcactgtagctccaaaccagagggcaaagctcccatgacccaataagcccacattgtccctttcctccgtggttccgtgtcgcccgtttctcaggactcgttctcaggcaggagagagcctcggggctgaaggccaggaccagccaggccgcgcggacctgaggttgaggaaccgggtgcaggcgagcacgatgggccggtcgtggctctggttgcagcagctcagacgagtgcgggacccgcagggctgagagtggctggaggagacccagggccctttgaacccgatcccttggccggagacctcagcccagtcggcccagtgggcgaaccggcaccaagagcggcctgcctgtcttcggaactgctgaggcggtggaggccgagagcagggtcatcgtgaggcctgaagtctcttacgcttttggcagctcccctcgcagcccctctggaaacgtacagcctcaggagcagccagtggcttgggacctggggtggtgtgtgtctgcggagcttcttgggctgccccatttcctagcggcccccacctccccacttcccgctcagagttagagataaggatctcagacttttgcctgagtaagggtctccgcactctttatccatttggttttcgatttcccgtttttgtttcttatttcaccaattctggtacacgctagtttttaaggctggaggttctcgagcgcttgctgccaaggactcccccaccccctcccccactgatggagtccgaaatgctgcaatcgcctcttctgggcctgggggaggaagatgaggctgatcttacagactggaacctacctttggcttttatgaaaaagaggcactgtgagaaaatt

SEQ ID NO: 2500 - DNA, 1195 bp, Homo sapiens
tgattaatgggtatacgtttgaccttttaattaaaacattaatttgtgaatgatcaacattccctaataagcttttcacaggttgttaagagaaacaaaagttctgtgactcttagtgactactgagattgctgcttagaaaggagctggggagaaagtttgctgtatctgtttttcggtggagaaaatcagcagctaacatcttcagttgagtgtgtgggagtttggaatcttgtcatctcttccctcttccaaaggtcaggtcctttggaatcttgtcatctcttccctcaaggaccgtatcacacatgctataggacagaagttgcaaactcaaatgatattgagtggggatggtagcataagagaatgaaacaggccacatttaagaagaataatggcataggttcaaagataaagacaaatggcagctgacatttggcacagtgtgtgtgacagtttctggagggtgggaacaggggctccctgatgccataactgaaggggcaactgggctatggccaggcctctctctttgtctttgagaagtcagcaaactttttttttcttttattgtaaatattcatactaattcagatttattaccaaacacactgtagtccaacactgcaggctgaacaaccccatttgtggagtgtttttctgtttctttttttttttttttttttttgagacagggtcttgctctgtcatccaggctggagtacagtggtgagatcacacggctcactgcagcctcgacctcctgggcctgagtgatcctctcacctcagcctccccagtagctgagactataagtgtgcgccagtgtgtctggggttggggagtctcactgtgttgcccaggctggtcttgaactcctgggatcaagcaatcctcctgccttgtcctccaaaaatgctaggattacaggcatcagccaacacgctcagcctggggtggtttttttttttttttttttttttttttgagatggagtttcattcttgttgcccaggctggagtgcagtggtgtggtcttgactcactgcaacctccgcctcccaggatcaagctattctcctgcctcagcctcccaagtagctgggattacaggcgcctggctagttttttttgtatttttagtggagatggggtttcaccatgttggccaggctggtcctgaactcctgac

SEQ ID NO: 2501 - DNA, 1204 bp, Homo sapiens
agacagagggaagtgccccttcccatcactaggaggcttctggttaggaaaggaaagcatacacaaatcctggaattggatgcaggaagcaggagccacccaaactctgagtgagccagagctgggaggtggctggacactgtgccaggggtgccaggccgtcctctagaactgcggcccagtctgttgaaaagtcaatggaatttagtctaatgttaacaagcttggtgtccttgatgcggtctcgtgcttaaggcagacaaggtcaggcgactaagaaacccacatggtctggtcttcgctcttgctgggatggcagtggctgtacatgttggtaatttcttggtgtgataacgagaggcttttcttgaagtccttgaaaaatgcctattctcagtcatctatcctatgatgaaagaggaatggcatagataatccaaaactcattgctcttaaacttaaaaatgaatttgacttttccccaaaggatttgctttcctttcctaagcatttttaagtacacagcagctgattgcaggaggaagttccccagaggcatgtggaaggccgtgtgtgtgtctgtctgtctgtctgtctgtctgtctctatgtgtgtgtgtgtatccctgtgtctgtctgtgtgatgtgtgtgtgtatctctgtatgtgtgtatgtgtatctcgtgtgtgtgtctgtgtgtttctgtgtgtctgtgtgtgtgtgtctatttgttccggtgtgtgcaagccccaagccagcgtctcctctccctttcttcagattagcagcccctcctccgcctgccctcatctcctccatttgcacatctgagaattcccgcccgcacggaggagctggagggtgtcagccttgtggtctggccctgccagcaggtcctgctgtgtggacactgcagaggagattagtccaaggggatccatgtaggagctgccatcacacaggaggttgatcaggaaacggttgctgaatgagtaaatgattgtcttcctctgcccctgccaagtatttgaaaacaaatgctcacttggttgtcgttgaaacaacaggctctgggtgtcatgatggaaaagagcgccgtgttgtggtcggcgtcgtctgtaactcctgatagcaactgcagtcttaggagtgtctttaacattagagaccttttccaaacttcagaagaggaagcaggacgtgtt

SEQ ID NO: 2502 - DNA, 1183 bp, Homo sapiens
gtgagaggatctcttgagcccaggagctcgagaccagcctgggcaacatagccgaaaccctatctctactaacataaaaaaaaaaaaaagaaaagaaaaaacaaataaggcccttgtccccagaaactgtgatcggtgtgactgatgaagcttctgatggaagctcaccctgaacgcccagctccactgaggaaccctggccaggcacagtggtcagatgggggctttgggcctagaaacagagttgctgctagtgcctcagcccctctgtcctcgcgggacctgcctggtctgtgtgcctagcgtcggcttcccggctggtgactctttccttgtgtgccgccctctctcggatgcaggccaacggagcccacagacttcctgatgctcttcgagggcagccccagtgggaaaaagaggcctgccagcctgagcacagcccccagcgagaagggagccacctggaacgtcctggtaaggtggtgcatgcggccccacgtcctggtctctgtgatgggattgtggcctggttcctaatttgttctcactgcctttgcaaaagggcactgcagggagggtgtcaagcttagatctgacatggcagaccccaggacatccacctgtctgtatgggaagttggtggctcctcccgtttgtgggagaggcagggaagggatggggtgtctgggtgtgtgcgggcggtgtcatgggctgagctgtctgacaggatgaccagccccggggcttcaccttgccatccaatgcccggagttccagtgcccttgactcaccagcgggcccgcggaggaaagaatgcaccgtggccctggcccccaacttcactgctaacaacaggtacgacctgtgcaggtgcccacgacgggcaccagtgggaagctcctggagtggagactgtgtgtgtctttgtcttgtttatggctcgttcagggtgctttggaatgaatgaatgagtgagtgagtgaaagaatggctttcattcccaagggcataggcaggaggctgccaggtggcgtcttgcacataaggggctctcggcccaggctttgctcttaaagagtttcaggccttggggaggctcacatggggctgagagggtggggcctggggaggggccttggctgaggaggcttgtagggggtcctggggaagctccaaaagaaat

SEQ ID NO: 2503 - DNA, 1199 bp, Homo sapiens
cgggttacggctggcacacacttggtgcaggagcacccggtctgactcgcttcaacactggccagttatttgccgcaagcggctgtgacttatgtcatttttacaagatgttttcaaattattataggaagctttgaaaaatgatgggttagggctgtgaggcataaaagttcaatccaggagcgagaaggatgttttgtgagtggtgagagcaaatatctcagggacggccctgcatgccaggcatagactgacgtgccggcccagcctccccagtggtgacaccatgaccagccagagaagtgcagggtcagcattctcccaggaacgcagccctgggcctcgcccagacccctggatgtgggggacagggctggctccaaggagatcagggccatggggccggccctcaagcagcagcccctgctccctgctagcaccccgggccagacgcctgcctgcagggaaaggccatgacgggcagagcaggtctcccgcacacctcctttcacaggaggaagtgcaggtggcagaccagccacctcggccgtgggccacgtgctcgccctgggtgctgcggggctcaaccacggaatgtcaatggtacaaggacgagatcccatgtgctggtgacacctccccatactccagggcagggttccgaaagagcaggcaccatggcctcacttgctcctcaaaggactagccctgggcctggtgctgggaagaggaggaaagaggagacagaagggaggagggggagggggaggagggagggagaaagaggaggagggagaaggaaggtgggggaagaggaggagggaggaggaggaaggagggaagaggaggaaggagggaagaggaggaaggagggaagaggaggaaggagggaagaggaggaaggagggaagaggaggaggagggagggaagaggagcaggagggagggaagaggaggatgaaggagggagggaagaggagggagaaggagggagggagaaggagggagggaagaggagggaggagggaagaggagggaggagagaagaggagggagaaggagggaggagggaagaggagggaggaaggaagaggaagaggaggaaaaaagagggggaggggggaaggagccatgccacgtccagccagaagccacgtgggacacatgtgaagcaccgtggaggagacaggctgttccta

SEQ ID NO: 2504 - DNA, 1205 bp, Homo sapiens
aagccggctccagggcctgggctgccgcccgagcctcgcgagcagagggacgtggagcgagcgggtggaaaccaggcggccagccagctggagggtaaggcctccgccctacagccgcctgcctcaggcccagggagcggcagccccctcccccagccctggggtgatgcccaggtcatcctcgggagccctgccaggccccccttctctttccagccgcctgctgagcagacccctcggagagctttctgctcccttcccatcagcagcttgctttctgggaaccttttatctgccttactcccctttaaacacctgcggcatcgtcacatggcttgtgattaccgttttatctcccttgctcccctttaaaacacctgcggcattgtcacttggcttgtgattaccatttcgtctttaaagcaggtttgttaacagttttaacactcggagtatttaaagccagccaggtgtgggcgtgcctgcacccagatgtggaggtttattttaaggctgtgccccaaggggacccagtttgggggtggctgtgcccgccctggtcctagcatagccctggcccagagcactgctcccacaccctcgggcctcggagctcggctgtgttcatctacagggatctgtcacctgtccctccaggaaagctccttacgcctttgctctcctgagaataaaacttgctctgaatcctcctccaaacttctcgccccttgggtctcagctgttggctttttgcgacccctccttgtggcctcatgcagttgggtagcagcagccccgtctgtgagcctgctggggacaggcttctgtgccatgtcctctcccaggctaggggtccacccgccctctgagggtgtgtggctgggcccccgctcaccaaaagtcacgtgcatttggtggcagtgtccaagccttctctcaagatggtcaaccctgccccatgcggggtccacgtgtgcctcagcattgagagggtctgttccagggatctgtgtgggggtcgcagggcacagccgctccagcctcctgtgccaagcccctgggagcaggtgtgggagctccgggccagccctggcacgggcacctcccaggatgttcgtaagacacacgcttcctgcccgcgcatcttgccctgtggcctcaggacagccggtccgagggagggcaggtgcagcagccacgtccca

SEQ ID NO: 2505 - DNA, 1156 bp, Homo sapiens
tggaggtgctggccagtgacttccgcctccaggaggggcctccacttctgtaacagacaggaggagaggtccgttgaagggagcccctggcgtcggctgagtgcgtggggacgccatctcagccgtgaccctggggcttgttgtcatctctgttctgagctccgcactcctgtgcctggaaagctccttcccagcgttgtcacctcatacaaactgccccgagggacactctccgagggtcttcctggatccgctgtgctcatatttgccaaggatgactgttcccggatggcgaaggtgggcaggggagccctgccttctgggttccgtgcagctggcggggctgtgcttggggacagtaggggtcaccagagaaggaaactgggagtgttccgaagcagccggtggagctgccttgcgttggatttggtaattcggactggaaaaacgtccacctggagagggaggtgggtgttttgctcccacctcagctggtgccccaggctcggtcctgcctgagcagggccacttactgctgtccaggcctctgggctagactgggcgctgacatgggagctgtcggtgggattgtggtagcctgggagctagagtccagtgtgctgagaccctagccctgggcagtgaggggtgtcgccctcgtccagcaggctgccggggagtggacttctcggtgccagccagcaggaggctccccgtccccttagcactgcgccgcctctgcctgcggccggtgcaagcagctgtatcccgtcatgaggcttgtgcgggccgtgggcctccggctcacctggtgccctccgaggccacatctggtttctgtttcttccacgaggctgtaacaaaacacatggcccctctcagaaccacatgctgcttgtttttagcgtgtctctgattttccagcccccggctcccccgtgatagatgggctgccgggctgaggctgagctggggtcgagggtcctgcaccgatgtgcgctccctgtcagactgctgagcggagttttattggtctctttgatgctgcagaggccaaagatggtacctgctgactgggtgagagtcctgcgtggccctgggctgtggccgtgaatcccatcctcatgcagatgtcatgtgtcgtggttagacgcgc

SEQ ID NO: 2506 - DNA, 1214 bp, Homo sapiens
gtaatcccagcactttgggagaccgaggtgggcagatcatgaggtcaggagttcaagaccagcctggccaacatggtgaaaccctgtctctactaaaaatacaaaaattagctgggcatggtggcacgtgcatgtaaacccggctactcgggaggctgaggcaggagaattgcttgaaccaggaccggggaggcagaggtacgccgaggccaagatcgcaccactgcactccagcctggtctacagagggagaccccgtctcaaaaaaaaaaaaaaagaaagaaaaagaaagaaatgggcatgttcttacagaaactagagatttttagaaggaggaggcgaaatggtgccttgcccctggaaggccatctcttgcagaagcttcattatgaagtggattgaaggccattctggggggcagggcacaggtcccccccatgccctgcccactgtgacaggtgccactcggctaggatgtctgtctgccacgttgccatttcttattctccaacaggtggggtttttcggctacgtcagcttcaccgaggccacggccggcaacgtgctcatgcactttccctccaacctggtgacggagatgctccgtgtgggcttcatgatgtcagtggctgtgggcttccccatgatgatcctgccatgcaggcaggccctgagcacgctgctgtgtgagcagcaggtaagaccctcggggcactctccggatcgtaatagcacaggtcaggctcgcttcccataagcccccagctgtcccgaaccagagatatagcaggaaagtggggatttgcgtcagaggagtcccgggagggcggaagttgggggagcctagaggaaccagattgatgggcaggagctgataatggccagagtctggagatgggcacatggcgttcactgcacagttctctttttttttgagacggagtttcgctctgtcgcccaggctggagtgcagtggcgcgatctcgactcactgcaagctccgcctcccgggttcacgccattctcctgcctcagcctcccgtgtagctgggactacaggcgcgcgccaccatgcccggctaatttttgtatttttagtagagatggggtttcaccgtgttagccaggatggtctcgatctcctgacctcgtgatccgcccgtctcggcctcccaaagtgctgggattacaggcgtgagccaccgcgcccggcc

SEQ ID NO: 2507 - DNA, 1179 bp, Homo sapiens
gtaagtgttttaaagaaactagagcagcagagaagagagactcagaagcccgtggcacggctttctcggcgtcccctccagcgagggggtctccattgctgcagttgccggttttgtccaaccaggtcaggaggctgcccggccccctccccactctcaaagttgcttgttaaacacagagtcgtaatttgtggctaaatataactagtgtgttctcacggaaagtataattcagggtgctcattgtatgaggttatcaacaagacccatctgggttaaattaaagtgattttcataaagggcagaagcgcccctttgcctggtttcccctgcctttttattagtgacagtgttattgttgcaattattagaggggatcaaggaaggtgggagttgccagggacccccaggctgaggagggagcctcccagcccccctccactcaccattgtcctgctgcccctccagccccctggtcactgtcacctctgcggctggagggctggagaaaggcccaggagcccagggaacctccaccatgccaggctgccttccctaaaggccggctccttccccccaggcagccagtctgggggtggacctggaggggcagggttctctgggaatctctgggccaagggatgcgctttggggatctgctggaataaagagtaatcggttttccttacaggaggttgacccgaaacagccctccgtcttcctgcccatgaggatgaggacaggaagccagacccgggagagaaagcccagatcagacagatgggggttgggagggcctagtggctgaaactgccctgcttggggacaatgctcaggcaggaccaatccaaacgagggcactgcttatgtggtccttccggagcatcctccaaggcagagcctggcttcgggccctccctgcaaggacacctgcctccactccctgccagaccaggcctggctgcagaggcggaggggcggcagggctgcctgtctccactgtttggcggtgtttacacgtgtcgctgtcagggtgtctggacagtgggggtcgggggcctcccgggcccagacttccccaggcctattctcacactggtgagagggccctaggggaagggtgtgggctgggtggcggggccaggccagctgagacctacaggaccgtggagcatttag

SEQ ID NO: 2508 - DNA, 1124 bp, Homo sapiens
tgagcatctcacctgtgttcaaaacaagacaaagacgaacaaatattttaaagtattgataagaaaaagcaatgtttggattgtatctgctgaatcatattccaacctatatctgatttctgtttccggggccagttggtctgaggccaaggagtctggcctccacccagagcagggaggggctggcccctcgcccccctcaccctcgccgccctggcacactcgggaagcagggcccagctctgagcccctcctcacccctggggtcctaactttcctgaaagtagtaggtgccgtgagaaggggcagtttggccaggttcctgaactgggcagggctcggggcctatgagggcaggttcacagtcccaccagattctctcctcacccccaagcagaatgcatgcaaaagacaccccttttcccacccaccttattggtgcccccaaacccctggcctgctgcgtagatggtggtgaggccaggccagcagtgctgtggccaggggagaagaaaataaaacgcaggccctgcccttggggaaggcccctttctgggcccccttttccaccagccaaatctgcctggccctcggacccctctgcctgccccaacccctttggaggtttctcggccttttctgtgccacttggtggggcagatggcctgatgggctagtgcttggggcatagaatgagggtccccctgaccacctgagcccaaatcctggccccaggtgcaagcagcacccctcgagggctctgccccagtatccccagggaattcacacccctccccttctcccacagccaaggacagacaggctgcctggacctgagcccaacagccttcagcctcagaaacgcatggggggccacacactccttatatcctcccacactaaggttcccctggccccacgggagcttcaggaaagccccccaagttagccactgctctaggacgagctctgtgtcccccacaccacaggcctcgaagcagggtgctggtgggtgccctgtaccccaatcccaggtccccttggccccctatttttctcgggcccattggggcctgtttctcacctgctggctggaccccctgaagggccgttcccagaggctc

SEQ ID NO: 2509 - DNA, 1512 bp, Homo sapiens
cacgagaccaccttcaactccatcatgaagtgtgacgtggacatccgcaaagacctgtacgccaacacggtgctgtcgggcggcaccaccatgtacccgggcattgccgacaggatgcagaaggagatcaccgccctggcgcccagcaccatgaagatcaaggtgagtcgaggggttggtggccctctgcctggctcgggagagctgactggggggcgctctgtgagctgaagccgtgcctggctgtctttgcagatcatcgcacccccagagcgcaagtactcggtgtggatcggtggctccatcctggcctcactgtccaccttccagcagatgtggattagcaagcaggagtacgacgagtcgggcccctccatcgtccaccgcaaatgcttctaaacggactcagcagatgcgtagcatttgctgcatgggttaattgagaatagaaatttgcccctggcaaatgcacacacctcatgctagcctcacgaaactggaataagccttcgaaaagaaattgtccttgaagcttgtatctgatatcagcactggattgtagaacttgttgctgattttgaccttgtattgaagttaactgttccccttggtatttgtttaataccctgtacatatctttgagttcaacctttagtacgtgtggcttggtcacttcgtggctaaggtaagaacgtgcttgtggaagacaagtctgtggcttggtgagtctgtgtggccagcagcctctgatctgtgcagggtattaacgtgtcagggctgagtgttctgggatttctctagaggctggcaagaaccagttgttttgtcttgcgggtctgtcagggttggaaagtccaagccgtaggacccagtttcctttcttagctgatgtctttggccagaacaccgtgggctgttacttgctttgagttggaagcggtttgcatttacgcctgtaaatgtattcattcttaatttatgtaaggttttttttgtacgcaattctcgattctttgaagagatgacaacaaattttggttttctactgttatgtgagaacattaggccccagcaacacgtcattgtgtaaggaaaaataaaagtgctgccgtaaccaatgaatggctcctgtttggggaagtagcaagtgggctgggaaagacagaccaacctggaagtattgggtagtcttgggggtgggggcggtgggtgctgctcagcttggcttcgtgggctggtgagaaaacggcttaacaataaactgagcagttcgatttcttccaaatcgaaagtgcaagaacaaggcagcctagtgggtttgggtgttggagataactgaagcaacatcataagcaggctgggagggaagtcctgagacggctttttccattatttaggaaaaactagatgacttgacatcttgggtaaatatttggcataaaataaccacctgaatcagcaggggcctgccttagtttccccccagccctcaggtggacgtgtgatatgaga

SEQ ID NO: 2510 - DNA, 1216 bp, Homo sapiens
ccagcctcgcccccgcccccacgaccctggcggcctcgggtccgcaacgtggggaagaaaggtgggggacggggacgcgcgcccggggccggcacctccccgcacttcctagacaaagaagcttcggaggagaccagagacccggaggggcagggtccccggccggcccggagcagaacgtagtgtggggtgaacgcaggatggaggggcttgtggctattccccacccgcctcgtgtccctcggtgtgtgacgtcgcatcttgggaccccccaagtggaagtcctcacccgggggtcgagcaggctgtgtggttctgcccagggacgcgagtccgggtgggtctgttggaggcccagccccggcttcgccacgggagggaacatacctgacagccttgcccgggcccccggagattctgggcctgggggcgctcagcacccctgggaggcctggggcacgggggccttaggcacgggtctcggcgtccgggctgactgcagcccgcaggtgagctgggccggccgccttgccctgactcgctgttgtcactcccaaacacggggtcgcgagctaacgttgcagggccccggactccgcgtggggaccccggccccgccccccagcctgtcgagtcaatctgaacgctctgcgacctcgggcgagtccgtcccctcactgcgcggcctcactgccacccctacgcggccggcgctccaaccctgaaaattccagcagcgcacaaggaaaccgtagtgccgggcgcctctcggggtgtaaccaaagcaccggcgccgctcctggcgaggagtgagcgccctggacaagcctgtggctaaacccacgccagccctgatcgctgctcttaactagcatcgtaaacagaagagggtatccccccgaccgcccgaagctggggagccgaccttcaaaaaagtcagggctcccattgtctacctcagtttccctataatgtctacaggtgaccagaatgaaacaaaggcctcactccacaccaccttctcagcacataagggggcggggtagccccaacccggagcgcgcgcctggggacaatcaggcctgtgatttgaggggcagggatgtgtcgggtcgggtagaaaggggcctcggtcttcaaacgaacggagatccggggcagggcgccccgtggagggacctgcatggtggtggctgcgcttggggacgggcgggct

SEQ ID NO: 2511 - DNA, 1167 bp, Homo sapiens
tctctggtttggggagaattgtgggcctcctccacctccagctgcaggacccccaagcggcgccccggggcccacccacagctgcgggagagacacggttttaatgcgcgacaggctggtctgggcgcggcctcagtactcccaaagcgcggtcccggccggggcgtcggcatcggcccgcagcaggcccgaggcgccgccgcgcaggtacttgccgctccgggcgcggatggccaggcggccgcgctcacggaactcgaagacgaagtcctcggcgcgttcgccgtcgctgcacacgctgccgtggctgcccgtgtaccagaaccctccgtcgcggcctgggggacgggacggcgtcggcgggggtgcccacctgcccgctgccacccccgctcccgcgtgcccacccgccccgccacgcacctcggatccggtaggcgccgtcgctgaagctcaggtggaagacgtcgtagacggagcggttggtgtccagctggttggagccgcggtggtggcagacgaagccgtccaggccgcgcagcaccaggatgggccggttgatgagcttgagggtgaactcttcgtccttgcctggcggggagagcgtctgctgcgctgcccctcccgccaccttccctgtccaggccgggcggggtgggggccctgggaaacgccacacctggacttagggacccaggcctgccattgcctcatgtgcggccttggcaaggcgcctagggggttcccagcagcggagataaggacattcagacctgtttcccttgccaagacgagttatcttgactagcaagtatgactccatgacagcacccgttccgtgggctggggagggtccagctcttggtggagatggggtgtctgggcaggtcctttccctgggtggagacagcccctgccccagtacctggcaggcagagtgctcaccgacaaaatcgctgatagccgccagctgcccattcttcttcatgcacacgtagcgcccgttgctggctttgagtgctacccgccggccacgccactccatctcaaacatggtgttggcagaactggagggagcagcaaaaggtctcctcaggacagcaggagatgggggtgcagggtctcacttccccatcctcctcaggttccaaggagtgggacagaagc

SEQ ID NO: 2512 - DNA, 1176 bp, Homo sapiens
tccctgtggaccccgatgcctgcatccttcccgatgctgcgctgtgcgcgttcaccttgctggacagtgtgctggtcaccctggtgcagggccctgcccgatggaagatgcagctgtttgagcagccctgtcctggggaggacccccggccaggaggccagatcggtgaggtggagctgtcctcctacacgcccccagccggggtcccaggaaagcctgcagccccccacttccttccagtgctgtgctctgtgtcaccatcaggctccagggtcccgcacgacctcctcgggggctccgggggcttcacgctggaggacgccctcttcgggctcctctttggagctgatgccaccctcctgcagtcacctgtggtcctctgtggtctccctgatggccagctctgctgtgtgatcctgaaggccctggtcacctccaggtcagcccctggtgacccaaatgcccttgtcaagatcctccatcacctggaggagcccgtcatcttcataggggccttgaagacagagccacaggctgcagaagctgcagagaattttctgcctgacgaggatgtgcactgtgactgcctggtggcctttggtcaccacggccggatgctggccatcaaggccagctgggatgagtccgggaagctggtgcccgagctgcgggagtactgcctcccaggccctgtgctctgcgctgcctgtggcgggggtggccgcgtgtaccacagcaccccttctgacctctgtgtggtggatctgtctcggggaagcaccccgctgggccctgagcagcccgaagaaggcccgggaggcctgccccccatgctgtgcccagccagcctgaacatctgcagtgtcgtctcgctgtccgcgtctcccaggacgcatgaaggtatgagctgctgtctaaaatgaaagatgggagcccagggtggagcaccctttttggctgtctgctactatcaggccgccttcctttcctgggcttgttcttttgcaaggctgacgggtgctgatacagcctagtggttaactctcttgtctcaaggtcaagccaggggctggtggtgggcctacctgttgctctgcctctggggtctagggtgtggccctgggcctggtaggatctgagtttgctgcttgctggctgtggacttggaggaaactg

SEQ ID NO: 2513 - DNA, 1861 bp, Homo sapiens
ttattttcagtgctttttgtttggcctccctgcccccatgtttttctggctgggagctcttggttacccccttgtctgactgcttggtggcaggcaccctgcctgtgagggccactttcctcttctagtagctgttgtctggtggggacgcagtggccctggacacggctcccctctgcaggtctgcaggtcggtttgctgcctgccctcctcctctcacccgatgtccaggtgggattttaaagtctgcattggttataataacagttatcagtaattcctgcccagaagacttttatttatttttttttaagataaaaactgcacaaaaggggagtgagagagactagtttccacatccttccctcctttagtgaagcccccgaggttgtgtccagggtgatgagtgtggacgggggcaccagtcagttctcccttgaagtaaacctcagtgcctgagacttttctaccaagccacacagctgcagcaactgcagatactgcgggctgagcaggagcagtggtggcgcctgccctgaggctgccctgcgatggcctgggtgggagagctgggtcaccggtgccgatgctctggccctccccaatacgctgcttcgtcccactgcaccgcctggctgagggcgttaggggctgtgcctcttgtgagggccatttgggacctccctggggcactgcacaattgatagtgtaccaatagagggagactgggcgatctggaacagcacgtggtggggtcctgcttgtgtgctctgcgttcctctgtggcgtggccaggccggggcatggctcttacccggggagtggtgggcatctcgatgcttctttgccttaatgatggccacatctgggctgctctgcacccacgggagaggctggcccagctgcagactgcttagggacttctgtgtccatcctggggggtaagcccacgtgacccacattcttggcactatgaacagagaacatttgcctgttggcttctgaagtggtcagggccatggctgacacctccaggtccgcctggcatgggacaccaagtggaaggcccaagcagctcatctgctcttgggaccaggggccagttgggttgggtctggtcacggcagagctattgtggagggtcaggaagggtggagaggagctgggttgaagcggactgctgcggatgcaactcccagcttgcccaccgcgggctgtctgctctccctcctagcagctgtcacactgaagttttgtcctctgctgtctcctctggtcctgagatgagctgtgagcctaggtggccaaggcttcctgcattgcttccctgtgagtccaaggccttcccccaccactgggcagaggctggacagcacggacttctagagagagccgcgttgccagttcctctcccactcgctcgtccttatccaccacgctattatagtttccgttgtcctccaccagcatttcccttactctgaagttccggcattcacatcattcatgttttcttttgtcttttagctaaaggaaaagcattggcgatttgtctgattctggttttgagttactctttgttcagtaatgcactttattttattgtccaaagagagtcagagctaagcatacaggcttgggggtgagccctgctgtgagagttcaggccctgggaggctcagccacctcctcttgtgggaaggaggtctcagccccacctcgcatcttcacctgcccttggtgtggacacaccctctcatgctaccagcaccataatccagtgggggtgactgggtgcacacctgcccaggtgaacacagcggctgccagtctcctggtcccgagaggaggtggggcctgg

SEQ ID NO: 2514 - DNA, 1146 bp, Homo sapiens
gagcacgactgctttttcaggctgtggttataatgagctccaagaaatggtggaaggtggttttactgcaaaaatatgcacgttttcctttctgctatccatacacttcaataagatttgaagtaatttaaaaagtgaaggccggacgcggtggctcacgcctgtaatcccagcactttggggggctgaggcgggtggatcacgaggtcaggagatcgagaccatcctggcaaacacagtgaaaccctgtctctactaaaaaatacaaaaaaaattagccgggcgtggtggcgggcgcctgtagtcccagctacttgggaggctgaggcaggagaatggtgtgaacctgggaggcggagcttgcagtgagtggagatcacgccactgcattccagcctgggcgacagcacaagactctgtctcaaaaaataaataaataaataaattaattaattaaataaaaggtgagacaagcatgtgaaaggaaaatcattactactgatcgtctttgctcaccgctgttcccctctgactattgcaggacgtagacaagtttggcaacgagatcacccagctggcccggcccctgcctgtggagtatctcatcatagacgtaagtgccccccatgcacagcttgggcaggtggacccattgggcgccttgtaggtgggactgctgggtggtggctgctcaagggaggaggctgcaatttaaggcaccctctgccttgagcagtgcccaccccagaacaggcacccaggaggtggttgtagaatcactgagcatgcggtgttgctgaaatgctcacagttttaagggctttttgttttagtctcaggtttttatttccttgacgtcaacctaggggttaactgtccccatactaaagtacaaaggaccactgaccccaggctaggcagcctctggaaggcagcgaacccccattgcttgggtctccagtcaccggagcatcaagcagtcttgtccagatgtgctgtgcttggtgtgtggctgtcagctgtcctgcacgtgcaggtgcttgccctagccccagcacagctgccacagcccacagtgtgtctgggtcactccgtccagggtggtccccaggggacacacctgtaactcagtgttcttgagtgagg

SEQ ID NO: 2515 - DNA, 1167 bp, Homo sapiens
gggttcacgccattctcctgcctcagcctcccgagtaactgagactacaggcgcccgccaccacgcctggctctggctaattttttgtatttttataaaatacaaaaaaaatagagacgggatttcatcatgttggtcaggatggtcttgatctcctgacctcatgatccgcccgccttggcctcccaaagtgctgggattacaggcgtgagccactgcgcccagcccagatgtttattttttaagatacaaggggtctcactctgtcacccaggctggacttgaactcctgggcttaagcgatcctctagcctcggcctcctgagtatctgggaccacaggcatgcaccatcacaccctattggtttgttttttaaagaactaggtaaaagatatttatgaatggtttgtgttagaaaaacaagtgatttctttttgatggcatgttttcatcagcccactcttgttaactctacagaagtacaggcatgtggacaatatcatgtttgagaatcacaccgtcgctgaccgctttcttgacttctggagaaagacagggaaccagcattttgggtacttatacggacggtacacggagcacaaagacattccccttggcatcagggctgaagtggctgcgatttatgagccacctcaggtaaacatgacgggattcaagttcctgagtttctgtgtttggaggctgtgggggacgccctttcggagaggccttgccctgttcgctttgttgtttgttccccctttgtcacacaccggtgcacgtgcacaacattttctgagttattggagagtgagatcatggctcctaaaaccttcagtgtatgttactaaggataaggatattttcttacacaaccggtacatttgccactattgatccagtgtttttatctcgtctgctgtgtccaggtttgctcattgactctgtagtgtccaggtgctcagtccttgtgtcattctgtgtctcttccaccatgcagcagtcactgtcttaggaaccatggagaaggccacagacacacctcagcaccaatcaccagagtgtcaccagagtaacaaaaactgccaccaaaataggactgataacaatttaagatttgtttggaggggaaagaagtgtcctgagggtatatcccgcagggtgtg

SEQ ID NO: 2516 - DNA, 1210 bp, Homo sapiens
ccctcgagtcctgccctgctctgctctggagtgtggccattcggacacctgtggctgtggaaccactgtcctcactctgtggggacacttagaggagcccgcagaggtgtggttgagagctttggcgggggcagggcggtgtcagcgcatggtgacctgcagcattccttgtgcccacaggaaagcggagggaaaggccacttccaccactgagctgccccccgagtacctgaccagccccctgtctcagcagtcccaggtactcagccccctccgtcccgtgggcacctcttccccggcgccccccctcaccctccccgcttgtcctcagctgccccccaagagggacgagacggccctgcaggaggaggaggagctgcagctggccctggcgctgtcacagtcagaggcggaggagaaggagaggctggtaagccgggtggggcggggcggcctcaggaggggcccagctcccctggatgtgctgcggtggggccggaggggcgtcacgtgcacccaagtgacgccccttctgattctgcctcagagacagaagtccacgtacacttcgtaccccaaggcggagcccatgccctcggcctcctcagcgccccccgccagcagcctgtactcttcacctgtggtgagcggcccttgggctggagctccctctcctggaaggcagtagggttgatgggggacgcgggtccctgagctgatttagtcaggttggtgggggatgcgggtccccgggcttcccagagaggacagccccagcacacgggcggacatcagggcagagccccacggctccaggcacccgttgctcctggtccctggttcggcccttgggactgaggacatgggacaggctgtgggggaggcgccttgctggtgagaccccgtctcttccacacccctcccgccccacaggaactgaaggacttgctttctggggcatccacgtcacctctccctggcctcagccccgctctcagtagagggtgaagaggcagcctgttttgcagggggttgggtcggggacagcaggttgagaaagtcattttgtaggttccgtggagtggccaggccgctgcaggcccaggggtgcagaacagccctgccccagtgagccaccccttcccttcttcccttccttccgggctgtcggctggggccccacacgctggaccgtgggggctgtccagtg

SEQ ID NO: 2517 - DNA, 1196 bp, Homo sapiens
agacaggaaaaaccgtgaatttacttgaaaggcaaaggccgcatgagctggctgcatgagctgcagtccgtggacatggattacaagcacttgtgggtctgtggctctgctgggacaaaagccttcctccctgggctggggaagggaggaccagggccatgcctgctttcctcctgcacagatggcaccctctggcggtcccccccagcagcagccccccgtggcccagcaaccgcaggcacaggggccgccggcacagggcagcgaggcccagctcatttcattcgactgacccaggccatgctcacgtccggagtaacactacatacagttcacctgaaacgcctcgtctctaactgccgtcgtcctgcctccctgtcctctactgccggtagtgtcccttctctgcgagtgagggggggccttcaccccaagcccacctcccttgtcctcagcctactgcagtccctgagttagtctctgctttctttccccagggctgggccatggggagggaaggactttctcccaggggaagcccccagccctgtgggtcatggtctgtgagaggtggcaggaatggggaccctcaccccccaagcagcctgtgccctctggccgcactgtgagctggctgtggtgtctgggtgtggcctggggctccctctgcaggggcctctctcggcagccacagccaagggtggaggcttcaggtctccagcttctctgcttctcagctgccatctccagtgccccagaatggtacagcgataataaaatgtatttcagaaagcatcagcgttttttctttaattaatttttttgagatggagtctcactctgtcacccaggctggagtggtgatctccgctcactgcaagctccgcctcctgggttcaagcgattctcgggcctcagcctcccgagtagctggactacaggtgcaccccattaccatgcctggctagtttttgtatttttagtagcgacggtgtttcaccatgttggccaggctggtcgtgaacgcctaacctcaggtgatccacctgcctcgggctcctaaagtgctgggattacaggcatgagccaccgcgcccgacctgcatcaacgtttgctcagggggcaggtggtcaggctgatggcccagctgcaggcagggtcatttccagcctgcccctccctgaggctgcgtgcc

SEQ ID NO: 2518 - DNA, 1208 bp, Homo sapiens
taccagccagcagccgccgctcacacccacacccacacccacaccccacattgagaatgcccaggccaccgtgcctggctggtgcctgggaggggattttcgttgccttttgggtgagaagcagcctttttgattgtttcactgcgttttctgcagggcgttttccactgcgccgtggagacagcgaagctcgggcctctggccttttacaaggtgcagtggtggcggcagtggcggcttgggcaatggggagcgggccccttcgggctctgtgtctctcattttccctgtctccctccagggcctcgtcccagctggcatccgcctcatcccccacaccgtgctcacttttgtgtttctggaacagctacgcaaaaactttggcatcaaagtgccatcctgaccagccgtgggaatggctgggctgccaggccagacacgctaggttcttccaaagagtcccaagcccagcacctgctcctggggccacgacctccctggccgtggccacccgtcctccgcagcaggcccctgctgtccccccacctgctggctgagctcctcctggcctcgtcccctctcagctgtagctgcaccacccccgctctggctaccaggctctcccggctgggcactgcgtggccttgcccctctcccgctggcagctcctcaggggaacaggggctaccagaggctgatttctcccctctcctgggccaggggaggggtattatccctgcctcctgcccccgatgcccaaagcagcatcttccagcactttccatcgaggacttgggtggcagagtgtgggtgcagcctggctgttgctcacccaagtgctagctctgcacttcgtgtctgctgagagcaaccagaccttccatgtcctcgggcagctgcaactccccgcgagaccccgcagctgggtgggatgaacaagcaacgcagaccacaagcgagtgcctgggagggagtggcccagggtggttctggagccattgtgggtgagggtcgagggccaccgaggtcccgcgcaccgctgcctgccctgcagtggctttaacagttagttttgccaaagcctctccactcaccagcaggcggtctctgtcttcagggattgtgcctgcgtccctcgggcacctgggcccccccgcttggctccctgggggaatggcccaggcgggccgcggttcctccttagggcc

SEQ ID NO: 2519 - DNA, 1212 bp, Homo sapiens
ctgcccagaggcatgcccccctgccagccacagcgacccctgctgctgttgctgctgctgctggcctgccaggtgaggactcacagcaccctcagcacccaggggccctcctgtgaggactgcacactgatggctctctgtctgcctgcctgcctgcctgcctgtctgcctgcctgtctgtctgtctgcccgtctgcctgcccatctgcctgtctgtctgcctgtccgtctgtctgtccatctgtccatctgcctatccatctgcctgcctgtctgcctgtccgtctgcctgtctgtctgcctgtccatctgtccatctgcctatccatctgcctgcctgtctgtcggcctgcctgcctgcctgtctgtctgctgcctgtctgtccgtctgcctgtctgcctgtccgtctgcctgcctgtccgtctgcctgtccgtctgcctgcctgcctgtctgtctgcctgcctgtctgcctgcctgtccgtctgcctgtccgtctgcctgcctgtctgcctgcctgtctgcctgtctgcccgtctgcctgtctgtctgcctgtccgtctgcctgtctgtccgtctgtccatctgcctatccatctgcctgcctatctgtctgtccgtctgcctgcctgtctgtctgcctgtctgcctgtctgtctgcctgtctgtccatctgcctatccatctacctgcctgcctgtctgcctgtctgtctgcctgtctgtctgcctgcctgtctgtctgtctgtctggttgcttgtgcatgtgtcccccagccacaggtcccctccgctcaggtgatggacttcctgtttgagaagtggaagctctacggtgaccagtgtcaccacaacctgagcctgctgccccctcccacgggtgagccccccacccagagcctttcagcctgtgcctggcctcagcacttcctgagttctcttcatgggaaggttcctgggtgcttatgcagcctttgaggaccccgccaaggggccctgtcattcctcaggcccccaccaccgtgggcaggtgaggtaacgaggtaactgagccacagagctggggacttgcctcaggccgcagagccaggaaataacagaacggtggcattgccccagaaccggctgctgctgctgcccccaggcccagatgggtaataccacctacagccccgtggagttttcagtgggcagacagtgccagggcgtggaag

SEQ ID NO: 2520 - DNA, 1134 bp, Homo sapiens
tgggccctgcccaccctcctgccctcccccagccacctggctgcatttttgaagctgcctggcccccaggggccctgacctgacctctctcctctcccctcaccctcctgcccctggccactgcaggatcaggaggggagaagaaggagcctctgctgcctcccaggctgctgggactgggctggttttgtccttgaagtggtcaggatacaggacaagggcagccccaccccatccagcctgggctccccgcagacccttgctgctcccgtggcctggacacgctggggagcttctcacacctacccctaccgtccagcctggcctcttccctgaatcagcttcaagatggcaccagctctttgggcctaggatactgccgggccccccaagggggtccccagcaaccaggcctggcctcctggtgtctgcggtcacagtggcccctgggcaggggcacccaggctgaccctgaggtgctgctgctgggtctgtcttggctctggggtgtgctgggagggtcaccaggtcccttttccttcctgtgccctctgaaagctaagtgtctgtgtggctgtggagctcgagggtctgtgaataaaggcggcggcactgggcgtggcctcttggtggtctgtcaggcctctgcccctgcggcacacatgcacagccagctcccgggcagggctggaaaccccagatcatggcgaaggcttctcaagcccagaaattctcagtctaagccactgggcgtgctcaggtctcctagggcaggtggtggcagggagggcattctggagggagaggctgggctgcctgatatcactacccttgttctgccacaggggctgcccagggggccgcagaggtagtaggcaccaccctgaacccaccctctggggcactgtggcccctctaggagctggctcctcccctgtccagaagaagggggtgccgctgggcccaggagagagccacgtgcacttgaccttcaaacctgcaagctgccctggcaggccagacagggagctctattcctgttcctgttggaagcgaaaccagaatttattccaggaacacgctttcccagaagagtggccccacaggcgcctcctggtgggtgggctggtgcag

SEQ ID NO: 2521 - DNA, 1308 bp, Homo sapiens
cctttacctgggcagctgaggtgtcagtctcctgctggctcaggggctgccacctcaggtggccgtctgccgtgtgctgggtcttttccggctgcccccggcgcttctctgggcctgtgccattgtcccctgctcactctcacccactatggtcctgggtccctccacatccaccacctcagggaccccatgcatggatgttgtgcctcagggttccctctgcttagccagacaccagcctgctgcccaccaggcctgagctagggctgagctgcctgccagccacacttcctgccctcccccctcagctgtgtgcctcactatgctaggccgccccgctgaggttgttggaggccttattgtggctccatggtgacctcttggttcagagcttgcttgacctccagccctctccgtggatggctccttcctgccctcacaggcaccgtcctggccccggctccagttatgtccatgcctcggccctctgcagcttcctcccattccatgtgtcccagggcctgtctgtggcccctcaggtcctgctcttgtgcttggtgtccgtctctgcgtgggggctgtggtgccccctctggctgctgattcccttatgggaataggccaggtgtgcattgctacccttctgcggtggctcttccctttgggtaattacgagtgaaattctccagctgtccttgtacgcatcttgggtgtgtgtacctaggagcagaatggctgggtcataggttgtgcacagatacttgatttttaatggaaaattccttctgggtcagaattgggcacccagctccttggcagggccccaggaggcagtgaggctgaatgagctgcagaaccgtttattgtgcttccagggggacagcaggcccctggcctcttggaactgctggcacatccaggaaagcctggggctatgtgtgcagggtcggggggtgggggggcagtgtgaggccctgggggtccctaagctggaggaagaagtagggagaggtgggaagggctcttcgtgtctgggaagacttagaggacacagcctgtggtattgagggtgtgggtacatttcttttcctaacaagaggaggcaaacgagactccttgttgacttaaaaaactgtatgggtgcagctgggtgtggtagctcacacctgtaatctcagcactttgggaggccgaagcagatggatcacgaggtcaggagatcgagaccatcctgactaacacagtgaaaccccatctccactaaaaatagaaaaaattagctgggcgtggtggcgggcgcctatagtc

SEQ ID NO: 2522 - DNA, 1170 bp, Homo sapiens
cccgtctcttccttctgcttttcggtttttggaaagggatccatctccaggcagcccaccctggtggggcttgtttcctgaaaccatgatgtactttttcatacatgagtctgtccagagtgcttgctaccgtgttcggagtctcgctgcctccctcccgcgggaggtttctcctctttttgaaaattccgtctgtgggatttttagacatttttcgacatcagggtatttgttccaccttggccaggcctcctcggagaagcttgtcccccgtgtgggagggacggagccggactggacatggtcactcagtaccgcctgcagtgtcgccatgactgatcatggctcttgcatttttgggtaaatggagacttccggatcctgtcagggtgtcccccatgcctggaagaggagctggtggctgccagccctggggcccggcacaggcctgggccttccccttccctcaagccagggctcctcctcctgtcgtgggctcattgtgaccactggcctctctacagcacggcctgtggcctgttcaaggcagaaccacgacccttgactcccgggtggggaggtggccaaggatgctggagctgaatcagacgctgacagttcttcaggcatttctatttcacaatcgaattgaacacattggccaaataaagttgaaattttaccacctgtccttgcctcgggtttatgatctcaccaagcccggagagctgggctggaatgcggacgccaaggccatctgccaggccttagtggggttactggtgctgagaggcctcgcccctgggacgaggtgcagatgcagaaacaggccccagtctccccagcagagctgtgcaggcttgcgattcccggggaggatgccttccctgcctgtaggctgctttacctggactctgatggggcttctgtgattctggaccctggatgtggacacgggtggagccacccagccccatgtgatgctcagactcctggtcattccctcccatccccgccgtggagtgacgagaaatcaggtggactcaggcttcaaggatgggtgagaggaacagggggccctgcttatcactaacccttcacacgataaagggcagggctgggcgcagggacgcgcgcctggaatcccagtgctggggcaacacggggaga

SEQ ID NO: 2523 - DNA, 1355 bp, Homo sapiens
tcacagagttctgccaccgcttcctggagggcaaaatcaaggtgcaggcgcgtccccgggccagggctgcctcccgggtagagccgccaccttggggtctctgggctctcagtgtcctgggcttcgtcctcaaagtaagatcttcagagtaagaggacggagcccaagatggtgtgaagaccaccattcttgtcacacctttggggacctgtaggagccctcttgtccacacggctggcccagatgctcctcagggaaacctcctggccggcgagggtgcggcctgcgtgggctcattgggcccagcccactggcccagccttctctttctggattcttggcactgttggtgtctgcggctgccaccctggtgtgcccagggcagccacgcacctcagtcccgggcagggtgagggttggggagctctgtggtcccccaggcatcgccgcccctcaccgtgccctgcctgccctccagccccacctgatgagccaggagctgccggaggactgggacaagcagcctgtcaaggtgcttgttgggaagaactttgaagacgtggcttttgatgagaaaaaaaacgtctttgtggagttctgtaagtgttgccctttcagctccccaggtccgtgccaccagggcacgcgcaaggtaggcagactcctggggaagcgtctgccagtggctttgtgtccaggacacaccctagaactgctttcttttcagatgccccatggtgtggtcactgcaaacagttggctcccatttgggataaactgggagagacgtacaaggaccatgagaacatcgtcatcgccaagatggactcgactgccaacgaggtggaggccgtcaaagtgcacagcttccccacactcaagttctttcctgccagtgccgacaggacggtgcgccttccctccagacggggctggggcgggctctgggaagagcagtggtccccacgccagcctgggtgcctctctggaaggagcctggggctagtcaggtgggagaagagctgtgggagctccttcagaagcacccacctttgtttttcgagagagatgggatctcactatattgcctaggctgtttttgaactcccaatgtgctggattccgggtgtgagccaccggaccgggcctgctctgcctttctctagggaggaggagccaatgccaggagattggctctgggccgggaccagcccctgcactcatccctgtcttccacaggtcattgattacaacggggaacgcacgctggatggttttaagaaattcctggagagcggtggccaggatggggcaggggatgatgacgtgagtggggtcacagccctgggctggtc

SEQ ID NO: 2524 - DNA, 1120 bp, Homo sapiens
ggagataagccccttgcggggcccaccctgctgataaaccccagagcagtatggcctgtgtcagaatgaccagtaggagggccccggggtagcagctgcccagcccagctgcgtgtgtgtgtgaagtattttcctcaacaccttataccacagaaggcagattttgaaactcgcatcaggccagaaaaagaatttctgaatggacacttctaaggggtgcctggttactcatctgcctcttccccctgcagggtagaggggcatgggtttgaagttcccgggggctcttggagactgcagacacggacgagctggggttcctggatgctgcagcagttggggcccctggctgagcgcacctgccccaggaggccctgcgtggttcccccagtagccccttcacaccacaccgcagtgaggatgccctgtctcctgccgatcccatcacaccaagccttttcgctgttgggctcctggcactgcccgatcctggagggcacttggctgcggctgtggctgtgaagggctggtgctctaggcgcctccgtggcccccgttgcctgggcacctacttcctgcctcagccacagctgcatccacgtgcgccaggggccacaaggccgaccctggcttgggcctgttcctccctgggtttccttgggatccagtcattggagggcccgcgcacagctgggccaactcgacacctccaagcccggccagggaatcaagcagctctccctctggcagcatgagctacacaagccaggcccgtcttcccattcccttagcaaggaggggcaaccccagccaaggccttctgcactgttctagactgttgctgcctagggctactgtagctgggagtcacattcctttctccccagatagttgcaaggggcccagcagccacagcacttcaagggggccctgcccttcccctcccaccaccccaccagggtccccatcttcccctttgtctcctaaagcccgtgaggcagtagaggagccaggccctcccctgccacaccctggagaagccaagcagcagacacccccagctccttcaggggcatttatttcccggtcagaaaagaagcagggacaggcgcctctgcct

SEQ ID NO: 2525 - DNA, 1098 bp, Homo sapiens
ttccaaagcagctgcagcattttatatttctaccagcaatgtatgagggttccaatttctccacattctcaccaacacttaccttttttagtttagtcatcctactgggtgtgaagtaatatctcattgtgattttgctttgcagtttcttctttgtaatcttttttttaaatgtctttaatctctctttttttttttttttttttttttttttgagacagagtctcgctctgtagcccaggctggagtgcagtggtgcaatctcagctcacaacagcctctgcctcccgggtccccgttcaagcaattcttctgcttcagcctcccaagtggctgggattacaggcacgtgccgccatgcccagctaatttttgtatttttagtagagacagggtctcaccatgttggccaggctggtcttgatctcctgaccttgtgatccgcccacctcggcctcccaaagtgctgggattacaggtgtgagccaccgcgcctggccctcaatctctatcttttttatatctggattgaatagactttaccatggataaatctccaccctggcagatttaggactttacttggaaatacagatattctaaatggaattaaatgtcctattatcagtggcattcatcacattcaacaaaatagcatcataaaaggttgatattgttgagcgtaatgaatacctgaactccagttacataaagatgaggatcatgtctcttcatattaccttaatgtcattacattttgtagaaaaacttgtctcaggctgggcgcagtggctcacgcctgtaatcccggcacattgagaggctgaggcaggcagatcacaaagtcaggagatcgagaccatcctggctaacatggtgaaaccccgtctctactataaatacaaaaaattagccaggcgtggtggcgggcccctgtagtcccagctactggggaggctgaggcaggagaatggcgtgaacccaggaggcggagcttgcagtgagccaagattgcaccactgcactccagcctgggtgacagagcgagactgtgtctcaaaaaaaaaaagaaacttgtctcaaaagtgctatgatatt

SEQ ID NO: 2526 - DNA, 2067 bp, Homo sapiens
cctgaccccactgtcccacagctgggatgtaaggaagcccagggcagtgggcagtggtagtggagagacagacaggaatgcatgccgtgtctgcagaaacctttccctgcaccagcggctcctgcgggcacacatcccaggctaagcttgcttccacgctgggatgggcctggctgagtcatgggcaagggagtgtgactaagggtggttctttcgctgtcggtcacagatgtcactacagatcagcagctgccatctaagcagcttgcccaatgccagccagggccacagtctaggaacccagatgaacaggatgactaatcttggcccttccagaagcccagtctagcaggagaaaggattactaagtccccagctgtagtcgctgtgaatgtgacagaaaatgtcaccagtgcagtgagttagagtcaggttatccccaagcaggtgcccttggcccgggcctcggtgttggagcaaggcctgagcaggcccatgccaggcagggggtctgctctctggggccgtgctaggactggctccctgctgcttaggaagtggagagggcacctgatggactggtgtggtcagcccctgcagggtgtgacaaatgacaggactgacaagcagcattgctttggttgtgcagtagtggtgtaacaggcatttggagggaggaatgaccaggatttgggacttcctggcattctcgggagtgaggggcatgggaatgaagtaatatgaggccttggggaactgggtgggtaggtgtcactggagagaaggccccaggaaggagccagctgaggggcgtcagcattggacaggctgggcagaggcaccagctggcccgcaggagagcgttgcctagagccggacctctccagtttgtcagctgatagcacgtggacacgtcgaagtcgtgtccatatgtggcatggtcttgggagggttggaggtaaaggaagtagagagaatgatgtcatagaagcaacagctggtatttgctggggggccagtggtggggtcattgaggcaggtgctgccgagtggtcaaaggagaatgacctgattctgtgcctgtggtggaggtggggctggccatttataactaggatagaggctgggtctggaagccaccggggcttctggtgggcagcaggtcaggtagctgggctgagcctcatcatacccaatcttcatttccttattcataaaacacaaaaccttattttacttccaaggccagaggactatttaatttattgttccagcagggtgcttgtgagagaaagaagagcagggctcttccactgactgcacagacagcaagtagacatgaggccttggccagctgggctgtctggtcccctcttgaagggtgctgccagtcctccgggcacagggccttgcagggcggacactccacactgcccagtgccctgctgccccccacatggtgactgagtgatgctttgctcagacagcgagctatggctgacaaactgaactggcagcctgtgccccatgggcacttggggaaccccctctgcctctggctgtcctgtggttccatggtgccatgcacctgtaatcccagctactccggaggctgaggcaggagaatcgcttgaacccaggaggtggaggttgcagtgagccgagatcgcgccatcgcactccagcctgggtgaaaaagagcacaactccatctcggggcaaaaaaagaaagcacagggattggcccaggttggacacatgacttaagtgtcgacaagcgaaattacactcagggtggggagaaaagggaagccctgttcttcctggtccctttccctggccggcatgggctgagagtaggaactggccagccccgggcaggagaggcagcattcctgtgggacttggagctcttccagggtggctcatggtctgcccagctccgtcttcagcctgaggtccctggagagggtctcggatgtgagcgtgcacacgctcccacagtgctctggtttctggctggtgtgcacggagatctaaggagcagtctacactgggcagctgatt

SEQ ID NO: 2527 - DNA, 1046 bp, Homo sapiens
gattgacgcacagcggaggcctgcacagaggtgacttccggggcctctggggaaggggattggccgagggtgaggctgcgtcgctcttagggtccttccgggtgtgtgaacggtttcgtcttccttgctagcgtaaacagaggtggcatgactagaaaccgtggcgctggaggttttggtggtggtggaggcacccggagaggcacccgcggaggcgcccgtggaagaggcagaggtgccggcaggaattcaaagcagcagctttcggcagaggagctggatgcccagctggacgcctataatgcgagagtgagtcccgggggagccagctgggggcctggtcaaagccgcagtggggagcaggccgcctgtgaatgcaagcctctttctcctctgtgtttcagatggacaccagttaaacagaccagcaaatccgcgtgcggaacaggacccaggcgtctcctcttgctccctggttggggggcggtggctggggctgtgcggccaatgatggatttgtttcttttatgttttaaaataggatttaaaaactcatgtaaaggttttttttttttctttttttttttttttaattctgaaacagacctgttttgtaccgagttatttttgggataaattttactggttgctgttgtggagaaggtggcgtttccaccttttccataataaaatagaaatgtgtgtagaactggaactgtttgattcgtcccactgttggagtccaggcctgggccaggattttggtgtctgtccagctgggagggggtgggagaacctgagttggggatggagggagcagccccatctggtgttggacacctgaagttggcatgggttgtgggggtggcggggggtccccgctcctggagggccgaagctgcctgtcttctttcttatcttctttcctgcctcacacctaacaccttcctctctaactcaccaggtgggaggacacctttgcccgggagccacctgttgacccttgtgcctgtgcctccaggtgaggggaggttggggtgggatgg

SEQ ID NO: 2528 - DNA, 1305 bp, Homo sapiens
tgcagccctgaccctctgggcccagagccctttacttgttatttgttttaatagaaacggggctcatagcagggcataggggttcacgcctgtaatcccagcactttgggaggccgcagtggcagatcgcttgaggccaggagttcaagaccagcctggcctacatggtgaaacctcgactactaaaaatacaaaaattagtcgggcgtggagtcacgtgcctatagcctcagctactcaggaggccgaagcacaagaaatgagctgagatcatgccactgcactacagcctgggtgacagagtgagactctgtctcaaaaaaaaaaaattaataaaaataaaagtaaaataaaatagaaacagggctcacgatgtttcccaggctgggttcggactcctgggccggtatgatcttcctgccttggccccctgagtagctgggactgcactgtggcaggcttatacctgtgttggtgcctaaacgttctagctctgcagactcaatttagccagtcgtcctgttccctccgccgcaggctctgctgccatgaaggtgaagattaagtgctggaacggcgtggccacttggctctgggtggccaacgatgagaactgtggcatctgcaggatggcatttaacggatgctgccctgactgtgagtgtcccctccatgctgtctgagcggccccgactgtgagtgtcccctctgtgctgtctgctgcctgctggactagcctcagtagctcctgttaaatacctgcacgaaatacccagtttcattttctttttttttttttttttttgagaccgagtttcgatcttgtttcccaggctggagtgcaatggcgcgatctcggcttgccgcaacctctgcctcccgggttcaaacggttctcctgcctcagccttccaagcagctgggattacaggcatgtgccaccatgctgggctaatttttttatttttagtagagacggggttttgccttgttggctaggctggccttgaactcctgacctcaggtgacctgcccgcttcagccttccaaagtgctgggattacaggtgtgagccactttgcctggcccacatttttattttcttttctttctttcttttctttttttttttttttttttttgagatggagtttcactcttgttgcccaggctggagtgcaatggcgcgatctcggctcactgcaacctccgcctcctgggctcaagcgattctcctgcctcagccttccaagtacctgggatcacaggcatgtgccactacacccggctaattttgtatttttt

SEQ ID NO: 2529 - DNA, 1318 bp, Homo sapiens
tcccagactaccggggccctaatggagtgtggacactgcttcagaaagggagaagcgttaggtaagcgggccaggcatggcctcccacataggctgggcagcggcagcacgggcctgagctccagctctcctcaccttgccttcctttctgcctggcagtgctgccgacctgagcgaggccgagccaaccctcacccacatgagcatcacccgtctgcatgagcagaagctggtaagagccctgggtggctggtacacttgccagggaccaggcagagcaccttggtgcccagtgggcaactaactgcacccgccctctgtctgccagttgactcccatgatgagcacccaccaagcgggttaggccgcgggtttgatcctcctgtgcttgactctccaggacagaaggggagctccccctctgaaccatcccatccgcagccagcctcagcctcagagctgctggtggcctttcccctttgtgattcccttgcatttttctgtggacctcagaagccatcctagtcacaggggaggcttataggacatctctggggaccttctgctgaacaccctcaaccaatggggtgtagtggttgatctgcctaggtccccagggacctgaaatgtcatgacccaagagagcatggatctggggcagagtggcccttgccaaaccccgagccacttcccaaccttgccgggacggtgcaacctcttgccctcccagccactccaggtgcatcagggctggaggaaggacagcccctccccaccacaggccctcttgactcctggtggttggacctgttgtgtgttttactttctaaggctctctggggggacggagctgcccctggttttgggagccatcggcggggctcagaacagcctcgctgtggccgggtactgacctccccaccaccactggcagccatccctccccttgccacccgttctgccttccaggtgcagcatgtggtgtctcagaactgtgacgggctccacctgaggagtgggctgccgcgcacggccatctccgagctccacgggaacatgtacattgaagtgagcagtcctgcagggacccagggtctccatgggcaggcgggtcccactcactgtgccctcttgcctctaggtctgtacctcctgcgttcccaacagggagtacgtgcgggtgttcgatgtgacggagcgcactgccctccacagacaccagacaggccggacctgccacaagtgtgggacccagctgcgggacaccattgtgcactttggggagagggggacgttggggcagcctttgaactgggaa

SEQ ID NO: 2530 - DNA, 1099 bp, Homo sapiens
ctcaggtgaggtcaggagtttgcttcctcctcctctggccacttctgagtgaagcaacctcatgcctccctcttgcctcccggccacacacctgggagggcagaggccgggcgtctgcaccgtgttggatgtgggggctcccatctagcccggcgtcagggtccagcccctctgttttctgtccccctggctgtcctgggactgttcctgttgagtggacaagggagtggggagtgagggtgttgggtccattctaggactatgatggtgttggcaccccatcctccctctgggaactctgccaaactctgcactgtgacacctgagtccccatgaagcgctcgtgcccctcgacccgtgtgctccgggtgagcaggggctgaccccctctaggcctgctcttgtggggacccctcagtgtgagagacacagtggctgtcatgttcccccattctagaggcgtgggcctcagccccttccctccgtgaccagggcgggtcttgtctgcagagcgtggggcgtggagcatggggctcgcagcccagagtagtgcccgcccgtgctcgcccgtcgggaggcgctgttggggtggggtcttggctggcaggaggggtccaggggagggagcgtgtgcctggcctgcatggcgtgctgagggcctttgatctgggacttgggcagctgattgatggagggcgtcctgcctgccccgcgcctcccatcgccgccagccgcacacgcagagggcccggggccacatgccgctgctgggtccctttcagtgatggggggaggggagaagggaacaaaacagaacttttttggggaacttcaaaggtacactttagtaagcaaaaagagtttccaagtttcccattaatgttttgcctgtgtgtggtttttggacttaaataaagagtcagaaggaagagacaggataaaatacaggcaggtcctcggccgagacccggggtggttcacagacccgggcggttcctgcctttgatgtcaggcattaattattagaaggtagttttactggcgatcagaaccgggcgctgggagaggctggggctgcccggcgccccctggccctgtc

SEQ ID NO: 2531 - DNA, 1185 bp, Homo sapiens
gggagccacgtggcttgccctgtccgcagcgccgtggggaagacatgcttgctgatcagctacacgaccaacgccttccccggagagtacatccccaccgtgtgagtgtgggggcttcccgggagagcacaggccctccgtgtgagtgtggcatgggggggacacgggcagggtctcctctgggcttccacgtcggctcaggtggccctgtctctgggcttcccggctggagctgaggtgctggccagagttctagttctgtgcagacttgtgaaccccaagacacaggccagcagggctgggggtttctgggacccctcccaagccctgaccctgccctcactgctctgcagttttgacaactactctgccaacgtgatggtggacgggaaaccagtcaacttggggctgtgggacacagcgggtcaggaggactacgatcggctgcggccactctcctacccccaaactgtacgtaacaatggggccagccccgggagctgggggggtccctgagatccgcacaagggagggagcagggccctggggagcccctgaccactccaccaggtcccacctttttcccaaggacgtctttctgatctgcttctctctggtgagcccggcctccttcgagaatgttcgtgccaaggtagggcaaggctgggggcccctgtggggagagggcttgccccagtacctgccccgacaagttgtcctttagaggcaattgcgatacgggttctgcctggggtaggcacacggagtggggtctgaagatgaccatgggggctgatggggtgccgtggtggtggtcacagctctcagaatggagggttctgagggctctggctgctggggatgggccttgactaggaggccctgggaggtctccaggttccctggctgcgtgtttgttcctggtatctccccaccaaatccgcccctggtcaccccttgaaggaagaagagccaagtgtagctctggaacagtggggaaagtccctgagggccgtgacttgctcaggtggggctggggtagccgactccgggcctagggatcagagcgtctgtccctgcagtggtacccggaggtgcggcaccactgcccccacacgcccatcctcctggtgggcaccaagctggacctccgcgacgacaaggacaccattgagcggctgcggg

SEQ ID NO: 2532 - DNA, 1130 bp, Homo sapiens
gggcatagggttgggggcccaagctgatccacccaggtggtttgcatgtggtgtttcaggagcaggccaggaggccctcaccgtactgggcagagagggggtgtctgggccaggtggggagggtctggaggctacgggtcaatggcctgcagaagcccccggctctttttgctccaagaagcttctgttacctgggtgggatctcctaaggggcagcttaagaaagatgcctggggagtcccatgaagagtcaggggtgagaagccctgtcctgggcagctctgaccaccaccccatcttcaggtgaccacggtcaagttctggtttgctactggtggggccgggttctgcctcagcagaggccttgccctcaagatgagcccatgggccaggtgagtgggggtccagctgcccgggctgggaggcggaggctgagacctgaaaggtgctgaccggcctccccccagcctgggcagcttcatgagcacagctgagcaggtgcggctgccggatgactgcacagttggctacatcgtggaggggctcctgggcgcccgcctgctgcacagccccctcttccactctcacctggagaacctgcagaggctgccgcccgacaccctgctccagcaggtacaggcgccactctgggtgcctctgccacctgggctttgccccgccctgactcccccaggggccccactgccccggcccgatgcccggctgagcaggcaggtgggatttgcatgtggctgggggtggaccctggacaggccccttggcctgttggacacagggtcctcacgtacagatggggtatggtgtctggggcagaggaacgaggggagaagcacagttctcgggccagtgaggccccatgccagctgggcagtgggtgtggtgtgtatggtgatggtgagtcggaacaggtcccatcacgtggagcagggagggaatgagggtcagctttgccctggaggtttcagatccctatcttctgtcccccaggctctgcctgaggtgtccccctactcagctcatgccatgcttcaatgctgtttccaagcctggcctccccgagggcctggggagagggggtgggcaaaggggctctagcagggctcctggcc

SEQ ID NO: 2533 - DNA, 1141 bp, Homo sapiens
tcccggcggccgcatgagccgcgcgcgtggggcgctgtgccgggcctgcctcgcgctggccgcggccctggccgcgctgctgttactgccgctgccgctgccccgcgcgcccgccccggcccggacccccgccccggccccgcgcgcgcccccgtcccggcccgctgcccccagcctgcggcctgacgacgtcttcatcgccgtcaagaccacccggaagaaccacgggccgcgcctgcggctgctgctgcgcacctggatctcccgggcccgccagcaggtgcgccggaccccgaccccgacggcgagccccacgcccacccgccccgcctcccagggtctaggcccggcccaggcccccggaggctccgcgcggggcgggtcggtctccggcctgggcagcgccccagaagcctcatagattgtttctcccccagacgtttatcttcaccgacggggacgaccctgagctcgagctccagggcggtgagtgtcccccactccccggcgcccgcgggatctgccccccgagcctttctcgctccgaagccacggccccttcgctgctgtgggtgcctttctctgcccaggctcccgaggcccggggaggccccgacgctgcccaggtcacgcggcctgcggagggcccaccctgccagccaagctctgctccccaccagcctctcacactagccgcttcccggggcgtggggctagtgccacgtcccctgaagaagcgccagcagggaatccgcccttccaggccaggtcagggcgagctgcctccgtcctgtttccactcaagagatcccaaccgatggccgcctgcttcagcctcggtggcaccagcagggtcagcgcgtgagggctagggctgtggttggacccaggcaaggtgtccaggcatgtcagacagccacgttgtgccctggcccttgggggcaggtggggcacaggccttaccccaaccccagtgccatcctctacgtgcgtgcttcccgtctctgattcgcaggcgaccgtgtcatcaacaccaactgctcggcggtgcgcactcgtcaggccctctgctgcaagatgtccgtggagtatgacaagttcattgagtccgggcgcaagtacgcggcgctgacccgacccg

SEQ ID NO: 2534 - DNA, 1207 bp, Homo sapiens
gggctgggcagcaagggactagggcctggctgggcccgtggctgactcctgcatcttctccagttctgtgccaatgacccggaggtgtttgttcaggcggctctcctggctcaggattactgtgacgccattgacctgaacttgggctgcccacagatgatagccaagagaggtgagctccatgtggagcatgggggcacctggggcaggggccagagccagctcagtgcagccccaggtgtggtgagcttggaggacggcaggccctgcctctgtcgtgacagtggctcaggctggagccagctgtcctctgtgctccgcctctggagggtggctgtcctcaggccttgggggctaggggccgagccctactggctctctcttccctcagggagctccctctgcataaacatgattgctgatacagggtccccattacccccttgcactgctgtgtgtggggctgagcctgctacctcaccgggcccctgaggaggtgttacttggttccagaccgtgcagggtgggggttccattcagcaccttctgagcttaggcagctgggcaaatagagcccctgagtctgatgccgacaaaccactgctctgactgtcccactgccccaactggagacactgctggttctggggacctgtgtcccgcctgacagggcagctcctggcctgcgtggatgcaggaaagggtgcagagggggtgcaaggcttcggccccaccagccttaacacaggtgccagccaggccatgcttgctccttgcaggtcactatggcgcctttctgcaggacgagtgggacctgctccaaagaatgagtgagttggctgggtggatggtgaaggacccccagagaccctcaagagggacacatgggcactgtccacttggttggggctcaggagaggacaggcgttggcaggagttctcagcatcaccctggggcttcctgcccacagcagcctctctgctggaaggaggtggctgtgaagttgcctgtcctgcaccacccaccccttaaaaccagacagtaggtgccagggcagagtccttgctcgggcccagccccagatgtcctgggagacagagccggccttggccctgcttgtttgaacttcggagggccgggggtatggcggagggagcctgcccagcaacctgagggagacacccagatggtggcccgggctgcctc

SEQ ID NO: 2535 - DNA, 1145 bp, Homo sapiens
ctgccccccgaggctgctagatgtaggtgttaggcatgtcccacccacccgccgcctcccacggcacctcggggacaccagagctgccgacttggagactcctggtctgtgaagagccggtggtgcccgtgcccgcaggaactgggctgggcctcgtgcgcccgtggggtctgcgcttggtctttctgtgcttggatttgcatatttattgcattgctggtagagacccccaggcctgtccaccctgccaagactcctcaggcagcgtgtgggtcccgcactctgcccccatttccccgatgtcccctgcgggcgcgggcagccacccaagcctgctggctgcggccccctctcggccaggcattggctcagcccgctgagtggggggtcgtgggccagtccccgaggagctgggcccctgcacaggcacacagggcccggccacacccagcggccccccgcacagccacccgtggggtgctgcccttatgcccggcgccgggcaccaactccatgtttggtgtttgtctgtgtttgtttttcaagaaatgattcaaattgctgcttggattttgaaatttactgtaactgtcagtgtacacgtctggaccccgtttcatttttacaccaatttggtaaaaatgctgctctcagcctcccacaattaaaccgcatgtgatctccaccaccgtcctttcttccctcctccctgacctggcagctgcaagctctccagctccaccccacccagtcacggggccgtgaaggggatgccctctgtcctctggtccccagttcccacacacccctaggccatgtcccagagccggggctgggccggggagtgaggaaggagcccgcgtggcagccccgggcttcccgggaaagcgctgggactggcgggggggggggtaccgaggctctggccaagaaacaccaccagtgagaaacgtgtaggaggtacagacactgggaagttggcttcagctgaggagaggcccctcgtggagaatagtatttgcttgaagtcagtggattgcaggcattcgccctgccaaagatgccgtcacagcctcaccaagacggtgtcaatagcgccactggctggccaggttgacccagaagacttgggtttaggcaaagga

SEQ ID NO: 2536 - DNA, 1195 bp, Homo sapiens
actccccaccccgacctccccgcagctctgcccacctgccccctcccccacaggcctggccgtgcagtggggcgccatcggcgacgtgggcattttggtggagacgatgagcaccaacgacacgatcgtcagtggcacgctgccccagcgcatggcgtcctgcctggaggtgctggacctcttcctgaaccagccccacatggtcctgagcagctttgtgctggctgagaaggctgcggcctatagggacagggacagccagcgggacctggtggaggccgtggcacacatcctgggtgagcactcccagtaggagccgcgccaggtgtttcccctgctggcatcagggtcttgggacatagcagtcgtgcccctgtgcgcctcagtttccccatctgcagagccagggtgcgggcgcaggtgtcactgtggtggtggtgctttgggagatgcacagcccacgcacccctgggtgtcagccctgccgcatacaggccgtccccatgccccctctggagttgccgacccggcgcatcccttccaggcatccgcgacttggctgctgtcaacctggacagctcactggcggacctgggcctggactcgctcatgagcgtggaggtgcgccagacgctggagcgtgagctcaacctggtgctgtccgtgcgcgaggtgcggcaactcacgctccggaaactgcaggagctgtcctcaaaggcggatgaggccagcggtgcgtgtgggtggccaggcgggagtggggtccccgggcctccccagcccttcctccttgttgtctggaccgtgtcccggcaggcataccgcccttcgtcacgggtgccattctgagcgttcccaccccgactcccacctgacgtagcaccgtggggacctgcgtgcgtgtctgtgtgtccttgcgtgggtgccagggctctgcacccagaccagcctggcatctgcccctgtcttcacagagctggcatgccccacgcccaaggaggatggtctggcccagcagcagactcagctgaacctgcgctccctgctggtgaacccggagggccccaccctgatgcggctcaactccgtgcagagctcggagcggcccctgttcctggtgcacccaatcgagggctccaccaccgtgttccacagcctggcctcccggctcagcatccccacctatggcctgcag

SEQ ID NO: 2537 - DNA, 1099 bp, Homo sapiens
tgtgatgggactggtgcctgccaagggcctggccacctctgtcctgctgtcaccggacttcctctgggatgtgccttccaactggtgagtgtgtcgagggtgtgagcctgggccccacgtggatggcggccaggcctgtgctgacccacctgctgcatccccaggacgctggaggaggcggcctcggtgcctgtcgtctacagcacggcctactacgcgctggtggtgcgtgggcgggtgcgccccggggagacgctgctcatccactcgggctcgggcggcgtgggccaggccgccatcgccatcgccctcagtctgggctgccgcgtcttcaccaccgtgggtaaggccccgcccccggtgcctcccgctgccctcctggccccgccgccctggctcaccagccgcgcttcctctcttcaccagggtcggctgagaagcgggcgtacctccaggccaggttcccccagctcgacagcaccagcttcgccaactcccgggacacatccttcgagcagcatgtgctgtggcacacgggcgggaagggtgagtggcccccacagcccccacctgcctcctgcctagcctccggcccagggagaagcagggtctggccctctggactgtggtggctgggcttgcagtgggtgtgattgtctggcccctctggccccctaggcgttgacctggtcttgaactccttggcggaagagaagctgcaggccagcgtgaggtgcttggctacgcacggtcgcttcctggaaattggcaaattcgacctttctcagaaccacccgctcggtgaggccggcagcgcctgggcgggggtgggcatggatgggtgtgggtggacctgtggaaggccctgggtgagcacggcccctgcccgcaggcatggctatcttcctgaagaacgtgacattccacggggtcctactggatgcgttcttcaacgagagcagtgctgactggcgggaggtgtgggcgcttgtgcaggccggcatccgggatggggtggtacggcccctcaagtgcacggtgttccatggggcccaggtggaggacgccttccgctacatggcccaagggaagcacattg

SEQ ID NO: 2538 - DNA, 1185 bp, Homo sapiens
catccaccacgtacccccgcaggtgctgctgtccctggagcacgggctctgggcccccaacctgcacttccatagccccaaccctgagatcccagcgctgttggatgggcggctgcaggtggtggaccagcccctgcccgtccgtggcggcaacgtgggcatcaactcctttggcttcgggggctccaacgtgcacatcatcctgaggcccaacacgcagccgccccccgcacccgccccacatgccaccctgccccgtctgctgcgggccagcggacgcacccctgaggccgtgcagaagctgctggagcagggcctccggcacagccaggacctggctttcctgagcatgctgaacgacatcgcggctgtccccgccaccgccatgcccttccgtggctacgctgtgctgggtggtgagcgcggtggcccagaggtgcagcaggtgcccgctggcgagcgcccgctctggttcatctgctctggtgagcccacactctgcccccaaggtggtcccttccctggggaaaggcaggcgaactggagctggtggtcccctgaggtgctctctgggacggggatgggcacacagtggcacgggatggggctgagcctcgtgacgtgctctctgggacagggatgggcacacagtggcgcgggatggggctgagcctcatgcgcctggaccgcttccgagattccatcctacgctccgatgaggctgtgaagccattcggcctgaaggtgtcacagctgctgctgagcacagacgagagcacctttgatgacatcgtccattcgtttgtgagcctgactgccatccaggtagggcccagcctgccagcgtgtgagcaacgccagccccagggctctggctttccctggagcccaggagctgcagtgttgagtccggggcccctgacagcccctttgctaggcagagccttgtgctgggggcaggacgggaggggaggaggggtctcagtggggctgtgtgggggccataggggcttctttcctatcaggagacctgggagggtcgatggggcgcgggggtggagatggcctagtggggccgggggccgcccccaacagctgcacctgctggaggttgcaacctgagtgtcctgttcccaccccagataggcctcatagacctgctgagctgcatggggctgaggccag

SEQ ID NO: 2539 - DNA, 1477 bp, Homo sapiens
tttttagtagagatggggtttcaccatgtttgccaggatggtctcgatctcttgacctcgtgatccatccatctcagcttcccaaagtgctgggattacaggcatgagccaccacgcccagccatgccatttcttaagatccaggtgctccctccccgggcggagaaggacctcctgagggggaggctgagccctgggctgcccttgggtgtgagcggttcacacacccacccaccctagggcagagccagcccaccaggggcgaggaggggccctgctggccgagaggtggaagcccttctcctgcgcccttcctgctgccagaccccaccccaagactaaggttatgctccccgggggtgaccggtgtccctctctccttcccgagcctggacacttggcctttgtctcctcggttccttatcacggcctgttctggtgcaggctgcccttggcgctggagaggccactggccgacgggctcatcagagctgccggtgacaccaggggccaaaggcgtcgcctggggacaatgctgccctctgtccttcctggagccactctggccgtgcctggtgccctcccctgggcccgcctgccccctccgcctcgttccctctgtgacctggttcctgttccaggcctcacctgggctggctgctggccacaggctctgttctggcccctctgcaggacacctcaccctccttaggccccttccagggtcccactgggatggaccccccctcaccccaagccagtgaggccaagatgggaccttcgccccagagccgggtgggtgggtgggctggctgcgctgtggggcccggccgtggcaccttgaccactgtttgtggcaggcatcaacccagattcactccgaggaacacacactggcgtctgggtgggcgtgagcggctctgagacctcggaggccctgagccgagaccccgagacactcgtgggctacagcatggtgggctgccagcgagcgatgatggccaaccggctctccttcttcttcgacttcagaggtgggtcctgcccagcctcctgcggaggtgggtggccttcaggtccccacatgctgagcagaaaccacgtggcgtgggctcactccgtgcagtgtgtgtccagcctggtggcaggaggtgtgctcaggggtctcgtgtgctcacagccccacctgagccgcagcacccttccttgcagggcccagcatcgcactggacacagcctgctcctccagcctgatggccctgcagaacgcctaccaggccatccacagcgggcagtgccctgccgccatcgtggggggcatcaatgtcctgctgaagcccaacacctccgtgcagttcttgaggctggggatgctcagccccgagggcacctgcaaggccttcgacacagcgggtgagtgtgcggctgcgcggccagggcaggcgggacagtggcacaggacggccccccgcacagt

SEQ ID NO: 2540 - DNA, 1038 bp, Homo sapiens
gggtccgagcgccccgccgcagccggctggacccccggtgtggccacggggtagtccccagtgtggcccaagcattcccatcccgcacacgtggccccggcggacacgggggtcggggatggctcgggaggcgcgccgcgggctcggtcgcagccgcgtgcgcgtcggggcccgcggggcgggaggcggaagtcggggggcggtggtttcccgcccgccccgcccccggcgctcctcagtcccagccccacccccccaggcgcgttcccgcgcagggtcccggctcgggcggcggcgcgcacgagcatcaccccaccggcggcggcgcgccgggtcccggggcgcagccccgacgctcattggcctgggcggcgcagccaagctgtcagcccatgtggcgtggccgcccggggatggccgcggtttaaatagcgtcggcgccggcctagagggagccagagagacggcagcggccccggcctccctctccgccgcgcttcagcctcccgctccgccgcgctccagcctcgctctccgccgcccgcaccgccgcccgcgccctcaccaggtacgagcagccggcgctggggccggggcgcgggtcgtggtcggggctgggcccggggttcccggggtggcccggctcctcatcctccgctctcggggcgcgcgtggcccggccccgtatccaggggtcgcctgggcggcctgtccgggtctcggtgttcgtgccccttcggaggcgcccggggccccgcggagtaggtgggcggatggcgggggaaggacgccggggaaagccaccaacagccgccttcgcttcccgtgggggaggccgcggaccctgaagggcctggaggagcccccggctcggcctccccgcgcccacaaaggcgccgccgcatcctcctcccggagccgccccggagccgaggcccagcccgaaggggacgccgcgagggaggaacgggggggcgcaggggccgcgccgggaccggcctccccatcacgtggcgcagcccggccgaagcgcagggg

SEQ ID NO: 2541 - DNA, 1148 bp, Homo sapiens
gagactaacctgggcagaatagtgacaccctgtctctactaaaaaacaaaaaacttggctgggtgtggtcccagctacttgggaggctgaggtgggaggatcgcttgagcccaggaggtggaggctgcagtgagccgcgattgcaccactgcactccagcctgggtgacagagcaagactctgtctcaaaaaaactagttttctttttttttttttttttttggtactatacatataaaatgtactgttgaaagctcatgaagtatacaaagtatacagttcagtgcattaagcacgtcaagaatgttgtgcgagcatcatcatttgttccagaattcctttcacttcagaggaaaccccacactcattcgcagttgcttcctgtcccccgcccagcacccacattctgcctccatgcctttgcctgttctggacgtttcacttcagcaggatcccacaggatgtgtccctttgtgcctggcttctttccctctgtgtcctgtttgagggtccctcgtgctggggcgtctgcacttaattcctttccatgggaagagctctttgctgggggacaggccactgtaggcatttgtccatcagtttgatggacatttggatggtttccgcctttgggctattgtgaataatattgctgtgaacattcagttctcttggatgcctccctagaagtggccttgctgggtcatgtgggaattctgtgtctaacctggtaaggagccaccaaaccgcctcccatgcccaccagctgcgcacgaaggttctgatttctccacatctgcaccagcacttgctattttctgtcggggttttttttaattaagaatacttttattgcatatctttaaaaactttattttttttatatttaaaaaaatttcttttaaaaatagaggtgggatctcactgtgttgcccacgccagtatccaacacctgacatcaaggatcccccccacccggcctcccagtgtgctggggttacaggtgtgagccaccgcacccagctgttttctatcctgttgatcccagccaacctagtgggtgtgaggcgggatcccatagtgggcttgattttacattctcctggtgaccaatggtgttgagtgtcttcaggaggtttttgcccaca

SEQ ID NO: 2542 - DNA, 1162 bp, Homo sapiens
accctggaccctgcacaggagagatggcgtcagggcgttatctggacggttggtgacatttgcacacgggccacggaccaggtcacgtattgtgtacacccacccaagtactgaggtgtgacgcggcactgcgtctccagcctacctcctgtagtgcaggaagccagtgcagggtgggtgaggaagtgcacaggggtccagggactgtcccacagcactcctgacgaaagctggtccccttccacggccctagccaaggagccaggtctgcaaagctgggaccaggtgtgtgcggaggcacgtgttcccacttctcccatggcagagggagagcctgtggacaacagtggggcactctgctcccaggcaggtcccactgggctgagccgcacagcctggctttgggcttccctgactgcaccacccacatcagctgcctctagcccttaaaatacaaaacttcccccagtcactggccgccagggctgagttgggggatgtgttacatccctgggtccactggggggcagtgttggccatggtgttggtgctggctctgccgagaggcgttggagtggctgtgtggggcggtgagcgccggcccagcctgatggaacccactgtaccaggcccaggcctcagcctctgagaaggacttccctgtgtcactcactcatacatgtcctcaggacgtgaagacatttcagcagaccaaagtttccttcgaattttcttcgaatcgtccagatacttggagacatctcctcctcacctgtggggtgctggggcagtcctaggcgtgggggcagatgggtggacagctgctgctgccctgctgggggtgggcagcccttggagcacacagtggtgaagacattcctgaatatgtctcaggctgtagaaatcttattttgtggaaagattttagagaatcatcaaaataaacttttaccaaataacattttaccagaaactgaatccgagagaagtagaatcgttcactccctgccccccaggtcactgtgtgcagaatcacgtgactaggacatgggccctgtgatccatgccctccttcctttgcctgtggggtcaacagcaagaaggcccctcagtgcccctcaagcctggcaccagccgcagggcctggtgtaactttgcaggg

SEQ ID NO: 2543 - DNA, 1062 bp, Homo sapiens
cccatagttgtagggccccgccccagcccggactccgcctgggtctgttccctcttcgccccctctcttttcgggctgttggtgttcggccagggctctttggctacagtagcctgggccctaaaggccatctagttgctgagtctgtttggggtttttacttggtgagaagaaggccttgtcattccaacagtcgatgactcgctttgatcaactcctgcccaggactaggcctgagccctgtcgtcgtaccggcgaggatgtgcgtctcccctgccttcaggctgtgccctgagacccagttgtggggctgcccagcacctgccatcctgctgggatcaggttttcttagtgcttgagaagactcaggagggcctgtcccatgccattgttggccttaagagcaagtgattccagaagaggagtgggcaccactctcatccagaggcccgtcctgagaggcaagtgaggctgtgctctgtgcctgggctcccccaggtggcacctgtcggtctgtggacctggttgaggcaaggatgcccatctggacatggagccgacacaggtagtcagggggccagcgggacgcttaccaacagctgtcttttccccacctcagaatagcattcctttcgaacaccacggcaagtagctgctcgtctcccatcggaaggcagcactgggtgagtgtgcgcgtggcgggcgccaggcagcagcgccaggtgggtgggagccaccatgccccacccatgggagcttgcaggtgggctgggcttgcatgccaggtgctggaggtagagtgaggcttcttctgctctgttcttcttgtggggtgcagagcggcggcagtccgctgcccagtcttggggggaggctgtccacagagagctttggaacagagtgaccccaggagaccatcctgttggcctgtggcctccccgtgactgcgttccgtgtgccgttgctctcctcctgtcctgggtgcccacccgtgaggcaggagtggcaaggcgggtgccccgagcacttgagttgccttgtctgcggtcggccgtgcctgga

SEQ ID NO: 2544 - DNA, 1102 bp, Homo sapiens
ttagtgtggagctgaggcagggcctggactgaaacactgtgtctgatttccttgcctagtgggcatccccaccatcagatggtgcggggcagagggggactacaacgtcatggtgatggagctgctggggccaagcctggaggacctcttcaacttctgctccaggaaattcagcctcaaaaccgtcctgctgcttgctgaccaaatggtaaggactgtttcctgacagttggcacacacttgctgtctgatagaatcagccactcgcttgtgctgttcttgccattattatggccattaattcacagaggaaatggaaatttgctgagcctcagccttgaggctgcagtggctcagctcactggcttctcgaggctccggtggctccgctcactggcttctcgaggctccggcggcccagctcactggcttctcgaggctccggcggcccagctcactggcttctcgaggctccggcggcccagctcactggcttctggaggctccgacggctcagctcactggcttctcgaggctccggcggcccagctcactggcttctcgaggctccggcggctcagctcactggcttctcgaggctccgacggctcagctcactggcttctcgaggctccggcggctcagctgactggcttctggaggctccggcggctcagctcactggcttgtcgaggctccgatggctcagctcactggcttctggaggccccggcggctcagctgactggcttctcgaggcccccggcggctcagcacactggcttctcgaggccccggcggctcagctgactggcttctcgaggccccggcggctcagctgactggcttctcgaggctccggtggctcaccgcactggcttctcgaggctccggcggctcagctcactggcttctcgaggctccggcggctcagctcactggcgtctcgaggctccggcggctcagctgactggcttctggaggctccggcggctcagctcactggcttctcgaggctccggcggctcagctcactggcttctcgaggctccggcggctcagctcactggcgtctcgaggctccggcggctcagctgactgg

SEQ ID NO: 2545 - DNA, 1137 bp, Homo sapiens
gcgtgaacccgggaggcagagcttgcagtgagcccagatagcgccactgcagtccagcctggatgaaagagcgagactccgtctcaaaaaaaaaaaaaaaaaagattttgtgtgaatttcaatgcatgctccccgtggtgtcgtgtgcccctcagtggtcactggagctgttgccagtggcacgtgtgttgctcagtggggccttcctgatgtgtgatccctgagtgaggcctctgctccttcgcatgctttgcttatagcttgggggaagtcccttcatactctctgggctcgttttctccgagcaaaacaagggttttgaacttggcgaccatcatgacctcttccagctcagttactgtcccagttctgcgagccctcagcccagggccttaggtacctggtgttccacggtgggccaggtgtggagcagagcgctcctgtcctcccctcagagtccagctcttgcgagttccctggactttcaaacagttgggctgatggagcaggagggtattctctgcggggatttcagagccatgaagcgtgtgtctcaacagcagagcttcggtctggcaggagccctctttgggaacagagctttttgtctgaagagtggctgtgccacgtctgtggagccctcccagtgagaaggctccgcggcacatttgtaggtggatggttgggtgagtccccttgggcaactggccaaaggaaaacctgttcagggcctctgttagcccttttgtcacgggaaagggaggactgttgatttgattctttgacatcttttctcagcacaagcacgtaatctgtgctactacaagaaaccgacgtttctaagtttatgtgacacaaaatatctttggcagcacctgtggtcctggggaacccgttacagagaggggcacccagtgtgtcccatcacgggcctcacgtgaccagaggaggccacaggaatgaaaaatcccatcaccaacccagggaaagctcagcagagactccgccctgggagcctgtctggcggcccttggtggtggactggcttctcaagggcctggagcctgcattgccttgaaggtgtgacgagccaatagagcagggtggtgcggggtgtggccttggcctgcgggagcc

SEQ ID NO: 2546 - DNA, 1192 bp, Homo sapiens
ctctccaccctgcctcccggggcccgttctgccacagagtgaggtgtcctttcctctttggaagcccatagcagccttgggctgaagggctcaaaccccaggctgctacttcccttgagaattgctcacccaggcgggagggctgctccttccacacagcacagcctgtaaacgtcactctctgtcatcgtttataagcatgatgactgggttttcacgcttccccataggatgggccttccttaaatcttgttatgttgtcagcacattacttgtgtgacgcaaaagaaaaaaaattcactcttgcagtctgccaggcccaacatgtaggtttctgctttttagggcactaaaacgaggacacatttttatttctcagcaaataaatatatgaattctacgtatttttttatgtttcatagaattcaattcgccacaatctctctctgaatcgttatttcatcaaagtgccgcgttcccaggaagaaccaggcaaaggctcgttctggaggatagacccagcctctgaaagcaaattaatagaacaggcttttaggaaacgacggcctaggggcgtgccctgctttagaacccctctgggaccgctctcttctaggtaaggaaaaagaagaacaaaaggcctcacttcgtgcttactaaacttaccttcagtgtattgggaaaatttccttttgaaaatgaaggaactactaaatgcattatgattaaatgttgggatggggatttgagcaaaagtgttgggtgctgcccaggtgtttctggttctagtggctgaaacatttgagacgatttgcaaagtttaaactgcactcgacgcagtgattgttgcttcatggggctcatcgcatgttgttcataccagtgccacgtcgacgtttttcctttcccttggcacaggaaaagttctttaaaactactttttaggccgggcgctgtggctcacgcctgtaatcccagcattttgggaggccgaggcgggcggatcacctgaggtcaggaggtcgagatcagcctggccaatatggtcaaaccccgtctctactaaaaatacaaaaaaattagccgggcgcggtggcgcgcgcctgtaatcccagctactcgggagcctgaggcaggagaatcgcttgaacccggaaaggcagagattgcagtgagccgagattgcgccact

SEQ ID NO: 2547 - DNA, 1236 bp, Homo sapiens
gaggccgaggcgggcggatcacgaggtcaggagattgagaccatcctggctaacacggtgaaaccctgtctccaccaaaaatacaaaaaattagctggacatggtggcgggcgcctgtagtcccagctattcgggaggctgaggcaggagaatggcatgaacccgggaggtggagcttgcagtgagctgagatcgcgccactgcactcccgcctgggcgacagagcgagactgtctcaaaaaaaaaaaaaaaaaaaatgctccagacacttcagtttgaaaatattggaatttatgtggggaggattagtgtgcatggaaggccaaaaatgtgaatgcatctccgcagtcatctttccaaaagccgccctctgaatcagtgaggaccctcagggtggggaacgtccccttgtgagtgtctgcagattggagtaggcagcagcggagcccgtctctgtagatggactcgcagaggaacttagttctttccctaaaggagtaggaacagctgggcgccgtggctcacgcctgcaatcccagcactttggaagaccagggtgggcagactgcttgtgcccaggagttcaagaccagcctggacaacatggtgaatctctgtgtctacaaaaaatcacaaaagtggctgtggcggcagcacctgtagtcccagccaccaagaggctaaggcagggagatcgtttgagccagggaggttgaggctgcagtgaaccgtgatcgccccactgcactccatcctgggagacagggtgagaccctctccacatagtaagtaaatggaggaatagaaacgcaagccggcatacattgtctttgacagcattttgtggataggcaagttctaaccatgggggcaacgtgggatgcagcagggtttggtgtgccgtggggcaggggtaatttgcttgtttctctaagactttgtacagctctgtaaacagattcccattaggtcgtcctttccttgtgacaggtaatagtggaggtgtcacaaggtaagtggcctgtcttgcctggttttcaggttctacggcttttgtcttgttttttgagaaagggtctgtcactcagactggagtgcagtggcgtgatcacagctcagtgcagccttgaactcgtgggctcaagtgattctcctgcctcagcctcctgagtagccaggactacaggcacgtacaaacatgtccagctaatattttttttcttttgtagagatggg

SEQ ID NO: 2548 - DNA, 1278 bp, Homo sapiens
cttaaagacagaagtcacacttgaacaaaacccacacacaacaaaacctgatttgggagacggtgtctccactgagcacctgctgggctgagcttctacctacgagtgaaactctgtcctcccgcgaggaccaggcatcgctgtgtgaggacggcacggccagcgcctgctgtgagtgggtctcccaagactaggcctcaggacgcggggggagccatccccgccgccctcacaggacccaccaggcagcggagacatgtggaattagagtattttgaggtgtcctttctttacaaaataatggggtcttgggcatttcacatcactccatttctactgagactttcagaatcacacaggccctttccgtggatttcatttggggcaaagaaacaacgtagttttgtttttgttttcagcctatggaatgatttccttttgtctgtcttgttcaagttcagacgaagctactctggcatctgcacatttccgtgttacagcagctgcctgatgaattttatccacctccatttcagcatgtggctcgcgtggacaggtggacggacgctgtggccgcatggaaccttgagaacccagggacgagccagtgccgggaaggaactgccgggactcaccgagctgcacttaactgttctctttctggctattttttgttgtttgtttctttgtgttgactttgtccctggcaaaattttccactctgagtaaaacaagtctcctaagtattgtgtatgtttaaaacgacagaaccatttctacttcatttggaaaaagattcagtcttttatcacaggcccttttgaaactcagatcccaggtctctccgtggtatgtttgtatttggggtgtccctccggctctaggcggcctctgacctgctgtctactccccaccttcggtgagcggccgccatggtggagcagggtccgagccacgtcctgcagggcacgtctggggcatttcctgttttgtggtaggaaatgtccctgacctttcagaaccgaacccaatcctgaggctgactcctctacggaaaatgaggacaggacgggggtgagggaatgagagtgggaggtccctgcacctcctcgcccggctcctcaggaagaaaaccgctggcccttcccgagtgtgccggccgagggccgagggccgtgcacatggggagagggcgtcagcctgatggctgagcttttaaatgtcatcatcataacattatttatttaaatgtagttattttggtatttaatttttttt

SEQ ID NO: 2549 - DNA, 1219 bp, Homo sapiens
gttcaaccccaagggggagtgcatccgagatgtctacgcgcagtttctagagatgaccgatgacaagctgtgactccagctgggggcgccacagcacccaccacctgccgccttcagactctcggggctggtgccagtgccccaggggcctcctgggccacgggctggaggggctgcccagggaccttggtctcgaagccatacgtggttgtctgctttcctaaggactcccatttccagtattaaagagagaatcatcatcaaggcaccgtaggtaactcagtggctgtgaccagctcgactggcggccactggctgttcccatgagttcagctgtgacgttagcttcagtggctccgccgcatcctcacactgacgggggctccatacggacctggggactgggctgagagggtggacgagttcaggtttgtttttgcagcagattccgtcgttcttactgagtctgcagcgggggagtgaacaagtgtgcagatgtaagttcttacatgataagcagattgaatacaacaccagcagcttgccttagaaaaggagaaaggaattccttttcccgcccgaacatgaagaaaaatgacctgaccctgtagagagaacacagtgtgaatgtttcccctcgtgtgagcccagcctgtggtcttctccgtacccgcaacgtggtcatctgtgcccgtgacgtcacctgtgcccgtgcgtggcgtccccgtctccgttggggccattagaatgaggcagacaccaggccactctagaagccgagccgtcacacctcaggcgtgtgcggggcggggacggggggtctcctggttacattttggattaaacctgtttcccggttatgtgtagggaacagcagagtgatgcacgaactttgaacattcgttatggggaaaacatcctttaacttcggggtcgtctgccagagcagggtctgggagggtccatgcagttcccgctggtgtggagggaaatgccctggtctggcctccgagcccccaggtccaccgtctcccctcccctcatttgtaagaatagctacacactaacattttgggaaggagaggcacataactttttttaacatttggtaactaggttatgggctctacattgtcagctacttgggatatatatttaattttcttaaattcccgttaaactctattttatggttttgatttcagattgcaaacatgta

SEQ ID NO: 2550 - DNA, 1099 bp, Homo sapiens
taaaaatacaaaaattagctgggcgtggtggcgggcgcctgtaatcccagctactcgggaggctgaggcagaagaatcgcttgaacccaggaggcagaggttgcagtgagtcgagatcgcgccactgcactccagcctgctgggtgactgaatgagactccgtctcaaaaaaaaaagagtgttcctagcagcggtgacatggcagctgtggtggggctctgaggctgaggaggtggggactctgaagaactgaaagaaggatgaagacagctggaagtcaggagcacgaggagagtgtgtgtgtctatgtgtatgttgtgtgtgtgtacgttgtatgtgtgtatgtttgtaatgtttgtatgttgtgtgtatgtattgtgtgtctgtgtgtgtgtaagggtggagccccaggtgaggatgggagagtgggcagggcagtggtgtgtgtctcaggagaaaaagaaaggccgctggccctgacctgttctgcggggatcactgctgtgtatgttgtgtgtgtgtgtctgtgtgttgtgtgtgtatggtgtgtctgtaagtcgtatgttgtgtgtgttgtgtgtctgtatgtgttgtgtgtgtgttgtgtgtctgtatatgttgtgtgtgtgtgttatgtgtctgtgtgtgtaagggtggagccccagatgaggatgggagagcaggcagggcagtggtgtgtgtagcaggaggaaaggaaaggccgctggctctgacttctactctagggatcactgctgtgtggtgagccagggggacccaagggaggagttgctgtggtcccggggagttggatggaaacggcatctcaagatgaggtggtttccagtgctgggcaggaggtggcatggaacttggtggtctcttcaggtgaaaagtgaccccaggtcactggcataggcagccagggtgccgcctgcacctgagaggtcgggtgagtctgtgtcctgtaggtggaacaggactgcagttgaggtgtcgtctgaggacactgacaggtaacccatgttcacagtcccactgttgccggatcttagtggaatattagtgccttcgattttcctctctccagagaacctcc

SEQ ID NO: 2551 - DNA, 1169 bp, Homo sapiens
catataaatgaacatatttaatgactgattccgtaaatatggtaatgaataacactaccaatttaggaaggaaatctttttttttgagagatggggtcttgctctgtcactcaggctagagtgcagtgatgcagtcagctcactgcagcctcgaactcttggtctcaaatgattctccctcctgcctcatcctctcagactacaggcatgtgccaccatcctgtctaatttttaattttttatgttgcccaggctagtctccaactcttggtctcaagctattcttttgcctcggcctcccaaagtgctgggattacgggtgtgagccatcgctcttggccatgggtagctttcttggggtgactacggtcttactaaattgtgtcactgtaatgtcacagaattctctttgatcagtgggtcgcgtagctggtgatttttgatgaaagggtagaaaggcaattttgctgctctctgtatttttaaatgttataattcagcatctctttatttgataggttcgaggctataaaacatttcttcgtttatttcctcatgaagttgccgatgtagagcctgttttagatttggtcacaattcagaatcccaaggaccatgaagtgagtgtctctgcctcccccctcgtctccagccctccgtgcctgtccttcctccctgcttgccccaccctgctgcaccttccccttcctgtttctttcattttatctccctttgttttgtgtcactcctcttttctttcttttcttttcacttttcctttacttcttgtacaagttgctttaaattattttcgtttaaaatagcccctttataaaaaaaattatgcctaggtgtagtttaacaataaatccgtcattgtttctatgtttttttaactgtgtaagtataactgtgttgggttcccaagaccacccccaggtttgatacttcctgagcgggactcacagcactcagcatagagtcctccttttggctgtcacttgttatggcaaaataatacacagcaaaatcagcaaagggaaaaggcacatgggtggggtctggggagaaccaggcgggagctcccggggtcctccagttgggtcccacagggcctgtgtcattcccccagcagtgagatgtgaccacacctgtgaggtgtctatcag

SEQ ID NO: 2552 - DNA, 1197 bp, Homo sapiens
aatggcgtgaacccggaaggtggagcttgcagtgagcgaggttgcgccactgcactccagcctgggcaacagagcgagactccatctcaaaaaaaaaaaaaggaactcctgacctcaggtgatccgctcgtctcggcctcccaaagtgttgggattacaggtgtgaaccaccacacctggccttttttctttattcttaggtgtttttactttttatctgtttttcactttttcaaaaggccagtttgtatgtggagaggtgccagcgaagagaagctgctatactgatgtattatgatttttctttgttcattttgatgtctctcttgtctgctgagctaagttacggcggtaggtgtgtgtggtggggattccgggggggatgtggcgaggagttggtgaacggcttgcatttctggccctgagggtgatggcatttgaatggctttcataggcattgggtgggcatggagggcagtgactttgagtagattgtggccagtggcctgtgattttcaagcaagactcattcttcccgtggtttaattttttaggcttgggaaacccgctacatgcttttgctctggctctccgtgacctgcctgatcccttttgatttttctcgccttgacgggaacctcctcacccagcctgggcaagcacgaatgtccataatggaccgtattctccaaatagcagaggtaaatatcatgcagataattagctgctaattagtactcactttcatgttcatgctgtcttgatgttagtggtttactcggtaagcttctgatatgtattcaactgctgtttttttcagtggggtaaaatcccataggataacttattttgaaattgtgataattcatgtaggggtcaggttgagttagcaaatctcatttctttgtagatgatgcaaatactctgttgagggtaatcatggcagataaggaagggtttagtggcatggtgagagagaataaggacccattttacatttagttcttaacgttatataaataatagatgctcatttgtaggagaactagaaaataaagataagcaagaaaaatactaaatttaaatttatgaaattctagtgccaagagataagttgtttattttctccgaacttttcctgatgtaaatattatgcatataaacacagcttattgtattagttatctattggatcat

SEQ ID NO: 2553 - DNA, 1177 bp, Homo sapiens
ggatctgaggtttggaaactccctttatgatgctcctgtgcagatgagaaaacagcaccccaggacctctgctcgcacacattgacctggtcatgttgtgtgggtgccagtgtgtgtgtgtgtccccggccacctgccctcccctcccgtcctgggggttacaggtggactttggactcacagagctgtaacgctgatctcattgcatagataagaaaccatgggcccggcgcagtggcgggtggatcacttgaggtcaggagttcgaggccagcctggccaacatggtgaaaccccatctctactaaaaatacaaaaattagcggggcgaggtggcgcgtgcctgtaatcccagctactcaagaggctgaggcaggagaattgcttgaacttgggaggcgaaggttgcagtgaaccgagatcacgccattgcactccagcctgggtgacaagagcaagaccctgcctcaaaaacaaaaacaaaaacaaaaacaaaaaaaaccatggttaccaacgttgactaggttttgatattgaggatgaagaatggaagtacatttaggtgtcttgtaattctctgacttcctccatgcttagcatttctttttccttagcatcttcaattttcttattttttttttcttaaggaacttgaacattctgtaggatccaagtaccgttctactaattgaatttgaatgcatcatgatcagtgcctcaaaattttatttcaaaagtccatgattaattcacactggccatgatgctggtgcactttgcccctgggattggcacaggtggtgactcgtggaatgcagcaccctgtagacgacgcacctcctctgctcatggcccccacctgccccgcccccagtgcctctccaaggctgctctgttggcctcggctcctgggcttcgggggagcggtggaaagaacacgtgggtttggtgtttgccacttgctggctgtgtggtcacgagaggctcctccgtaggtggcagaggtgggggttcgaggagacagtggcactgagccccgcacgcggcgggactggtgactctctgcccgctcctgctctgtgcagcaattgccgtccctcccaccacggttcctggtggccttgggatgggttcccgggggtctcctgctgtccggccccaactcctgttcccagtg

SEQ ID NO: 2554 - DNA, 1204 bp, Homo sapiens
tacctgggaggctgagataggaggattgcttgaggaggtcaaggctacagtgagtgatgatcacagcactggagaagggacacgtcagccacgtcatgaagccccttgagccccgtccctgtggagaagggacacgtcggccccgtggtgaagtctcttgaggccctgaccctgtggagaagggacacggattcatctgtcactttctcgtgacactttgtggaaataaactgcaggttgtttgtgacaagctgttcttttccgctaactctgtcaacgttaattgcttctaggttttcacctcaaatggccccacggtgatcatgcccacctggttctgctcgcgagcgtggttctcccacgtgggcccctttaacgagggaggtcaggtaagggccgaaggcgggaatcaggtccctcccccaggttcggggccctgtctctgtgtgtgggctctgcacactggccaccctccgccttgccatgcctccggggctctgcagatttaggaaacccctgcctgagggtcctcccggtgccccctcctggcacctgccagcatcttagttgttttgctgaaagcagggggtttctgcatgaaggctgtgggtgccctgggcatctgcacctgacctacactggctccaggttactgcatcctggtttaaaagctgtgtctgggaaagcgcaggacacggaagcttttggcagagctgtctctgggacaacagagggagaaggggagcccatcctccccccgggggtgcacctgcaggcgtctgtgtccccgtcccccccatgggggtgcacctgcaggcgtccatgtccccgtcccccccgtgggagtgcacctgcaggcgtctgtgtccccatcccccccgtgggagtgcacctgcaggtgtctgtgtccccgtcctccccatgggggtgcacctgcaggcatccgtgtccccgtcctccccatgggggtgcacctgcaggcgtccatgtccccgtcctccctgtgggtgtgcacctgcaggtgtccatgtccccgtcctccctgtgggagtgcacgttcaggcatccatgtccccgttctcctgtgggggtgcacctgcaggcgtccgtgtccccgtcctcccgtgggggtgcacctgcaggcgtccgtgtcaccgtcccccccgtgggggtgcacctgcaggcgtccgtgtccccgtcctcc

SEQ ID NO: 2555 - DNA, 1119 bp, Homo sapiens
cctgcttcaggatatcagagttatttagatgagctgacattcactctatgcttagaaagatggagttgaaatttaccatgtggtaaagaggaggaagagtatgcagaaaacaacattgtgaacaaaaccatggaaggatgaacatggcatggtgtttgggaactggggagtgggaactagaaagggatgtctgtggcccaggtaagggtaaggagagagattggtgtggaagctgggacacaggttgtgaaagctcttgggggaatcacactataacccaatggttcccagacttgctggctcatcagaaccaccagtgaatctatttttagatgagattcccaaaccttgcttagttctactgactcagaattttggcagtagaatctagaaaaagttctataattattaaatgtgagttaacttattccaggctatactgcaactaagggcagaaaatatgcttctcaaatctcttggatgtgcagggtatataatatcattgaatctaagtattgttagggactttagaggtcacctagtccagtctcatctctggcctagactgcttctctgctgtaacatccctggtgggtggtcattcagcctctgctgaatcatgctcattagtggagctcactgtttgagtcctgttagacaaatgtggttattggtgtgttcccttgtattgagttgaaatctgctgttttatttcacccactgcttctaggcaatatccctcacgtcgcattccagatatgatcttactagtgcagagtacagctggaaatatttcttccttttttctggacatagtatattaatgcactgttttgggcttagatcaccctagatatttttcctccatataccatgcctaagtgactacttttcttaaacacttatgagtgttagtaagtactcattgccttaaaatagaaggaagaatgagtagggatataaaagtattctaagtagtctagatagactacgtagaccttttcttaagaaaaatcttaattttgttgttctttaaacagtaactttctacttttccattctttcccctgaaacaatactgttattttaaatgttgaatcatagttaatatcaaacctt

SEQ ID NO: 2556 - DNA, 1213 bp, Homo sapiens
tcttttgtatgctttgtttggccatttgggatttgagtagggaccaggctttcccagaataggcttttcaaaatgaaacttggcttttcaaaatgaaacttatcttttcatccaaataagatcttctagacatttctttgaaaatataagcattgttgaatgatgtattttagacactgtcctataaaaatacacgttccctttttttgaattgcacattaactttattatttaagaaaaactaatgcccattcttatttctctcttttagtactgtcatctgcattataacggactgtgatgggatcacatgagcaaattttcagctctcaaaggcaaaggacactcctttctaattgcatcaccttctcatcagattgaaaaaaaaaaagcactgaaaaccaattactgaaaaaaaattgacagctagtgttttttaccatccgtcattacccaaagacttgggaactaaaatgttccccagggtgatatgctgattttcattgtgcacatggactgaatcacatagattctcctccgtcagtaaccgtgcgattatacaaattatgtcttccaaagtatggaacactccaatcagaaaaaggttatcattggtcgttgagttatgggaagaacttaagcatatactgtgtaaacagtgccatacatttctaaaatcccaagtgtaggaaaaatatgcagacatacagatatataggccaactattagtaataatatgaaatatacttaaagagcttttaaaactttgtatttttgtacaaaatatttgtcttttacaatttttttcctttttttttttttgtcattttaccgacataatacatggagccaaagaaaacaataatggtactaataaaaactcctagggtttcctgtcagatttaattctacccagtggcaaagaattttttcaattgtggctttaaaaaaataattaaatatacatgtgtatatatatatatatatatatatttttttttttttttttttttaatgtttcatttcctcagaggaaccaatcacttggaatgtctagaaatatccttgcagattttgccagtgtcaatcaagcctgcacacatgcacagtgaagcgggctgtgcctgccttgagcccatcaccagccaacattcttgacgtgtgcctgaccagacacagaagaaatgggcaactcaagacgtgcttccactt

SEQ ID NO: 2557 - DNA, 1211 bp, Homo sapiens
ttgttttgaacaaatgagtgggaaacgtatttacagagaaagcttcttgggctggctggctgtgggtccagttgtgtcttatttctaaaaactaagaagtttatataaacaaaaaatcaaagtaggaatttaaagagagcattagtataatttttaataacttacacgttttatctcatgggtttcataatgtgtatgagcaaataaccggactcgccccatacttccatatgtacatgcttagaatgtaatgcataggttctgtgtgtgtgcacgtatgcatctatgtgtatgtattttgtaaataatctataataatctataaaatatatttataaaataatctataaaaatataaactattaacagtagttacctctggggggtaaaattggaaaaggtaaaggaaactcacatttttaccttatatattgctccttgtttgaatttttcttttaatgagtatgcatttgtatatcttgagttcttagcatatggcctggcacttaataaacattttattcaatgtttaacaaataggggaatcagtcaattgagtggcacaaaaattatactcaaacatttgattttgagaggtttaggagaggaatgatgataaagaaattgaactgagggcttaggaaagagagcatggtctggatgtattgctaaaagaggccgtcggaaataaaggaatactttggggttaccattgctaaactgcgtattttctacccttaaaggtgccccaagttagatacctgtctggcaaattacgtagtcctaatcataggtgttcttaagggtttatgtcttgactgaaaagggacaaatcacctggcaaggagaccactacctaaccctggtgactcttaccttacagggctggacagacatgacagtgtgaaaggcctttgtactctcagccatgtggcttgctggaccatctgaaggcctactgagactgtcctgggaaggggacagcaatccagtgactcacccagcagtaatttgcctgggttgactggataggcctgtcctgtagattggtatccaaagattaatatgatgggtgagaacttttagctccaatccagctggtgtgacccaaatgcataaaactcactcttggcttctcatcgaggaactaagttggagatattttaaaatgcttgaatggcagtttggagtctatttgaaaacactggcag

SEQ ID NO: 2558 - DNA, 1277 bp, Homo sapiens
gttagccaggatagtctcgatctcctgaccttgtgatctgcccgcctcggcctcccaaagtgctgggattacaggcgtgagccaccgcgcccagcctacattcacttctaaagtctatgtaatggtggtcattttttcccttttagaatacattaaatggttgatttggggaggaaaacttattctgaatattaacggtggtgaaaaggggacagtttttaccctaaagtgcaaaagtgaaacatacaaaataagactaatttttaagagtaactcagtaatttcaaaatacagatttgaatagcagcattagtggtttgagtgtctagcaaaggaaaaattgatgaataaaatgaaggtctggtgtatatgttttaaaatactctcatatagtcacactttaaattaagccttatattaggcccctctattttcaggatataattcttaactatcattatttacctgattttaatcatcagattcgaaattctgtgccatggcatatatgttcaaattcaaaccatttttaaaatgtgaagatggacttcatgcaagttggcagtggttctggtactaaaaattgtggttgttttttctgtttacgtaacctgcttagtattgacactctctaccaagagggtcttcctaagaagagtgctgtcattatttcctcttatcaacaacttgtgacatgagattttttaagggctttatgtgaactatgatattgtaatttttctaagcatattcaaaagggtgacaaaattacgtttatgtactaaatctaatcaggaaagtaaggcaggaaaagttgatggtattcattaggttttaactgaatggagcagttccttatataataacaattgtatagtagggataaaacactaacttaatgtgtattcattttaaattgttctgtatttttaaattgccaagaaaaacaactttgtaaatttggagatattttccaacagcttttcgtcttcagtgtcttaatgtggaagttaacccttaccaaaaaaggaagttggcaaaaacagccttctagcacacttttttaaatgaataatggtagcctaaacttaatatttttataaagtattgtaatattgttttgtggataattgaaataaaaagttctcattgaatgcacctattaatcgttttagttgctattcatattctcattcgttttttaaaaactgatatattctgaatttattcttccattgagaaaaaaatgttcagttacttgtaactactgagcagaa

SEQ ID NO: 2559 - DNA, 1197 bp, Homo sapiens
ccttcaggcttaagtatattgagtcaaaatcttccagtctggtaaccacaaaaggtatcttcttataatgtgcatttcttggaagactgggaaggttggatgcattttcatatgttaattggcctttcctgtgttgtgaattgtctcttgataggttttcatgtttttctgttggactttttcttttcatgcataagagttgtctgtattaagagtgtcaaccagattccacatgtgtacatttattatatattgagagaacaagaaagcatgagcaagtacaaagatattttagcttctcttaaacttctgtccccacccctgcccctctcaatgtggaagttactttatactttaaaagacttttccaactttagattatgaaactacttacctttaattttttctaatacttttagaagcaactgccttttatatatttagcttataattcctttacaatattttcactttagtcatccctcaagatccatgggaaattgtagagccttctagaacctcctgtggataccaaaatccccagatgctcaagtccatgatataaaatggcatgtatttgtatataacctgtgcacaaatcccccatatgcggttttttggggtttttgttgttgttgttgttgtttgtttgttttttttagacagaatctcactctttcacccaggctggagtgcagtggcataatcttgacttactgcaacctccgcctcccagattcaagcgattcttctgcctcagcctcccgagtagcggggactacaggtgcgcaccaccacacgtggctaacttttgtatttttagtagaggcagggtttcaccatgttggccaggctggtctcaaactcctgacctcaggtgatccacccgccttgtccctgcaaagtgctgggatgacaggtgtgagccactgtgcccagtccccctgtatgctttaaattgtctccagattgcactattcacaataacaaagacttggaaccaacccagatgtccctcagtgatagactggattaagaaaatgtggcacatatacaccatggaatactatgcagccataaaaaaggatgagttcacgtcctttgtagggacatggatgaagctggaaggcatcattctgagcaaactatcacaaggacagaaaaccaaacactgcatgttctcactcataggtggga

SEQ ID NO: 2560 - DNA, 1219 bp, Homo sapiens
agaaaagtaacagaatgtttatgaattagacctttggattgaagaaacttaaatgaaactttctctttctttctaattagtaaaatctcttttagatgttgctgccattgatccatgtttctctgataactgttaagataaaattatattaagctgttatgtattattctttcaaaatgaaaatgatcttattagaatatcatcaaattattctattttaatgagttcaaaaaattagggtttaggttaataaacactatataaaatggtaaaaatttgtctaagttataaggatgatatcatcctgaaccttatttcttttgcataaagtgttaattatctacagatcacaggttattttgctattcctcccaccattgcattatttgaattttaataatggacttttgtatgtacaatgtctccattcaaaatactgactcactcttgatgtaacttgtgacactaaattagaacctcaaacatgttcagttgaaccaaactaaattaatgttgtgtgctgctccaattaccaatgagaagatgttttatcctatcactataattttccagtggatgttggtagggaaagtgggaagtgtcaaagtatgaactaattaagcagatctacaataactacattttcattctcataccaccaagaattataacagtataactgaaaaatattgccatccacttttgagcacagtaacagatcattgattctactttctacaaacccctggtaaattctctagactgtattaaagatgactaacatacatatctctcattgcttacacagtcttttacataaataactcataggatctcactcaactcagcgaagtaaataagacctttcaaaggtgtgagaaaactaagcttcagaaacatttactgacacctaaagtgcagcgttaccaagaaatgaaactataattcaaatgcatcatccaactcaacatttcatggttttcagtataccacacatatatttatagacattatcatatgtattatttcttctagcaagaaattaagtgaaattccctcacacaaattttaagatggtaaaaatgagaacaccataaattcctccaatcagatcaagcttcacattgatcttctgtctctcacagccaaatctgccccttcacagccttgttttaaattttgattgtctataagaaaaccacaaacttccaagagcatt

SEQ ID NO: 2561 - DNA, 1221 bp, Homo sapiens
tagatggttgggtgtaatgaagaagtctgagatcatagaaaagctgtctggcttttctggaaattaaaccctgacctttgtctcagtagcagcaggctttaagtagcacagcccagtaccatgtcttggttttggtgatttcttatacgactagggtgtaataaataattttgaatgatgccttcacattctgaagccataagcctgttaaacattaggtcacgaactttttctggtttgtctaagacattgttggccctagcactggaagtcccacatccaggaatcccctcgaactagggcaaactgaaatgattgaccccccccccctttcttaaaaggtataatgcagctttcctaggattggatctatttctctgtttgttttgtcgtctagatttcttgttatatcagtgccctcccatcaggtatctccactatataagcggcaccaaccagcacatttaactgagggaaggggtgggcgtgaggcgggaggatggaatgagggatatagagagcaggaagattaatgtcatattggagttggactgcagggcttcctttacacaataaatattgtatgaagtgctgatgtaacctttactgcagcatgacatgggatttggctgtttttatggctcatgattaaagtaagaaacaagtctctgattagatgattctttttcccccacagacctctgtccttcatatttccaagaatgctattttatttatgcaatccatctaactcagacaccaaaatatgtagatcacaacctagacaacataaagaagcattctttttattcttggcctcagattatttataatctaaaatgctagctttgatgagcattgcagggaaagaaagagttgagactggcagattttacctccttttaaaaagtatactatctgcaagtggtgaaacccattgatattttgttgaggttgcataagaaaatagatgggtttttaatgatattagtttgttttagttgcagatagctaaatacagtcagctaaaaagcaaattgagctctaaggaacagaattaaataatttggttttctccttctggtctatcctattcagtaatttaattatttgtgaaacttttaaactcaattgactcattgaatttgttcaagttggttggtgtatggtgttacactcattatatattttttggtcctggtccagaaattagcaactcag

SEQ ID NO: 2562 - DNA, 1255 bp, Homo sapiens
ggaatacattttgatggccacaaaatgacataaagaagacacatatctggatacccactttcaaaatgctctttgttattgtgtctttcaaaagagaaagccactttcctagtctttgttgaatggtaaatgttccttcaagagttgcaggaagagcatgccttgcttgcgccatggggtggggctgcaccatcttgcttgctgcgtgtgcttgtattgttcatcatacacaattcatggtttcttttcaggaatttttgaagtcgcttgtccattctatgaaggtcagtttggttaaaattaaagcattttaactgagtacttacaaactgtagtagacccagataggctgaaagcaaaagtaggatggagggcttggcttcggtgaggaccaagcctcttctgtcagccactcctgtgcgactgtcaggcccagggatccactcagggaaggtacctgtgtcaacctcaatattaactgttatcaaagcttcctgtctcttttattttagccagaagcaatacttttaatggattccttccacgtccaaatggatcatgtgtacccctcctgggcacccaccggaagactctgggtattgtgtgcgttgtccgcctcagtgacgaggatcttcataactttccttcctgcaaaaaggaacattagttttcagtgtttccaacaattatccagcaataccatctaaacaccattttctgtattctaggagcaagctgaagaggaaaagaagcccaaggatagcacaacccctttgagtcacggtaattatcaccaatatttacagtggtagttcacagtgaacaaattttaagtgaatttttattagattgcttagttgttttaggtttattaattaaaatatgtgataataatatctaccatttattcagggtattgcatactcttctgcagactttatcagtgtcatctaaggttttcaaatatatgcttcaaaaacatctgaagctcttgttatctcatttatttgccttttaaaaaggctttaaataaaacaacttatttgtaaattttctctgtgaacaagaaaataaagagatgctatttagttttttaataatcctttgtgtgagcttttcccagactgatttgatcttctaatgattgcattgtattgaagtcatgttgtagaggagattgtgcattttctctaaaatgaatactcctcattatggttattaatacatcaataggttttagataatagccttttca

SEQ ID NO: 2563 - DNA, 1177 bp, Homo sapiens
ctgtaaaaaatctcatttcaaataacttttcaaagaatgtctaccactgtttatgaatatacagaagaatgatcatgattaattggattggtgaaattttttcttattttctgtttcagattgctatgctatgccttgtatgactaagacctcttaccaagaatacgtgtcagaccatgtgagtacagaagctgtgcaggctgattgcagtgaatcctaattggttaggtcagctaagcaaaaaagcaaacattttatcccagataagaccaaaagcaataatatctattttccccatgatataaattctagatgaggtagtaaacgcattgccctcccccttgtcttattattatattaagtactataaaaccaattgcaaagtttttgtcaacttatcaggttatttatagtaaccaactatgagaagtataattgaaagcattttcttgtttgcttctgtaattctgaaggggtcacacccccatccccaacttcttatgtaaccctgttttacagaaaaccactgccaaggagtgcgggggtggcaatgaaacagcccaacaggaaaaggaagcttaatatggattccaaagagcgtttggatcaggacggacgcttggtaagatgtccatccctggacccttcctcacagtgtgtgatcgctaccaaaatgcaccatggaatagtagagttcacataaccacactcaggggcttttcagtcacttgaaacgatgtggcttctgcttgagctttatgtgtaggggtatagaatataagtgttcttaaagtctgatatatattttaaaaggtgatcttaactttaaaggtgaaaggagaccttttcttttacaaaggtggaggtaatcaatcattctcaagtaagagaacggaagctgtaaactgcatggggttacattagggttctccagagaaacaggaccccctaggatgaccgtatgtgtatatgtgtgtgatatttttgtgtttgtgtacacacacacacagagcgagagagagctagcaagcgagagagagggtgagagagagagagacttatcttaaaaagaggaattgattgaggcaggttgtgggggctgacacgtctgaaatatgcagggcagcctgataggcaggaggcccagggaggagttggtgctgcagtcttgagtcca

SEQ ID NO: 2564 - DNA, 1233 bp, Homo sapiens
tgttagcacactgagtttttatagttgcacatcattcctcattgtgccttgttttatccattttataaatagagtagatatttgatataccactctgataactcatataaaaatatcatcataaaaagcttaatttcatcccttttatgttggttttaaaaggtaaatgcttaccatattttataattgagaactcttacatagtagaatccattctataatacatgtgttgacaaagctttagagaaagtttcctattctcttccatttcccctgcccaaagtgctgacataggcagtgatgaagaatctttaccaagattttcagggtgtacctatgaaattgctttaaatgcactgctggtgtaaataattagcaagcaaagcgtttctgtgacttcaggtaccagcttaaagagcactagggatggggaacgaatgccaaatcagactccacctagagcaccaggaaacagcttgtaccctggtagggaaatggtgttgctgaaaggggaggctgagccagtgcgagactgaacttgtgcagccttagccaagacaaagcagtgtttttcagcagacggctgatgggacaggaattgaagaagagaattgactcgtatgaacaggacagggtgaaaatgctgggaattattatgggaaacaaaactatctatgttcatattttgtaatatttcatttgttaagtttatatctggatataatgttctttttaaacaagtataatcatatcgtcggaggttaagattatgaaattttagaatctctattcaagatgatgttcactccaaatacactacagaatttagtcaacattttatataatgtttcaataaatgtttctttcaataaagatactatgtgcccttcatagtaataaaatctcaatcttaaagcatgaatctaaaacataaatatttatattacagactcaattttacaaaattactaattgctctagtgcatatttgaactacaagcaactttttaggaatacctctttatacgtctacatattttagtatataaaaatagataatgctcttggacacattttgtattattcatgatctgaatagtagttagttaaaagatcatttgtaatattatgatcaactgttataaattaaggtcttaataccttttctgctctttcaaataactctaatgaatattcaagatattttagccttttaaaaagttgagatttagc

SEQ ID NO: 2565 - DNA, 1192 bp, Homo sapiens
gatcatttgaggtcagcagttcgagcccagcctggccaacatggtgaaactccgtctctactgaaaatacaaaaaaatcagccaggtatggtggcacacgcctgtaatcccagcttaccggggaggctgaggcaggaaaatcgcttgaacccgtgaggtggaggttgcagtgagctgagattgtgccactgcactctagcctgggctacagagcgaggctccatctcaaaaaagcaccaccaccgccaccaacaacaaaaaacacacaaaaaataagatgtttaaatcagttaatactgtgatagaaaaaataaacaaatggatggcatcaacttctctatccttttcttgactttttttcccttcagatctttctggtgcttgaatacatgatttaactcatattttaccattttcttcttaaattggctattaactagcaaagactgtgttgtcattactgggtagaattttctttatgtgtccaggattaaaggatatattatgtaatagacacaaataagtgaaatagaatgatagttttaatggttttcttgtaaatctttttttcttagatcagcaatcgagtcctgtatgtgtttttcacacatgtgcaagaactctttggaaatgtggtactaaagcaagtgatgaaacctctgcgatggtctaacatggccacgatgcccacgctgccagagacccaggcgggcatcaaggaggagatcaggagacaggtgtgtgcaccctgcctgccacagcctgcctctgcattggctgttgtggagtccagtggtgatgggctcttgtttcctgaacactttctgtgtgtctggagctatgttaggcacactgaagtcagaaattcccatctggtactgtttcatgccaaataagtcagaataccatggtggaaagagcatagtttttggaatcaaaacacctggctttaaattcttgctctgatctagttaactgattttaggcaaattcttaaccaccttaagcactggtgttcttgctttaaaatggatcctcttataggattgatgtgaagattaccccaaatgagataatatatgaaacatgccaggcacgttgtaaatagtctaaagatgtttgccttttcttgacaaggttgctgtcatcagccatattttatagataagaatattaaaattcagggaagtta

SEQ ID NO: 2566 - DNA, 1205 bp, Homo sapiens
ccagatgcagcgagccaaggccgagcagcaggcgcaggaggacgaggagcctgagtggcgcgggggtgccgtccagccgcccagagacggcgtccttgagccaaaagcagctaaagagcagccaaaggcaggcaaggagccggcaaagccatcgcccagcagggataggaaggagacgtccatctgagcagcctgcgtggccgtctggagtccgtgagactgaaaggacccgtgcatcttactgtaacccgggggccaggccggctctctcgctgtacattctgtaaaggtgtcttctcttctcagactcttcctctgtcacacgtctgactccttcacgtcaggctcaggttccatgggaggacgaagcagtggacgcattgtgggctttagggacagatgagttttccagatagtgtcagcttatttgaagattaattttctttgttaacttaaaataactattttaacccttgagtggcttctttttaaaccaaaaaccgtctttctttgcttttttatcacagcagaatcaggatctctttctcattcaaggggggaaccaccccaggtcagcgctgcgcctgctgtggccgccgcgagccacgccctctgggatctctggtaccgtcactcttgcttgtgccttccacaccttctcggtgcagatccctatgggggagctgcctcacgttctctgactggtcagagcagcgcctggtgggtgttccctggcccactctcctctctccttctgcagttctaaaccacagtctataagcccgagtcaccaggacggcctgtctggccacagacaggggctgcctgtggagcctgcccaccggcccccggcagtgcagtccagcggggaggaggctgcccgttcctgccagttcctcactgcggggaccagcaaaggccttctcactgggttggtcaaaggtagtcaccttggcctggtgcatccacagaggatgttgttcaaaccagaaatcttttaaacgactgaccttccttaaaaacagaatgactccgattgcttgcttgggctagaatgtacacgtctccttgcctgaataagccatatatatgctcttaaacaaaagtttgaaattatccatatcatctcagtgaacctactggtggactcccaattgacaagattgagcaatagaaaaaaattcctttcctttgaatgatagctg

SEQ ID NO: 2567 - DNA, 1232 bp, Homo sapiens
ttccttgtgtaatgtaagcaaataggctttaggtctcagctttgcaatatgtcgttggagtagagaggtaatacaaataaccctaaaaataaaataatttaaatgttgttatgtatcttaaaatgattgtaggaatttctgtttccactacttttctttagttatttattattgaaattagcatggtgttatagaatcccaggattcttaaatgttaccttctctaactaatatatattgcttgactatctagacttatacttaacaggtatttacatctttgaacacagaacagctgatggagaaagaagcattataaataatatacataaactcagtttgtacagataatccgtaatttttaatgtttaacttgtctaaatgctatatgtaatatctttcatcagtttttttaaagtaattatcctttcatattgtttttttcccaccaaataaaacaataaaaggaccagagatcaagaagccccagaggatgtacaagtcaggccagaggatactccttcagatctcagtgttagtaattccagtgtcatactggaaaacacgatggaagaccatgctgctgaggcatccgggaagcctctaggtgaaattagtgttccactggacagctctttactttgtactttgtcctcagaatctcaccaggaagcagctagtaatgagaatgataaaaaacctggtaactacaaatctatgttacgaccagaggttggcaccacttcacaagattcagctctcttagatcaggaattgtataactccttccatttctggaggactcctcttcctgaaatagatctagacatagagcttgaacagaactctgggggaaaacccagcccagagggaccagaggaagaatctgagggccctgtgcccagttctccaaacatcaccatggccaccagaaaggaactggaagaaatgatagaaaatctagagccccacattgatgatccagatgttaaaggtatggaagtcaatcaagttatttattctgaaattgattaaaaatattagtgtctatcttaaaaaaatttcatttcagaaaaaattgtcatttaataatgtattatggactgggcacagtgactcatacctataataccagcactttgagaggttgagacaggaggatcacttgagaccaggaggttgagaccagtctgggcaacatagtaagaccccatctctacaaaaaaataaaa

SEQ ID NO: 2568 - DNA, 1148 bp, Homo sapiens
cacctgtcatcccagcactttgggaggctgaggcggggggatcatttgaggtcaggagttcaagaccagcctggccaacatggtcaaaccccgtctctattaaaaatacaaaaaaaagttagctgggcggtagcggcgcatgcttgtaatcccagctactcgggaggctgaggcaggagaatcgcttgagcctgggaggtggaggttgcagtgagccgaaatcacgccactgcactccagtccgggcgacagagtgagactctatctcaaagaaaagaaaacaaaagaaaagaaacatcagtcatatcacaccacatttgtggcttcctttttttttttttgagggtggctgtaagtttcagttttattgaaatcagaggacattttatttgaaagaccaaatgaccttgttgtccacactgagtaagatttgccacatcccctcgtttggctggctctttcctgggtgagatgtgtgcagcaggctgtgtttctagctgctcatccaattaggctgattctctgggtgggataacattgagggagatcaaaaccatttgactgtcttcggtttactctcttctctctctctctctctcctcttttttgttttgagacaaggtcacattctgtcatccaggctggagtgcagtggtgccatcatagctcactgcaccctccaactcctgggctcagtggatccttctgcatcagcctaggtttattctcttgattcgagagaccctgtggatcagtcagtgctaagtccaaaagtcctttaaaaaatatatgtatatttttgagatagggtctcactctgtcacccaggctggagtgcaatggtgccatcctggctcactgcagcctcagcctcccaagctcaggtgatcctcccacctcagcctgccaagtagctgggaccacaggtgtgtaccacccagcccagctaatactttttattatttttgtagagatggggtctccctatgttgcccaggctctttcaacattttaacaggaaccttgggctcatttgtgctttgcgtagggaggtctgtcttttctgggtgaagttttgtgtgtggctggcattcagcttcctgttttttagccatgagacacctccctgaagtcttgctatgaccaag

SEQ ID NO: 2569 - DNA, 1192 bp, Homo sapiens
taattgaaccataaccatgtaatattatgtaaaggcctggaaattactgttgctaaaaaaagtcatgtagtttcatgtagtgtagcatccttggcatcgttttccaaaatttgttccttctcccttttttttttctttcgtgtgtggcatgagtgtgtatctgtgtaaatatgattgtatatgtgttactccgatatgtaatccatttcactggctgagtttggcccctagccatgtgttaatataaagtaggcatggcttcccaatggaaatctctgagaatgacagtggagttgtgcaagcattttacattgccacataattgacttgccattttatggttaaaaacggcacattaggcagttgaatatgacgttaccttgcagactaaaaggttgaaggcccgaaactaacttttagctaacaataagggctgtgccccaatggaaactgagttcattttctgagaaaggtttggatgactgaaatatttcctctacagtcaaggactttggcatgtggtggctgaaactgagcttttttgtgtgggctccagttctcactgttctgcaatgctcatggcaagttgaatggtgagctagcttataaattaaagagctctgaactgtattcagaccgactgggtatctagcttactgttttaacatcattgttgaaaccagaccctgtagtccagtggtgctgccctgttgtgcaaactgctcctttttctcgtgtttttgtaaagagcttccatctgggctggacccagttcttgcacatacaagacaccgctgcagtcagctaggacctttccgccatgtattctattctgtagtaaagcatttccatcaacaatgcctaattgtatctgttatttttggtttaacacacactgattcatactaataaatattttcagttttaccgtttgtctttttcttattacactgttcagtagaatcattttttaaaaatcacagttaactcaaacagagaatgatgattccccagggaaatgtgtgcacctgcacatatgcagacatgcataaggatgttccctgaaacactgtttgcagtagcaaaatgttgccttccactaaggaaatggaaaaatgaaatgcggcccagccacatgatgaaagctatcaggtaatgaaaatgaactcactgtcatgcatcaacattgatc

SEQ ID NO: 2570 - DNA, 1183 bp, Homo sapiens
cctatagatttttagctccagtagtctcgttagtatgcttgtttttaaaaaccttttgtgtgtgtgttttttttctaggatgaaggtttaaggctcagaaaggtagcacattcggataaacctggatcaacctcaactgcatccttcagagataatgtcaccagtcctcttccttcacttcttgttgtaattgcagccattttcattggattctttctagggaaattcatcttgtagagtgaagcatgcagagtgctgtttctttttttttttttctcttgaccagaaaaagatttgtttacctaccatttcattggtagtatggcccacggtgaccatttttttgtgtgtacagcgtcatataggctttgcctttaatgatctcttacggttagaaaacacaataaaaacaaactgttcggctactggacaggttgtatattaccagatcatcactagcagatgtcagttgcacattgagtcctttatgaaattcataaataaagaattgttctttctttgtggttttaataagagttcaagaattgttcagagtcttgtaaatgttattttaataatccctttaaattttatctgttgctgttacctcttgaaatatgatttatttagattgctaatcccactcattcaggaaatgccaagaggtattccttggggaaatggtgcctcttacagtgtaaatttttcctcctttacctttgctaatatcatggcagaatttttcttatcccttgtgaggcagttgttgactgagtttttcatccttacaatcctgtcccatggtatttaacataaaaaaaaataaaactgttaacagattcttgctcgatagcttgtttgtgtctgtcgtgttattagagggaactccactatatatggtcacttgaaattatgatgcaaaggtttctcttgcattgaaaccctcttggatattacagtatttttaattgaaagtcctaattctgttaaggaaaggagttgattaaattttaaggtaccactggtattttgggagattataatcagtttgttttcaagataatagaaaataaggtccatgagaatagaagttatgtgatttcagtgagttgatgtgtacagcatggctgtgctccatctgatttaccccattcttaagttctgagagtatgttctcaaggaa

SEQ ID NO: 2571 - DNA, 1174 bp, Homo sapiens
gctgttttctcttgctgtaaatttactttactacctgtgaagtaaaatgtttttaaattagaaaatgattagaaaaattctgtatttttaaactatgaaggagcgtttataatgaagtttgattataaggtccacactggttcgcagagctacaatacttactttctattgtttgtgattttacttgatgatggttttacttgggatgaagtaaagtaaatctgtagacatgtgctgaagaatgaagaagtagcacaggtattgaaaacacgtgaactactgtatcaatttttttaaatacagttttccttaggtatttgaaataaaaattataagtagtttaaaacagtacattttcttgaggtgtttgcaaacttatcaataaaaaatgtttctcttatttgcaaactgtagtcataataactttgtacttcagtaaaacttcagattattgcgtaatagaaatagtttaaaatctgtgcagtgttttgttagtggttttgggaattatgtagttttaaactatattgacaggtattgaattacttcttttttacctgtttgtaggatttgtcttttggaaccaactgggtcagtgatttagttaactgtctttaaatagttgatctatagaaactattgatttttttcttttttccttaactttgacttcgttacttccattcagtctttttcatgctgccaagtaagtattcttcatgttttcatgtatttgcaaattatgttttaaatgttgctgtttttctgtaggttggtaattttttcccaaattataaattttgtattgatttaaataataatcatttctctttgcttcagtttttacctaaaccttaaaaaccaagacttactcctaactgtaagatgtaaagagtttaaattaaatttgccataatattttattaggagcattttgttcagtagcctatgggaaaaaaataagttaggatctcttttttcctctgtttgatagttaatggtgcctgtggagatgaagcaggaagctttctcttgccttgtggagagtagttatttgttggccgaggcaggcggatcacttgaggtcaggagttcaagaccagcctggccaacttggtgaaaaacctcgtctctactaaaaatacaaaaattaactggatgtggtggcacgtgc

SEQ ID NO: 2572 - DNA, 1182 bp, Homo sapiens
ctggcaatttgctgtaaatacctagtttatttccatggagctaaagttgtaaaacttcctaacaggaaagaggtgtcagggtgagctggaaaatacagtaggcaggaagtcaggggacttgatttctcatcctgcctcttcctggaacctcctctgccaggtcatgcctggactcgttcctcattccagtgttaaggttctaggattttttttctttcttttttttaagagacagggtttcggccaggcacggtggctcacccctgtaatcccagcactttgggaggccgaggtgggcagatcacaaggtcaggagatcgagaccatcctggctaacacggtgaaaccccatctctactgaaaatacaaaaaaaattagccgggcgtggtggtgggcacctgtggtcccagctacttgggaggctgaggcaggagaatggcatgaacccaggaggcggagcttgcagtgagccgagatcacaccactgcattccagcctgggcaacagagcgagactccatcgcaaaaaaaaaaaaaaaaagacaaggtctcactctggagtacagtggcataaccatggctcactgcagtcttgacctcctgggttcagatgatcctgccacctcagcttccagagtagctaggactagaggtgcacactaccacacttagctaattttcttggttttttgtttgtttgtttttagaaacagggttttgctctgttgcccaggctggtcttgaactcctgggctcaagcgatctgcccacctcagcctcccaatgtgctgagattacagggatgagccagtgcgcccagccaattctgtgattctaagaaagttcctgtaccctttctgaaaagaccctggttgatccattccaggcagctagaactggtgggacttgaaacggggaagtcaattactttagaaacctgaaagtaactcttgtgggtggttcttttctcctccagctcagaaatatgtgcccagggccgccctggtggacttagagccaggcaccatggacagcgtgcggtctgggccttttgggcagcttttccggcctgacaacttcatctttggtaggttccatctttctcactttcttcttcttcttttatttttttaaatcaaatattttatatgccagatttaaagcatcatgtgtcatagaaaa

SEQ ID NO: 2573 - DNA, 1232 bp, Homo sapiens
ggcatagcttccagttcttccttccgtgtcctggtttcttgttcagttttacttctaatccaacaacaaaagaaatgtctggctggtctcagctagagtctgatgtgtcttagagcatgtgtgcgtatctgaaccatcatccctgctctcatctcagctccctccaggcctgagcaccggttccttttgtcccatacgtcatgaagtcacactattgggaaacctgtgcttccctctccatggcttaactccctgtcagtgtcggagtgtataagaatgcttgtaaatactgtaatatatttattaatatttgaaaggcattcattcagtggacagtgggaattaactctcccaaggcaagtgaaaatgaatgattgacgtacgttgatttaacaatcttactagattttaattcttaaggatttcaaatgaaaccagaaggtggttatgtaagaggcttaaaatgatcttatgtttaaagagattctgttattagcaccatgaactcgtactatgaaatttttaagccttttatttttctaactatattactgtaggactggatattaggtgtcatataggaaacacaaaagtttattgctgtttgctaaagcaaaatagcagaaaattttgtatatgcaaaactgttgaaggaccatagagaaatgtgtactactgacggggcttttactaggcttcctgcgtgtgtaaaagtcgaggtattgctggcattcagggtgacatgatggtactaaatgttttccattaaagtcttctattttaaaatttagagaaaaataaaatggctttccatcagactttctgtgttgagttgctatcgtaagacggtgatgtcttttggtaattagctgtcagaaatcacctcaattgggaaggcagggtacttttataagcagcctgtgatctttgaagaaatacagtctaggccgggcatggtggttcacgcctgtaatcccagcactttgggaggctgaggcagacggatcacctgaggtcaggagttcaagcgattctcgtgcctcagcctcccaagtacctgggattacaagtgcccgccaccatgcccagctaatttttgtatttttgtacatggtggccaacatagtgaaaccccatctctactaaaaatacagaaattagccaggcgtggtggtgtgctcctgtaatcccagctactggggaggcaaggcacaagaatcgcttgaacccgg

SEQ ID NO: 2574 - DNA, 1179 bp, Homo sapiens
aacttctgaaatacattaaaagctgagaaatgccatcattcggatgtattcagccaacactacttacttagtgcacagttttaatggcctaaccctcaaaaaggccgtttattgttcccacctaacactactctttttctgaggatggagcaaaacagagtaggtatcaggcacgctgatttaattctgtcatctctgaaagtagttcctgttgaaagagaaaactgtgatcgttaattttttaaatgcgtattttaggcattttagagcaaatgatataatctttctgagtaaactcatccccctgtcctcttatactaataagcttctcatgttaaaaattcaaatgcaggatttttcccaaagcatttttaagcaaatgtaatcttccttaagttagcttgaacagagatggttttgcattgatttttagtaagaagcagtagttcttcagactacttttttaagtaaaatgctaatgtttgacaagtttgcaacctagattgatttttgtttttctctgattgaaagacagaactgattgttaaaactccataaactgactgcattcatagtcatgtgctttctcactggcgtgttggattcctgagtgcctgtgagcgatgctgttgtgtgtgtgtgggagtgaattataatgtgtttgtgctgagaacattcagtttcagtgtcactgcaccacaatggccccttgcagcctggcagggtccgaatgcacaagactgttctgtctttctctgagatccaccaatcaagtgcggggccggatggggagcggatgggtgtgaggctcttattcaatgagatcagttacatcaacatcttccgcagctgcttgtagggaaaccattaacacaagacagccaacataaatatttattatgaaatcttttacatttctctagtctttccattgctgactatacatttagcatttgttgaaagtaacaacaaatctagagaactgtggggcagcctggagagactgccttttggatataaatgctccagtagtttcatgttccagttccactcgtaccattaggatttgtaaaggtgtgctgatgtaactgatcactaaataatgcttgtcagtaaaaattactaaccatcttcttttggctattctgggtaccacaaatgagttttaaaaacagggcc

SEQ ID NO: 2575 - DNA, 1227 bp, Homo sapiens
ctcatttgtttgcatcgtctgagagagatgtgttttcagtgattgaatggaactagagaagtgtgtatacatggatatgaatagatttttgttgttgtttaggcttgagttaattgctacccgtaagtgagttttcagtctttcagatacttgggatgtctgtgcatctctaattagataaacattggcataagagttctgagaggatatattctttgataactatatctgttctcagaaatacctttgggaaatgtggaaaatcaactcggttaatattttatatatgaatggcaaatacaaattttaacacaaagtataaatctaagagaatataaaaagggtttgtgtatgtgttgtatgttggtttgagggaaaaaatcatactaaacatcttatgcctcacaattagtcctagaaagctcttcattcatctccattaaccacttttttaaatgttcctaggtcattgaatctttgggaattattatttataaagcactggactatggtttgaaggagaatgaagaaagggaattaagccctcccctagagcagcttatcgatcacatggccaacacggtggaagctgacggtagcaatgatgagggctatgaggctgcagaagaaggcctgggagatgaagatgaaaagagaaaaatctcagctattcggtcatatagagatgtcatgaaggtaaggcagcgttttatgcagtacttgtttttttcaagagttgttatttcttcttcttttttttccccccctggagagatggtctcactctgtcgcccaggctagagtgcagtggtgtgatcatggctcactgtagcctctgcctcatgagtagctgggactacaggtgtatgccaccacacctggctaatttttaaattttttgcagagatgaggtcttgctatgttgctcaggctggttttgaacccctgggctcaagtgattctcctgccttggcctcccagagtgctgggattacagaaatgagccactgtgtccaagctgttattttttaaaaaattgaatggttgacacatatctacatttatttaaaaataataacgaggctgggcgcgatggctcacggctgtaatcccagcactttgggaggccgaggcaggcggatcacgaggtcaggagatcaagaacgtcctggctaacacggtcaaaccctgtctctactaaaaatacaaaaaattagctgggcgtgg

SEQ ID NO: 2576 - DNA, 1124 bp, Homo sapiens
tgcacccaccgcttccagggctcaagcaattctcctgcctcagcctcccgagtagctgggattacaggtgatcaccaccacacccagctaatttttgtatttttagtagagacggggtctcgccgtgttggccaggctagtcgcgaactcctgaccttaagtcatctgcctgcctcagcctcccaaactgctggtaaaggcatgagccaccgcgcccggccaaattttatcaactcaattaacatcaaatttagaaatgtaaagattttatttccagtttgacgataagctgcctgccctgtgacagaccactgaaaaattcagctgtggctgacacctaggaatttgcagttacaggacgtttccaagttccatatgcgatgtcatagtgccgcctgctggctcctgtctcacaggaatgctacacatgcagacggtgggtctgaccccgcagctcacacacagttcacggatgaacctgaggaaagtaggaatgaagctcacaaatgtcatgtagaacaaaaggagctgggtaggaaaagtatagattgtgtaatttcatgtacaggaagcacaaaacaagtgaaacttcacaaaacaagtgaaactaactgtaccagtcaaggtttcgcagagaactaatgggagatctatggatatattttaaaggaatttatttaagggaattggctcatgtgattgtggggcctggctggtctataatctgtagggcaggtcagcaaaccagaaaaagtctggtaggatttctgtgttacagacttgaggcagaattccttctttttccctgctctcttgagagtctttgctctcaagtccttcaactgaatgggtgaggctcactctcattattgagggtaatctccttaaagtcaatggattgtagatattaatcatacctacaaaatatcttcacagcaacttctagacctagtgtttgagcaaacaactgggcaccatagcttaaccacagtgacacataaaattaactactgcaggctgggcgcggtggctcacgcctgtaatcccagcactttgggaggccgaggtgggtggatcacgaggtcaagagatcaagactatcctggccaacatggtgaaaccct

SEQ ID NO: 2577 - DNA, 1155 bp, Homo sapiens
ccaaaattctgggattacaggcgtgggccacctcacctggcttattttattttatttttctgagctggagtcttgctgtgtcacccaggttggagggcagtggcccgatctcagatcactgcaccctccgcttcccgggtttaagtgattcttctgcctcagcctcctgagtagctggaattacaggtgcccaccaccacacctggctaatttttgtatttttagtggagatggggttttgccatgttggccaggctggtctcggaactcctgatctcaggtgatccacccgccttggcctcccaaagtgctggggttacaggtatgagtaaccacacctggcctttatgagattttaaaattacactgtgcttaaactctataccctaacatcagtttttgtggattatgtagcagtgtctgtctttttacttcctaatggttaatgattgattttcaaatgaattgatttaaaatggaaacctaagtattacctaatttttttgaaaaattgtctttgtagaagctgaaacctatcaacactcttcaaaatgcaatggaatgtaccacggactgtatctcgactggcacgcaggacatgcttggaaccacataatgctggtctctttggacactgtcaaaatgtaaagggacctttacttttatacaatgctgaatccaaagtggttttggtacaaggccctcaaaaacaatggttgcatttatctgctgcccagtgtgttgcaaaggaaaggaggccattggatgctcatccaccccaaccaggagtccttcgccataagcaagggaagcaacatgtttcattcaggagggttttttcatccagtgccacagctcagggaactccggaaaaaaaggaagagcctgatcctttgcaagacaaatctattagtctttatcaacgattcaagaagacatttagacagtatggaaaagttctgattccagtgcatctaataacttctggtgtttggtttggaacattttattatgcagccttgaagtaagtttttgcttagttgaatgtctttccctgtcttaccagaatattaatctttttaattgtactaatgatagctttagatttttaaatgctttaatgtttttcatcaatagaggataactgttttttca

SEQ ID NO: 2578 - DNA, 1183 bp, Homo sapiens
tgtcattactcacctagaagctatagcgatttgagtttgccatctctacaatagtgaagagtatagtgatacccagataccctgaaatgcttagactaggatcatatgtggagtccattacattttaacttttgtggccttgggcacattacttctttgagactcagtttcctcatttataaagtggataatatagcggtaactttctcttaaggagtgtaacacactttactcctatgcaagtgcttttacatattatataataaaagcttagtaaaagttagctgtgattattattacagctactactgccatcatcatcatcacctgtggaatataaaaggtattcctgtatcatgctattatggtagtaaccagaacaatgaagaatctttttactttcaaaataacatttttataattttgttttaaaaagtaaattattgttacctatttttatataaacttgaaaataaataattttatttttagggttctgttagagtctcgtaggaaatctaagaagattacagccagaggaatctttgcaggtgccagagtggtgcgaggagtggactggcagtgggaagatcaagatggaggaaatggacgtaggggaaaggtacagtgtttctctgaattcattatgtattctagagtattatatgttcagaacctttttattactactataaatgaatttcttggtccattgttttccatgccagtaacagtttttaaaatcttgatttcttttttctctggaagtaaaaagattgttcttgctttttgtaagcattgatgttccttagagggtcattaggtaggttttaccttcccaccttcaggtttcatattgtcattttgttacctagcatgcttttctgaacgcatttgggccagtccctccctaagcagtatctcatgtcctcaactttcctgctatttaaatttcatttgaattgacttgttttatattctcttccctcaaagacctgtttctgaggcacagtgggcaattatgctgttatcgagcccacctacctctgttatcctttgcagatagcatagcgggctcagagttttaggagtaggtcaaagcagaatattctgtgtggtgaaatgagagacctcagctgatctaggtggcagggaatgggggtgaagaggagagtgggaatgt

SEQ ID NO: 2579 - DNA, 1211 bp, Homo sapiens
caggagttcgagaccagcctggccaacatggtgaaaccccatctctactaaaactacaaaaattagccaggcgtggtgacaggcacctgtaatctcagctactcaggaggctgaggcaggagaagcttgaacccgggaggcggaggttgcattgagccaggatcgcaccactgcactccagcccgggcgacaagagcgagattccatctcaaaaccaaaaaccaaaaaacaaaaaactgttcttaaaggaatctctttaagaataaaaatattttaaattttctatcaaattctattttctgataatctatcactgtaatccccaagcctcttgatttaaaaatttctacagaggttttagaaattaccttataattctggaaaaatatggctctaatgataatttaactatgttagcagtgacatatttggcaaataagtatttttcatgatcctgttacacaggttgctagatgaaatgatttttaagatttaaatgtaataattaaaagaactaagctcttccctcccctttaaaaaacttcttttctcaaaaactattctgttaggtaacagaaatccaggactggagtgcatcaagcccacatagcgcagcatatgtcctctgggataatggtgctaagaacctttacagagttggctttgagggcatggtaagtagtgaagagccatagcaggtgaaagaaaatgttggatgggtgaatagctcttactgctcttttattatttttcctttgtcatctccctttgtcagaacctttacgtttttactatgtttctctaaactatttaatagtaaatatgatttgcctttagtttaatgtttgagtaccttactatatattggtggtgtagaggtgacccattttcagtgtaagtccagggggtttatttacgaaaatctatcaaaaagattgggaatcatctgtaagaccattccttgacgtggatggacctggaagacggtattataatgaggttttgtgatatatttgtattctgtgctctggtagcttatataaaagtataaattacaacaaatattaaaattattttttaggagattcctctccaccccttggtattttttaaagtatagtgttgataattgaaaatgattgacttagaaacaccttgaattacttaagtgtttagaaaaataatggaggtttattcaatgagttgtccta

SEQ ID NO: 2580 - DNA, 1127 bp, Homo sapiens
agggcaagaatcacaggaaccatttgttaaaataagatagtactaagcacttaatggaaaaaataattccagggctttcattcatattctctagttagttattgtggttctaatgcagtgatagtaagttatccaggcataaaagtgagtattttcaacacctggaactttgtgttctgatacaaggttgaatagtcttttatagactctacttttactcagtctttgttataactcatattatttcaatttttgagtctgtttggcttttttctttttttaaaaaaagctttctagttctaaaattttatacttatagggaattctcaagaccttttaaaactagatggtacctgaaactaaaatatctacatgttatttaaagataatgcagctgcctgttgttgtgaggtttttttctccctttattcaattgcctctgaaattacaggtgagcagaatggcaacaggaatcctggtggattgcagattggtgacctggtaaatatagatctcgacctcgaaattgtacagtctttgcagcatggtcatggaggatggactgatggaatgtttgagactttaactacaactggaactgtttgtggcattgatgaagatcatgacattgtagtacagtatccaagtggcaataggtgggtgatatctctcaatttttgacaatgacaaataaaactaatatagagaaaagtcttagagaaagcaaataaagtgatacaaccaaatactcattaaagctagcttttagatggtaagtaaaaatccagaatatatattggtaaggtggagagaaacaaatgataagaattacgtgtgtgtgtgtgtgtgtgtgtgtgtgtgtcttgtgtgtgtatgtgaatttatatgaggatgtttatgatacagtgttctgtacactatttttccttcaagaggagaatacattatatcactattaggtctgaatacagcttaaaagttctgtgttcgtattggactatatcagtctaccctgaataggaagggttttacattaaaactcctttggtgcatatctccagggtcatctcttattttttgtttttattgatacacaagaggtgtacatattttgggatacatgtgat

SEQ ID NO: 2581 - DNA, 1102 bp, Homo sapiens
gttgaactttgtcctggtttgattctttttgcaagagattcaaagaatcagtgtagtgttacagagtgtatttcggaaacttaagatcagcctagtgtttcttcagtcttcagagtgaatttcttctttttttgtagtctgcttctagatcctacaggtagatagtaattaattaaattcaattttttttttacaaactagatatcttactcaaaacctaacaaattaaccaataagtatttctgatattgactctagaagttgaaacaacaaggagaaaaaccaggatgagtgtgggtgaattgaacttttttaaagattatgaatttttgttagtgttttataaggtcacagataagaactcgtgatcatttgaaaatttgtcattcttttttctttattagttccttacctgaagtttgcactttgatgcttctctttgggttaaatacaaatatgagttgaatacaaattcaaatagatgtagaaatatctaattttggtgagtttaagttgttttgattctttaatctttttagtataaaggataactgtcagaatcgtcaacttttagaaagtatcacttcaaagaactgaaaggttttagtctgtgagcacctgggttttatttaccttgatagtttagaatgaaaagaaattatagttggtaagtagccttcagttattgtggtattagaaggttaatttaaaacctcaagaaattttcagatttgtcaaaggaggaaaaaaaagggcagggatagtagaatttctgcagcttgtgataaaaagctagtgcagcttatagagagcaaatcagaatgtagcagtagatagcccagcactacagcagtttcagcaatgcagcattagaattacaccatgcacgttctgatttatttttgtggccaattattagtaagcattaaaaagtattttatgatctgccaagtttcttggttgactaaaccttgaaatagaagctaatagttttagaaaataagtatactttggaagcaggatgtgacttactagagatgcaaaatcatcacttaatctgaaacaataatgactaaatctttaataatgtaaatgacaataa

SEQ ID NO: 2582 - DNA, 1183 bp, Homo sapiens
taaaaaggtagaacatctgactgatgatgttcacataaagagacagacagactatcatgttgcagacatgaaaacagcatgtcaggtttttcctttccttccatgccatgggctacccatctcttcccactagatcacctggtgaggagggagcacctggctgactcatgcagagtttggccaatcagagaattgtgtggtctccagctctactttccttaaacaaatcctttctgttttctgagctgcagtgctaaaacagatccctaaaaggtaatagcatcttccagactagtttaattatttcctttataagaatatgacataaatttttattatagaaataatgtcattataattttagtgctagtacttgtgggttttctgtatttgtatcaccttgaaatttgttccatgaatagaaaatacttctttattcatgttttcaatcacttagaattattttaaatttattttgggtttgtgagagataataagattaagaacttcatcatttcagtgactttcctccaactctctgaatctgctacctcttattatatgtcccttagcagtacttttccagttaggttcgttaccctgctcattagctaaacctctttatcttgtgcctcaaaagagcttttacttttcttagaaacatttataaaaaagaaaaaaactgacacgcattcattcaaaaaagtatttattgggctttagggattagatacacaacagtggaaaaatggcatcttagcacactcagaatttattgtgcagcagttgtgtattttaaggaatctgtagttaaaaggaagagatccaaaggtcctgataacatttcctaacgtttcagaagagttgtcattgagtagtgtttggatttcctctctgtatccctcaccctaccattttctcctttattcttctaagattgttagcgttgttactcaaaacatacacatacaacataccagatggtgctgttctaatggtatttgttcacgtaatttaacgttcttactgcttatactatatacatatttaattttgttgggagcaagaaggttttcaagaaaagataattttgtattagtgtaggaatatattagacaaatgtttagttggtcaaattatgcataagatatttgtaactttaaacattgcaaattgaccagct

SEQ ID NO: 2583 - DNA, 1188 bp, Homo sapiens
cggccttgcggggtccaagtaactcgctcgcagtccaaaactctgcaacgctccacataaccgtcctgtagacccacaactctcccaggagcacagccccaggacctaacccaccgggttctgctcgctcacccaattcccagtgcgagcgcgcgggggaaacgtgctcgcctcccgcacctggcttccgcggccccgggagtcgccaactctcccagcaggcagctccgacaacccggacagccgggccgatcccccgccccaccacccgctcggctctcgcgtcctcctcttcctcctcccgtggccccttgcctcccgccgtctgcctctgcggccgccgcctgcggctttgttttcctcccaggtcgcattccccacacgtgattccgtgttattgcaaagagggctttggagcgcgagcgcggggcgcgcgcacctataaatacggacacccggccccggagcccgcgagccagcggccaggcgaccggcgggcggccagccagcgagccgaactagccgagctaggtagcgaggcgtgcgcgtgggccggggcggcggcgcccccatccccagcaccgaggggcgagcatggcccgcccgcgggggggctggaccgccgcgcacgccgcccgatccccgcgccctacccagcccgggtcgccgccgctcgcgcccgccgcttagcgctcgggcgccgctcgcttctccgggcatcgcggaaatcccgccgcagacggacacaatggcggcggcggcggcggccgccaccacggccgcctgcagcagcggcagcgccggcaccgacgccgcgggcgccagcggattgcagcagccgccgccgcagccccagcctcagcccgcggccgccgcgccggcccagccgccgcccgaacccccccggaagccgcgcatggacccgcggcgccgccaggctgccctctccttcctcaccaacatctcgctggacggccggctgccgccgcaggacgcggagtggggcggtggcgaggagggcggcgcggccaagccgggcgccggcggcgcctgcggcgcgaggactcggttcagcttgctcgccgctgccgagcggggcggctgcatcgcgctcgccgcgccgggcacgccggctgcggggttagccgctgggtccggcccctgcctcccacagccctcgtcgctgcc

SEQ ID NO: 2584 - DNA, 1189 bp, Homo sapiens
ctgcaggtggctgaaatttgtcagctgaccatcatcagcctgagggcgagtttgaatagaatagcatgtggtattcccgccagcgttatctcctgcagccagttatctcctgcagcatagatgagtgatttgagtgattggcgtaaaggcccagaagcctcgtagtcagccatgtggaaagctaaaagcagggagagcagaagcaggaaggagcattacagatgagaaccaagatgcagatacttcattcactggaaatgctagagccagtccactgagattaaactgagcaaggagaaatgtaattcaggtggactgctgattatagcgcaggatacagattttttagtacacatgaaaaataccttggcatttaggacagtgtgttccaccccaggctcacaatgcaatgccaatacagagggagctaatttagtttgtcctgatggaaggctagtatcacagaaggctggtgtcgcctttgcacccaaccagggcgggtcccatctgtggtgttgccatcagcatgcatgtcgtgtcatagaaagctagatgtgtattaggatggtcccccagcagtggactttgtggaaggagttgtgatgaaccttgaaaataagctgagtgaaatgagccaatcacgaaaggtcaaatgtcatatgactccatttatatgaaataaccagaatagtccatacagacagaaagtagataagaggttaccagggtttagggcaagaggaattattgcttaatgactctccagatacaaggtgcccaataataaggcagttccttaactacatgcactgtaggaacatgtgtcctcggtccaccccacacatgtttgctggcacctactctgtgactattgggatgtatccatgaataaaacaggttacatcccaatagggagggaaatgatacatgtgcacaggtgaaagatgagataatgtgccatggagagagactgaggcagccagggttggggaaggacactctggggcaatggggagacctgacagtggaggtgtgagggaggtgagggaggtgagggagccagccctggggctatcccagtggggaagcgcatgcgccctgatggaacagcagtcatggagacgctgaggcggaagggccggggtgtgtttgaggaactttaggaaagcccgcatggtggaggtgattg

SEQ ID NO: 2585 - DNA, 1223 bp, Homo sapiens
aacagtggcatgtactcctgttaacaatacaaaagcaaccaaatatagcacaagcaattttcaagatatgaacatcgaacttatgggaatggtgataaactaccagaattttggcatttttagggtacatcttagatgacagaacaatactcccatagtaactgctctccctttcttcctcgcctccaccaggagagtgcaccactgttcattgataaccactggccgggcgtggtgcctcatgtgtgtaatcccagcactttgggaggccgaggtgggtggatcacttgaggtcaggagttcaagaccagcctggctaacatggtgaaaccccgtctctactaaaacacaaaaaaattagccgggcatggtggtctgcgccggtaatcccagctactcaggaggctgaggcagaagaattgcttgaagctgggaggtggaggttgcagtgagccaagatcacgccactgcactccagtctgggtgacagagcgagactccctctcaaagaaaaaaagaaaaccattgatagcgccctcacccatcacacaacgcacgtccatggggaacctggtgctaaaccatttgtaaatgaccggcttctgggtcagggtttcgtacatagcagagcacctccctcgctgcaaaaatctattgaaagtcagcccttgacacaagggtttgttaaaaaagaaaaaaaaaaaccattgatatgagtcagggtttttattaacagtagaatttcctgggtccaactgtactgctcactaatcacctactaacagcaaccttgaatgcccttactatgcaaagaatgaagatggtgactggagccagggagatgtttatccttcctggcctaggaggacacatcaatgggcccaaacgagttaaaagattgcttagtgggtaccttgtttctcagggatgggtctgcccctgcttctaggagcagcgcaactgttttaatgtttccactgagcactgctgcatggagcgctgatgtcccattctaagagaaaatgacagtgtgtgtcaggagtgagctcacagccattggcattcagcatggctttcatcataaaccatctgggtgataagactgtaacctcatacccgtaaccttccttatcttgccttgtacttttcaaagtcacatcagcccctagtatagtgtccttggatacataaccaatggtcagtacaaatattgctaatgttct

SEQ ID NO: 2586 - DNA, 1176 bp, Homo sapiens
actctttcacccatgctggagtgcagtggggccctcatagctcactgcagccttgaacgtctgggcacaacagatccttccacctagaactatacgcgtgcgccactgtacctggctaatttttaaaaatcttttgtagagacagggtttcaccgtgttgcccaggctggtcttgaaccttaagcggtcttcctaccccagcctcccaaagttctcggatcacaggcatgagccaccacgcccagctgagaatgcttgtaaaacacatgcttccagagccgggtgtagtggctcacacctataatcccagctacacaggaggcgaaggcaggaggatcgcttgaagtcaggagttagaggccaacctgggcaacataacaagaccccctcttcccgccccccaccatatctctctctttctctctctgtctctgtctctttctctatagacagggtctcgctctgtcgccaaggctggagtacagtggtgcaatctcagctcactgcaacctccacatccagagctcaagtgatcctcccaccctagcctccccaggaattaggaccacaggcatgtgccactgtacctggctaattttctgtattttttgtagggacagggttttgccatgttgcccaggctggtctgaaactcctgggctcaagtgatctgcctgccttagcctcccaaagtgctggggttataggcatgagccaccgtgcccagccaagaccccatctctaaaaaactcaaagctggatgtatggcatgtgcttgtagtcccagctactctggtggctgaggcaggaggatcgcttgagccccaggagtttgaggctacagtgagtgagctatgatggcaccaccgcactccagcttggatgacagagcaagaccctgtctctaaaatagtaaataaacaaatacaataaatgcttcctatgttctgtgtctcagaaattctctctatctcacctaacatacagaatatatgtataatcctgggctttaggatttcctaggagaccatttctcatgtttatgtattgaaggcctactgtgtttcaggcgatgcccagacaacttgacacgtatcgtttcatttgatggagaatgactgccttgaaatatatacatataatttgttctagatctgttctcagggaagctgagat

SEQ ID NO: 2587 - DNA, 1127 bp, Homo sapiens
gaaattacagggtgatactgtatacctaacgatataaaaaaattttgtttattgtaggtacggctgcttttttgtggtatgacagtgttagaaatgattcgtttgtaatcttctttgcctgttatggtcaaactattatctaattatatttttaaatttatcttttagggacagtatggaaattaccagcagtgaaaaagtacttacattccagtagccagtatctattagcagccatattgtcacctcagcactgtggacacctccctgtgaagagatccttccattccatctagtttttggaaaaaccttgtggataagtggctgtttcatcagtaagcagcctttgtggtttagttataaaaggctttagtagctcaaaaatactcttgatttcacatttctactctagatggcaacattggacagaaaatgcaatgacataaccaatttgtaatgattttggaactgtgtttcaaatggactgttacagactgaaaggtgtgaacagctttgtatgtttatgaagggtaagggaatttaatacttttccacagatttttttgtaaggggaagagggaaatgtacactttttacagcagcaatattttgtatattatgtttatttcatgtggtgaatatgcaaggcggtacactacgcactggacagcatcagaaatcctctgttaatgtggactggaacatggtagatgcttgattgttttggtctcaaaatggtgtgctataaagataaaggtgaggggaagacaaagcacaccatatgtccactgttctgttctcatagaggaaattcaaatcccttttatctattagataatcaagggcactgtgatacagttttgagtaaaaagacattttttaaaagccttccagttttgtggattaaacctttttataaagatcatttataatactgttttaaaatgtgaggcaataagaattactttgtgttggatctgaggaggctttggtaaaacagtttcatctaaatgaaagtggtaatcctcttctaaaatagcaataactgaaaatgaaagtgttaattttaccttgtttgagttatcagggaacttagtaagtaatatcaaagcattttataaatgata

SEQ ID NO: 2588 - DNA, 1132 bp, Homo sapiens
gtaaaattgctaatttagaataatggtttagagattcttaaattatgcacaagaaccagaaattgtaaagggcattaagtgctttaattataagatgaccttgaacacagtccttatcagttttcctttttgaacatgttttgttgcttttttgttttttcctctaaaactataggtataaattactaaggtattccaaggagcgtcagtacatcgatggactgaacaatttaatatataggccaaaaatactggttgataggttgtatacaaacatatctgtaaacctcatgccagagttagctccaatcgaagactattaaaagaagtggctgtcgtggcaaggtagaccacaatgctggatcataaacttggagcgcgctcttagtggaggtcagtgattggctgtgtcacagtgcccttttctctgagaagagccagcagtccacagtgtttacagagtgggactatatacagtcacccttctctcacccgtcctccctgctctgagacacacccctgtggcgagcaccgcagaaacgggaagccactacttaagatcggaagttaagagagctccctccgaagagaaaatttttatactaaaatctataatttaattcaagagaatgcttttatttccgtttaaacatattttgtatatatgtgatataaattaatgtgtgcaaattgtttaaaaattagatgtgttgcagttttgcatgtaatcggttatacctttattggacttttatagacattttttatttgcatgaaaaaaactcactaaatttacatcactaaacaaaggttaacccttgtgtgaaatgaaggaactgtcaataattgacagccaactaatacagtaaactgttatactagttttgagctttagacctcagccttttgtgtggaagaagtcacagctttcttaggctttaaaggaaaagaaggaaggacttaaatagcttttcttcctaccgggattacctatgtttttccttgcttgcaatctcatctgattttgctagaaatcacaaccatattgtttatgcatattgcatgagtattaccaagaaaaatcttaaaagttgtgatgtgacatgatataaaggatctctttatgttaaat

SEQ ID NO: 2589 - DNA, 1140 bp, Homo sapiens
gttcagaagttgcctgtcattcagaatctccataaatcccagtggcaaccagccttctcctgcacctaacacaacgctctccacatatctggagggctggtgcttggagaatcagttgtgcagagtcactaagagccagccccgacttccatatcagaaaagaatatttatagaggcagaaacctctgaactggccatgaagagccaaaagggagggtgtgatattccaccccctgcctcctctccactcctgagagaagaagccgctaccaggaagggcactgattcctggaatgaccaactccatcacattaacctccttatgggccctcataaccaactgcttcctagaaaagagattgacatgttgggtttttgatagcataagtagcattttttgaatcctcagcaagaagctaccaagatagataaaagttttttggggaatgtgagggttatctggctgtgacatatgtcaccccattaatggccaggattgatttggctgacctggctggctaggtgggtgtcctcttcctccctcacccctacatgtgcgtccctcctgaagctgcatgctcgttccaagaggatgaccatccccaatagaggaggaccggtctttggtcaagggtatacaaatagctgcactcccctgctagaacctccaaacaagctctcaaggtaagagttttttggagagataaatagttttctgcattctttaaattccaatcggtatatcaagatttagaccttgctgacttcaccattaagccaggaatagggagaactcaggctatgctgtaagggagacctctgccatgtgggaagggtagagctgacatactccattcccagagcagggggcaaggagaaaagagatgggggagcaaaaagaggcaactcatctggcaacctgctccagaccaaattcccggaggggaaaaatcaatggacacatctaggcaaatatgaaggaagcttggggctagttgttttcttcaccctgtaaaacctaagggagctgagagcctccagaaaaagatcatgccctgtctgatggtataaccacccaatctgttcaccttgcccgctgcctagacagagccaatttaccaagacagggggatttcaata

SEQ ID NO: 2590 - DNA, 1129 bp, Homo sapiens
aaaaaaggaaaatgaatagctctctattacttcttttgtcctgtcacctgaagataactactattttggtgtttctctttccagctttaaaaactaaaaacaatgaaatgaaaacaaaacagttgtaattacaacagcttttctcacttaaagaatgcttttgttattatataatcttcataaacgtttaatgttagtaaaatattctattcagtgcttataaagtactttattttaacatccacttgatatatatagactgtttccatcttttgcttatataaaattatattgtggccgggtgtggtggctcacacctgtaatcccagcactttgggaggccaagacgggcagatcatgaggtcaagagattgagaccatcctggccaacatggtgaaaccctgtctctactaaaaatacaaaaaactagctgggcgtggtggcatgcgcctgtagtcccagctactcgggaggctgaatcaggagaatcgcttgaacccaggaggcggaggttgcagtagccgagatctcgccactgcgctccagcaagactgtctcaaaaaaaaaaaatcgtattgtgatggacatctttgtagataaaatttgttttttaaatgtcttatggaaattttcaaatgtacatagaagtaaagaacagttaccaatgttctgctgttcttgtaagacttttttttaaatgcaggatgatttatttaggattgaaccctagaatggcaataatggaacaaaagtataaatatattaagctcttcattatcttacattaaataactcagaaacagaaagtcaaatactacatgctcccatcgataactggggttggagctaaataatgtgtacacatagacattgagacttgggagggtagggaatgaaggatgagaaattacttatgggtacaatgtatactatttgggtgatggctacacgaaaagcccagactttgccaccaagaaaatatgtctgtataacaaaacataacttgtaccccctaaatctatacaaatatattttatataaatgcatatattttaaagctctcgatggctgttaaactttgtcattctaaacattcttatatttgaatttaatcaacgtttctccttg

SEQ ID NO: 2591 - DNA, 1199 bp, Homo sapiens
aaccaatttgtgtgctcttttgtagtagacctgtttatgtcttgtggaacaacatgtcgatatacatcagtttgagacaaaagcttatgttactcatccttttattttgtaaggggaggaaatggagatccagtgtgcgttaatttgttggcctaagattacacagctactaaatggcagagccaggatccggtttttcctttgtaccatgcttcctctagtaatattattaatatgtagcattaatatttattcatcatatattatgttaagaagttgtaaagcagacttgagtgtaattgttcaaatattcccatctagtccagttatcagtcttactctctgataaatacatatacagttactaaacttctgagatttatgtacatatgagtagcctaacttatttaatatgaatacatatttataatcacttgtttgtatttaattatagagatgaagagagtaattttttttgtaattaatgtgtcacaatgtttggtttagtttctgtagaaaatgtttcctgactgcaatgagggaaagcggagcacattgtcccctatgtcgtggaaatgtgactagaagagagagagcatgtcctgaacgggccttagaccttgaaaatataatgaggaagttttctggtagctgcagatgctgtgcaaaacaggtagagtaaatgtgacatctctcttctttggaagccaagtttctactctgaaattcttatttgaattttcttggttggtgttttttttttttttgaaaagatgaaaggtatttagactgggaattggatagaaaaggccaaaaaaagctgtggtcatagatcttactagattataaacttactgagaaatgagactgaaaaaaaaatcactgaatttcataatacttagcgtggcatttttctaaaagtaatttctcattgattacttgctaaagtaactaaattagcaagctggcatttagctcatttaaaccccattctggtacaaattcaccccttaagtttttctcatggtagcatcattattgcagctttacacatagaaatgttactagtttgggcacatggatttatgtagtttaaggaactctctagctcctcactttacttatgtatttatgtatgtatttaagaaatcacaagggccgggcatggtggctcatgcctgtaatcccagcacttatgg

SEQ ID NO: 2592 - DNA, 1221 bp, Homo sapiens
tgtcaactttctttcagacaaagaataataataacttgggagatgtgaatagcctctaaatggcagagctttctctagactatgcctgtgctaacaaaggtctgaaggaaagtgaaagctaggtcttggtttggaagcttagaacactgagccagcggtagggtgtaattcaaaaactgccgattagaataaaatcaatctccctcactttagaaagaactggagccctagcctcaaccctttctcaattttacttaaggatgccaatcaacttggattgacagcaaaaaccatcaaaatgttacaccttgtaatgaaataatgacagtcagccaaccagatactagataactacatagctgagaggaaaaccctttcaatatctgttataaatatctgtccttgtactgggcttcttaaatataaagaaaaacaaaacttaaagtgggttcatctggagaccactactcctgttataatgcctttttaatccactcagaattttccaaataaactcaatgatgttaatgatttgcctcaacacaggttcagtaacttctgtttgcaaatgtgacatcgcacatctctcttccagcttgtcgtgtcagtctcatgattttgtaaatagcagaacaaatggaacctaagtcctgctagaaaaatcaaagctttgaaaggccactacagaagtggaaatacatttctctcagatgtcagagttcttgtgtgctagtcttgtctctgctctaattaaattcaagtgaagctatttccctctcatgggacatctgtctcctctgtggaggtagagggtggagggggttgggtcttgacctatctccatcatgcttcaaggagaaccaaaaggataaaataacatctcttgttttagttcatgaaacgaataccattatctgaaaatttacgcatgtttaggaaaagtctgttaaaacattttcaagttatagaatcattacagttttggaacacatgtttagttatgtgcttagtactgttttattcaaggatttaaatttaatactgcaaatttaataactacagtaaatgcttaatgtcagctaagaagtataaaagtgaacacttaaagaataattgaaagaagtatcttctcaacacaaatgactgaataaaagattttaaataactttataaatactttttaagtaaaaatttacaaaatgttgtcaaaaagcataccca

SEQ ID NO: 2593 - DNA, 1199 bp, Homo sapiens
ttggataaagcgcagtagattctattttgaaaatccttgtttctttacttaagccaaacagggaacatttactgagctttgcagcacctgattcagagtgttcactgctgatggcacatttccaggatccttatttagtggttatccatgcaactaaactaaacagaacaatgaattacattgaatatatcatttggttgtacacatctcatttctatgctcccttctagtacaaatcaacatgccaacagcctactgcattgatagccacacaactagcccaggctgaaactgccaaggcaggcgcctgaccaaagggcaatgaaaccacaagtcaaacccacagccaatgcagccagaccggaaaaatgaattaggccaaaggatttcatctcttggaatttgaactaacactttcttcttaagggccaatgaccacatcaaaaccaccagtgaatttagaaatacagaatcagagactttatcccagacctactaaatcagaatctgcattttaaccagactcccagaagattcatttgcatggtaaaatttgaaaagttgaaaccactaacttcgttagtagctgcagcagaagtaaaagtggtaggggagcattgagctggagaagttacaggggtccatgatgaatacaaaactatttcaatattccaatttttgaagagtattatattctctctttgattaccaaagagtatatgtctatatccctttttcctttgtcccttcctcctttccttcctttttccatccttctattgagcaatttacttagaatctcttgagccaaattcatcagagaaagccaagtagggagacacgtagaaacagaaaagataagggaactgtgtagggtctacctcacacagtcttggtgtacagttattctctcagtacaattactaatcatgcccccctttggatctcaaatatatcctggtttagacaataaactatatgatatctcagtatgaaactcagtgaggtttatttatggcctagctgttctgcacattctagtcttgggtcccttaaatcactgtctcccttattgggacacatcattcttaaaaaaattgacacccttgtgccctgattttttgaagtagcccacacacataaaaattttactatttaattagtagatactaggtgccactaaagagtaattaaaaatg

SEQ ID NO: 2594 - DNA, 1188 bp, Homo sapiens
gttggtcaggacggaagttggggtaagtttggttggtcagagggagttgtgctggagattgtgaaaaatgggttcttgaatgatctactataaggcagggaaggttcatttgtaagtagtaatgtgaactgaattgcattaagagtgtgtggcctttgttgtgatatactatgtattttcttatatgcatgagccaaactgttgcatcataatttagcactgatgtctgcttttattttgatcatctttgtccacccttattagttcttggctgttaaccgtagatagatcttgtaaatccagcaacctttggttgctgcattccccttggttcgattccacgcaaggagccacaagtgagaactccactgtccttagaagaaagggcatttttacttttgaaccaaaaagagaaaaaaaaatcagaagtgttgcatcttgaggcgaattaactgtaagacatttttaattatgactactgcaatttgacaccatttgaaataatcaattcagagacactaaagatttcacaatattcattggtattgtaaaaaaaaaatactattgtatggatttttgtattgctgttaagtattgttttgtgtgtgtgtgtgtgtgtgtgtgttggaacctcctggggacatgttatattttgaagtgattaaactatttaattgtgtgtctatattttggagtggaataatttcttcattaaaaaatgtttttaaaaacactatatcttgggtggtttattcctttgtttcagtgaatctttcctaaagcaacgtggagtcagtctgttgaaagaaggaaggcaggtacttgcagtttaaagcaggacccattgatggaatattgagccaccgaggcaaaatagctcaccttctcttgccttgggggatgcatggtttttaccattctactgttttattagcatctgtgagcatctaatagaaatactattctgctatttatggaaatccttattataattgatatggaagtgagtttgaaattctaacagctaacatatttcatgtttgtatcacacactgttcttaacactttatgtgacttcactcaattctttgaatcctctgcatctagccatgtattctgcaaatattaagtgctcaatggtttttttgttgaattactgaataaatgaattagtggtgtttggtttgt

SEQ ID NO: 2595 - DNA, 1084 bp, Homo sapiens
caactgccagtgtagattttaaaagtgttaaatagtgactcccttgattaaactgtttgtaattatttgagtagattaataatgaaaatactttggaaataatatacattttgacattctaccaagaggacaactttggttctggaactggtttctatttgtcaaatcagtttccttttaacataattaatccctttaacaaaaagccgtctatgggattaaaagacacgtgaaatgatacttttattattcccttgctcatataactttaaaaataatacttttagctctaatagctcaagaacacaatattcgttaatgttcagtaaagtagcctgagacattttcaatgtttccttaaggtttttgaatgactgtatatttggcagttaagcagtgccacactacagggtagatatggtaaattttatatttgtatatttacagttacaaaacaaatgtacttttaccttttatttctgaccctgtgtgttagagcagttgcatgctctcctgctgttaaaaacacattgttaagctgtggatttgtactcaataatgacttaggataaacatttattttcattcattgctttacatactagacatttttcttctctttgtaagtagattcaaattagatagtcaataaaacatcttgaaaatcccacaagccaattatgtctctctagtctgaatggcttcattgtttctttctcagtattagaaattatagttacaatgaattgcatatgaagaaggcagacatttatttttaatagccaagtagttctgcaaatagttcttttaacaatttgacctctctccaaaacagagacacatataagtagtgctcatccatgcactactaataatacatggcttattccaaagtttttagtcaacttttgggacttggggtgcattttctcacagaaagaatagtagttaggttccctaacactaccgctgatagctcacctgggaactgaatccacctaaccatgaatgtccttcacttgtaacgtggttcacaggttactaatcatagatcctgaccagcatttgtaacactgctctaact

SEQ ID NO: 2596 - DNA, 1127 bp, Homo sapiens
gtatataggtcactagtgttaactatattcacatgattttgcaccttatttctagaactcttcatattgcagaactgaaactctgtacctacccattcaacaatttctcatttccgccttcacccagccaccaatttttctttcagtctctgaatttggctattccggataccttatataagggaaagcatacagtattctctttttgtgactggcttatttctttagcataatgccctctaggttcatccaatttgtagtacatgtcagaatttccttcctttttaaggccgaatagtaatccattgaatgtatacactgcatgttttcatttgtccatggctgtatacttgggttgcttccacctcttggctattgtgaataatgctgctatggactgttggtgtacaaataatatctttgaggccgggcatggtggctcacgcctgtaatcccagtactttgtgggtggattattttatgtcgggagtttgagaccagcctggccaacatggtgaaaccctgcttctactaaaaatacaaaaattagccggacgtggtggctggcacctgtagtcccagctatttgagaggctgaggcaggagaatcacttgaacccgggaggctgaggttgcagtgagcggagatcacgccactgcactctagcctgggcgacagagtgggactctgtctcaaaaaaaaaaaaaaaaagtatgtgaatgtgtgtgtgtgtgtgtgtgtgtgtgtgtgtatatatgtgtatatatgtgtgtgtgtgtgtgtgtgtgtgtgtatgtgagaccctactttcaacttgttgggggcatttactgagaggttgaattgctagattatacattaattctattttcaaattttcttgagaactgacatactggtttccatagtgctacaacattttgcattcccaccaacagagcacgagggttccattttctccacatcctcaccaacatttggtgttttctgtctttgttgatagtagctatcctaatgtatattaggtagtatctcattgtggttttgatttgcgtttccctaataattaatgatattgaacacctttttcatatgcttatggccatttgtttagctttggagaaat

SEQ ID NO: 2597 - DNA, 1205 bp, Homo sapiens
ttatgccctttatttgtttttcttgccttcttgcaacacctccaattaggtattaactggaagtgatgagaagagaacatcttcatcttgttctgtatctcaggaagaaatacatatttcatctttaagtttgatgtcacctgtgggtttttgggttttggtagatgccttttatatcccattgaataatttctcttttactcttagtttgccaagaatttttgttcttgtttttttgcttttactaatcatgaatggacactgattatttatagcacttgacttttagtatatgtttattgtctgtttccttcataaggcattatttctgtcttgtacactattgtatactgagattctaatacactaccttatgctcagtatgtagtcagtaaataaatacatgttacgtgaatgaattattaaatcagagttgcttgatcagaaaagatctgactcaagagaaaacttgcccgttagtgctgaatctgcataatctgacactctactgccacctggtgatagtatatctaaattgcaataaaagcttctcaggaggtgaataagcatgtgagctaaaactgcaaatgattggactgacgtggcaattataatttaaaaatatacatatactcatgatatgtatctggactgcatttgagatttagcacatatatttcacatttaaaagatgctgaaatgttttctgttttcctgactgctaggaaagaatgaagtggatcagttaaattacatatgttaaagaaatagaataaattgggaaagttggcagaagtagagtaagagcaaaggcacattttctatatttgaattcctgctctgtaagcattttcttgctgtaaggtgctagctaaattttaattttaaagaacaagaatttttaacttcttaatatcttgtattaatatttaatatattgcaagaaaatccagcttgtggccaagaatgaaatttaatgcttgttcttaaaaattaaatcctttagttacacagaattcactgagatttaagtgtagaatacaatgggatttctgttatattagacagtttcttggaatgaaatcatctatcatctacactgttatgattaccactatatactttcatttcttagcctctctccgaaaaaacaaaccatgtgccaaatatatgttagtaaaagtttttagagatgcaattcaaat

SEQ ID NO: 2598 - DNA, 1165 bp, Homo sapiens
gacaatgttaaagtgaatatagaagagttagtaggataaaactctgaacatattatttaggatagtagacatgttgaaaataaaatgaaaacactttcattggaccttaagttttttgaagagatgcaggcctcctatttgttatttaggtgaatgcatgaatgaaggaggtgtttgacagagaatgtgtatgtgtgtgtgtaaaacatatgaatggccattgaaaccaaggatacccaaatagtctccaagagagattattacagaaaactgaaactggtagcctcaaggctgaatcagacttacagacatagtatatagtatttggttggcatgatgtttttaaacatttagaatttgagtgcatttagatgacatgacatgaagctaaaatagaatcccaaataatagcaatatttcaagaattagctgtgaaagaggagtctgcaatggagactaatacaagcagtaagaaagactggtagaaaaccaagagaaaattgtgtcataaaagtcaaagggaaaaagaatttcaagaagagagtaataattattgtgtcgtgcttaaagggttatgtgataaggatgaaaacgtgtccattgaacttagtaacagagagagtgagaatggaagataatgggctttggattgagtgggaggtgaggaagtagtaatgacaacaggacttaaccatgaaggggagaagaagcagggagttgtagctgcatgcagacttagagtcaaaggtgggttttgttaagtcaagtaagtcacaaagatatttaaatgtagatgacaaggaagcaatatgaagatgttaaaaatacaggagagggtattattgatcaaaggagatcccagtgatataggacctagaatttgaatcacaggtggaaaaattatcgtcagtcaagagaaggaagattttactactgtaataggagggaatgtggaaaggacaactatgttgcagttgatgggtttgccagcaggtagtaagggtatttccatgtggtattctcaattttctctgtgaatcaggaggtgagatggtctgcttactatagtacgggaggtgaggaacatatagggctgatggatagtgaggttgaaggtttgaaacaacttctgtgaagagcttgagaagtgaaggaaagagtgatg

SEQ ID NO: 2599 - DNA, 1175 bp, Homo sapiens
ggctaagattatgaaccattatttctacatgagtacaattggagtgggccccaccatgttctatctggtgagacacaacagcaacaaaaaataaacaataacaaggaaaaaatccccataaccttgtaattcacataaacctgagtttgagtatcaatagcaatacttattaattatctgactttgaatatgttacctctaaaaaggccttacttatattatccatgaaatatggaaacttgattgcagataagccatgtgatttttttcaaggcttaaatgatgtaacagttgaaagctcctagcatagtgtccagaccttactaggccacaataattgctagttgattcttgactttacctttattatgagagtgctttagaccagataaaatccaggagtcccatggctgatgagatctcagccattgttgttttccttcaacagtcagctagcttctgcctctcttaccattagagcagtgttactcaaagaacagtaacccctatcaagaggatgagggacctaaatgtaacatctgaatgtagcacttccatgtgatgtggcccaaccagccattctggtgcctcctctgctttgtcgtaacttgctctatactccaaacgtagtccctcagagtggtacaggtgtgtaatgattttgcagagtataacagctatgatagaaagcaagtcactggcttgcataaagtgtcacaatagggaggtagaagatcaataataatctcacagtttgctaaaggctttttatttatgtgatgtctgctatagccctgctataggagtgaagaaagagtcccagttctcaagcaacttaggattctgaaagagaaaccaggtacaaagagctagaaacctttggtaaatacacttaggaaggcaaaccaatggagcggtcagtccagaaaatctctggtggaagggaatgcaggcattggagttgataacagggatagattgcggggttctggtattgagttgacactgaagcaccccccttaacttgagcaaaggtgtataaggtgctcagaatagaggtgcccaagagagaagttaatcaactatacttatgagaaacaagcatgaatgttaaaaagaaaaaaaagattaaaaataaataattaatgtaaaaataatttaaattgtcttagagt

SEQ ID NO: 2600 - DNA, 1226 bp, Homo sapiens
taattctggctggattctgggtattttcttttttcctgaaggttctaaatctttatgtatgatcttctctaaaaagcacaaaatatatgtgaatgtgagtccctgtgtgtccacatatatgacatttattgaatgcctactgtgcaccactcaccctctgcaggatttactgggattgctttcactttgtagattaggaaaatgaaccctgaaggagttaaataacttcttccaaggtcacacaaataatagggggtgaagctgagatctgaggttcacatcctttctgtcttatttgacttttattcactctgctacattattgggacagtgctaagggagagagagaaagttagaaaattagtttattattagtaaaaataattgaattttaagtgtgtatttttagacccgggttctaatttctagaaaccctgaggagtcaaaggtgataccaacacagtccttgtaccttataggcactagatgttagttgagtgttttagtcatgggggctctctaagcatgggtttacagactacttcatgggaatatttatgaccaggtaatgaaattcttccttacattactggttatgatactggcaaacctcaaatgcatttgaatggattcagaaattgtaggatttagaatcccatgtggtattccagttaggaagggaggcggtagaattttcagcacacatttctcgtaccttttcctgtgcctcatcgacctttctttcaaactaggcaagagcatgcattaacccaagctggactttaaaacctcctgagaaacagccacacactggcactggattggccaggactctacttaaattatacttattgaatgatagaagagtagaaaacattctccggtctcttttatttatatagtgatttgaggtgataatgttttattttgatttgagtttcaacattttaactacttaagaccaacatagccaaatatttttattgcctttgcttttgagggcagcttttttgaaaacctgtctttgatgcagggcaggtttccctctccctatgggtggggttttaacaccagtttttctacagccactctgaagggaaccaataaatctcagcaagttcgtaaggtttcacattctattagagaaagagaacaaaggaacaacagaattagagacaaatgatttgacggagtgccacgaagaaggttcattagatactaaagac

SEQ ID NO: 2601 - DNA, 1179 bp, Homo sapiens
tttaatgaaaataccaatcaatcttcatggctgttaaagggcattgctgctgtgtcttaataaatttaaatgatcagatgttctttaagaaaatcttgctgatagaagaagcctagttatttcaataaaagtattagacaatgttctggtgtaagaacagaattaagaacctaattatagttcaactatgcggtagtaggctacctaatttataaaattgatgcgtttcaacaggcatggctttttctactctgtgtgagagtgcatgtggtgtgtgtccgtgtgtctgtgtctctccatttatagcattgaactgcgttttactttaatttgaaatagctctgtgttaagaggtgttgtgtgtttgatgctgtgggcaggctggtaaggattttggcaaagatacattcctaaaaagggatggtaactgcattattgcactgtacttcaaggccctaagacataatataaataaaataaatttaatttattaaaacataaatctattctgcctaccttgtactttctgaagtagtcaaatattcaggatgggatacttacaacaaaaaaggagaacatgtactgaatgggccaatgaaataataaaattcggaatgacatccactaggtcaatctgccaccaaacgtttgccaattgcccactttgatgttagctttatattttgcaccatttggattgccaggaaggcaaaaaaaaagtttttttccctcaaaaatctctatagcatttctcggatattgatgctgatagaaagcaaaaaattgaatgtaaatagtataagagatatagaaagaaattaatattaattgagaatacattaagtgccaagaaaaaaaaagaccatttagttcacatatacagtataattaaactttatactgaggaaactgaaacttatttgattagataagttactcagattcagaaagcttgacttttctgctaactagattgcctcagtataagggctaaactccacagaaagggaagcgggagataccatatacactgttattagacaaatctgaatttgatcaaagtcccttgtttttccaattaaaaaaagagccaaatgaaatattttgcccaatttaaataattaaatgcaagatttgggggctgtaacataaatattcaaaagtctacttaaaacagtt

SEQ ID NO: 2602 - DNA, 1218 bp, Homo sapiens
tgctcaggctgaggtactggagtcggaaagagcagaggggacttccaggaagatatggtcgtgtacaaaacttgggagattactggaggcaatgagatcgtaattcagaggctcccagggctgacagaaggagttttagacattgcccagcacatctctcattttatagaagaggattttgaagtttggatgaggaaagtaacctgctgggaagtcacaaagggttgcaatgaccccagccctcttggtgtcgttcttacccagtgctgtccctaacatatcacctcattgtctaaagtcactcaaataaacaacaggaagatttgctggacctcctaccttcacataccactgcaggctcttcaataaatggtattgggtagggatgtgacttgggatcgtgattcattttgtttagggatgactattggtggcaaaatgtgtcttaggatctgagatttgtatgtgataattcttccttgggttatcaagcaggaaacattcatggatgcaagacattctacctaatattatagacgaggctcagatgcggtggaggatcaaggcttacccagatttgaaaatgtggcagaggccctcccctctagtttcaagaaaaatatgattcctgtgctccagaaaagtaagttgataaagtgctgcttctacctaagtgcaataaatctagtataaaatagcagtgtcttatgaggggatgttattgtgaataaggtcactgcttgccatagtcaatggtctaccagttccatggatattttcccactcctctctttctctttttcttgaaataccatgacttattaaaatgccacagtgatggtgatgagccctgaaatagcatgggtggtctcttagttgttcggtctcaggttccttttagatcctcatagtgtcaggaaccctgaccagtttataattcactcattgctacttggcacatcgaacaccaagtcttcttcctcatagcctgagtctccttcggtagctatagctgttattagaagtagagtgggagtgattgagcggttttagatcaggtttactgactaagagtagcaggggaaactgtgtctcattctgcccacctattgattctggggtttctaaactcatctactggttacatccagggtgattattatctgatgaaaacctgaagaatgtttttaaggtggaaaaggctacagataacaggtg

SEQ ID NO: 2603 - DNA, 1408 bp, Homo sapiens
tatggagcttctcacacataaataagatgataatcaaatttgtcttaagatttccatttggccttcatcactttatttcatactgatcacccagcccaagaatcattgccaaagaaaatacagtggaaaaaagcttattaacctgtccaatttctttgcttctgtaatagttatttgaggatatgatagtgagcatattaggcttatcaatgtgctgtcctaagattattcaaaatagcaattttaaaagtcttaatcagagagggttgtttgttagttggaaaagtactcaagaataaaccaggtgaaaaggacaatactgcttccccccccaccccccgactattttcttatgtagtattggtgtatggggaggagtgcccattcagcttcattgatgttcaattgtgtcttttgtgcagggtatgtccttgaacttggaacctgacaatgttggtgttgtcgtgtttggaaatgataaactaattaaggaaggagatatagtgaagaggacaggagccattgtggacgttccagttggtgaggagctgttgggtcgtgtagttgatgcccttggtaatgctattgatggaaaggtaggtttaatgttcgttagatatagttgcagcttctaacaaacatcaaaactgattatgcttagggtttttctttttattttttaacagggtccaattggttccaagacgcgtaggcgagttggtctgaaagcccccggtatcattcctcgaatttcagtgcgggaaccaatgcagactggcattaaggctgtggatagcttggtgccaattggtcgtggtcagcgtgaactgattattggtgaccgacagactgggtaaagactcaaaagcatattaaaagttctaactaaaatttgctcaatggaaggattatattttagtcttggaatggtaaatggtaatggggacattagaatctaatacgaggattaatagtaaaatttcagctgggaagtgaagggggccagcccctccacacctgtgggtatttctcatcaggtgggacgagctagctcagtcggtagagcatgggactcttaatcccagggtcgtgggtttgagccccatgttgggcaccagatgaagggggccagcccctccacacctgtgagtatttctcgtcaggtgggttgagagactgagaaaataaataagacacagatacaaagtatagagaaagaacagtgggcccaggggaacggcgctcagcatatggaggacccatgccgccactggtctctgagttccctcagtatttattgatcactatctctactatctcggtgtgggggatgtggcaggactgtagggttaatggtggggagagggtcagcaggaaaacgtgagcaaaggtctctgtgtcataaata

SEQ ID NO: 2604 - DNA, 1169 bp, Homo sapiens
ctcctaaagtgctagcattaccactgtggctagcgtgagccactgtgctgggtctgtagaatatatttggattattatgatcacaaaactagttttttgttgttgagaaatgggctttgaaaagatccgaggaccagatttttattattattattattattattattattattattattattattattattttgagatggagtttttgcccttgttacccaggcttgagtgcaatggtgtgatttcagctcaccgcaacctccgcctcctgggttcaagcgattcttctgcctcagcctccgcctcccgagtagctgggattacaggcatgtgccaccatgcccagctaattttgtatttttagtagagacagggttctccatgttggtcaggctggtctcaaactcctgcccttaggtgatctgcctgcctcagcctccaaaagtgctgggattacagctgtgagccactgtgcctggcccagattatttttttaattgaattgaattgtcttccatagggactgctgagatgtcctctattcttgaagagcgtattcttggagctgatacctctgttgatcttgaagaaactgggcgtgtcttaagtattggtgatggtattgcccgcgtacatgggctgaggaatgttcaagcagaagaaatggtagagttttcttcaggcttaaaggtaaattataaaataagattttggtgttttaggatctaagtcttctcagttattcatttagcgattcaaagattgtatcagatttttaaaaaactttgtcttaatttgcctcagatttttttcttgttattatcatagattgtaaagagaataaacttaagggtttgaattagccaagtttttttactctagggactgatttatacataacttgtagccactggctccaaaatataaaattgaataaactttcaccccaaatccaagaagtttaagtctgttctgtcttgctgttaagattattttatacaaaagcaaagcatttgataacttcaacaaaatttttctggtggaaattggaagtccgtgactttgtatttctagtgagtagacatattgttcaaaggcgagttttggtgtagctatcagaagctctctaatgtaagtctactttgtattgggttgagcctcatctgtca

SEQ ID NO: 2605 - DNA, 1199 bp, Homo sapiens
gccagaccgtgcagccagagaaaggcagagctggggctcgctagccctcagatccccctcccacccccggtcccagaccctgtgcccctgagccctcctggcagctgcctgttttcccagaagcagatggacagttgctccgacaaaggggctgtgtggcacccatgctgtggttcccatggtaaacccaggcccctcatgtttctaattactcctggtgttcttttcttcctgcagcatgagcagggccaggctggggcattcttgtcatccctgtcccccacctcccctccccaccaggggtccccttatggaaacttctcacacacgagaagactggggcccaggcagcttgaacgagtccgagaaactcaggggtcagccaggaagccttttttttccaccaaaatagttttttttcaattatttaattaatgaatttttatggtggggaaatatacatattgtatgatttgccattttaaccattaagtgccacagtttagtgatattagcagcattcacatcgctgtgctattatcttcaccatccatctccagaactttctcacctaccccaatgaaaactctgtccccattaaacacgaactccccattctcctcccgccagcccctggcagcctttattccactttctgtctctgtgaatttgactacttgaggcccctcatgtcagtggaatcacacagtgcttgtccttctgtgtctggtttatttcattcaggagaacgtcttcagggttcacctgtgctgcaccctgtgtcaggatttcattccccagccaggtggctttatgccttctctttgtgctctaattctttggtttttaaacttaaaaaagaaaaaagcaatggaatcctcccccatcttttcccccttcaacagagtctcatacggaggtctagtaaatacagcacacaaaagcagcaaggctctggctgaactgggggggctagagaccctacaccccaagcctggcattcctggagacacttcctggggatggaaagtgcctgcatgcctggagagaggggccgatttgattgacttgggtcatgagtgagaagccccttgagtctgacatttggtcttgagggcctccccagtcactgcacttccctactgccctcctggcttccctcctaaatgtcctcttcaggtcttgggccccagccaggc

SEQ ID NO: 2606 - DNA, 1272 bp, Homo sapiens
ttattcttgattacttcacactttacgcattttcccttcttgtaactgtagattttgcctcctattagttatgaaagtttaaaacccgggggagagtgggcttacaaattttcaatgtatttttgtatagtcttttgagattagagtgaagttctaaaaagtaagagaaccttttgtgaaaatattttaattgacactactaagagtttaaaatagtattggtggtgaaaaatcgttaaaagtatctgattttacttgcaaaattactgtattttcccacaagaggagtccttacaacattcttgtttttagaagggtttgtttccatcattcatttaaattcataaagataacgttttcatgggtggagaagtctattgggaaagtcataattcgaatttctatcttgctttgcagtttgctttctatgataagttgaaattattacttgatgttcaaggtagtctctacatcatcctttcaatatttctgctaggttcgatacaagaggctgttttcctagcgtggcttgctgcctttggtaagaacatgtcgtccatcttgccattcacgccgccagttgtgaagagactgctgggatggaagaagtcagctggtgggtctggaggagcaggcggaggagagcagaatgggcaggaagaaaagtggtgtgagaaagcagtgaaaagtctggtgaagaagctaaagaaaacaggacgattagatgagcttgagaaagccatcaccactcaaaactgtaatactaaatgtgttaccataccaaggtaagttttgttagatcccaggtttgatcaaattatgtcaaggaatctgaaggaaagttactgaatttgtgttcctttcaagttgcctgtaaaaagtgatgattgaaatatgactgtttttaaccttgtataaattgtttttgctagctgacttgttttataaattattttcttgaatagtgaggtttaatcaagctaaataagatacttagatttattatcttcattgcctacatttgtatgttatcctcatttccgtgattgaatgatacttgaataaagaattgaagctttttctatcactaacatagtagcaacctacagttttctcctcctttagtcaaaactttcatcaggggtgaaaagaggctgctcactttttaatgaattttatatggtttttctttgcgttgcagcattgcttccaagaaagaatagtgtgttaggtggcttcttaattgttgtaggcattagtcagaacctgtct

SEQ ID NO: 2607 - DNA, 1146 bp, Homo sapiens
tcgaattgggttcttccttacccctcagctctccacccgtctaaggatctttgggaaggccactcatagacaaaatgtatagcacactgagtttggtggcaatttagacatgtaaaggtgaaggcagacaactggttaaaaaaatgctatttgcagaataaaaggattgccttttaaaaatgatttcattgaggcaggactctggagcaagcctgggaattcatatttagcaatgatagtttgtggtgttttactaattaaggatgttcctggtttcattctccttcctttcttccccagggtttagatgtagattctctggtcattgagcatatccaagtgaacaaagcacctaagatgcgccgccggacctacagagctcatggtcggattaacccatacatgagctctccctgccacattgagatgatccttacggaaaaggaacagattgttcctaaaccagaagaggaggttgcccagaagaaaaaggtaaataagtagttgctcggttttgtttgtgatagtagaaagatttgtggttgctgtgatgactatcttaggacacctttggaataactatgaaagaaaactattctgagcaaccctttcacctgtcttattttggcttttgtaagtttgtttcttgactaataataaatggtaagttttctgtaatcccagcactttgggaggctgaggtgggtggatcacaaggtcaggagatcgagaccatcctggctaacacagtgaaaccccgtctctactaaaaatgcaaaaaaaaattagctgggcgtggtggcgggtatctgtagtcccagctactcaggaggctgaggcaggagaatggcatgaacccgggaggaggaactaggagtgagccgagatcgcgccactgcactccagcctgggtgacagagcgagacgctgtctcaaaaaaaaaaaaactggtagttttatattcagtacctcaggcccgtatgattatctgctgatggccccacttagatgtacatagccacttcaaaatgggccctctccccaaatctaagaagcttgttttcagtaattgatcacatttagttcttttaagtcaagaacctgagtgattctgtacacttctttttacatctaatgaacttaagt

SEQ ID NO: 2608 - DNA, 1146 bp, Homo sapiens; identical to SEQ ID NO: 2607

SEQ ID NO: 2609 - DNA, 1146 bp, Homo sapiens; identical to SEQ ID NO: 2607

SEQ ID NO: 2610 - DNA, 1543 bp, Homo sapiens
ggtcagtcggcctctgaggtccgcagagggacgtgatgggcgggaatggggactaccgggctcctccactggtgggggcgccggcccgccgtggggtgcgggccgcctggggtccgtgcggactccggaggtccggtgtctagtggtgagtggtggccgcaacgaggaaaaagttttgggggaaagaaaagtcgggtggaggcgtaacacgttactacaagagtgttgcgtacaggagggctcttaaagtgggtcatagcccgaaggtgttgagagagacggcactcactacctgcagccctgacagcaaaggggtttctgtagagcgggagggaggaggtgtagagggttacggttgagttgtgccctgcggatgcgtcgagtcattttacgcctggaagatccagcattggattgaaacaggctgtattttcttccaaagggttgactggattggtgaggcccgtgtggctacttctgtggaagcagtgctgtagttactggaagataaaagggaaagcaagcccttggtgggggaaagtatggctgcgatgatggcatttcttaggacacctttggattaataatgaaaacaactactctctgagcagctgttcgaatcatctgatatttatactgaatgagttactgtaagtacgtattgacagaattacactgtactttcctctaggtgatctgtgaaaatggttcgctattcacttgacccggagaaccccacgaaatgtaagtggacaggaggtagatacccatttcctacttggggcttggcataagataccaaaaattaaccaaaacgttttattttctagcatgcaaatcaagaggttccaatcttcgtgttcactttaaggtatgcgattcatagttgtgatccaacagttcctcatgttccactcaaaaaaggtagctgcagtgatgactttcttaggacacctttggatttaccgtgaaaattaataaattctgagcagccaccttatatttaggcattgatgatcagggtgtaaggatgtagcgtttgtgaaattgagaagtagtaccagaaaaccatttgaaaacctagtgtgcagatcaagatggggcattttaattgtaattacatgatgatggaatttaaacgttttatagtgaataaatggagttttggagttttctctagcttcaacgaagtttacctggcttttagtcacaagtttttttaattgccttgcccccaaagaatagaaataactcgacattttgaaaagctgaaaattgaaaatttaacgtttactttaaaaattaaagctttgatctagttaaccaacactttattcttcatacttagaacactcgtgaaactgctcaggccatcaagggtatgcatatacgaaaagccacgaagtatctgaaagatgtcactttacagaaacagtgtgtaccattccgacgttacaatggtggagttggcaggtgtgcgcaggtgagaattcttagttgccatttgaaaagacagattttaatggaaaagtgatgggatagg

SEQ ID NO: 2611 - DNA, 1543 bp, Homo sapiens; identical to SEQ ID NO: 2610

SEQ ID NO: 2612 - DNA, 1543 bp, Homo sapiens; identical to SEQ ID NO: 2610

SEQ ID NO: 2613 - DNA, 1543 bp, Homo sapiens; identical to SEQ ID NO: 2610

SEQ ID NO: 2614 - DNA, 1259 bp, Homo sapiens
ccacgcgtagcgctgcccgcctcaccccagcccgagggagcccaggggacggggctcggatagaccacaacgcgccttgagagcggactctttcctcacatcctcatttttagattttctccgtttccaaaccgagagaatttggtttgacacctctcacccatcatatcctagccccgacaggcgatgactcttcccctttgtctccgccaacaccctaaacactgggcaggagccaagggctgaggaacttggcgcgcgggcggccgcggccgccagctgggggcgggaccgaacgtcctgtgggcggggcgcggcggcggcggcgggattggctggggcgggcgggtgcgcagtccgctgggcagaggcttgggccgccgagctggacccggaccggttttgggtactgtactgggggcagggcagagaggtgggcggcagttggggtgcggtgattgtagtaggctagggcgctttcgggtccccattgcagcccccggatgagcccgcagtattttccttatatgatcaggtcccattgcgggcggcgccgcttgcccggagcctgagaggattatgaaaacgtggcgagcgaaatggggccaggggacctggagcaggggcgtgaggagagtaggcagcgggtgaggctggacgggagggaggtctagggaggcctctgccgcgggcactgtgagtcctggccgatgatgacgagaccactgcgcaatctgagttctgggaaccaggtgatggagtatgttctgagaacagactgaggccgggcaagcaggaggcggccgcggcaggggagaggcggagagcccctcgataccagggctcggagggccgggctgcctagcgagggcttcttttgagtgcgtaggggtggtgggtggcatggacggtttctctgagtcgtcagcgaatgccccccctagaatcctgcttttcaaacactttggtgacactcttgcaatgttggggtgtttttaaatccaaatttgtattatgaaaacttacaaacttacagaaaagtgggaagacttgtacagtggacacatatcgacccaattgttaacattttgctatattgctatccacctgttcttccatcaaaccatcttatctttttaatgcagaccttagtactctacacccatgaacacatcagcacacattattcatttacagttctttttaaggcaaaatatccacgcaatcaaatgtacaaatcttagacaagcttcacaaat

SEQ ID NO: 2615 - DNA, 1101 bp, Homo sapiens
aggttcactcctttttgctggcaaaaaccatttagtatcaaaaaaaaaaaaatgcgtaatttcgtaattagatttagaacaaggcatttgaataatttttatggtggatttcataaattacttttgccataccctgcagagactagataatatatatttcagttgaaatctaggaagttctaaaatgtaacttttttttaatgctaaggacttactctctctatattggaaagttctgatatgattagtacataatattccaaactgtaaaatgattaacatttaaaaatacggtttttaaaattagtgtttcttccataatgctgtcatgattttgtttacttaaatgggtttgttacagaacaaatgtaatagagatggaccaagcatttgtaattcggagtagctttaggtctaaagacgatggtgaattatgtaggtttaagttgttggaattaaaactaaaagcttcttttgataaaagtcgttataacattttgtgactctattaatagaagtggctttttctttgctttccaggtttttgggcgagttttaaagaagtattgcatcttcgttttttttatttttgaagtgggagtgtatgtttctgtttaggtcactgccttcattgtaaatcttgagtttagaaaaaaccaaactgcaaatctgtttttcagacttaatgaaaatttgtgccgagaaagtcactttgaaatattttggaataagttttacatgaatgattgatcttttatgatagctttgctgtttgaagcaattctccctctactaggaagcagcaaatcttacttttaaaaacctctgcttcactttcttaagctacattttagtcgagcgattgtgtgtgaattctttttctgtattccccttcagtttttctttctccccgcaaattaaggagcgagaattaacctaatttatgctgcccagtcacactccagctctcccacttggaagcagtttttttctgattgagccagtgttatagtaacatcattagacactattctaattgaggtgtgagttactgaggcctctgctagggaggttaaccctacagaatctgtagggttcatt

SEQ ID NO: 2616 - DNA, 1175 bp, Homo sapiens
ttctccatgattcgtgcatctcgaaacaaaaatgggcctgccctgggaggattatcatgtagtcctaatctgcccggtcaaaccaccgtccaagtcagggtcccttatcgtgtggtaggattagtggttggacccaaaggagcaactattaaaagaattcagcagcagacccacacctacatagtaactccgagcagagataaggaacctgtctttgaagtgacagggatgcctgaaaatgttgaccgagcacgggaagaaatagaaatgcatattgccatgcgtacaggaaactatatagagctcaatgaagagaatgatttccattacaatggtaccgatgtaagctttgaaggtggcactcttggctctgcgtggctctcctccaatcctgttcctcctagccgcgcaagaatgatatccaattatcgaaatgatagttccagttctctaggaagtggctctacagattcctactttggaagcaataggctggctgactttagtccaacaagcccatttagcacaggaaacttctggtttggagatacactaccatctgtaggctcagaagacctagcagttgactctcctgcctttgactctttaccaacatctgctcaaactatctggactccatttgaaccagttaacccactctctggctttgggagtgatccttctggtaacatgaagactcagcgcagaggaagtcagccatctactcctcgtctgtctcctacatttcctgagagcatagaacatccacttgctcggagggttaggagcgacccacctagtacaggcaaccatgttggccttccaatatatatccctgctttttctaatggtaccaatagttactcctcttccaatggtggttccacctctagctcacctccagaatcaagacgaaagcacgactgtgtgatttgctttgagaatgaggttattgctgccctagttccatgtggccacaacctcttctgcatggaatgtgccaacaagatctgtgaaaagagaacgccatcatgtccagtttgccagacagctgttactcaggcaatccaaattcactcttaactatatatatatacataaatactatatctctatatggactcgtaaaggcatgggtataatggtaccccccagtaaacttcctaatgatttct

SEQ ID NO: 2617 - DNA, 1186 bp, Homo sapiens
ggaaaatgtgtctgtacacataccatgcttatgaactaaaaatacttttaactagattgaaaaggttaaagaaatgtacatacacatatatacatacatatgcacacacaagaatgtgatcactgctggtgcagcatgtaaatacgaacacattcctgatggttgctatatatggatgagtagttgtagtaagttcacttcacctcaactaaaaaataaaagtgatgtttcatagaacttagtcttccacttgatctggaccctcatcttgaaacctcatatgataaaatggagaacttcttttaaacataagaaggtagtaatcacctgtggtcccagttacggggctggggcgagagaatctcttgagtccaggagttcgaggctgcaatgacctatgattgtgcctgggcaatagagtgaaaccccatctctttaaagaaaaaaaagaaaaagtgtgatagtcttggtttgtatttcctcatcattaaatatttgatttaatggtaagaaagttattgtgagcactttcacaggtcctccctcaggctgtggggccaggatttggtagctggtgctgagagaaaacctttgttggcatccttgccctgggactgtgccagtggcagctgtcattcaatgggacaatttcttctgattaaaaaaaaaggttattgtggttaaaaaaagattagttttctcaagttcattagtttcatttagtgccgttcacaattgttcgttttctagtattctttcattaacagagcattctgttttctttctaagcaggctgtctgcataaccttctgtgaactatgtgctgatgtcttgtaggcaattatatttgacaagattattctgtatctgtgattgaactccttgaggaatagatgactaggctattctcagtagaacatcttaaactttgaattttactctgtggcagttctcctgggatatggtttgtttggttttgggatgatgtttttgttcagactgactttgggtattgcagagctttttgtttgttggttttccttgtagttggaaaagttatttcaagaagtcagattgttgtagtgctcatttggatttgtggccacttaacattttcttggatgttgtgtaaattttctgatgttaaatttattttattttttttgagatggagtctagctctgtc

SEQ ID NO: 2618 - DNA, 1185 bp, Homo sapiens
tcctccagtagaggatttttctaatcattgacagaaacaaggtttattcatttcatttttaatagtactcttaaagtaaccaggatctttttcttaaaccagaaaaaattagtcacttttaatctgttttcattgcatgtcagtgtattgagggggaaagtctggaaatttgctatattgggcatgaaggacatgagtttaacatacgcttctaattccagattcttttgtgatcgacatttgatttctaactatctaaaaatagtatgtcaaatatgttttactcatatagcatcattttttaaattaacttctctaaactttcaaccttgtttttaaaaattgctatttaaaaaaaaaaaaaaaactgtgtgaaaccaaaaatagcctgcatgtgttttatttttaattccttgtggctgggattggaggggaggtcacagtttgcttcaacagtgaaaatacattgcatgccagaaaagatccaaggataaaaattaataccaaggttttaaactgattattagtatttttaataactcatatttaaaatcaataggatgtacatataaacttatttttgtttttctaggtagttggcaaaaaaggagaaagccactaaggtacaaaagacactggacaaccatattgcaatcagatctacagctcctggataattgcttgattctcgccagagactgtcaatgtttcattcattgccattaccaataaatcattgcttttgttcagatggtatcactagtgtttccattgtaatcttgacacatgcaattgtaaataaaagtcaccacttttgccaagcttaatttttgtctttctaaatcagtattttctctttccatgtatttgaaaactggttaacttctgattttagtagagacttaagtgtctggtagtatattgattgaaagccagtttctttagaaaaggagaaactgttctagggaattaagaagtacatgtgtacacattcatggcaagttattttgataagtgaacctggaacagctaaccatgttaaattattactgcatttttattaaaggacatttgtatatctgagctatggaaattactcaaattataaattagaagaaataaacaggtttaatgagatttagctactcttacctaaaacttagctaatgggtccacagattcttt

SEQ ID NO: 2619 - DNA, 1211 bp, Homo sapiens
ttcctctgactgtaacattactttattaatcttgttgcttttaagattttccgtttatcactggttttgagcagtttgattgtgtggttcttcagtgtagtgttcttcatgtttcttgtggttggggttcattgagtttattaattttgaaaaattttcaataattatttcttcaaatattcattctgccctttcctccctcctctctctaagggactgaaattacatgtacgttaggctgattgaagttgtttcacctatcacggtgctcttttatttcgggattatttttcctctctgtgttttgattgagatagtttccattgcaatgtcttcaagtttattagtcttttctcagcaatgtgtaatatgccattggtcccatccagtgcactttaaaaatttatttttatttttttttatagagacagtgtctcgctatgttgcctaggttggtcttgaacccccaggctgcagcaattttccctgtttggccccctcaaagtgctgggattgcaggcatgagtgaccatgcccagctgtcatccaattcacttttaatctcagacattgttatatgtgtccccagaattttgatttgggtcttaaaattttttttccttgtctctacctaactgctttgaatacatggattgcagttataataaatgttttaacacccttcactgataattttgatagctctgtcagttctgggttggtttaaattaattattctcctccttgtggactgtgctttcctgcctctttgcgtgtttgataatcttagaatagatgggagatgtttgaattttgcctgtttgggtgctggacacttttgtgttcttaaaaatcttgagctttgttgtgggatgcagttatgtcatgtggaaacagtttcttttttttcctggtcttgcttttatgacttgttaggtggatttggagcagtgctctaagatgaattactccctattactgaggccaaaccttccagaatatccaatgccctgtgaattatgaggttttccatttaggctgttgggagcaggcactgtttctggtcctttagatattttccccccagctcgagtagtttctttacagacatgtactgattggtattctgctgtatacttgagggagatcctctgaagaactttgatctttgcagctcccttctttctgtacattgaattctagctgccctg

SEQ ID NO: 2620 - DNA, 1192 bp, Homo sapiens
ccactgactcctctccttcttctctttcccttcaagcgtgcaaacgcaaagagcaagaaccaaacaaagacaggaacaattcccagaagaagtcccgcctggtgttcactgacctccaacgccgaacactcttcgccatcttcaaggagaacaaacgcccgtcaaaggagatgcagatcaccatttcccagcagctgggcctggagctcacaaccgtcagcaacttcttcatgaacgcccggcgccgcagcctggagaagtggcaagacgatctgagcacagggggctcctcgtccacctccagcacgtgtaccaaagcatgatggaaggactctcacttgggcacaagtcacctccaaatgaggacaacagataccaaaagaaaacaaaggaaaaagacaccggattcctagctggggcccttcactggtgatttgaaagcacaattctcttgcaaagaaacttatattctagctgtaatcataggccaggtgttcttcttttgtttttaatggctatggagtccaagtgcaagctgaaaaattaatctcttagaaccagacactgttctctgagcatgctaagcatcccagaaacccaaatggggccttcctggagcgagttaattccagtatggtgtcaaccaagctcgggattgcttaaaatatcatccatcccacttcaggtcctgtcagcttcttgcagtcagagttcctatgagtaacaataggagtttggcctatgtaaggactctgagtttaggcttccaagatacaacaataagagaagaatctagcaacgagaatgacctcatttgctttccacatgcttagcctcattataccatgttatgtccaagttcacagccacaacatcagaatggtaattactgagcacaagttttaaatatggacgttaaaaaaaaaaatccaaggacctgtttttccaacccagacatcttttcattgaatgatttagaaagctttaagttgatccagcttacaattttttttttctttacctcctggaaatctcatatggtcttggatccgtcaaaaaaaccagtcagttcacttgcgctcaaagtatcaagcacaacaaagataaacagaagtgaggaaggttctgggttcactacatctggattttcaagacacctattgtgaagtcattagggaattgatgagaatat

SEQ ID NO: 2621 - DNA, 1122 bp, Homo sapiens
tggtttccaggattgagacaatggtactgcggtcttggggagactgcgttagctagtggggagtggtgatttttttcatgcttgtcacatctaaatggtctttaacatgagaaagttttagaggttataatttcctgctttgtttttatttagactatcaaatgaagttatacatgttgtcagtcaaaaaatgaagacaccctctgccccaccccacagaatgctttttatcttgtctctttgggttatgacccaacaagctaagtaccattaatgtaattaacttatttaaattagttcctagtacataaatgtataggatttgggtaattatttaatcatccttccttagtttgattctactccttgtacttatttatcaaaacctagaccaatggtgcatcagagatgcaaaattctacttggaatactcttgaagtttagtttgctttataaagcagtgaaattctgttacagacagggaagaaatacaggttacaaaaagagaatttgggatattcttccctcttaaattaacttttaaaatagtctaagtaacaatttttaaattatttaacttaagttcgcagccccacctggtaccaggcgaacttcacctcttaattattgtggccctcggagccttcatattgtaacttatttatttaacttattcagcatctgtgaaaggtgcactgtatagtttatatttttaatttaaaacaacagagagcactgcagtttgtttgctgtcagaacaacagagcaaattttgtggacaagcaatgactattcagcctgaacctgtgcattcagaaaacataagctgagaccctgcttcaccagcctggatttcggggcttctatacagaaactggaaaaataaattttaaaaaaatcgtaaacaaaaagagagaaacccttacactagctgcttccaagaatgaactctgtgtgtatgtaaagcaacaaaacaaaaaaggaaaaaaacaaaaagcagaaaaaagaaaaaaaaaatgaaaaactttctatttctagtgagaaccaaagaaggctacctcactgactttttccatttgtaattttaatcgtgttgatgacaccaaagataccaaagatttc

SEQ ID NO: 2622 - DNA, 1160 bp, Homo sapiens
aaattattctttacacaaatgtgtatgggttaagggtaggtgtgtatcctctactctgttgaattgataggaggaaggactggtacagggtgaaggagctgcttctgtcttgttgcgatccaagttgtaaatgttaatgaagtcttgtttgacctcaggatatcccagaagctcctgagagactgatgacagacaccattaatgaaccaatcttgctgtgtcgatttcctgtggagatcaagtccttctacatgcagcgatgtcctgaggattcccgtcttactgaatctgtcagtttctgtttcaaagagtattaataattttgctttttaagggggtggggactgtcatctggaatcaggtacagctcatgccaaatatttcattctctatctagaataacaatatttaaagacgttgggttttttcaccctcccctgattgaagttgacatgctttgttaaattagagaaatgtaaacatttgaatattacatgatcatagtggctcctttagcccttggagcttaattgtaattttcatttaaactctagggcagtgctgtgtctgatcgcttgatagtaattgtgtatcttctttcacttatatttaaaggtcgacgtgttgatgcccaatgttggtgagattgtgggaggctcaatgcgtatctttgatagtgaagaaatactggcaggttataaaagggaagggattgaccccactccctattactggtatacggatcaggtaaaaccaattttttaagtactcaacatttttttccactgtaatcgttctgtatatattgaaatttttaaaaggggagaattcagggtagtactttggtatttgaatgagctatattcagtttgcaggttataatgtggtgtgtgaatattgccagctttgttttggccaagttatatgttaatttcatttgaaaacctgtttaacggccggcttgttgattgcaactgagttttaaaaaattgatcctaccagtatctagtacccttcttcattttcctcttataaatagacattgacttattttaaaagtttttaaaaatctcttctttccagggtagtacttattccctggttgattttttcataccaaattatttctttatgcatggttcatgaaggcatagagatta

SEQ ID NO: 2623 - DNA, 1200 bp, Homo sapiens
gaattcagcggcctcaaaagtcccgcctcttccaagccccgcccaccgcagtccatctttaggccccgccccaattcggctcagcccgccccagcgtagaggcaccacctttcctcgctgcagtcatccaatagccaagatacacggctaggtgatttgcgagcgggagttaggtgtcctcttggcgcctgaccagagtcgggaaattcagctcctcttgagtagtcccttccccgagttgccccccgaggtatgcggggtcactcgctgctcgatgttccctccgaagggtcggacaaggctccggagccctgtagctgccctccctaggagccccgggtcttcactggccgaggtgcccaccccgcagcattctgggagtggtagttttcttccttcaggttcattcctggctggccagtgcccaagactggcgagactacgattcccagacgcccaagcgagtcgccggtcacgtggccgcaaggacgctgggccggtgggcgggggccggcaggtgctccgcagccgtctgtgccacccagagccggcgggccgctaggtccccggagaccctgctatggtgcgtgcgggcgccgtgggggctcatctccccgcgtccggcttggatatcttcggggacctgaagaagatgaacaagcgccaggtgacggaggagggtggtgagcgcgccgtggccgggaccgcctgtgctagcggggagtcggggcttcccagtcagggctccggctcccagtgaatgcggccgggcggccacccgaagctcccgcgctgggctctcaggccctgggttctacgcctacgtgtgggcatgggtgtgcacttccttgccctgacaagagcacaattaggggagggtgcaggaaaggggagaatagaaaccccgtgccatggaatgtcaaatgtggttgagaatgccacagccacgcttgtgggagagatgactcggtgaacgacagctctctgagcgtatttgaagggccacccggtgaagagggaaccgatttctctgtggggcttcagaggcctgactgccggcaggtggaagaggcagaaaggcaggcgagagggaagaactttcctacaacgggagctgtccagcgatgcctcccaaagcagtttcttcccagcctgggcagttgtttttcccctgaccgtgggtcgggactaaataatgct

SEQ ID NO: 2624 - DNA, 1214 bp, Homo sapiens
actttgcttgaaaatcactcagcaaagtagttcacatgatgtgtatcatatttgaagtgtggtttttctcaaaatcattgactttaaggagctcatttctgaacaaaaaggtttgctctgtggaaaaatcaatcactgccaggattctttcatttctgtactattttgtataattgaatttgttcacttctctcacaccagcaagtgttttacaggtgccttggattaaaacaaaattgattttaaaatttttatgtaagtcattgtgtctatgatgccacttttaaaaggaaaatgcaattgcgtaatggcttatatccttatttaatgtacctatttgtgttctaataattgtttgaatgttttattcagcttaaaactttaccatgaagtcataaacagtaaacaatgttttgttatgtattaaggggatatcagtgtttctcaaagtatgatccatggaccatctgggtcatggcgcctggtttcagacaacctgaatcaaatcttaggggtggggctttgggatgtcattgttcaataggcacctcaggagattctgagcacaccaatgtttgagaaccactaaaatgaggagtgggaaaaaaaaaataggtgttttgttaatttagagctgagctgagaagataatatatttttattgtcaatgacattaacagatatgcactgattcttttatacctacaatttacttaatgttccttttattaaaacgcgtggttcatgagcaactacagactgaatccagattattacctgttgctttcagtattttcgtgatggcttttaatcttatgaaatcatcttgagatcattcatggtcaagccatgaaaactcccatcttcaagcctgcctgctaaagcttctttgccttcctgattgtgattatggtaacaatttatatcagacagttgtactttttgataacttagggaaaacagaaatgacttgaacaagggattgcctgcctcactgcattgcagagatacaatttttgtaaagaacacaaatagcagttgtgaatattaaggtgtgattatctttccctgtccatgtgcttattgaaagaagatagtgaacaaatgattatattgaggatttttttaatttataagatctaatgtgaaatccacacttggaactttttagatctgtctgttgcttgtttaatatatttcttttatgacattac

SEQ ID NO: 2625 - DNA, 1194 bp, Homo sapiens
tgtgcctgtacatgggtctgtgtgtgtgttgtgtgtgtgcatttgtgtgtctctatgtgtgcatgtgttgtgtagtgtgtgtgtcttttgtatgtctgtgtctgtatgtcagtgtgtgtctgtgtgtgtctgtgtatgtctgtgggtgtctctgtgtctgtgtgtcagtgtgtgtctgtgtgtgtctctgtgtcagtgtgtgtctctgtgtctgtgtgtgtctgtatatgtctgtgtgtgtgtctctgtgtctgtgtgtcactgtgtgtctttgtgtgtgtctctgtgtctatgtgtgtctgtgtatgtctgtgtgtctgtgtgtctctgtgtcagtgtgtgtctgtgtctctgtgtctgtgtgtctctgtgtcagtgtgtgtctgtgtgtgtccctgtgtctgtgtgtgtctgtgtgtgtgtgtctctgtgtgtcagtgtgtgtgtctgtgtctgttgtgtctttgtgtctgtgtgtgtctgtgtatgtctgtgtgtgtgtctctgtgtctgtgtgtcagtgtgtgtctgtgtgtgtgtctctgtgtctatgtgtctgtgtgtcaatgtgtgtctgtgtctatgtgtgtctgtgtgtcaatgtgtgtctgtgtctatgtgtgtctgtgtgtcaatgtgtgtctgtgtgtgtctctgtcagtgtgtgtctgtgtgtgtctctgtgtctgtgtgtcagtgtgtgtctgtgtgtgtctctgtgtctatgtgtgtctgtgtgtcaatgggtgtctgtgtgtgtctatgtcagtgtgtgtctgtgtgtgtctctgtgtctgtgtgtgtgtctctgtgtctgtgtcagtgtgtgtctgtgtgtgtctctgtgtctatgtgtgtctctgtgtcagtgtgtgtctgtgtgtgtgtctctatgtcagtgtgtgtctgtgtgtgtttgtgtgtgtctgtgtgtgtctctgtgtgtgtgtgtgtgtgtatgtctgtgtgtgtgtgtctctacatctttgcgtatacaggggcatagcatagtcatgcaaaaccgtcttccttcaactcatagttctctccttcctcaaccagaagccactctgctttgttgtgaaaacaaataaactactttcttacaaaagaaagaccaaataacctgaaaagctcaaataaaatccaccttatgatacaatattaagaaacagaaattttcaatggagaaaa

SEQ ID NO: 2626 - DNA, 1264 bp, Homo sapiens
cttgaaatagtcttgtaccgttggatgcactaaaagctctctctttatcttgcaggtggtcaccatgggccttttccgcactattgctttgttttaccttggaagttttgacagcatagttcgtcgctgcatgatgcagagagaaaaatctgaaaatgcagacaaaactgcctaatcttcttaccccttggaagaagactgtttccaaataatttgaacagcttgctgctaaatgggacccaatttttggcctatagacacttatgtattgttttcgaatacgtcagattggaccagtgctcttcaggaatgtggctgcaagcaaggggctagaagttcacctcctgacagtattattaatactatgcaaatatggaataggagaccatttgattttctaggctttgtggtagagaggtgaaggtatgagaattaatagcgtgtgaacaaagtaaagaacaggattccagaatgatcattaaatttgtttctatttattcttttttgcccccctagagattaagtccagaaatgtactttctggcacataaagaaatcttgaggactttgtttaaaccttccataaaaaaacaattttcggtttctcgggttctctctctctctctctctgtctctctgtctctctgtctctctgtctctctgtctctctgtctctctctctctctctctttctttctttgtgtattttattcaagatgagttggacccattgccagtgagtctgaatgtcactgacagccctgtgttgtgctcaggactcactctgctgctggtggaaactcatggcttctctctctctttgatcccataaagctacgagggggacgggagagggcagtgcaatgggaagtaaagagatattttccagtaggaaaagcaatgctttcttgtctttagactcaaatgcttagggaacgtttcatttctcattcatggggaaaggcagcctccttaaatgttttctgaagagcggtaaaatctagaagcttaagaatttacagttccttcaataaccatgatgacctgaagttcacctatcccattttagcatctacttgtttttcccatctcttcctttccaattttgcttatactgctgtaatatttttgtaaaaaaaaaaaaaaaggaaaaaaaagaccagctaaaattttcgacttgactttttaacttaactcatgaattaattaaagcaaatgaaaaaattaaaaagtgtgactttttctcggagcatatatgtagctt

SEQ ID NO: 2627 - DNA, 1181 bp, Homo sapiens
gcaaagagcatttatattttcttttttttttactaaaatgatatagggtttattttatattttcaaaaaaattgttaaacatcattcttatcaatgtaaaatttacgttattaaaaaattacaaatgatagaatctttactcagggatgggcaataaaacagcaaagagctttgtgattgggtttgaaagattttgaattatagacagtgctcttaatagtttttaataagttgatatttttttctgtgtagatttaaataatttctttaaaagcgtaagctttggctgggcatggtggcttatgcctgtaatcccagcactttgggaggctacgatgggtggatcacctgaggtcaggagttcaagaccagtctggccaacatggtgaaatgccgtctctactaaaaatacaaaaattagctgggcatgatggcgagtgtctgtaatcccagctactcaggaggctgaggcgggagaatcacttgaacctgggaggcagaggttgcagtgagctgagatcgcgctactgcattccagcctgggcgccgagatagcgccattgcactccagcctgggcgactgaataaaactctgtctcaaaaaaaaacaaaaacggtaagcttttatatttaattaactgatacctttcactgtgcaatctcaagaggaagattttctaaattagacattgtctttaccttaaagaagaaaattgtctatttcagtgtcttttttagcaagattgaccaaaacaggtggtaggtgtgtaatttttaactgtcatgaaatactgtaatgcgcacctttgctaataaggaaatggtctccctttgaattatgggaagtttcttgtctgtgatatggggtgtctgtgtacatatatgtatatttccttttttaatacaggataataatatggggtcttgtccttcaccttttaagttcagggaacagtttgtcctgaccacacatatgttatcagtgtaatgctttatgaagctttagaaatgagctcatgactcattaaaaaataataaacgatgctattttaatattttcaaataaataatctgaggatgtgtttcatactttagcatcaacgctgagttgtgccttgtagaattgcattgtctatacatgcaaaagactattaagttaggatgaactagattccctaatt

SEQ ID NO: 2628 - DNA, 1159 bp, Homo sapiens
ctgctttcggccccgccccgcccgccgccggcctgctcacggctcctcccgtcctccccgaagccccgcctctgaccccgccctgtcctgtctccgtcccgccccacgcccgccagccagcgtcgctgtctctcgccttccctgaggccccgccttcagccccgccttcaaccccgccccgtcctgcctccgccccgcccccgcttgccggcccgcgtcgccgtctcaccctccccgggctgcgcggccggagctggcacagaggatcctcggccgcggcgacatcaccgcctgggcacgcgggcgctgctctggatacggcgccaccgagagaacccgccgcccgcgggtctctgtcctgcggtccgtggttgcccccacaagcgtccggcgtttcctgagggcgggcgtgtccgggccgtgcgggtcgcggggaccgagcgcggctgaggagaccgagctggggcagcgcctgccgtagcgcgggagacgacgcgggggtcttgcggagccccgcgggagcctggcccgccgtgcagagcagttttctggaactctccacctccgtctcccttggggcccagtgcggcgccgagcccccgtcgggatctgcctgaggtaagcggacttggtggctcaggggtctctcgccatcctgcctcactcagccccagagcggggagcggagaatgggggcggcagggtcggaggacgccagtgaaaaaatgcaacaggcggggcggatcaggaaactcctagcctgaatgtttcctacagaggggagacttgtccaagactgaaacttgcttaggttcttccagccgcggacgggcacggagaggcgtctttcgacaccggggtccgagctccctctggcggctccacctgaggacagggactcggccacaggtgagcgccgagcgcggagctcccgcccctcggcttggcgcctggtcacgattcgcggttaccccgccgagaaaagtgactggtccgagtagttctcattaggaagataccttctgatcccatgaactctaaaccttcccccggaattaaaaaaaaaaaaaaaaaaaaagatcttttcaactttcagttttttgtccctcggtccttgggaacaagaaataacaaggatagcaggactcatctttgtgta

SEQ ID NO: 2629 - DNA, 1137 bp, Homo sapiens
atctcttcaggtttctactttttattatatttggaaaatttctggtcattatatttttcaaatatttaacttcccctcctctttgccaggaactctatttacagtatattaggtggcttgaagttctcctaccatctgtccattggcagtcattgagttctcactagggtgggctattggaaaagtactggaggatgttagggagttttgatcaatgggttgtatccgtcactttgaggtacgcctcagttttccagtgttattctctgtgatttggccatctatctttgctaactggcacccattgaagtgagatttctaccttgccacagagaaagggagaaataggatcactatcttttgtaatacatacattttaaggagatggctttcagatctttggaataaatatttctgggatataaaactgtcaagaagatgggaaaatatttattccttaaaggggcagagaaataacttgcaagtttttgtttttccttttaaaaatacatgctccagtgcttgcttcggcagcacatatactaaaattggaacgatacagagaagattagcatggcccttgcgcaaggatgacacgcaaattcgtgaagcgttccatatttttcttcaaactatactacaaggctacagtaaccaaaacagcatggtactggtaccaaaacagagatatagatcaatggaacagaacagagccctcagaaataatgccgcatatctacaactatctgatctttgacaaacctgagaaaaacaagcaatggggaaaggattccgtatttaataaatggtgctgggaaaactggctagccatatgcagaaagctgaaactggatcccttccttacaccttatacaaaaatcaattcaagatggattaaagatttaaacgttagacctaaaaccataaaaaccctagaagaaaacctaggcattaccattcaggacataggcgtgggcaaggacttcatgtccaaaacaccaaaagcaatggcaacaaaagccaaaattgacaaatgggatctaattaaactaaagagcttctgcacagcaaaagaaactaccatcagagtgaacaggcaacctacaacatgggagaaaattttcgcaacctactcat

SEQ ID NO: 2630 - DNA, 1208 bp, Homo sapiens
tctgtctggagtctgtcttgcacccagcactgtcagtctatgctctggggacaactagaccctcaccatagtggctcgctggcagaccaatcccatgtccttgctaggtcatatgcagggatttttgaatcccttcagtgttacaatgttgctgagggaaagagactctaaaccactatttcatgttctttctcaaccaaataatctatgtaatgattttaaatggctttgaccacatgtcttgctatggaatccactggagggaaactgtctcctacgattacaaatagaagcaggatatgttccttctgtgctgtccctcttgcttttagcttcctatccaccctatctgggtttttctatcacagccctattggaagtgcacacctttcccccatgcacccaagcttttaggactctgaaaattcaagaaggtcagccttcagactcaatgacacattggtttccttctgttgaagccaaaaatcatggaaagaggcttcattaaagtagaatttttaggaaatgaaaatacattgcaaaatatttttaaatccctcatatgttaatatagattttattatatgtgtccttggtgagggggggccttctttccttctttcctccctctcctgttctctcacacactctctctctggtttttgctctgtcttctttcctctcctttcttctcccttcttctccatcccccttccattcttcctttctctctttcattttccttttttactttctttcttgaaatcgtatgtgaacaattataaaagcaacatggccccctaagtattggagaagcagaaaagctttgaaagattgaatgactctgatgctgaatttttcagttatgaggcaaactcttgcctgatttattctaatatcaataagaattgttcattttagactcatcagaaaatatgtgcttcgatctttaaaataaaaattttacctataagcaatttgcatttgacttttgatatggtttgtacatggtttaatgtattccaaaggcccattcattgaaaaatgtgttgaaacttcttataatgccatttttcgattttgaaccaacttatatagcactccttggggaactgccagtgccttctttggcaagaaaatctttggctataggataactaaaatagttcaaaaggtttcccagtgcaaaatttaacaatcagtgtatt

SEQ ID NO: 2631 - DNA, 1168 bp, Homo sapiens
gcacctggcaaattatttaaaactgaagccagaatcaagaaggaacactatgagaataacttctaggtgctaaaatgttttatctctagctgggttgcctggactacatattcttaggttgcatctggcttattcattaattaaaacctgatcatgttaatgagtgtcaggagtttgggcaggagaaagacaattaattctgttttgtccttgttacatctgatacctgggagataactgatccatgatttggaaatcacaaaagagacaataatatttagatttgggaaccatcaatgtgtatgtggtaatcaataacataagggtggatgaaagcactcaaagtagaatacagaaagagtattggactgcaagcagaaccctggaatgccaacactaagatatgtgcaagaaggaactgtcagaaagcagaaagaaatagttttagagttcagaaacctgagaaaggacaaatttcaagggatgaaaaataagtaaagccaggcatggtggcgtgtgcctgttatctcagctacttgggaggctgaggcagaaggatcacttgatcccaggagttctgggctgtagtgcgctatgctggctgcccatgctaagtctggcatcaatatggtgatttcctgcaagtggggaccacctggttgcctcaggaggggtgaactggcccaggtcagaaacggagcaggtcaaaactcccacgctgaagtgggattgcatctgtgaatagccagtgcactccagcctggacaacacctcatctcttaaaaaaaaaataagtcaaatgtagcaggaaagttgcatgagataacagctcaaaagtgttcatttggcggtgactgacgtctgagagcaatttcatgggaatggtagaaattgaagctagatttgagagaatgaagcagtggatgggagatggggaatgtgggctgatttttaaaatacgtttcattgagaagggatgataagagaaaggggagcggtgaaggaggtaatacgcaggggaagagggcatgacaatgtgaggtcacattgccataaatgtgaggtgtgtcataaatgtgaggtgttggaaagagatggaggataatagaaataacccagtccaagagaaaaagaaatgagtgggattaagaggactcataggtgaact

SEQ ID NO: 2632 - DNA, 1177 bp, Homo sapiens
ctttcatctcttccgtgcatgcgaacggctttccgagatgccccctttatgggcttggccatcgctacttttgttacaaattaacgtctgggactcggactgctgccaataggaaactcccgcgattcgctgcctagttcgccgccctcacaagactggactctgcacaggccatccatgcccgctggtgcacctcgctctctcgcacgcttaacccgcggggacgcccccgacctcccacctcagccctcgccacagttagtcccgcccttccgcgcagactccgtggagtcctgtcacgctctccgcgcgctgcggcagccgggagattgtgaagggcacctccggcagccaattaacacccgcatactgggcgggaccacgcttgggcaggcggagggggtcgaccgaaggcggggacttttgagtgacaaggatgatggccaaccgtcggaggcccttctactgcgccccgcccctgagccggccgcccagcccccagtggggttcccggcgcggggaatgtcccgggtggagctggctgagtcgcgcgctctgctccacccgacggggctgtgtgtgctgggcctggctcgcggcgaaccgagatggcagagcagtcggacgaggccgtgaagtactacaccctagaggagattcagaagcacaaccacagcaagagcacctggctgatcctgcaccacaaggtgtacgatttgaccaaatttctggaagaggtgagttggggatgagcggcttggggcgcagggagcgtgggccgggtttgggggttcactggcatgacctgtctttcgcggcccggagtccgcatacctacgcctaggcgcgccccccgagttcgctcacctgcgcgtgtacgcctgggcgcgcttccgagtccgcacacctgcgcgtgcaagcctgggcgccccccaccgccccaagtccgcacacctgcgcgctcacacctgggagcgctccccgagtccgcacacctgctagtgtacacctgggcgctctcctcgagtccgcacacctgcgcgtgcacacctggggagcgctccctgagtccgcacacctgcgcgtgtacacctgggagcgctccccgaatccgtacacctgcgcgtgcacacctgggagcgccctgcgcggcggcatcctcgctaggtggtgctgg

SEQ ID NO: 2633 - DNA, 1201 bp, Homo sapiens
tattttttaaagttgttcagtagatgtcatatattttcctaactactatttacatagatataggatggcaaattttacaggtttaatgggtaaagaactcttagagggagtgtgactacctagatgaatactgggttgggtttaaaataaagaaaaactgtgatgtgtaaaatgctcaatatgattactagaaatgatgtatctaaaaataaccataaaataattctttacaaactgtttcaacctacttttgttttaattagaataactctaagattggggatattcctgaattgtttcttcctaattaaaatatatttaggagtgtctgacttgggttgatgttacgtgattttttgcttggagtgttctcataaaaccaagtagacatttattcaactatgatagtcactaactttggcttaaatatccgtaaatatatattttagctttctctaaactattaatgtaaatctctgaaggaatttaaaacattatatatctatctatatatatattcttcagattgtgtaattaaaatctattgtatacacatggtgtgttttcactttttttatattccatctagggacatgtgagtggacattggtattctcccccagatttacattctctgggtatttaaagctcatggattttttgaaatagatgaactacatagataacttaatactggtgtgttttgggcttgctttctgatttcataatacgtaaatatatcattgtggtttagatttttatttttcaaagattggattttgatgatttcatttttatctttgaaaattcttttgtgtttgatgagataaatccatttcattttaattaaaaatgcttaacctatgtagagctggttgaacaccatgtaggatgctagtgattacagaatctatgcatataaaatatatctatttatgaaattgaaaacaattatgaggtaaaaaagatacatttatgtttaattttgaaattgacctttgacttcagttttacttagctaaaattcgtggctaaatttgtatatatctgaatattctaagaagtttgtttatataattgaatggtagaatcatcttaaaattaccctgacaatggttactggagctatggtctgtgattgtgcttgagaaacaaatagataaaacatttgtgactcttttaatgattatatttcttgata

SEQ ID NO: 2634 - DNA, 1202 bp, Homo sapiens
tctgtgacgttttgggaacagcagcagttgactttggccatgtgaagggtaacacagaaaaatacgttcattaggttatgtatttaatcaaaactagttttcatggaagtttagaaggccatttcctttagccatttcctttgttttcattattcatttaataaagactttagtaatgatgcttgttttttattttctttattccttgcttttgacatggtgtcagtggtgtgtttgctcatcactatctgtatcctatacatcagggacattttcatgtcattgaaatggaagcaacacagaaactttcttttgagtgtttcctaatgtatgaaaaattccctttggtggttttactgtatttactcagggacacaatgatttcctcaaataccccaaactgtaagtatcttcacaacagcccaaaacattcagcatgatataatgtcatttggcatactctctcatcttaaacatctgtcagatgcatactgacatggcgtgggcccctgtttctccagcacagaggacccaggggctagagcaggatctggcccacaatagacatttcctaggtgtctctgtgggaatggatgggcctaggccctttgtgaactgacccccgccactcttgggctcattcctcttcattccttcccacatcctgcgcctcagccctcttgaactacgggtatacgccaaatatgccatgcccagtcctccatgtctcgtctcctaaggccttggcctttgcacacatacagcaccctcttccctctcctggtgctgggaagctgagccgctctgattccaagagtcaattctgaaacccttctgagtggacacagtgccctacctacctcccttcagcacttacgtgctctgttgaaatcacctggttggctgtccagctctcctactgtaaactctttgaaggcctgagactcggctgagggttttgatgaaagaattaacaaatgaatgaatgaatgctggcagtgtctatgttcctggctggaaatcttattcacctgaacaatagatgcctatcattcttgtatacaaagagattatcctgctctgacagttaatgcatggtcttcatcccacatcagccccttcttccagcagccacatagaatcattggagctccacagttctccccggtttctttgtaaaatccaatcgcactttctttagc

SEQ ID NO: 2635 - DNA, 1150 bp, Homo sapiens
gcgcacaagccgttcaagtgcaggctgtgcagctacgcgacgctgcgggaggagtcgctgctgagccacatcgagagggaccacatcaccgcgcaggggcccggcagcggcgaggcctgcgtggagaacggcaagcccgagctgagccccggggagttcccgtgcgaggtgtgtggccaggccttcagccagacctggttcctgaaggcgcacatgaagaagcaccggggctccttcgaccacggctgccacatctgcggccgtaggttcaaggagccctggttcctcaagaaccacatgaaggcgcacggccccaagacgggcagcaagaacaggcccaagagtgagctggaccccatcgccaccatcaacaacgtggtccaggaggaggtgatcgtcgccggcctgagcctctacgaggtctgcgccaagtgcgggaacctgtttacaaacctggacagcttgaacgcccacaatgccatccaccgcagagtcgaggccagccgcacgcgcgccccggccgaggagggggcggaggggccctcggacaccaagcagttcttcctccagtgcctgaacctgaggccgtcggcggccggcgactcgtgccctggcacgcaggccggacggcgggtggctgagctggacccggtcaacagctaccaggcctggcagctggccacgcggggtaaggtggccgagccggccgagtacctcaagtacggggcctgggacgaggcgctggccggggacgtggccttcgacaaggacaggcgcgagtacgtcctggtgagccaggagaagcgcaagcgtgagcaggatgcaccagccgcgcaggggcccccgcggaagcgcgcgagcgggcctggggaccccgcgcccgccggccacctcgatccccgctcggccgcgcgccccaaccgcagggccgcagccaccaccggccagggcaagtcctccgagtgcttcgagtgcggcaagatcttccgcacctatcatcagatggtgctgcactcacgcgtgcatcgccgcgcgcgccgcgagagggacagtgacggggacagggcggcgcgggcccgctgcggatcactcagtgagggtgactcggcctcccagcccagcagccctggctccgcctgtgccgctgctg

SEQ ID NO: 2636 - DNA, 1246 bp, Homo sapiens
aataaactagagaaggatggcccacgtgttgagtttggggtttaaatgaagatggggtggttgaggaaggtggtttttgaatgaagagcggaacccgtgaggacccagtcgcctctctctgggaaggacgttcggatgaagatggggtggttggggaaggtggtttttgaatgaagagcggaacccgtgaggacccggccgcctctccctgggaaggacgttcgggggcttgtgctgctgttaggggaggaggggaggtgggcagtgaggggctcacgggagccttgttggccaggtgggactggggctgtcactccaagtcgcccggagctgtccggcagcgtggtctcagggacgtttgctgaggcccgctccttggggtccgttggtcgaggccgggggttgctggccggccctgagttcatgggtttctgctttgtgatgcccagcccctcatgctcccatctgcttctttttctctctagaacactatggctatgcatcctccaacgtcagccccgccctgccgctccccacggcgcactccaccctgccggccccgtgccacaaccttcagacctccacaccgggcatcatcccgccggcggatcacccctcggggtacggagcagctttggacggtgggcccgcgggctacttcctctcctccggccacaccaggcctgatggggcccctgccctggagagtcctcgcatcgagataacctcgtgcttgggcctgtaccacaacaataaccagtttttccacgatgtggaggtggaagacgtcctccctagctccaaacggtccccctccacggccacgctgagtctgcccagcctggaggcctacagagacccctcgtgcctgagcccggccagcagcctgtcctcccggagctgcaactcagaggcctcctcctacgagtccaactactcgtacccgtacgcgtccccccagacgtcgccatggcagtctccctgcgtgtctcccaagaccacggaccccgaggagggctttccccgcgggctgggggcctgcacactgctgggttccccgcggcactccccctccacctcgccccgcgccagcgtcactgaggagagctggctgggtgcccgctcctccagacccgcgtccccttgcaacaagaggaagtacagcctcaacggccggcagccgccctactcaccccaccactcgcccacgccgtccccgcacggctccccgcgggtcagcgtgacc

SEQ ID NO: 2637 - DNA, 1208 bp, Homo sapiens
gtgctgggccaccgagcacttccatcacacagtggctggcggcggagccttgggtcgttttctgaaggtcaccaaccctttggcatcagagcaggcagagccttttgcatccccgccagtccccttgcccaggtggccccgggcaacctccaccctcaggcacccggtcccagttctgtttacagcttctcttttcctggcttctttccccatattgacaagatttcagtcttaggttggtcttgtctgctgtgctgctctgaggaagcctctcggctcctgggtgtgcaagaagccaagggcagccccttccctgtgagcgtgcgtgtccacacgcgtgtgcaggtggcacagagcatccagggctgtcatcagctgcttctggaccgcccaggtggctgcttgggagtttaccgtcacggcagtcctgtgctgccgtggaaacgcggggttgccgtgtggccgccgtggaaacgcggggttgccgtgtggccgccgtggaaacgcggggttgccgtgtggccgccgtggcgcggcagccatcgcctgcccggtgctgattgtgcctcctgtgtgcccttctcctgtagaattctctggtggttgagatcccgccatttcggaatcagaggataaccagccccgttcacgtcagtttctacgtctgcaacgggaagagaaagcgaagccagtaccagcgtttcacctaccttcccgccaacggtaacgccatctttctaaccgtaagccgtgaacatgagcgcgtggggtgctttttctaaagacgcagaaacgacgtcgccgtaaagcagcgtggcgtgttgcacatttaactgtgtgatgtcccgttagtgagaccgagccatcgatgccctgaaaaggaaaggaaaagggaagcttcggatgcattttccttgatccctgttgggggtggggggcgggggttgcatactcagatagtcacggttattttgcttcttgcgaatgtataacagccaaggggaaaacatggctcttctgctccaaaaaactgagggggtcctggtgtgcatttgcaccctaaagctgcttacggtgaaaaggcaaataggtatagctattttgcaggcacctttaggaataaactttgcttttaagcctgtagtcctgatgtggtctttaaggatggtgaatgagctttgtgctgggcggacgtccccgagacactt

SEQ ID NO: 2638 - DNA, 1137 bp, Homo sapiens
cttaagtacacaatttacaaccctgtccaaatgatatttcaagtaatttattatttgcatggtgattccgtaagttaatatgatgttactggtatttattgtatctgtccctgagcaaggcattgaagggagaataatgaaatattattttgactttcctaatgcctgtgaccatttattttgttggtgtatttattttagcttctgtagggaagtattttgtgtttaagtcaaatcaaaagacagtttattagtttaccatgaaaataaagctggattctggcaacctgaccaacacattctcactgtggacgctgcgggaaactagagtttcagaaatgggcgttgtcagagtgaccggactcagaggggcccatgtctaatgcaaacatcactttggggttttgaaagcacatggacggggagtcgcatgcccctgcagtgggccgtgtgctcactttggggttttgaaagcacatggatggcgagttgcatgctcctgcagtgggccgtgtgctcaccttggggttttgaaagcacatggatggcgaggcgcacgctcctgcagtgggccctgtgctggagttctgatacggtttttttcaccaaagctgaagggcagtggagtctttgtgaagtgtgggctttccccctccccctctccccaccctgctccatggtttacatttccatcttaatttttaaaaaatatttcccaaagtagagaatatagtgaacccgtctgttcctattgttccacttcaacaattgctggtattttgctggtcttgtgttacctaacccctcatttttttaggctgtgtgtttcatggaaatcccagatataattatttcacctgtaagttacagtcaggttgtaaagatttagttttatatgaagaaatgttgtgcatatcccattgatttcccgtgactgctgtgagaggatgctgcaagctgaggggcttaaaacaacagaaacttctctcacaattctggataccagaagtccagaatcgaggtgttttccaggctgggctctctctgaaacctgccaaggagagtcctcatgcttctcccagcttctggtgctgccagcagcctcttggagctcctaggcttgtagacgcctctgca

SEQ ID NO: 2639 - DNA, 1248 bp, Homo sapiens
tgacaatgctaccgtgttagaagggtttaaaaataacacactggggaccactgccactatagtgcctgctcctctccagtgcctggggagaattaagtgtacccaggagccatagagaaagtaaagccctgttccctgaagggatggttttatgttgtggttcatgagagtttcagctagatttagtccaggccttataaggttgccttccctatatctaatggcaatatctttaggataaggatatccatacttagtctagttatccacagtaccatttggaactatacatgctgcgtaggaagaatctttttggcaaatagagttttgaaaaattagagacacagaatgtcctggccaatatcttagacaaccctctttacagggtctgttggtttagacatcccattagtccacaaatttgcagattacttccattaaattttttttttttttttgggaccggggtccagtgcggagtgcccttcctcctgggaaacggggtgaggccggaaaggcggccggccgccccctcgcccgtcacgcaacgcacgttcctggggaacctggtgctaaagcattcgtcgacgacctgcttctgggtcggggtttcgtacatagcagagcagctccctcgctgcgatctgttgaaagtcagccctcgacacaagggtttgaagaaagaaaaaataagagagagagaacaaaaaaaattaaaaaaggaaaaaaaaaaattttttttttttttttgagacggagtctggctctgtcccccaggctggagcacagtggcgcgcgatcttggctcactgcaagctccgcctcctgggttcacaccattctcctgcctcagcctcctgagtagctgggactataggtgcccgccaccatgcccagctaattttttgtatttttagtagagacggggtttcaccatgttaaccaggatgctctcgatctcctacctcatgatccccccgcctcggcctcccaaagtgctgggattacaggcgtgagccaccacacctggccccattaaatattttattattattattatttttgagatggagtctcactctgttgcccaggctggagtgcagtggcatgatctcaactcactgcaacctctacctcccaggttcaaacgattctcctgcctcagcctcccaagtagctgggattactggcatgcgccaccacgcccggctaattttttatttctttttgtatttatagtagaaaggg

SEQ ID NO: 2640 - DNA, 1981 bp, Homo sapiens
gtgcatgatgtggaaatagttggccgccccagttagcctgctcttttctaatggtgaaaatacagattttactgagctctaagattctatggagaacagtatctatagaggatctataaatatgaaaacattgaactatttcatagttaattcatccactgggcattttacatggaatattttatcttaggattgataaattatgctataagaatggatctaagaatgaataaattgtggtagcttagaatggataaattatgggtaaaagtcagcttcccatccccaaagtggttggcaacagttatgaaacctgtaatttacttgcattttattttttatcctttgttggtttccctaaagcagttaggaaactgctaaacaaaaaaaaaaaggaggggggaacttttccccctcctttttttaaatgaaaaggtatttgtgtgcttgtgttttgttttgtttagaagggccacaataacgatgaaggaatggaagcactttcatttgagaataaaaagttcctatttttcaaattcaagggaaaaaaataaaaaagtgacaactccttggccctagtcccaagccttgaacaagtaaccacagacccctgcccaatctctgagagcctcattttagtaacccctttctgaggttcatgtatgtacaaccatgcttacatgaatcagccaatccccaatcactctgcttttaaaagtccaccagtctttgtatcccaggcttctcaaaactctgtgataagatcagctctggctgtgtgagttgagattttcttggaagcagtaaatttagcttccctgtttcagatacatatggatgatggtccctactttagacaacactgtttgtcagccagcttttggagaagaaccccagaggatagagaggatagtggaactttaaggaggaaatgaaatcaagtctgatagagtccctggaaagcagctaacaaaattttcgttgagttttgctctgaccaaagaagctggactgggccagaaagtgaccttgagcttagtgtttagaaatgcataatgaggttatggcagctcttgtgtgagagtgtaagcttttgaaggctagaacccaaatcagtgcattttattaaagaaaatttttaaacttaaaattttataaagaaaatttttaaatttttatcctcccagttctacaatgctaatgatccttaaatctctccttttgctgagaccaggatacatttttcacatagataactttgaaaagaaatttatccgcttcaaaacagcttctcaaaaacttggtgtttgcttgttacccaccaaaaatttctccctattatatgttaaccctttctgcctcccactcctctcccagtttgattccagtccacctttttggttttacttttgccaaataaattcagacttttccttctttacctcaataattttttgatgctaatttattcaccttgtatgtcttgggcaccagctttccatagccatgtcctctttagaacctcctagcactttctgcatatcttacggttcttatcctgttttattttatatcttttgttcatttaatgaacatttgctacgtactgtgctctgtgatgggaccctctcaagcaaatataacatgatttctgccctggagtagttcagcccaataggagaaatggatatataagtagataattgcaacatggtgagtcgagtgcagtggagtggtatgtggttatggtactaagtcctaggagggatcactaagcctgtccttgggtggtggatacaagagaggaatgtagaagtagaattgcttactcagaaattgtccttaaaaatcatgagagagctgggcatggtggttcatgcctgtaatccccgtactttgagaggctgacggggaggattgcttgagctcaggagttcaagaccagcctgggtaacatagggagaccctgtctctaccaaaa

SEQ ID NO: 2641 - DNA, 1252 bp, Homo sapiens
tcgaactcagatatttcctgctcccccagaagctcaagccgtaaggctttagcccccttgggccctgcctgtgccatggccgttgttgtctgtcccccaggctggcagggccggaggagtcggcctggggggacgaggaggactctttggagcacaattactacaacagcatcccggggaaggagccgccgctgggcgggctagtggactccaggctggccctgacacagccctgcgccctcacggccctcgaccaggtcagcctctgccctcggggggatggggacagggatgccccagctgctggttccctggacctacctccagctcttctttctgctcctgttctcctcgatcctagaggagggtctctcactcagactcactcactcactcactcatgatttcacttactcacagactcacaatctcactcacaatctcacaggctcacgatctcactcatgatttcactcactcacagactcacgatctcactcacttgctcactatctcacagactcatgatctcactcagtctcactcactatctcactcacagactcacgatctcactcagactcatcatctcactcacgatctcatgatctcactcactcatgatctcactcacagactcatgatctcagtcacgatctcactcactcatgatctcactcactcatgatctcactcatgatctcactcactcatgatctcactcaggatctcactcactcactcaatcacaggctcacaatggggcgccgtgtatctgcccggcctcctctatctctcactcactatctcactcacgatgaagcgccatctgcccggcctcctctaactctcactcacgatctcactcacgatgaagcgccatctatctgcccggcctcctctaactctcactcacgatctcactcacgatgaagcgccatctatctgcccggcctcctctatctctcactcacgatctcactcacgatgaagcgccatctatctgcccggcctcctctatctctcactcacgatctcactcacgatgaagcgccatctatctgccccgcctcctctatctctcactcacgatctcactcacgatgaagcgccatctatctgccccgcctcctctaactctcactcacgatctcactcacgatgaagcgccatctatctgcccggcctcctctaactctcactcacgatctcactcacgatgaagcgccatctatctgcccggcctcctcta

SEQ ID NO: 2642 - DNA, 1170 bp, Homo sapiens
ctaatttattaatacgttcatatatatatatatatatgtacatttttaaaggcagagatgtgcgtctcgccatgttgccgcgtctggtctcgagctcccgggctcaagcgatcttcccgcctcgacctcccaaggctctgggagtacagacgtgagccacagcggccggcccgtgtttaactcagataaaatctgggtaacacactttcaacgcttcaaccccctcgggcgcaccgctctgcgctcattgcaactttgaaagcaggaaggaagaaatgcgcaggctccagccgcgtccccgcaggccccactcccgtttcctagcaacgccgggtcacgtgcgccgccgcccggattccgtagcgtgagcctgccggagccggcgcgtacatgcgagcgtgtgcgcgcgtgcgcaggcggggcgaccggcgtccccggcgctcgccccgcccccgagatgacgccgtgcgtgcgcgcgcccggtccgcgcctccgccgctttttatagcggccgcgggcggcggcggcagcggttggaggttgtaggaccggcgaggaataggaatcatggcggctgcgctgttcgtgctgctgggattcgcgctgctgggcacccacggagcctccggggctggtgaggagcgggtagggggcgggggtgcggtcctgcaggggccgggaatggaggccgcggtgccgacccgaagccgacgggagcctggggcctcggcgcggggcggcctggggtgcgaaaggccggccccgggggcttcccgcgccagcatggagcttgggggtgaagtcccagggtttgaggggggactagaggttcctcccggcgcggcctgccgggctcccccgggcgctccggcctcgagcccggcctctgtgtgtgggcgtgaagctccctgcttggaggcgggagccagggggtcctggccaggccggtcttggtcaggggaggtgggcgtcttgcttttcggtcacctggggttgggggtgacctgcttcctgggtgagggcgtctgcgaaggcggttggaggtggcccgcccgccggtcccatcggccaggagaagggagacccaaagcctgggtgagcgtcccctttggcctggagccaggggtcaggggctggttggtgcctgcccaacccgtcctgctggggctg

SEQ ID NO: 2643 - DNA, 1421 bp, Homo sapiens
cagagcccctgggcttcagtattcgggggtcctgggggccggggtgggcaggggtgacttggagagagtgacttgcgggggacaccctctcacccggcccctcgtgccccaggaagagcagcgggcagcaccagaatgacaaaggcaagaacgtccgccagaggaactcttcctgaggcaggtgcggtgggcgggagctcctcctgagccaggtgtggtgggtgggtgggcgggaactcctgagccaggtgtggtgggcgggatctgctagccaggtgtgggctcctgggtcccgcctgtgggtcgctgggaggtgggtccagtctgagcgcccctccctgtccacaggtggcccgaggacgctccctgctccacgtctgcgccgccgccggagtccactcccagtgcttgcaagattccaagttctcacctcttaaagaaaacccaccccgtagattcccatcatacacttccttcttttttaaaaaagttgggttttctccattcaggattctgttccttaggtttttttccttctgaagtgtttcacgagagcccgggagctgctgccctgcggccccgtctgtggctttcagcctctgggtctgagtcatggccgggtgggcggcacagccttctccactggccggagtcagtgccaggtccttgccctttgtggaaagtcacaggtcacacgaggggccccgtgtcctgcctgtctgaagccaatgctgtctggttgcgccatttttgtgcttttatgtttaattttatgagggccacgggtctgtgttcgactcagcctcagggacgactctgacctcttggccacagaggactcacttgcccacaccgagggcgaccccgtcacagcctcaagtcactcccaagccccctccttgtctgtgcatccgggggcagctctggagggggtttgctggggaactggcgccatcgccgggactccagaaccgcagaagcctccccagctcacccctggaggacggccggctctctatagcaccagggctcacgtgggaacccccctcccacccaccgccacaataaagatcgcccccacctccaccctcaccctctcctggctcctgtctgtgcctgacggggttgggttttccgagagcaggtgcaccctgggctctggtggtcacagcaggggtgcgtccagtactgggatttcacatgcgaggacgggtctgctgagaccgcagtgggtgttgggtggctcggggcatgggctggacagggcctgaggctgtcagccggactgggaacttggaaggtggctggggccgaccccgtgcctcagagccacacagaagagagtgggcactgacctgagccttctctgagcctgttactcctctcggcatgttttgggcctgacaaaggctgaggctttc

SEQ ID NO: 2644 - DNA, 1170 bp, Homo sapiens
cacctgttccacgacggctgcatcgtgccctggctggagcaggtgagtgccccgcccacccgcccccccaccccgaccgcggccctcccgcctctaacctgccccttctcccgtccctgcctctgtccccacaaagcacgacagctgccccgtctgccgaaaaagcctcacgggacagaacacggccacgaacccccctggcctcactggggtgagcttctcctcctcgtcgtcatcgtcctcctccagctcgcccagcaacgagaacgccacaagcaactcgtgagcccacgtcggccgtcgggaaagcacggggcctttcccacccaccctcagccagcgccacacggcacccacagactgggtgccccggcggcgccacgcttggctggtcagcgctgcaggtcccgcctgttccagggcaggacccgggcccggcccaccggccccctggcttgggaaggcgtgggccacatggtcccctctggggcgtccccagcctccccgtcctctgtctaacctcaccctctaaacgttcagcggtggaaagatttttataattttaaattattactgctttgaaataaacggacgtttgagctcacgtggcggccatgcatggtttgtggcggaagacggggcccagcggctcccccagcgctgaagcacggggttcagcggctcccccagtgctgcaggtgccgccaggacgggccacgtgggcccccagcctccccctcggccgcctccacgacccggagtaggggggctcgggaccatgaggatgaccagcaaaattcaagaacaaaactgctccaacagacttttttaaaggaaaaaatatgtgtatcttgaaagctatttaaaatacactacttacaaagagaagccggtgctgtggctttccttctgcgcccgtgcgtcaggaaaaggccaagctgggaggctggtcgggctctgcagagtccggtcctgtctccaggggtctgcgcctcctgcagggcttggcacccagggccggctagcaaaactgctctcccgaagttaagcccaggagggctgctggcgaggtagcagggtggcagtgtcactgggtcgtgaaatttaaaaccagaaacaccagcgttaaagcgccagggcccagcgcctctgccccacgcttcggtcaca

SEQ ID NO: 2645 - DNA, 1127 bp, Homo sapiens
tcgccccgtggccttggacacggaggaccttgacctcctccgactgtcactgggcctggggagggccttcctgtagtgaaaggaactctgtggtgacaggccgctgtggtctttgccctcacagaatttacaggctggccagggagccagcatggaacagtgattgacaaatatttaatcatggacgttggtagattccttaagagcaaataactgcagagagggctgcgggggcctgcccgtgtccaccccgcgggtgatcccaagggcatctgcttgtgcctttggagcaggacgcaacaaggcgcccgtagacagcatggcagtgtcagaacttctccgtacgtggcaggaccctgtctctacagaagactaaaacaattagtggggtgtgttgttgcactcctggagtcccagctactggcgggggctgaggtggtgggaggagcgcttgagcctgggaggtggaggctgcggtgagccgtgatggtgccagtgcactccagcctgggtgacaagcaagacgctgtctcaaaaacgaattttttatgctgggaaatgggcacacctggcgtttgttctggggagggacggctgctccgtatctggcaatggggaaagtccccagccacaaccagtgccctcgaaacggggcgtctctgccgctggggagcttgcccggcggctgagtcaggggcggcactgctgctgctgagacacctgggctggctgtcgggaagctcctgcctgcctctgacgcaggggggactggctgccatgggctgtgtgcctgcccacgagggcttctcccaggcagctgggccgttccgggcctcctttgctgtcctgggctctgggatcaggctgaggccccgcgcagctgggtcattctctgctgggcagccttggcctcagtctcctcacctgccaagtgggtttagtgatgcgattcgctccccgtggcatctggtgggcacgtgtgtgcagagtggccggcacctggccgctctcctggtgactcgtgagggtgtcctgagcggggagccacacttgcggtcgggggctcaggcgacgacggcacaggggcagcagttgcccccatgaaaggctgtgatgaggccgagcgc

SEQ ID NO: 2646 - DNA, 1276 bp, Homo sapiens
aaaagagggaggactgagctgcccccaacgggtgggaagagccagggtgggggcaggtgtagggggcagattgggagtagtgttatggacgtgtgagagtggggcccctgtggataggggctgagtccaggtcaaggtccaggtggggatgggtgtgcgggagattagagccgagtgcctgggcgaggtccccggcgcagagcagagtccagggccgcagccgggcctaagcgtcgaggttgggtgggaggagggaaacgaggtggctatgggggccgaggggccaggcgatggcagggctgcccacgatggggaccgatggcccctcagaagtggtgaggacatgcagctatctggggggtgtgccaggcattgggaacagcctgtgcaaaggccctgaggctgggccgcacctggggtgcagtgtcatgggtcaggccagtcctggcagccctgttcagctcccgctgcggggcggggtctcagggaggtgcctggtgatccccagtgctcgtcatcttcaagcaggcctgggggtggcgggcagccaccagtcgctgttaggatgcaggctctgtgtggtttctgcaggaatgatttttacagagtggggcgaggtgctggctgtggagttagggccctgatgagtagcaagttcgactatctcaggagggttccttcattctgagtctaaatagatgacggcgtgtccaaccgttggctggaaggaggcgtcaagtcctgggagcttggatggtcggggcgggggctgtgggtctgcagactgagccccagtctccgccgtgaccccgggcaaggcaggatctctctgggattcacctgctcctctgagaaaccaggaatggtggggctcgagggctcacgtttataatcccagggctttgggaggctgaggtgggaggattgcttgagcccaggagtttgagaccagcctgggcaacatagtgagacccccatttccaaaaaagataaataaattagccgggtgtggtggcgcacacctgtggtcccagctacttgggaggctgaggtgggagaatggggtgagccaggaaggtcatgactgcagtgagctgtgatcgtgccgctccactccagcctggccaacagagggagaccctgtatctatttaaataataggctgggcgcggtggctcacgcctgtaatcccagcactttgggaggccaaggcaggtggatcacctgaggtcaggagtttgagaccagcctgaccaacatagagaaaccccgtctc

SEQ ID NO: 2647 - DNA, 1099 bp, Homo sapiens
ctattccggcgcctccactccgtcccccgcgggtctgctctgtgtgccatggacgggtgagtcgcacgtcgccccgcgccccaccgccctccccgcgccgcagccctgcccccgccgccgcgccggcctccccggggccgatctcgccccctctcgggcgggagggggcggcgggctctccccttcctctccgcgtggcgggcgcgggtgcggggcgggtcaggggcttcccgggggtctggccgcgtccccatcccccgtccggcccgcttccggcccccgcgcgccccgtccctagcgcacgcggcctcccgcgcccctccccctccgcgcgcgtccccgcacttcgcctttgccccgcctcggcggcgcgcggcccttcccgcttcccgtccggccctcgcgcgcccggatggcccttcccgcctcccgtccgctcccctcgtgcgcctgcgtagcccgtcgcgcgtccccgttggccccagcgcgcgtgcgcggccgccatcgggggcgcgcgcctttcccgccgcccggactctgcccccggcgcagccccggaagcgcaggcggggctggggcggccgccgggagggaaagctggcgccggggcctcgccgcgggcccgagtctctgcgctccccgccctacccctgccccccgtgcgccccgggccgcggccaaggggtttcggtgatctcgggagagaagcggccgccccgagggtctgtcctccgccccggggccggaggggcctctccagggacccccgcgggcgccgtcatggggaggggccttcccggctctcgggccggggcagcctttccgggcggctttgctgggcgggcttcccttgggagaggtgggagccccctccagaaaggccgtgtcccgccgagcgcttcctgcgcgaggccctccctgggaataggaagcgggagaggctggagatgtttcgcattctttccgttttcctgagaagtttttcttgggttcagtcacttttaaaagtctgttaaacgtggtccgtgcagtctgtggtgtcagaagaggcgcagccctagagtgggtctggaccccttagcatgcgtgcgggcaggtg

SEQ ID NO: 2648 - DNA, 1247 bp, Homo sapiens
cctcaaggcggtgcccagcctggccctccctcgcgggggcccaggacgcactccctgcctgtgcctcttaccacgagccgggtgctgtccctccagctcctcctgagcgaggccgtgcactaacagactcgatctcccttcacgcctgtaatcgtccttagagactgacttgtgccacagctgcgggagacagcgctgctgcagggcttggctgaggtggccgcgagcggagctgcacgcgcgctcctggggggcgtggttgggatcggcttctgggagcccctccagcagcgctgtctctgccggcatgtgagtgaaggtgcttctcttaccgtgtgcccgtcgaggtaaacctgtaactggaatgtgtgtggagtgtgactgatagaacactacctgattcttatgtatttactgacctgtgtttttttgctactttttttcttttctccccttcccctttccctattttttttcttgccctgatccggaatttctttgccaactgactgcacggtacttctgcttcctgttgttgcttgaaacaaaacaaaaacataaacaaataaaaaacaaaaattccccctcaaaccctgctctccggaaaccaacctgcccttgaatattaacatcctgacaacttcatcatccatcaaccactgcacgcctgcggggactgtcttcctcgtgtggacgattggcaactcgccccccttgacctctccctctcccctgtccctccgctgccttgctctgctgtctctaaagagagtcacaccccaaagcctctttattcttttcggtatgttatcgttcacacttttattaccttgttttcattaattgagatgattttgatgccctgagacgtattatgagtttgcggtttggcactctgatgctccgtggcatccgcctcgttttatggtttgctttcggtttgcgaattttatttggtcccgtagatacgtacgcatggtttatcgccctgcatgcttttcagagttagacctgtcggtggcatatgccaccgtggccacccgctggcagcttacctgtcctggatgctatgactttgctgaacggagctgctcctgttagcgcgccctgtggctgcgagacgcagctccgcagtggccgataaagcaaacccggccgggctgagccgggccttgtgggggtgcgcggggccggggctgacggggagatgggcggggcaggcagcaggagactcaggccccatccct

SEQ ID NO: 2649 - DNA, 1194 bp, Homo sapiens
taatcaagtcacgtgattctcccttcaccccgcccccagggccttcccttctgcccccaggcgggctccccgctgctccagctgcggagctggtcgacataatctctgtattatatactttgcagttgcagacgtctgtgcctagcaatatttccagttgaccaaatattctaatcttttttcatttatatgcaaaagaaatagttttaagtaactttttatagcaagatgatacaatggtatgagtgtaatctaaacttccttgtggtattaccttgtatgctgttacttttattttattccttgtaattaagtcacaggcaggacccagtttccagagagcaggcggggccgcccagtgggtcaggcacagggagccccggtcctatcttagagcccctgagcttcagggaaggggcgggcgtgtcgccgcctctggcatcgcctccggttgccttacaccacgccttcacctgcagtcgcctagaaaacttgctctcaaacttcagggttttttcttccttcaaattttggaccaaagtctcatttctgtgttttgcctgcctctgatgctgggacccggaaggcgggcgctcctcctgtcttctctgtgctctttctaccgcccccgcgtcctgtcccgggggctctcctaggatcccctttccgtaaaagcgtgtaacaagggtgtaaatatttataattttttatacctgttgtgagacccgaggggcggcggcgcggttttttatggtgacacaaatgtatattttgctaacagcaattccaggctcagtattgtgaccgcggagccacaggggaccccacgcacattccgttgccttacccgatggcttgtgacgcggagagaaccgattaaaaccgtttgagaaactcctcccttgtctagccctgtgttcgctgtggacgctgtagaggcaggttggccagtctgtacctggacttcgaataaatcttctgtatcctcgctccgttccgccttcgttgctggcttcctctttctgtgccgcgggcggccccgactcccgcccgggtgtccgccgaagcgccaggtggggccacgggcggggtgggcccggccctgagagtgggggtccctgcgtggggcgtgcgggccagagcgaatgaccaagagccggacctcggtttctgccgctttattgagcatccgcg

SEQ ID NO: 2650 - DNA, 1104 bp, Homo sapiens
cctcccaaagtgctgggattacaggcatgagccaccgcgcctggcccatcagtctttttctacgatagcgcctggctgcccctccaccaggtgggagaaagggcacagggcctcaggtgtcctccctggccttgccaagaagggtgacctgaggtccagggcctccagcaagcaggtgccgctgctcgtcgtcctggtgtgggtctggccgcacccagggtggtttgtgaaggcaggctccgtggctctgggctccagtccaggctgtgtcctggagcttctgtgtaaggtcaggagagtcgcacagtccctgtgagcctcagtttccccttatgggatatgggtcataggaacacggcctcgaagggtttctgtgcacctgagtctcagcccacagccttgcacacagaagacgctcacattccccttggtaagcaaagggaaacggtatgagccagaccaggaggggacacccatgcctggcgggccttcgcgcgtgtgtgtgtgtgtgtgtggcaagggcgccgccgtgtggccgcgtcagccccacggaagcgctggacccggaacttcgctgtattctccgttcttgcgcttttatctgtagcttcccgcgttcctctttttttaatgtttctgtttttgttttgagacagagtctcgctctgtcacccaggtcggagtacagtggtgcgatctcagctcactgcaacctccgcctcccgggttcaagctatcctcctgcctcagcctcctgagtagctggggctacaggtgcccaccaccacgctcagctaatttttttttgtatttttagtagacacggggtttcaccatgttggtcaggctgatcaggaactcctgacctcaaatgatccgcccgcctcggcctcccaaagtgctgggattacaggcgtgagccaccacgcagaattttttttttttttttgtagagagagacaaggtttcactctgttgcccaggctggagggcagtggtgcaatcacaactcactgcagcctcagcctcctgcgttcaagtcatcctcccacctcagcctcctgagtagctggaactacaagcacccacctccatgcccgccaa

SEQ ID NO: 2651 - DNA, 1189 bp, Homo sapiens
ctggggcaacatggcgagacctcatctctacaaaaatcttaaaaattagctgggtggccaggcgaggtggctcatgcctgtaactccagcactttgggaggccgagggggggcggatcacctgaggtcggaagttcgagaccagcctgaccaacatggagaaaccccgtctctactaaaaatgcaaaattagccgggcgtggtggcgcatgcctgtaatcccagctactcgggaggctgaggcaggagaatcgcttgaaccatcaggcagaggttgcagtgagccgagatcgtgccattgcactccagcctgggcgacgagagagactccgtctcaaaaacaacaaaaacaaaaacgtgaaattcacacagtgagctccaacttcgtggtggtcaccagacggctgaatgggcccccttccgtgcagtgcagtatttaccaaattcctaagagcagggctggggcttagatgtgtcttaccgtgcccggcccagggctctgcacacagtaagtgctcaatacgtgcttgcacgtcagtgtgattcctaggtgagtgttccatagccccaaaaacacccaagcacagtgttcatcaatccatccccccttttcccagcggacctgcctctcagatcatcagtcttttttttttttttgagatggaatctcgctctgtcacccaggctgcagtgtagtggtgtgatctccactcactgcaacctccacctcccgggttcacgccattctgcctcagcgtcccgagcagctgggactacaggtgcctgccaccacgcccggctaattttttgtatttttagtagagacggggtttcaccgtgttagccaggatggtctcgatctcctgacctcatgatctgcccgcctcagcctcccaaagtgctgggatgacaggcgtgagccaccggcacccggcccatcagtcactttttcttttctcttttttttttttttctttctttttgagatggagtctccttctgttgcccaggttgaaatgcagtggtgctatctcggctcactgcaagcttcacctcctggattcaagctattctcctgcctcagcctcccaagtagctgggactacaggcatccgccaccacgcccggctaatttttttgtatttttagtggagatgggatttcaccgtgttggccaggatggtctcaat

SEQ ID NO: 2652 - DNA, 1189 bp, Homo sapiens
ctggtgggcattgacaaccaggggaaggcgagctgctggggcacgtgggtctggggctggggctggggctgggagggtgccagagggaggcgcccccgggggaagggaccacaggtgcaagcccctcgccagcccctgcctgcgctgccttgtctgtgtgatgggttcgtcttgttgagcgaggtcagtggggtggctcacagcacgtattaggagcttcgtaactaggagctgttgagaggaccgcctttcacggggtagactcctcaggtaaagcagacgagtgtaagcctggctcggcatccagtgcagtcggggctcagggaggtttccttccctgttcccagaggcattgtgcatgaccctgacagaaaggtacagacgctacagacacatgcgcgcacacaggcccacacacgggcgtgcgcgcacacagatccacacacgtgccgcagccccagggccccattcctctcccggctgagggcgcagccccatctcaccgggctctccttgggctctgtctctggcagctgagcgtgctccgcctctcaccttccatgggccacccgctggaggtggggctggcgctgcggcacctgctcttcctgctggagtactgcatggtgaccggctacgactggtgggacatcctgctgcacgtgcagcccagtatggtacagagcctggtggagaagctgcacgaggagtacacgcgccagaccgctgccctgcagcaggtgggggcccgtggcaggtggggccccgtggcaggtgggggccctgtggcaggtgggggccccgtggcaggtggggccccgtggcaggtgggggccccgtggcaggtggtcccgtgccaggtggggctgtccctgtggcaggcaggggccccgtggtcagtaaagtgccagcagcagggagggagttcccttggagggtggaggaggtctctgcagcagttgtagaggtccccacggcagatgtgggggttgtggcagctggaggggtttccctgcggcaggttgggggctctatggcaggcggagggcaagaggggcaggtagcctgtggcaggtgaggctgcgtgtggggtgtgctcccagaggcccgtccaggaaagctgcacctcagagaagcagtttccttccttacctgggaagtttcttctgtaacacgttaagccccacag

SEQ ID NO: 2653 - DNA, 1141 bp, Homo sapiens
tgccatcccagctccaagcttcccactccgggacttgtgtttgggtggggagacctgacctgggcatgttcctgtttcttcatcgttgagcttttctggcccggtctgaagctcaagtgaggagggggaggctgggtttttatcacttttaatgaatttggtgtgatttgttgtagatttttaaatttcccttttggagagaaaaaccaaaaaaactcgccccactggtaaaacatgggtcttggtcccagcccctgctcagcccctcccagtttttagcttgaatgagggtggggtctctgggaccctgcccctcatgccagaagcatcttgtgttgtatatgtgtgcgcgcgtgtgccctgagacccaggacagaagccacggtcctaagagccggttttatcctcgtcattctgcgtgtcctcccccacgccacctgtgtcggggctcagggtctcctgctttatatgagcccccttcctttcctcccctcctttatgctgggggtccaggacttccagccagaagcctctgcccttgcactaccttgtctgtcaccccatcccgtgtcccctcgtcccccagcctgactcctgcctgatagctcctgtgtccccatgctggtcctcctggcccaggctgcaggagccaggctggggggcctccgcacccccttgctgcgtgtgggtaattgtgttttgggggaaagtggggaatttaataaatttctggtgctctggcctcgggctatgtgtgtttttcttcggggcagggccgggggcttagtaggtcctggccaccaagggctgcaggtgcccccctggctcctctgcccttggttgcctggattcaaaccctggctctgccacatgcctgccgtgtgaccttgggtgaggagcttgtaggagtgccttggggcccctgtagaccttgagtgagtggcttgtacgagtgccttggggcccctgtaatggagggtctcacacagggggcttgaaacgacagaaggccagtgcagtagctcatgcctgtgatcccagcaccttgggaggccaaggcaggaggatcgcttgagcccaggagtttgaaaccaaccagggcaacatagcaagaccttgtctctacaaaacatgagagaaa

SEQ ID NO: 2654 - DNA, 1179 bp, Homo sapiens
cgctgctagtgtccctgcgggtatcagacaccccttgtcagtcatgtgggacacattcagtcccaaaccaccagatcggggacgtccctcacctgccctgaactttccatggctctccagggtcctggggacaaacccaagctatcctcactcagggtctccgctgagggctggcctccccgccaggctgggcccaccccctggagccccagcccctacgagggtcaaagcccttcccatattcacaggccttagagttcgcgccttggctgggctcctagtccgggctgagcgtctactcgctggttaaggtcggtccttccaggtccacagcggcctccacgcggcccaccccctgcctgctccgccccctccagccccctcccgcgctctcactccgaccttgcaccgggaggagggaataggggggttgccgctgggtgaatagagggcgcgtgggcaggggagggagtggcgagcggctgccggagaggcgggaaggcaaggccaggggaggggggcacgggctataaacgctcggccgcagcggcgccggcagaggagccgccgagcccagcacagctgccctctggaccctgcggaccccagccgagccccttcctgagttccacaggcgcagcccccgggcggtcgggcggaggggtccccggggcggtgccagggcgcaatcctggagggcggccgggaggaggaggtgcgcgcggccatgcacaccgtggctacgtccggacccaacgcgtcctggggggcaccggccaacgcctccggctgcccgggctgtggcgccaacgcctcggacggcccagtcccttcgccgcgggccgtggacgcctggctcgtgccgctcttcttcgcggcgctgatgctgctgggcctggtggggaactcgctggtcatctacgtcatctgccgccacaagccgatgcggaccgtgaccaacttctacatcggtgagtgcgggcgctgcgccgcacctgctgccgtcccgggggctccgagggccgagcggcctggggcgccctctcgcgacgcatcggggccctctcggacccggctctgtcccctgcaggggtcccccccaacctcgaatcttttccctgtggtccctgcacctgaggctagaggtcgcaaactccagcgcgggcgggcccgggcggg

SEQ ID NO: 2655 - DNA, 1161 bp, Homo sapiens
ctgagcccctgagtctaggttcactttcccgtcgggctgtgggaggggactgtcactttcctgtgtctttggggaggggacccccacttccttctcggatctcagggccgtggacacacaccccctttccaggagggggtggtgggcgtctaggttttccttgtcccttcctggggccagcaccgtagcagcacaatcaccccgggaagggggtgtctgtttgcctccagacacaatcgggccccactcgcagaaccacctggactctgtccgtgtctgtcccccggcctccagggctcctctcccgggacccccgtcccacgcctgggccccgcgccgggggaagcgcctgctgcctatctctgtctacctcaggtctgacttttgatgccaaaatctgagcccctggggtgcctctcccccgcctcccgtgcaccagggtctgcagcagccactggggcctggctgcctgctgcatctggcggccctggacccctggggcccccgtgcacctgcccacctcggagcctggggaggggccgtgcagggtcgagggctgggtcgtctccctcgggctgcgtgtgtgtgtcgggaatcctgcgtgtcgtgtctgtgggcgatccggcctcccggcggtgggtggacctggattctaactcagaggacttgagcctgctgttaactccgatgattgtagggacaggcggggtgggtggggggtgggcgcgaggctgggtcccggcccaggagaaggaagtcgctgaaggcagtggccatgctggccgtggaaatgggaggcggttgcagagggtctatggggcccggtcctggatactcggcaggaagccgtgtctgcagaggctcctccctgcctcaggtggccccgttcaaccccagccgtgcccatctcctgccaccgcctgtcggtgggggtttaaattcggtgtggctttctggggtgcagctcagcacccccccttatgcagactgggagggggtcgggcagtcccctcagccacgaggaccctggatgggttctagttcacttgggaccgtggggcctggctgcgtactgagtgggtgccccacagtcaaggccaacgggggctccccctgctctgagatgttgggagaaaggcggcttctggaaccttccgtggg

SEQ ID NO: 2656 - DNA, 1104 bp, Homo sapiens
gggcccgtcctgactcccactctccctcccgcagcattccatgatctacttcttccaccactacgagctgcctgccatcctgcagcaggtccgcatccaggagatgctgcttcaggcgccgccactgggccccgggacccccacggcgctgcccgatgacatgaacaacaactcgggcgccccggctacagcccctgactctgccggccagccccccgccctgggccccgtctcgcctggggccagcgggagtcccgggcctgtggcagcggcgcccagctccctggtggccgcggcagcctcagtggcagcagctgccggtggtgacctgggttggatggcagagaccgctgccatcatcacagacgcctccttcctgtccggcctgagcgcctccctcctggagcggcgtccagccagcccgctgggccctgctgggggcctcccccacgccccccaggacagtgtccccccgagtgactccgcagcttctgacacaactcccctgggggctgcggtaggcgggcctagcccggcctccatggccccaacggaggcgccctcggaggtggggtcctgagccgcacagctgagccgcctctgacccctgctggctgggcctgaccttcccgagcccgtgggggtgggggaggccagccacctccttcctctgggactgcccagcctgtgtcgggggctttcagggtttcgtggggtttgcccggaaggcggctttcctccccctggtgtgaggtcgcgcccgaggcttgtacccgctagtgaggtgtttgagctggtcagcaaggagagggggtggggttccgcggaaggttctggaggggtcttggtaggtctgcagtgaaccgtcctgaggatggagtggggtcccatggtgcaggtctctgagcaaggcggaggtgtggaggagaggccggcttggggtggggcctcgcgccctagtgccggccggcctcagcccggctctgcctggtgctccctgcagtgccttctccatggccccgccctccccgcgtgtgcgccaggcttggggtccccgggagagcagagcttgcgcctcgggcatagggacgtggggtgcaggcg

SEQ ID NO: 2657 - DNA, 1244 bp, Homo sapiens
agagggaggtcacctgggggcagctggtgccgggtcttcacccagaccacgctgggtcccctctgttgggggtttggggtccgggtctcccaccagccactgcttcctcctgggccctcggccttccacccctcgtcttccctccctcgggggccctgatgcgtggcggcccccgcccggcctcggctctttactccattcacagccatgcacgcgctcaagccaccagggtgcgagatgccagctctggagttctcggttgttgtaggaggttgggtgttttcaaatggtaaagatgttttgagcaaataaatttgcttgatacagaaaccaggccgactaacaaggtttccagcaggtggccttgcctcaccccaagcacacgaggtcagcctggcaggtgtgccctcctcgcgctggcttcaggggtcagtgtctccccaggccctcgccctgccctcccacttcgtgctcctgggtaaggcgtgagcgtgtctgtctcttcccttcccgtgagggtgtggagttgttctctggcttgtgcagctgtggtttgcggccagttcctcttacagacgtttgggatctggctctacttccccgtttgcttactgtctgatttcagaaggcctcgcctgcccaagtttaacctagccacgtggttctctcacagtagctttattaagatgtaattcaccctcgggcggtcggtggtctgtaacgcgcccactgttctgtgcagcagggtccccagatccccaggccgcggactgtgtgtgtgatggggacagtgcttccccttctctccaaatgtacttttttcaaaattgtcttggccaaagcaagccagacccaaagggacaaacactgatgtcactcctaggaggtcactagagtcgtcagagactggaagtaggatgggggttcccgggactggggagttgggtggggatgggggttcccagggctggggaggagggaggggacagagtgtgtcatgtgcacagttttagtttgggaagatgagaaaattctggaggtggccgggcgcggtggctcacgcctgtaatcccagcactttgggaggccgaggtgggcggatcacctgaggtcgggagttcgagaccagcctgaccaacatggcaaaatcccatcactgcaaaaaatacaaaaattacctgggcgtggtggtgcatgcctgtaatcccagctacttgggagctaaggcaggagaatcacttgaa

SEQ ID NO: 2658 - DNA, 1098 bp, Homo sapiens
acctttgtggcctcctggggacaggatggctcgggggcctgtggggggctgttgggactctcacactgcatggcctcctggggtaagatggctctgggggggcttgggggcactgtggctgtggaggcagccggggaagctcacacccttgtggcctcctggagacaggacagcttggggactgtggggggctgctggggacgctcacgtccatgtgcttcttttccagtgccatcaagtggaacttcaccaaggtaagggggctgtggggggtaggggaccagcttcccctggccacagccgtggcccagatgggcagcggacaggaagggcagcctcagccccttgcaggggtggccccacagtttggacaccgtctctccacagttcctcatcgacaagaacggctgcgtggtgaagcgctacggacccatggaggagcccctggtaggtcctctctagggagcccgcttgaggctcgggggcttgggaggtagctgccctaacccagctttcctccccgacaggtgatagagaaggacctgccccactatttctagctccacaagtgtgtggccccgcccgagcccctgcccacgcccttggagccttccaccggcactcatgacggcctgcctgcaaacctgctggtggggcagacccgaaaatccagcgtgcaccccgccggaggaaggtcccatggcctgctgggcttggctcggcgcccccacccctggctaccttgtgggaataaacagacaaattagcctgctggatctttctgcgtaggggcttggggggcccttttgccaggggcccctccatgtcagggccagttgccgtcagctgccaggctgggggtgccatggaggtggcgtgttgttgccccctcttcctccaggctcggggggctgtgctggctgcagtgctggggtgcagtgagatctgggcccgttggacacccagccctggctcttaatccgtgcagccccacctgctgtgcacaggcagggcctggtgtagtgccgagtcttggaggagataattctaagtggctgtgcttcctggccccgggccttaactgttaggaggtggcta

SEQ ID NO: 2659 - DNA, 1151 bp, Homo sapiens
tggcacgatcttggctcactgcaacctccgcttcccaggttcaagcgattttcctgcctcagcctcccgagcagctgagaccacaggcatgcaccaccatgcctggctaatttttttttttttttttttggtagagacagggtttctccatgttggtcaggctggtctcaaactcctgacctgtggtgatccgcccgcctcagcctcccaaagtgctgggattacaggcgtgagccaccgtgcccggcctgtctctttcttttctctgtctctctctctccctcttccccctgctcctagtctctctctctgtctccctccctctcaatctctctctgcctatctccctctctgtctctgcctccctctctgcctctgtcttcctctctgcctctgtctctctctctgcctctgtctctgtctccctctatgctccatctctctgtctccctctcagtctctgtctctgtctccctctttgtctctgtctccctctctgtctctgtctctctgtctctgtctccatctccgcctctgtctctctgtctccctctctgtctctgtctgtgtctccctctctgcttgtctctgcccctgtctctctgtctccctctctgtctctgtctctctgtctccctctctgtctctgtctctttgtctctgcctctgtctctctgtctccctctccacctgtctctttgtctccctctctgcctctgtgtctgtttccctctctgtctctgtcgccctctctgtcttcgtctgtttccctctctgcctctgtctctgtcgccctctctgtcttcgtctgtttccctctctgcctctgtctctatgtctctatgtctctgcgtctctgtctccctgtctctgtctctctccatgtctctgtctctgtctccgtctccatctctgtctcatgaattctcctgctcctcccctcctgaacaattgctgctgcatctgttcagcccggagccctcggggccactgtgctggttctgtgagcaccgcccgcccggctccctgcccaccctgcctacagccgcctcatgctccagcgtccgtatgtggggcagcttggacccaaatctccctgttaaagcagcagaacttcatttggaggaagtctgaccccggtgccaagtgtg

SEQ ID NO: 2660 - DNA, 1166 bp, Homo sapiens
gctgccggggcagcttcccccatcacaaacaggtgccaggcgcaagctgcccaccagcacccacagccagagggcgggtgctgcccctggggtggaacgtgtgagagggtggtgcgggaatgtggccgcgtggcggggcaggcgggggcacccggaggctgatggctgcagagagcagcactggcgtgggcaggggcagcgccggacactctggggtctccctcacccacctcccttccctggccccctcctctgccactgcccagctctgtggggggcgaagtcctctcaggcaggcaccttggcccaggagtaggggaacctcacggatgtcttgaatgtgtcccctcctgtccccccactgtccccccgctgttcccccactgtcccccactgccccccgctgtccccatctccccgctgtctccctgttgtcaccccgtcccttgctgtccccccgctgtcccatccgccgctgcccccccactatcccccactgtttccctactgtccccctgctgtccccccaccatcccccgctgtccccccactgccccccactgtcccctgctgtccctccactgtcccctgctcttcccccgctgtcccactgtcccctgctgtccccccactgtcccctgctgtccccaactgtcccctgctgccccctgtccccccactgtcccctgctgtccccaactgtcccttgctaccccctcttgctacccccgtccccccaaggtctctcactgggctgaccctcccttggctccagcccttcaggcctcccttgccccgggctccatgttgagggacgaagcgctctgtctgcaggggtcaggacctgagacggcctgcagtgtcctccccaccagacggtcctggcggccgagttggggcctgcccaggtgcctgagcttgcagggctctctgccccatattagctgagccttgtgaaatcgccagcccccgccccctgcacccggtcctaggatgcgagttgtgcgcccgccaggtagagggtgattgccctgtcttgagcccatctggaggccagtgtgcggtggtcatagctgcaggtggggtcacggctgtggggcggcggttgcagccgcaggtggggtcatggctgcaggtggggtcatggctgcaggtggggtcgcggg

SEQ ID NO: 2661 - DNA, 1220 bp, Homo sapiens
ggcctgtggcctgcatcccctcccagccatgctcggctctcatccctgggaatgtgagtggaaggcgggttcccccggggcccctccctcgcccgctggcagaccatcagctgctgtgtgaccttggccgaggccctctgcctgtctgggctctgacttcctctaacacgaagtaagtgttggactgggccaggggtcagcagacttttcccatcaggccccggatggtggtgttcgtggggttatggtcagagaggctgtgtctccacaactctgctgctgttgaggcgaggaagcagtcagaggcgctgcatgacgaatgcacgtggctgtgtgccagtaaaacttaccgaagctccggggcagggggtgcttttgccctctgggctgtagcacatagatccctggactgtttgacagtagcccttcaattctgcaggccttgggtcaggcaggatcctggagacagggctgccttatctgggctcgaggcaggagtttgtgtggggagcagaggtgtcccatctgtagcactggcagcaggcaccagccctgctcagccagctcagcagggccagggcagcccagaggggctggggcccgctctgccttgtggacagggtggcaggtcctgtcgtcaggtgaggccaggataggggacaagtgcagagagaaggtgctgtcagcatgacagaggacacatcatcagacagtgggagaccctgtgttgtggctccagccagcgggggtggggtgagttctcccagcccccacccccaaggtagctaggggccagggaggggaaggcctcctctggctgccccgctccagctgagagaatccagatcttgaaatgaatggggcccaggggtgactagagacatttagagtccaatgtggttgcagcacatcccagaacctgtttgctggggcctgcccactcaagctttgctggggaggctgttgggagaagggggccgaggcaggggtggggcagtcccccagcgctctccagaccagggtggagctggcaggagagggcacctctctccctctcctcgttggcccccaccagcctgtatgtgactctctcatgccttccgtagtttcagccaggctgtgcaggccaccaggtgtccaggacacgcccttatgagtggccacatgttgaccagggctgccacaaggcactatcggtgccagaggcccttccactcact

SEQ ID NO: 2662 - DNA, 1119 bp, Homo sapiens
cccaccaccacccgccctgcaacttcctccctggggaaggctaatgggcgggcatgactcggtgccaggcagggaagcaaccctggggagcccagtgtctccgcccagcaccccctccagccccccccaacccagctccttcctgacgcaggcgcccagggaggagggtgtgaagccaacacgccctgggccccctgccaaccgcagccccccagcggcggggagctctgctcacactcgccccaggaaatcacctgcagcccccgccctggctcgggaccccggctctgcccccacgccactgctgctgctgctgtggccacccccatggcagaccacccagctcccggcccccgccctgcccccgcgatgtagggaaagggcaggactctacatgccgctgggaaagcggaagggggtgcgggcctcggggccagggaggcccgggaagccggccaccccttgctggggcgggtggcagcctgcgtcccccaccctggcagcgggcggattgctgaggcctgtgtcaccctcctgggaggtggccagggcccttgtctgaggaaggcttggccgcagccaagaaaatgaggaaagaaggagaaaaaaaaaaaaaagtccgcagcaaaaccgggaaccgggtgagggccagccccagcctccctcctggccgcttactaaatattttcctaacatcctgtctaggcctcactggccccagggctgggcacccccgccccctcccctttcggggtagagaacaaaggccagagagaggaggggagggtgacgagatccccaccctctcacgatgggggtcacggaaggcggaaggagtgtcacccaagccgccacccccagccctcagcagaaatgtaaaaaaggagaaactcgctctggggaagccacagcggctggaggggggctcctcggtgggggcggagggggctggggatgcaggccagggtgtgagcggggatgaggccccataggccaaggtcatcctgcaggcagtcttgtgaaagccaggcccccttcccccagggcagccaccgtgggagagaaagccctccgggtcaggtggtgaatcttgggggagaggaggtggggaggccaggc

SEQ ID NO: 2663 - DNA, 1128 bp, Homo sapiens
cagccggcggactgtgctgtttcctccgcccccactcccgtgttttctgacctcctgcctgagtttggggtatttatagactattaattttctgactgagccaatagtggttggggaactcttgaaaaaggggagagaatggctgggtgctggggagttcccccctccgagccctccttcccggcccaacctgagggatgtggatttgggactgtctgggggcccctcctgcagcgaggatgggagggggtgctgagctgtgaatcccctgggcagggggcgacaactccgtgtagcattaacccccgtggcggggtccgctgctggtctaatttggaccccctgcctctcagtgcccctgccctaggggtgtctgtctccagaggggagggacaaatcccctactggggccatttcaatggggtagtttttggatttttttccccactcactttttattttttaatgataatggagatgtctggacccttcctcaccccacctgtcggtcttgtcctggctctgcctgtcccccaccgttgttctcgtaggtgaaccccaggtcctcaactccccccctttatgtgttgaaagttaatggtttcagatgtgaacatcacgtgttataactgtagcgctgtaaatttttttgtgggagggtgggcagggaggggtcccagagggtagagctcaaggattttgggttttgttttgttttcatttttccaaaaaaaaaagaaaaaaaaatagaaaaaaaaggagtaaaaggggcgggtttgttttttgaagaactgtcttggatacctatttaaatgtgtgttctgttttgttttttaacgatttttaaataacgtctgtgcctccactggttgagggtggaacctccaggcaggaaccggctcgccaccctctgcccggtaagggctgcccaagaaagcattacccgccctcggggggtcgggctgtgggggtcccggcacctggcgtgagtttcatgtatgaaaacataaaattgaaaaaaaaaaaaaaacctacacgagcaccgtgatttcaagtaataaacagaaaatgaaacacacattgactcccgcctgctcgcctagtggggggatctggccttggttggga

SEQ ID NO: 2664 - DNA, 1528 bp, Homo sapiens
tggcatgggggctggcggctcagcctgttgtggcagagcagaagtagacgggtaccttccggtactcaacgtttgtctgtcttgcagccggagtcagagtggtggctacagtgaccggagctcgggcgggtcctacagagacagttatgacagttacggtaagtcacactccgagggcgccacgctgctgtggcctgcggtgggagctcggttcaccttggtgccctctccaagcactttaggctggacactcagaccttgtcactgtgcttgcccagaagaggcgcatctgtcctctcagagccatttctatcgcaggacgcaaaagccaaatgagactgaccaaaaaggcaagggagagcgagggcccgctgggcagtcagctaggtgcatgtgtggccgcaggccagcctccctcggctgtggggggtggttgctccccggccgcaggccgcgccctggtctggcctctggggtgaagctgcctcttgttgcttcggtgcctttacactgtgcctgcttcttgtcctcagctacacacaacgagtaaaaacccttcctgctcaagatcgtccttccaatggctgtgtgtttaaagattgtgggagcttcgctgaacgttaatgtgtagtaaatgcacctccttgtattcccactttcgtagtcatttcggttctgatcttgtcaaacccagcctgaccgcttctgacgccgggatggcctcgttactagacttttctttttaaggaagtgctgtttttttttgagggttttcaaaacattttgaaaagcatttacttttttgaccacgagccatgagttttcaaaaaaatcgggggttgtgtgggtttttggtttttgttttagtttttggttgcgttgcctttttttttttagtggggttggccccatgaagtgggtgccccactcacttctctgagatcgaacggactgtgaatccgctctttgtcggaagctgagcaagctgtggcttttttccaactccgtgtgacgtttctgagtgtagtgtggtaggaccccggcgggtgtggcagcaactgccctggagccccagcccctgcgtccatctgtgctgtgcgccccacagtagacgtgcagacgtccctgagaggttcttgaagatgtttatttatattgtccttttttactggaagacgtacgcatactccatcgatgttgtatttgcagtggctgaggaattcttgtacgcagttttctttggctttacgaagccgattaaaagaccgtgtgaaatgaaccttgctctgacaattcccttgcattgcaccacacactccttgctgcgggctcctgcagccagacctgagcagagagagaaggtggagaagcagcgggtctgcaagccttccctggggcctgcagagctagaaagggaggcccagcagactggcgctggtcagggtaggggagccaggcgggggacgggagcgggcagctcaggcctcagggcagccctgggaggcttctggcagtggtggccagaggg

SEQ ID NO: 2665 - DNA, 1196 bp, Homo sapiens
agtttgggtgtttagtgttagtttttatatcattagtactggttgtaaacttatcaatttaagcaagatggaaaatcgagggtgtgtcagggaagggggaagtttgagctgaaattatgacctcttaggggtgggaagaggaggctttggggttgtgaggtctgagcccccttactttgggatgagtccacatcgcggcgactcctctgcagaatgcggtgatgttgcggtaaggggtccgggatagctgcgaggcagctggaccaatcctgaacgaaagacatcagtgatcgcaagaggcgctaaaacttctgccgaaacccgggatcgaaccagggacctttagatcttcagtctaacgctctcccaactgagctatttcggctgggcggcagagtcgctctcgccgggactccgtcccgcgctgcgccttccctgcgcaggcgcagtcgtttcgcgtcagcaggccccacatcctttgtaaggtctcccagggcgccggagcgcagtgtcgtctctgtggcgcaatcggttagcgcgttcggctgttaaccgaaaggttggtggttcgagcccacccagggacgcgtggtgacttttgccctcctggaataacaagaaaatgagtgtcgcctctgtttttgtcggtccgccgcagacccgcggcccccacgtgcgcactccgatgacctttccgcctcgggtgatctgggggtgcacggcgcaacacgaccacggaggccgaaagcgcagcggaacctcccggctccaggttccggtttccgcatgcgctccgagccgctttgggcggcggccccgggaacccggagcgctaaggagaacggacctcagaggttgtctgaaggccgaggccaagatggcggtgctgtcaggtgagcgcggcaccggcggcgggtgtggggccgcgcgggtctggggccgtgggagcctcgggtgtcgtggtggcgtcgggggtcggtgccggcgtcgtggccgcggtcctctccgggcttctccgagccggccgctcctcgggctccccgcccggcttgcgatgaacggtcgccgttattgcgtccagagtacagtcggggaaaccgaggcccggtaggtcatgacgcaagcctccagcctcaggaaggcgctcggggtggaggctggaggggccccattcacgtccccgagaccagggcacg

SEQ ID NO: 2666 - DNA, 1181 bp, Homo sapiens
gtggcggccccgaacgggaacttgggggggtctggagcgtccccgttgccgcctgtagggcttcctggcctgggggaccccgaatgagaacctgagggagtctgcggggagtccagggcgccgtcgccgccgcctcccggcttcctggccagggggaccccaaactgtggcgtggggggtggtccggggcgcccccagcgcgcgcccaaacttggcgggcggcgcacgtggcgagccgaggcgagggttccggttctgccaccgcccaacctatcccactcggggctccgggctccccgctcccatcccacccccccaaagtggtaaggtcgggaggggttcgcaaacccagggcccagggggctcgggtcagccggggcctgctgtgtttacgttgcctcggcgcctccccgccgggggtgggcttgagctgcggaagggagagtcagcgcttccgaggcggcgacgggcccgcggatctttgctgcgccgaggcgtcccctcctataggagcctgacctgctccggaccccgcggggccgggaaacctcatttcgctgtgccccagggctcggcgccattctttggtaggagcggctcctgccgcagcgacgtcgttttagagttgcattcttccggcaaaacagtctgggttgggtttcctagtggtctggtgtaaatttctcggtgcccttagctttgagcagcgccctgtgttctcagcgctgggcttggctagtgcgggagcggttgctgctagagggttgccttggcaggcgcctctcgcaccagctacaggtcacacttgtggatgggaaatgccttttgtgggctctccccctccccagacaaaacaaaagagcaccttccgttggagaaccaggatgaaagcacttagcccctgcctagcccgtgctgtgagtcctctccaggcactttgacttggcagggtccgtgtgcctgtgtgagggacattgcagggatgggcctgagcagggagtccaccggccatgggggatggagccatcgactttggggtgaggcagggaaagggctcccagatggggtacctggattaggtccattcaagccgcgggtgaacgtgggcccgctccacccaagccgtggctgtgaggaggctggagagaggtgagggctcctgtcccctccctgcatggaca

SEQ ID NO: 2667 - DNA, 2107 bp, Homo sapiens
tgcggggccacgggggctccctggagtcgggtcctggcagtggggactgcctggtgaacacagatgtgcttgggatgacgggtgcctcccaagagcttcccatctccctagaagagcccaagcgtccccgtcccgtggagtcgctaaagccagccctccctgtcctttccagaggccctgccgagagcccgtgctgcctgctggagccgcctgcagacgcggtcctcggccccacgtgaaccaggctcggcggcgaagcccagccttggagacacccaggaggaaggccgtgctcctggctccctcctcggcccgtccccacttcccggggcctcggggcacacagctggggctgcccccacccgaaagaccctccacgctcgtcctctacagagtccggcttcgggaagtgccgggtgctcctgggccctgcctggctccctacgacctttgggctcgaggccagctcctccccatgcccgctgtcccagctccttgagactggagagcagccagcaggtgcccggcagctcggcgccacggcttgctgacagctgggagggtttctcggtctggaggcgtagttttgaaactcacatcacccactgtgcagcgtgaggacgggactctggtctgctgtggggggcatgcaggacggcgccactctctgccctgccatgcggctggtggtgccacagagcctcaccgtgcctgagtggcatgcccaggaggccgctctccttcagtaaatgtaacacagtcgaggcacgtcatcgggcagccttccctgtgtgccaacgccagccttcgcttctgaaaaccaaactccagccgctgccagtcgggacttggtcgcccggcgctgccagaatgctccactgccagccggcccccctgcctcggtttcccttctgtttagtggcgacacaggcacccagctttggggtggtgctgacgctcccaggggtgccaggagccactgggacagggtgaggctcccagacgctcctcgaggtgcccagctctccagggagcttctggcccaaggccgtctgagggatctgctccttaaccccccagtgccttggcgagggcaggttccaagccacagacgcctgccccgagtggactctgcggccagtccctggtgccctcctggccctgctgcccagtgagggctcctacgggtgggttcattggcctgggcccagcgagcccccacctgcattgaccttaggcccatagagagggcctgtcccggtgctgccccagccaggatctggtcgctgccccagggggactgatgggcagagtcgcccctgtggctggactgtgaccatccctgatggggcctgaccgcgggagctgaggaagcgccgctccaccgtctgccctccaaggacccgcatggaggcagtgggctggcagcttcctgctgctccctgtcagagtcaaagcacaaatcctcaggacgggctcaagggccagggcagccgagggaagctccaggtggggaccacgtcttcctgaggttggtgcccactggctgggaccctttgcagtggggtggcctcccctctgtctgcctggtggagggagccgtgggcgtggggacgtgactgaataaagccaccatgggtggatgtgcttggagcctggagttcggtgcgtccgctagactttggtgcccacgtttgagcttctgtctttggttgggtgatgaaaggctgaaagcggtgtggggacagggccagcaggtcccccaacctcgcggacattcacaacccaagagtcaggcttaggggtattcagagaagaccaggccggcctgggcatctgtgggcaagggccgtgccccctgaggtgccgctggctcagcctagggatcgtgggtcttggccctgctgccccggtgaggaagatgggctggggctcagacccagcaccgctccttccaaaggaagggaagcaggaggggctgcctggcagggagggccccccaggtcctcaggtcctgcacagccgctgcagggaggggagctgtgccccgggaccctggacttcagctcactagccatggccactggaagctgctttctggacctga

SEQ ID NO: 2668 - DNA, 2609 bp, Homo sapiens
ggaggccaaggcagccagatcatgaggtcaggaggtcgcgaccatcctggctaacactgtgaaaccccacctctactaaaaatataaaaaattagccgggcgtggtggtgggcagctgtagtcccagctactcgggaggctgagtcaggagaatggtgtgaacccggaagtcggaggttgcagtgagccaagatcgcaccactgcactctagcctgggtgacagagcgagactccgtcttaaaaaaaaaaaaaattaggccgggcacggtgactcacacctgtaatcccagcactttgggaggctgaggcggacagatcacctgaggtcaggagttcgtgaccagcctggccaacacagtgaaacctggtctctactaaaaatacaaaaatcagccaggtgtggtggcgggcacctgtactcccagctactcaggaggctcaggcaggagaatcacttgaacctgggaggtggaggttgcagagagccaagatcgagccacttcactccagcctgggcgacagagtgagactccatctcaaaaaaaaaaaaattaggcgtggtggcttgtgcctgtcgtcctagctacttgggagactaaggtggaaggatcaccctagcccaggagttcaaggttgcagtgagctgtgattgagccattgcattccagcctgggcaagagtgagaccctatctccaaaaggaaagagagaaacgaagtcctgtccctatcagcagccactccacatcctgcaccccagcctctggcactacgcgtccccttcctgtctctgaattatcctgttctagacatttcttagaaatgggatcacacactgtgtggccttttgtgtctggcgtctctcactgaatgtggcgtcctcaaggtgcatccacgctgtggcctgtgtcagagcctcgctccttttcatggctgagtatgtcccatcgtgtggatgggcgtttgtccgttcatccattgaaggcgtctgggctgcttccaccttctggctcctggggacatccgtgtagaagtgatggtgtggatgcgtgctcatttttcgggcagatacctaagagtggcgtggccgggtcatctggaaactcagtgaagagctgtcaggcttttccaacatggctgttccatcttacatcccaaccatgatgacggtgtgttgggttgggtgcttgtcatcctgtagtgtgacctcatgtgacacacagggcaacccattggtgggtgtccttatgtcctggagaggatgagttgccggcgcttgtccatggcaggctgagagcagagccccgtgtctgagagcaggtctgtgtttacctggctgccttgttgcgagctctccagtcgggttatgcccaagcagctgttagggcctggccccagatcttagaacgagaccccttcccagtctggccctgctgctgtaaccccaaggtggaagaagattgcttttagggctgtccctcacatacctgttctccgtggggtcttttctcaagaatgtgacctaaattccatgtctggaatgttctggacatgtgagccatcctcccagagccggggcccaaagccctgtaggtagtagcgtttgtacccgaactcagcgtctgctgtgcctgacgctgccagggcctacggtggggaggattcagaggggaccggggttgggggtctggagcaaggatccgatgtggaggctggggctagggccagggtgtgaggatcggggccagtgctctgggtctggctggcgcccagatctaggggccagttgtggggtgctggggtctgggatgaaggtctggggtcacgccagggttggggtctggggctggggccagggcctgcctgggtttggggtcagggccgtgttggggtctggggctggggtcgcgacctgaagctggggctgggactgggtttgggtctgcggccgaggcctgggtttggggtctggggtccgcccggggcgccgaccgtcccgcctccccgcagcccgagcgggaagaagttccgcagcaagccgcagctggcgcgctacctgggcggctccatggacctgagcaccttcgacttccgcacgggcaagatgctgatgagcaagatgaacaagagccgccagcgcgtgcgctacgactcctccaaccaggtcaaggtgagtggtggcgtcacgcaggtgacgtcggcgcggggcgttctaggcggggacgcggccatgacgtgagctgcaggcgacacagcccggcgtcctgagcgcaggaggtcacagcgggcggagggcacagagcggaaggcgcaggccacagggtgcagagcgcaaggcgcatggcgaggacgcggcccgcggcgggcgttccagagccggccggaccgaccctgcgggagcggcctccccggaccgtgggggtcctggcgggcgcgggggacacgaggggcgccggcaaagcagggggtcacccgggccccgcaccccctgaggctccgcgccgccggggcgcccccaggccggactgcatatccttcctcccgcagggcaagcccgacctgaacacggcgctgcccgtgcgccagacggcgtccatcttcaagcagccg

SEQ ID NO: 2669 - DNA, 1242 bp, Homo sapiens
gggactggctgccggacggcgactgcggcctttgttcgtgcgcgctgggccaggggcgcctggcggcggccagatgctaccggggggcaggggtggagggtgggctgtccctttggttcccgtgagacgcagggggtgccttcttggggcgctcctggggtggcgcggagcccgagggggtggccagccgggatttcggggagcagggctcatgggcggatcggggagggcgtgcgtgaaaatacgggttcttgggctcgccccagtcctgggaataagcgcctcagggtgactggtctcccacgcagcgttgctttttttaaaggtattccccttgactccttccgaggcctctggtcctcttgggtcgtggccccctcagggtggagacctgaggctttcgactttccgagcccacctaacggtagtctttgcgtggatgttactggtggtggaaggctttcagagacccccccgtccccaaattggaacaaggcgctgctctgaaaggtcgcagggaaccccctccgtggaacaaagacttagtcgcctgctgcagccaagtcccagacagtcggccacctgctgtttgtcctcttttttttttttttcctggctcgggaaagatgcttttgattctgggccagctttgattgcgccctccccttggttcagtgtcccgtggcgccttcaggtcccccaggaggggaaagcggaggacgcctgccatgtgccgagcacctgggtaaaggggggtgtgcggctggtccccctttttcccacagctcggggtcgtgggcaggagaccgcccaggtgagggcgggtggtttccacgagccaaggaggggcagaacgaccgctccgtccactgtgcacttcggtcctctgtggttcttgactgtcccggtttggggagataaagtgagaaaagtgagcggggaaaggatggctgtgatcagaagcaatgtgtggggcctcgtcctgcaggaggagctcagggactggttcctggaaagttggaggacagcaagagaggggaaacttggtccccaaatgtgtacccttatgagctggaaccctgtacacgtcctgagatctgcagtgacacatgctgaaatctgggagggcagatgacggggcctgaatgagactggggtcagggagggcttctctgaggacgtgacattgagtgacagggagaggcgtccaggcagcaggaaccccctaagaggtggctgcag

SEQ ID NO: 2670 - DNA, 2318 bp, Homo sapiens
catacactttgtcagagaagaaaaaaatgccttaactataaaaagcggagaaatggaaacatatcactcaagggggatgctgtggaaacctggcttattcttctaaagccaccagcaaattgtgcctaagcgaaatattttttttaaggaaaataaaaacattagttacaagattttttttttcttaatgtagatgaaaattagcaaggatgctgcctttggtctctggtttttttaagctttttttgcatatgttttgtaagcaacaaatttttttgtataaaagtcccgtgtctctcgctatttctgctgctgttcctagactgagcattgcatttcttgatcaaccagatgattaaacgttgtattaaaaagaccccgtgtaaacctgagcccccccgtccccccccccccccggaagccactgcacacagacagaacggggacaggcggcgggtcttttgtttttttgatgttgggggttctcttggttttgtcatgtggaaagtgatgcgtgggcgttccctgatgaaggcaccttggggcttccctgccgcatcctctcccctcaggaaggggactgacctgggcttgggggaagggacgtcagcaaggtggctctgaccctcccaggtgactctgccaagcagctgtggcccccagggctaccctacacaacgccctccccaggcccccctaagctgctctcccttggaacctgcacagctctctgaaatggggcattttgttgggaccagtgacccctggcatggggaccacaccctggagcccggtgctggggacctcctggacaccctgtccttcactcctttgccccagggacccaggctcatgctctgaactctggctgagaggatgctgctcaggagccagcacaggacaccccccaccccaccccaccatgtccccattacaccagagggccatcgtgacgtagacaggatgccaggggcctggccagcctcccccaatgctggggagcatccctgggcctggggccacacctgctgccctccctctgtgtggtccaagggcaagagtggctggagccgggggactgtgctggtctgagccccacgaaggccttgggctgtgcgtccgaccctgctgcagaaccagcagggtgtcccctcgggcccatctgtgtcccatgtcccagcacccaggcctctctccaggtctccttttctggtcttttgccatgagggtaaccagctcttcccagctggctggggactgtcttgggtttaaaactgcaagtctcctaccctgggatcccatccagttccacacgaactagggcagtggtcactgtggcacccaggtgtgggcctggctagctgggggccttcatgtgcccttcatgcccctccctgcattgaggccttgtggacccctgggctggctgtgttcatccccgctgcaggtcgggcgtctccccccgtgccactcctgagactcccaccgttacccccaggagatcctggactgcctgactcccctccccagactggcttgggagcctgggccccatggtagatgcaagggaaacctcaaggccagctcaatgcctggtatctgcccccagtccaggccaggcggaggggaggggctgtccggctgcctctcccttctcggtggcttcccctacgccctgggagtttgatctcttaagggaacttgcctctccctcttgttttgctcctggccctgcccctaggtctgggtgggcagtggccccatagcctctggaactgtgcgttctgcatagaattcaaacgagattcacccagcgcgaggaggaagaaacagcagttcctgggaaccacaattatggggggtggggggtgtgatctgagtgcctcaagatggttttcaaaaaaatttttttaaagaaaataattgtatacgtgtcaacacagctggctggatgattgggactttaaaacgaccctctttcaggtggattcagagacctgtcctgtatataacagcactgtagcaataaacgtgacattttataacgatgccctgcagtccccgggttctttttggtgtcacatgtttaggaagggaagtgggggggggccctgacgttcacctcgggtgcagcaaggaccgtggtccaccctgtgcactgggcttcctcgaagcgactcctcactctgaggagcccatggctcccagggcggctgggaacctgcatgtgtactcagggctccaggccacctggaagcaggattggctcccggggaaaagcagctccctgggggctgcacttgggcgcgtaggaacca

SEQ ID NO: 2671 - DNA, 1185 bp, Homo sapiens
aggtgttgcttctgagacctgggatggggagggaggggacctctgggttcttccaaagaacatttgactcagtggggtcgggagggaatcctggcttatttattttcctctgtcctcgggtgtgggggccctagctcgccctctctgggtgggtgggtgagagaggctgcaggggaggctggcaccgggcttgggcctccagtccctgccttgctgactttggccgttgcggtatcacgtgacaatcaactctcccttaacgacgactgcggctgttgggctgcgctgccctccctggcctgcaggtggggccgtggagcccatgcccgccggggttgcaggctcttccgggcctgggctgcagcctggcccggccctgcttccctggcctcccctccttctcctgggtgcttggaagaggtgggtcctggcccgtggttgaggtcttgcctcgtggactggaagcagagggctggctgtgcagcctcctggggtagctcgttttttttgcaccgggtagaatattttttcaggcacggattcctttttttctgggcccccatgggtggtccggcatcctcagggggtgtgagtgtgtgtggggggtctctgagctgaacttgggtggggtggggacttgttcctcgggggccacctttgtgtccttgtcagcggtcgtcctgctgtggcctgggttgcatttcctcttggggggggtattgaggacccccagcctggaatgagaagggtccccggttccatgtcagacccagaaaggtggatccccccactgttggctgcaggaggtttttggtacccccttttgttccagaaccgtcctgcctctcgcttggggacaggggggctttggatggcactggtgtgcacctggacccagccccggcctggcaggatccagggatgggtgcctgggatcctggggggagggaggcaggggacgcccttctggagctgggctcggagggtcctgccccatccagccctcggctctctgtgttctctgtccctagcctcaaaccctcttctggcagcgctagtgagatgccttagtctgtgggggtgggtgggggactggggccccgttttcctttgtgagtcttggttggccccagccctggcaggggcctgtctggagcaggggtaggtagggctgtgggttccaga

SEQ ID NO: 2672 - DNA, 1224 bp, Homo sapiens
ctgctggatcagggcagccggggaggtggccaggccagtggccaggccctgtggagacaatccctcaggactagggacagggctgtgccggcctgggccagggcccacggacccgcagctcagggcgcctgcccacgtcgtctgccggcggtgcgccgcgggcgtccctcgcgtctcttcactgcacattgcaatgcatttgcgattcccatttctctgctaggagccagcctgggtggcgctgctcccagagccgtgggtcccagaccttgcgttccttttgttcctgtccgtttatcaggacacgggccccacctgtcacgtgcccgaggccacccaagcccagcctgcggggcgttcccactgcctggatgccggcttgagttctgcgcacgcaggattcagtgtggggacggcccctgccggataggcctagccctggcccaggtggtgagcggtttgcagtgtccgttctcatccacctgatgggcccagataaaggcccccgctgtccagcctccctggacggccctcgcggtccctgcagcccaagatgggactcagaccctgtgccccagagctcccctgccgcagaatggggccccagccggccccgaccgggtccaggagcactgctcgcctgtacatactgttgccctagcccacctggtgccgtgggagccacccccaggtgctgggggcacagcccctccccactccggccacgcccccacccaccccgcgtgtttctgccctgtgactcctggaacctgcgtcctccccaaagccatgggaggggtgtcctcctcagaccatgcccccagatgatttttttaaataaagaaacaaatgcacctgccttgagcgcacactgctttgctccccttcactctctgccctgtcatccgggctgcagtgggcgagggatgtcgtgcgccgagaggggccctgaaccccgggtctggtcgccagtgctgcgagaccctccttaagtacccacaggccacactgaagcccgggaggtcgagactgcagtgagcagtgatgcaccactgccctcccccctgggcaagagcaagaccctaactaactcaacacctccccccaaacccaaatgcaatggacgtgtgtgccgatttccccgtggggaggccctgctggctgctgggggaccgtggatgtgagagatggagagaaagcagggagtgcccagttgtggcctca

SEQ ID NO: 2673 - DNA, 2271 bp, Homo sapiens
gcattgcaggcacccgggaaggtgagcagagggtaggtgggtgggcttgtcccctccccggtcccccgccctgctcacctctactatgaaggtgcccccaggtcacctgtgctgcccgccatctgcccacgtggcttgcagtgactcaggagagcaggcccacagcgtttgccatcttgcagagctggggaggggcacaggaccctgccctcgtgttccctcccagcccgcagtatttcagggacaggctcttcccctctatccctcaccctgagagcacccctggtggcttggttggggaagggaggggctgcctgtctctggaggtgtcaggcaggcaggtggcaggcagctcacccacccaccccatgggatcccccagcccttcacccgcgcctgccttgtccccatgatagttgacaatcggggcttcctgcaaggcccgtctgtctgtccaggactcctggtggccagattcggcctccgaccttgaccttaaactgcagctgaccccaggggctcgccgctgcccctcccctccacaccaaggcctgagacagcaggagccccgcctggcccgaagccgtttccaccgcagcaggcagaggggctggacaggcactgtcagccaatgtggggggtcctgaagacacccccttggggcacccgagtgccccttctcagggctcagtctgaccgtagccacgtcctgcctcgcgccgcccctcgggcctgacctggaagctccgtcagctccgtccttgtccttagagctgagcccagaccccggggtctggccgaatcctcacccccagggcagtgtttttggtctgccaccttcaggaaaacggctgcggcctcggcctcccttcgggcacccaggaatgcgggggtctgctcagtccccccaccctccatgctccaacccccgggggctgcggagcctgctgccccctccccgcgggtggggacgttctatgcaatacagggttccactttagaagtgcgcgcggctagggtcaccgcccgcccttcccggcgcagcccccgagctccacagctggggcagcccctctggcttctaaatccgcggtcgggattcttcctcctgtttagttttttagtttttccttaaaaaaaaacaacacatcgatggactttgcttccctgttcttgaagaatacttgaatgtcggggggcctgggggtgggggcctcggagaccgtctgcctggccctgctgcccctcctgaatctcgtatgatggtcacagtccggtggccgtgggggtgctctgccttccctggtccccactgcccatatctgtggactgccccttccaaagacccctggggggggtggggcattccgcccacccctttcccccatcacttctcgcctgtcagtgattccatgtttcgtaacgggggattctctgcctttttgtatcaaagaacaagcaaatggacccccgcccgctgcaggcgcccatagccatcgggtctctaaagctgagtggctagcagcgtttgtttgtttgtttttttttttttttctgaaggtgggacagtcacttcctcctccctccccacccctgtcgcatccacgtgcgacctggaggactggtcagaaccgttactgtgaatgagtgaagatcctggaggaccctgggccccaggccagctcccatcgctgggggacggtgaacggccatgtgttaatgttacgatgtttttaaaagacaaaaaaaaaaaaaaaacctcaaaagtttttttaaagtgggggaaaaacatccaagcactttaattccaatgtaccaggtgaactgacggagctcagaagttttcctttacaccaactgtcaatgccggaattttgtattctgttttgtaaagatttaataaaagtcaaaaaacttgctgtgtgcctgagttttagttttctgtcaccgcataaggagccatccacaaccagttggtgcaaaaccacgttgttgctggtgatgctgagtcaggagttttgagggggtgcgctcctgtggggtctgtctctgctccaggatgcctggatgcactgctgggaagacaggcaaaaagctgagctcggctgggagcagtggctcacgcctgtaattacccagcactttgggaggccaaggcaggtggatcactcgaggtctggccaacatgatgaaatcccgcctctaccaaaaatacaaaaattagcccggtgtggtgcaacatgcctgtaatcccagctactctggaggctg

SEQ ID NO: 2674 - DNA, 1231 bp, Homo sapiens
tctcgtagggctgcctgggcgtggcgtctgagccggcagcaggcgcctctgttggtaccgtccctctcgtcctctctgacatggcttctgtccctcggcagcatgcggtgcacagaggtggtgcagggaatgggcttggggctccatggagcggaggcctgtgggacaggctgggttctgggctggctgcggcatccttggggtgtcatccctcactggggacagccttgtttggacgggttcctggtcctcagtgctgtgttcttcatgacaagccagcaacctcggggtgggcagtgttctctcccgccctgttgtgatgcagtctcaggtgctcctcccatggaccctggggatggcgtcgcgtgtggccctccctgtagggtgtgcgctcccctttcagtggctgagtggcagtgggatgggtgtgggggtgggaaggggatgctgtttagggagcaggaaggacagttttcctgacccaggttgggtgattaatgggccatagcttccaggagtagccaccactcctgcatcctcctgggaactccttcccaccccacgctgagtccttagacaccaggctccgccctggtcctttccacacagaggcctgcagagctgggtccttccttgacctgtgtgctcctcctcacagtcccagctgctcaggcgctcacctgtggtggaggctgatggcgccccgggcccatctgctctgtctcccagcgacgtcccagacctccccgcccttatggggtgtgggcttggtgctggtgcagctgctcccgtgatgtggattggagggtggcttggggtctggggactgcaggaaggtggatgcttcctattctagacctggagcccctggagtacagagcccgcagcccctcgagcctcagagcccgcagccccttgagtcctgagaagcttcccttataaggcagaaggagtgctgggtggggcgggcaccaggtcaccaccctgggaggacgatggcacaggggttgccaagctgcccagcagagcggctcaggatggaacatggcaaggccaactcgtgatcccaggtgcctgcgacgacccagttcctgggtggaatccgcaagtttgcagaagcaacagaaacaaagtgttcaggggtcctgttgtcattcgactctcacagttcagagggatgcatgagggacacaggtggcatacagttccagtcccctcccaggtggtgccc

SEQ ID NO: 2675 - DNA, 1133 bp, Homo sapiens
ccttctgtggggtggggctgtcctgggcagtgcagggtgctgagcagcgtccctggtgtccacccactccatgccaggagcacccctggtcgcgacaaccacacacgtccccatagagcactgtgtgccatgggggtagaatcactcctcggggagaccccggcttcgaggggaggcgtgaaggatttacaggacttttgtggacagagacaggcccacggtgggaaggagccggcccctcccatgccccctgcctgccttactgtgctgcgtgctctgtcagctcccagccttgcggggcagcacggcctcctctgaggggcttccctgaggagcgcccacccgggaggtgcctgtgttgctggatgctggccgttcttgcagccgtgatctaagtcgcttccagatcttctccccctccttttccattccactcagctgggtttgtggctgtttttctgaggttggaggggcccaggccaggtggtgttgaatggtgcacctccctgggccggcctctgtgggccactgtggcctgacgcagtgtgggagaagagggaagacgcgcagctcaggcttctgtccccacgcctgccctggggtgggtgaggtctgcatggaggggctgtgggcaggcgcaggccccggcctcacctgtggctcctgcagacatcggcaccatcatgcgcgtggtggagctctcgcccctgaagggctcggtgtcgtggacggggaagccagtctcctactacctgcacactatcgaccgcaccatagtgagtatctcgctgcgcctcagccgcagggccgtcctggtcttccaccccgcccacgtcacactgctctctcctttctcatgtggcctctgagaccctcccctcagagccctcaacgccccccggcccctgagctcaggcccagctcctcaaggcccctcagtactgcttgcaccgcaggacccaccagggtcctcccaggcactgggcgtgtcctgggtgagggctgagtgctgtctcccctagtctacgctcagctcctggggtggggcggggccatcagagtgatgtgtgaccataagggtcccggccgccatatccagaggcccctgtggataggagtcccacgtccctgtt

SEQ ID NO: 2676 - DNA, 2192 bp, Homo sapiens
tgcgcccttgcatgtgaaggggcctgcgcggtgacgcagctggccatgtgctgcgcgatggtgctgtgaggacggcgcgggcacgttgaacaagtgcatttacttttgtatttctcggctgtccatggctcgcagcatgccctgcgatgcggggcaggcctgtcgtgggtcccttggtgtttctgtacaggagagagtcacactaatgagtggcagtattttatagagatgtgatgagaatttataaatttcatagatttgacagcttttatttttagatggtataatgcacagtgaagaggaaagaaaagcgaggggaaaaaaccttatttattcaaacagtgcacaaaatggccccagcgtcagccccgaccctagacccctcagttgcagctcccagcagcccagacagagctgccggcgcccctgcctgccccacatcccttcctgtcagggccacgcctggcacccatcccttggagcctgtgctggttctcccagctgctgtgggtgtgctggggccagggtgcactgctgaaacctggcctctctggccctaggccccagggtgacgtcggccccccactctgcagccttggcgggtgcctgggactgggtgtggaaggagaggagctgaggccggggtgtagcaggcaggcagggccactccagtgcttctggagccctgagcagtcagggcctgggttgtctgagcagtggtggctctgtgccctccctggaggatgggatctgggagtctgagctccccgcatctggccctgggctgtgtggcacttgctgagcccaccttctcaagtgcttgctcctgtgagatggcatcggggagccccttccccaaggtgccacagatccaccctccagggagctgccagccctgtgttctggttcccaagggcaggatggacacacgtcacatccctaccacgtggcctccaaagggagccacggaggaaaggcttctgtggttgctaggtgggggagtcctgtgtgggagggcctgaagacccctgcttgtgcctggtgaggggggtgctgcctcccccagcccccaacaacctctcagacccccaccctccaacatagctgagttctgaagatggtgctccggacctgtcctcttaagtggtgcccagtgccctccccaccccacgttggtgctctcagctagaaggtgctgtgcctctgcctgagccccaagccccgagcctggccttcaggacaggcagcctgctctgtgtcgccacgggccggatacgccacagggttgatggcagagacggccgagtccctggtctagaacaagacacattctttaaacactgtattacttctgcctccctctaggtgacagtggcagtccgggtgccatcacgggtcctgcagatggccatgcagggctcctgcccacgcaggccaccgtatgttcaggacacgcactgggtctcagagccactggcccaggcagaagtctccttgagcccactgggtcatatgcgtgtcaccacacgtgaactagtgtggtggctgcctgcggacaccctcctgttctgagccctgggcctgtgttcttctcagacactcccagactgaggggtggtgtgtggcgggtggcagggtggctgtggagactggggatctggagcctggtgctggcacctggcctgagtttccgtgggcagctggcggggacctgtgctgctgctgctgactgtgggtgggcgggcggcgcctgggagtggctcttgctcaggaattgataggaaccctaaaaactaggataccccctcctcggcccatgaggcacgcacagtgacttatttaagacttcccccttaatttatctgcccccaggatgcgtcagtctgttcagtggtcagcaggccccccaccccccgccgactgccctcgccatcgtggtcagacccccctcccaacacaacacgctgctggtctgtgtcagcctttgtaacgtgggaggctctgccgtgtcttccgggtgaactgtatttggattgcgcgcattgtcacggtccgcccctgggctgcaggcgccccttcctctgggcacccctgcattctgcatccccacctctagacgctgtaataaacagactgttttcactcggacctggtgtgaatggcagcctttcttccaggtggcatgaggcgtc

SEQ ID NO: 2677 - DNA, 1172 bp, Homo sapiens
ggtgggcacagcagccatgcagagcgggcatttgaccccgtgccacccttttccccagctacgagttcatgcggagaagcctcatcttctacaggaacgaaatccggaaggtgacgggcaaggtgtgtgcagggctgcagagggccggggtggggctgcaggtggcagaggcagtcctccagccctggctcatggccacccgtcctccccacaggaccccctggaacagttcggcatatccgaggaggccaggttccagctgagtggcttgcaggcgtgagcgcagggcacggtggtcagcgtgcagcgggacgggactggccctgcccagccatgaatcgcttggccatgcctggatctgttttgttttggtttttggtttttgggtcagggtttcactgtgttgcccaggctagagtgcagtggtgccacagctcactgtgaccttgaccttctggactcaagtgatcctcctgcctcagcttcccaagtagcggggatcacaggcatgagccgccacacccggccatcacacctggattttcagtgggaggtttttggtttggagacatccaaagcctgaagccaggtgggtgtgggcaggggctgcattttatgaaactgcccagcaagctgcgctccctggggccccaggatccacctaactggcctggcacctggtgccacgtgctgctgccgccaggatatgcgccttcccacaggtgccctgcctgagttgtgtgcatccaggggcctggtgagcccccaggctggtggcatggcccccctgccccgtgctgaatgaatgtacagagccagacaaagctgtgaatggcctaggggctgagtcccacaccagctgtgaattctcctgcagacaggagggccctggctgtgcacctggggaagtggttgccctggggccagggtgcttgttctgttcaaataaaggtacctcttttccacactggatggcggtgaagtgaaggagaggggaggggcagccagggagcccccacccaagggaagtaaggctcagggtcctgagaggcagtggctgggcctcctgcactgaggggagagctagaacccccagccaggacaggtggaggctgggacccaggcctggggagaacagagctgctgtgtggtatcaggaatcctgtggtgac

SEQ ID NO: 2678 - DNA, 1172 bp, Homo sapiens; identical to SEQ ID NO: 2677

SEQ ID NO: 2679 - DNA, 1218 bp, Homo sapiens
gctgtaccttggagatggcctggtggaggacagaccccaccagccagctaggaggggatctggggtcctgttctggggagggaagagcagactccacgatatccttggggtctccagatagcccaccaggggtggggagggtgagcagggacagggcgcccccactgacttgggaccctcctcctccaggcccacacctcagcacccaggacatctgggccccccgcccccagcgctgtctagtttggttgcctggccgtcactcccagcctggttcccactcctgtgtcttctggggatggccctcaaggacggcatgttgacacatcaggcccagctctatcactggggagggagataggctgccagggacagaaagggctctttgagaaggccactctgcctggagtgggggcgccgggcactgtcccccaaggtcgcggcagaggagataggggtctgtcctgcacaaacaccccaccttccactcggctcacttaaggcaggcagcccagcccctggcagcacccacgatgcgggacctgcctctcaccagcctggccctagtgctgtctgccctgggggctctgctggggactgaggccctcagagcagaggagccagctgtgggcaccagtggcctcatcttccgagaagacttggactggcctccaggcagcccacaagagcctctgtgcctggtggcactgggcggggacagcaatggcagcagctcccccctgcgggtggtgggggctctaagcgcctatgagcaggccttcctgggggccgtgcagagggcccgctggggcccccgagacctggccaccttcggggtctgcaacaccggtgacaggcaggctgccttgccctctctacggcggctgggggcctggctgcgggaccctggggggcagcgcctggtggtcctacacctggaggaaggtatgtggggcccagccccaagcttggcaccgccgtcttccttcaggtgggccgggtcctcctagggaagatcaggggctggcagagcccccaccctgggcagggaggctgtggtcttgttcctaggactgggttgcgggtccgtggcctggaaggtgggcaccacactctgtcctgtccccgaagcccagctcttagacttgcccctgcctcggtgccagggagagagctgctgccttctccccacccctgaagacgacgcagggctcgggg

SEQ ID NO: 2680 - DNA, 2443 bp, Homo sapiens
ctccgcccggagcctggcgctgcctcgtgacctgcatcatcttcagttccagggtctccctccactgctgtagtaacccgggtccggggcctcggtggtgctcctgatgcccctcacccacccctgaagatcccaggtgggcgagggaatagtcagagggatcacaatctttcagctaacttattctactccgtgagtatggggccgggcctgctggggctgctctggggccacaggtactttcttgtgcaccttgctgcccgtacctgtgattgaatgtaatcgtgggaaccctgagtttcatcagagccggcgcacagtctcctgcagcccaggcgttgcctgagctcaacacggcctaggcccaagctttagcgctgccgggttcttggagtcctgtggggtgagtcagggttctgaattgggctgcaccccctggacaggatgatcggctgaatgtaacagaggaactaacgtccaacgacaagacgaggattctcaacgtccagtccaggctcacagacgccaaacgcattaactggcgaacagtgctgagtggcggcagcctctacatcgagatcccgggcggcgcgctgcccgaggggagcaaggacaggtgaggggcaaggacaggcagggagtgctcacccaggggagcagggaccaggtgaggggcaaggacaggcggggagtgctcacccaggggagcagggaccaggtgcgggttgctgcccaaggggtgcagggacagatgagggagggcactgccttcaggcagcacatatgggggccaccatcgctttgttggtggggacagggtccccccttttttttttttttgagatggagtcttgcttttgttgcccaggctggagtgcagtggcatgatcttggctcactgcaacctctgccttccgggttcaagcgattctcctgcctcagcctcccgagtagctgggcttacaggcgcccgccaccgatgcccagctaatttttgtgtttttagtagagacgaggtttcgctatgttggccaggctggtcttgaactcctgacctcgtgatccgcccacctcggcctcccaaagtgctgggattacaggcgtgagctaccgctcccggcctggggtccctttttaaaaagtgcactccaaattcgtaccctgggattctaccctccaagggatgccaggcagtgtcagagcttttctgtcatggggcatgcacgtgggtgggtgcagcggtgctgctcaacactgtggtgtcaggacggccccacccagaggacgatctgggccccagggggaccctggagtagagcgggcctcagggtagctgctaaggcccaggaggtaggcaggtgggtcgggccagccgagacgctgacactcgctgcagctttgcagttctcctggagttcgctgaggagcagctgcgagccgaccatgtcttcatttgcttccacaagaaccgcgaggacagaggtaggtgacccgtatcgcctgcagtagggtgcgtgggggtgcctgcgccgccccttcattctcagcccgcaggcacggtctccctgcgggggtggggggtgcgggcggggggttctggtcggcaggggttctgacggcttctcccccgcagccgccttgctccgaaccttcagctttttgggctttgagattgtgagaccggggcatccccttgtccccaagagacccgacgcttgcttcatggcctacacgttcgagagagagtcttcgggagaggaggaggagtagggccgcctcggggctgggcatccggcccctggggccaccccttgtcagccgggtgggtaggaaccgtagactcgctcatctcgcctgggtttgtccgcatgttgtaatcgtgcaaataaacgctcactccgaattagcggtgtatttcttgaagtttaatattgtgtttgtgatactgaagtatttgctttaattctaaataaaaatttatattttacttttttattgctggtttaagatgattcagattatccttgtactttgaggagaagtttcttatttggagtcttttggaaacagtcttagtcttttaacttggaaagatgaggtattaatcccctccattgctctccaaaagccaataaagtgattacacccgatgcacctggctctgtggtggtgacgctggggactggtgggaggagtgcctgggaccacagagggccctgggtggaggggtcgcgggggatttggcacccaggcagctgcgggacccctcccacggaggagaccccctgggctgggaggccgggccctcagcttggcgccagccttgccactgctcgcttgaagccccttcctgcctcgcgtccccttccgccccagcctgggcctgcgcatggggatgtctgtgctcccaactcaacttttgagttcgccgtgttactggccg

SEQ ID NO: 2681 - DNA, 1213 bp, Homo sapiens
gcctgtcctggacatttcatagaaatgggatctcacggtgcgcagccttctgtgtctggcgtctctcactgagcgtgacgtcctcaggtgcgtcctcaggcgcatccgcgctgtggcctgcgccagcctcgctcctcttcctggctggtggtcccaccgcgtacacgtgccgccgcctgttttgctgctgcttttgagctgagaattgtttttatgacttttaaatagctagaaagggatcaaaacaagactgtctcacgatgtggaaattacatgaaattcacagttcagtgcctgtgagtagagctgaccggccgcagttcagccacacatggactcattaccgaagctgcctccacccaggcagcccgagccagcagctgtgaccggcaccctgtggcccacacggccagaagtgtttgccatctggccccccgcagacgtggtctgctgcctgtggtggagatcactctggaggcggctgtcatcggccactcccgggagccctctcctaccctcagtcctccatccctggagcagttagccccatacctgggccatgctggggcgggccctgcgcccaggacggatctcatgccttctcttttctctcccccggtgatttctccaagccagtggaatcctgaagggcttcgacccactcctcaaccttgtgctggacggcaccattgagtacatgcgaggtgagtggggtggcggccgaggcaggcagcgggacgagggggatagtggggtgaggggggcagcgggacgaggggggcagtgggacgaggggggcagccgtggggctccctgctggctcttcttctctcaaacccacaaaacctctgagttaccaacgtgaagcctcgtggcggccgatggacgggcttgagcgctcactggtcctagacgtcctcacaaagcaggaaaccccattgttgtggggcctggagagacgggagctgccagctcacccactggtctctacacactgacggggcgcccggcacagttagaggacaacctttttaaatgttttattattttaatttttgttaaattggtgacgtgagaggccaggcacaatggctcacacctataatcccagcgctttgggaggccaaggcaggaggatctcttgaggtcaggagtttgagaccagcctgaccaacatggtgaaaccccgtctccgctaaaaatgcaaaaaaat

SEQ ID NO: 2682 - DNA, 1165 bp, Homo sapiens
acagagaggccgaagggccgcagcccgcggtgccgtcgggaccggtgccgcgctcacctgggccgcgaggagcagaaaggccgccaaaagccgcgccagcgcagccgccaccgctgccgccatgtcggccggtgcccgccgcaaccaacggcagatgtttcccagcaacgccccgagaccccgggccacgcatgcgccgcgcatgcgcgtgggggaggtcaaagggcgcggggcggtgcctgcgaagagccacacggcgcgacaagatggcggtgagcgcgcggcggaatctggagccggggggcgtggagctcgggccgcgctccaggtctcatgcgctctgctttccccgcaggataaggagaagaagaaaaaggagagcatcttggacttgtccaagtacatcgacaagacgatccgggtaaagttccagggaggccgcgaaggtgaggaggctcccgctgtcggtaccccctctttaaaaatttcaaataaacccagcaacagagatgatgaggacgcatgcggaagcacctcttttatttattttcattattttttttgagacgcagtctcgctctgtcacccgggctggagtgcagtggtgcgatctcagctcactgcaacctccgcctcccaggttcaagtgattcttgtgcctcagcctcccgagtagctggaattaatgtgtaccaccacgcccggctaatatttgtatttttagtagagaggccatgttggccaggatggtctcaaactcctggcctcaagcgatctgcctgcctcagccccctaaattgctgggatttcaggcatgagccaccatgcccagcctagcatttttgactgggcaagtgagctgccttctcctagcctccgtttcctcatttgtcaaatggggctggtaactccacccacttcacagggggtggtgagaatgaatggttacaggcatgtaatgtaattgaggcagctctcagcaggaagtaagcagtcagacaacacgtcacttattcaatagcctcttggatctttggtttcttttttttgtaagacggggacccaaacctctttgtccctggattgtagacaactgggtggcatgagagttattaaaaatcacagtgccccagccggacggggcggctcacgtgtgtaatcccag

SEQ ID NO: 2683 - DNA, 1107 bp, Homo sapiens
tcgccgtggccaacgcgcaggagctgctgcaggtgcggggctggccggggacgggcgctgggggcgacagggccacccctgggggccgacgtcgcggctaaagcctcgcgtgtctccacagaggatgacggacaagtgtttccggaagtgtatagggaaacctgggggctccctggacaactccgagcaggtgagacccgcggaggttcggggcaagggtcgcgagggcctagattcgaggggggaggtgtctgcgcgtgcgcagactaacggggaggtgcgacggagtggtcactgcacgtgcgtagtctgcagcccgggcgtcctggagccggggtcagggcggtccccggggccgcgaagtcccgagctgagccgtgcgcccctccgctcccgcagaagtgcatcgccatgtgcatggaccgctacatggacgcctggaacaccgtgtctcgcgcctacaactcgcggctgcagcgggaacgagccaacatgtgaccggcgagcgcgggccaccccaccctgttcatttccataaacgtgctttgagaggcggggtccgcatgtacgtactgcctgcccggggcttaggagggtggcaccggtgctgggacacacgggactgtgtcctcgccaccccccgccctgccccctgccagccagtgcagcttggatctcgggggtgtggggccctgtgccttcctgaagtgctggcagcccagtggcacctccttcaggcctttggggtattcccctagtgtgcccaagtcagcctcatattctgggcggacagcttgtctggacttcggagttgggggtggtcagacaccacaggagctgtcacctcctgcggatgggcaaataaattggtggaggacggagagaaacctctttatttccctcctgaggggtctctgggaagaggtgacgcgtgtccctggaaccccagctcggagggtctcagcctcccctgggttgggagaagtccatctttccccttagtgccaccgggctgctgagtcacgaggaatgtgttgctgctgccacccctgccccaaaggctaagggggacagccttccccttgtcagggcttgctttgaccctgc

SEQ ID NO: 2684 - DNA, 2911 bp, Homo sapiens
tcgcaagttcctgtgactgttttggaacccagaacagaatgtgtagctcacaggcgggctcatggggacatggaagtggaatggaaggctctagaaatagacactgttgttgctcagcccctccctggtggggaggtgggggcagccatctacctgccggctgcctccaggctggccctgatcatggccgaccttccttccttccttcctgcagggggacccgaggaccacctcaagaggctgctacgtgatgtgaacccacactcctcatccacacacctttctttacccagagccactgaaaactatttttatatcattggctttctttagttcttgatacatttctagagaatttctaagcgaactgccagaacgtgtgggtgggtctcccccagccctccctcctggcgggtctcctccagcctcacttcgctgccacttcgccgctgccccggagacttttcaatcccaccccactcctcatctcaccatttggtcaaattggaagcccagggccaggacccggaggtttagaagatgcttgggcttggagggaggagggccggcgaggctagcgaggggacaggagacggccctgctgcggacggagcgcggaaactgcgtaggaattcagtggtggtgggtttttttaaggctttctacaaaaccaaattcagaatccaggcgtcgacctggtggggcccggggccaagcctgcattctggctgcccagcttcggacagcgggaactcctcaggcagccacgcagcgggtgtgggccagcatggggatggcgtggcccccagggcgggttttcactccgctgcctgggcttccagattcccgttctggcagcgcaccggccgggtttctcggaccgttgactttatttgggggagttttcccgcagttcagttcctgactgtgcaaggccaacagggcaggggaggggaagacctggggaaggaagaatgaggacagtcccgtcgtaagacctgtcacaacaataagcagggaggggagatgtggaggggacacatctggttgccttggaggcagaagctgtgagtttcagaacagctgtctgcagggaacgccaccatgttgaccctctggaggagagcgctgtggagcccctcccgtgttccagctccgtctgccctgtgcctatatatacacatgcgtctatccatactgtgcttttatctgtgattttctcgctgaaaccatgtttctcagacaggccaaggccacctgactcctatcacgacgcacccaagcccctcagtccagcttcccaatgcctggcaccccccttcggcaatagctcaccgtttacaccctccctcatagatacacagaagttatttttttaatggatatttatttttttacattggtcagtacacaggtcaggagctcacgccagggccttgaggacaggctgaccctcctccccggggtggcgtggggctggggcaccctccgacggcagagcctccttcagaaagtgcagctcaagtcttaaagacaccaaaactgagccatgggcacgcgccgtctccgggccatggcgttcactgcagggcgggggcggcaccgctcccctgtgactgcatcccgcctccctggggacctgcctgtggcaggaaggaatggggggccccagccccaggccgggaaggagccagcggccgacaaagcagaaacacccgctgctccacgtagcccctgctcgctgtccttgctctcagaagtcccggtcccatgtagatagaggggggcgcatcttaccaaagcatttcctcctggaggctacgccgctgtgctcccagtcaggcggctggtagggagctttgcctgccccggggataccctctgccagccgctggaagtgggaatgctggcgacagactgtgtcctctttcccaccttcatagcaggaatcacccggacccgactggctgggcttcgtgctagcgagggttctgggggtgggtcttggtgatcttgtcctatggggagtctgcagtggtctcagccacatcctatgtattttggctctggaggagcaaagctgtatcctggagttggtctgtgatttgccgacagccttgcaggctgggctcagggacaaagtcccccccaaaacccgcaggtcctcatgtccagacgctgcccagtcctgtcctgaaaacagcacgccccaggcccacagaaccccccaccctacatttgccttgggtggagctgggggtggtcctaggactgcgggtgcccttagctgaagggggtggggagaagcgtggactgggcagcctgtgggtaattggaggttcattgagaattgagtctttggaaacactaagaaaatcaaatttttaaaagttatttatggcctgggaaacaatttgcatttgtccccaaatacgcttagctgtgtgccgcttagaacgatgcgaaaccatccctctgtgtaagcccgtgccgtgtgactcgaagcctagcgccctccctgcgaagcatcagacgccacccagccctggggggaggcccacgcctgctggaccaacgcgggttctggggtgcacagcgccaggttaacgctgaagcctgccccgctgagcccaggagccgggaggcctgcgggctgacccagaatccgatcatgcacctgtcctcatgccagcggctttggctggggttggtctgaagcctgcacgcggcagttctttgttaaagatctgagggactcctcagtcctggggcgtcgccgcctgcagcctcttccaagccctgcgtccagcgagcgtcacagcacaacctgcaaaaacggagctgggctgcagctggggctggcatggactttcatttcagagattcggtttttaagaagatgcatgcctaa

SEQ ID NO: 2685 - DNA, 1878 bp, Homo sapiens
cacgtggccccgagtgtgtggaacgcttctggtgcagctgtggctctgacgttcgttgaaatagccgctgtggcccctggctgtccactctgggcctctcctgctgcctggagtgtgtggtgcagccttggtccccacctgcgctctgacagccttcatgtctgtccccttccagctgctcccggtgtgaccgcgtccttccctggccgacccgaaggaagccttctggttgtctgccacttcctcctgttggactgcctgagagaggggaagagagagacctcggacctgcatgtcaagatggattttccccttttatctctgccctcctccactccctttttgtaactcccttacagcccccagacccttcttgaaacgagagccagcaagctgagcacagaccagcagcgacctcccttccagcccccagaaagctcggtcacttgagtgttttctagaatcctggggtgctcccgggccgctctcagagaagtggcaggtttcacgttcagccgtgtggcggatcgtgtggcttccaaagccttttacagcccccgccccccatcccgtggtctgtctgcaggaactctcccgtctgtgagaagcctctttccgagtcgacctcccggccaccccggccctgtgcctgctcggaagagctcactgccagctgcggcctgggcaccgcgggccatgtgtgtttgcatgaggaactctttagtggcagacacctaagagacggctgcggtcaccccacgcctccgcggctcaggagccgtcctgggtgcataggaccagtttctgtgacttttctccagttgggcatgttgacagacatgtttcccctcctcccaccctcattttctggtcctcgcgactgagagccaggggcgacatcatgaccttctgtcccggccgccttagccccgggcacagggaaggcagctgggccgtttctgtctgtgtcccatcctgctgtccttctgtcctggatgtttcatgggcccggggccccccagggaagcttacccctcctgtgctgggtggaggccacgggacacctcaggtgccacccaccttggccctaaaacagccaccaggaaagcagccggagagccggacagcaggcagcctgtctgggttcctgaggcctgggggtggcagacgagcccacggcgccgtggtcccagcagcagggttgtcagtcggagcatcctggggctccctggctcctggccgtctgtgaggtaggcgcagtaccgtgtatcgtaggtagcagtaggaacgggggccgccgcggccctgcagccgctcatggcggtgaggtgtgtgccaagcccacccggggtgcagggcgtgacgtgtggggaataaataggcgttgtgacctctgtctgtcttcgtgttgaccttggcgccaccgataccctccaaccccaaacctcgagaaaacccccgacgcggagtttgtggatcagctgggctgcttgtgagtgaatccccgcgacgccggagccgcacttcttgggtcacgggtcacgggtcatgggaggtttcggacagtcagcctctaccctctgctgtctcccttccctccgcctccgtccccagctgcatcccggtgtagagggtcaccccagggtggggtgagatgcctcggtcctcagcagagagtgatcgtattgtctgttgctttgctttgctttttttttttttttgagactttcaccctagatgcccaggctggagtgcaatggcgcaatctcggctcacctcaacctccacctcccgggttcaagtgattctcctgcgtcagccttccaagtagctgggattacaggcatgcaccaccacgcccagctaattttttgtatt

SEQ ID NO: 2686 - DNA, 1176 bp, Homo sapiens
gcttactcagcacctgatgaaagttaaccctaccgtcttgctagaagaagtcactgagggacaaacactgggtgatccactcctaggaggtcccagggtcgtcaggttcactgagacagaaagcagaatggggggtgccaggggttggggaggggacggggagtgagagttttatggggacagaaattcagtttgggaagatgggaaaattctggagatggtgctggggatggctgcacaaccgtgtgtgtgctttatgctgctgagctgtgcacttacaaatggttaaaatggactgtaattcggccaggtgcggtggctcctgcctgtaatcccagcattttgggaggctgaggcaggtggatcaccagaggtcaggagttcgagaccagcctgtccaacatggtgaaaccctgtctctgctaaaacttaaaaaaaaaaattagccgggcatggtggtgtttgcctgtaatcccagctactcgggaggctgaggcaggagaatagaattgcttgaactcaggaggcgggggttgcagtgagcagagattgcgccgctgcactccagcctgggtgagagagttagactccatctcaaaaaaaaaaaaaaaaaaagttagctcttctgagagtgccccaggttcctttcatcctcagtacctttgcacagtccctgtttcttttttctttttcttttcttttgtgtgtgtgtgtgtgtgtgatggattcttgctctgttacccaggctggagtgcagtggcatgatcttggctgactgcaacctccacctcctgggtgcaagcgattctcatgcctcagcctcctgagtagctgggattacaggcgtgcaccaccacgcccggctaatttttgtatttttagtagagacgggtctccctatgttgcccgggctggtctcgaacccccggactcaagcaatccgcccgtgtcaggctccgagtgttgggtttacaggtgtgagccactgtacccagcctgcactgtccctgtttctgtgtggtacgttctctcttcagagagacgtgaaagatagttctacttcagagtggatacactgggaggatccttgatgccttgaggaccaaacccagaggggagatgctcagtttgttcagattccactgagtctgagatttctggaagcttggggtgggg

SEQ ID NO: 2687 - DNA, 1184 bp, Homo sapiens
ggggccaacactggctgcttggggctgcccggggactccagagggctgcacggccaccctgccctggctagagcgcaccccaccggagcccacgtgggctgggcggctggagggatggtcccccggtgacactgggagaaaggccacttggatgggggcgtttctgttttgttccgctttgtgatgtcaccaatttggaaacagcgagggtgggtggggacttttacagaatattctcaggtgtgtacccgagaggcagagagagggacgtggccggcagctctgtgcgtggccttgtcccaagcacttgcgcccgcccccgagcgccgcccccggggagcgggaagccagcactcgcactttggccaggggcgcgtggaaggtggtggcaggcaccggcctgggcagcttccaggcctggctggccacgaccacggcccgagggggagcccgccaggccacgccgcactgagccacagccccgggggccgcctcccggggccccttgaggcactgaggcaccgagactggttctccccgagagactcggaaggtggggaacgaggggactgtgtttggggaggtggctttttcgtctgctgttgactgaacactacagcgccctgtggttccgggcttcgcacagctgtcccagggatggatcgcctgtgctgccttcgcccgccgccacaccgggaccctgcacggctgcttctggcctcgacagatgacaaaagaaacagccccaaaatacgaccactccaaccagcagttcccgcctgcctgcccgccactgtcaggcctgccctggcctcctcgtccgcagggctgtctgctggcttctgggggcagaagagcggggagccccgtggaagggtcaggggagaccaggtcagggcagctacatttctggtgatcagccccatggggagacggggctggcgggataccccccccccggcttccccacaccacttctgtctcacccggaagcgtcctttttttgtgccaggtgtctacctaagagggttggtgccagaagccccccatggcgagtgctggggcccggcggtgccctgggggagcagatggggccacccctggcagggccgctacaaccttttccagcagcggagccctctggggggcctgtgcttgtggcatctctgagggcctagattgca

SEQ ID NO: 2688 - DNA, 1099 bp, Homo sapiens
gccagccctggggttctgggattccagccctcctggagccttttgttccccatgtggtctcagtgacccgtccccctgacagtgggctcggggagctgcatcacccagccttccccttctccgactgcagggtctgatgtcatcattgacagcctttgcttcgtgggggcctggcagggcccctgcctccccgacccccgacccactgcaaatccccgttcccctgcactcctcttctcccagcccatccctccggcccctgtgcctctgcggccccagcccagctcccagggccgtcacctgcttggccctggcccagctccctgccctgagtcctgagccagtgcctggtgtttcctgggctcggtactgggcccccaggccatccaggctttgccacggccagttggtcctccctggggaactgggtgcgggtggagtactgggaggcaggaggtggcccggggaggccttgtggctcctcccctcgctcctcgccctgggcctcagcttcctcatcaatagaaaggatgtgttcggggtgggggcgtcaggtgagaacgtttgctgggaaggagaggacttggggcatggcctctggggccacccttcctggaactcagagaggaaggtccgggccctcgggaagccttggacagaaccctccaccccgcagaccaggcgtcgtgtgtgtgtgggagagaaggaggcccgtgttgagctcagggagaccccggtgtgtccgttctttagcaatataacctacccagtgcgtgccgagcaggcttggtggggaagggacttgagctgggcaagtcctggcctggcacccgcagccgtctcccttccgtggcccagggaggtgtttgctgtccgaaggacctgggccggcccatgggagcctggggttctgtccagataggaccagggggtctcactttggccaccagttcttcggccagcacctctgccctccagaacctgcagcctggaggggtgaggggacaaccacccctctttcctccaggttggcaggggaccctcttctcccgtctgccctgcgggttgcccgcctcctccagagacttgcccaagggcc

SEQ ID NO: 2689 - DNA, 1189 bp, Homo sapiens
cacgtgcctcttcccctagccctgacagcccaccgtgggctcccccagcctcaagtcctgccggctcagccagcccttaggaccctccccacccagaagaatgcagacacaggttgttgctgagatatgctttgtgacctcgagcaggtcacactgtgtgtgccccagtttccccatccataaaatgggatcatacccctaacaggcagttctgaggactacaggtggccaggagattagccaggctgcctgggttttggtctccaccatgctagcttggtgtccgacctgtgttgagaccctccctgcctctggcccgggtgtcccatccaagcaatggacaggttggaacaggcgttcgtagggaacgggctgaacgcccgcggctcccgcgatgtctcgcgatactacctccctcgcccccgctcacttaaggaccggaagtagcaaagcccgccgtcgcgccccccgccccgcgtctccctggtaaccagcctctccccttccctcgcccataaggagcaagcggcacaaatcgggctcgatggaggaagacgtggacacgagccctggcggcgattactacacttcgcccagctcgcccacgagtagcagccgcaactggacggaggacatggaaggaggtagggctggtggcgggggcggagccggccttccggtctgagtcaccgtggcgggaactacgtcttccggcagccactgcgcgggcgccgcggggcaggaagccggcctggagccgcggggcctcctgggaattgtagtcgtcccgagctgcgcttggctggaagtacggtccgggttcgcgttctcggatctctttggttccgctgcggcgaaggagggcagagactgtcccctgcctgactctcctgccctccggccgtgaatgccacatctctgtggggtccccgagctgcaggatggactcagtagtgactctgatcaacagggcgcctcttcctgggatctgtcatagaatccctcgtctgtagggaccctgtttgtcctcttcccctctagaaggtcctgagatgccggatcccttctcattggggtccttcttgaggttacttttttttttaaccaggttcccatctccatgggatcttctggttctgcaggagactcgtctcctttctgtagggtctccattcccatggcgtcgttt

SEQ ID NO: 2690 - DNA, 1178 bp, Homo sapiens
tttttttgtaaagatggagtctcactatgttggccaggctggtctcgaactcctaagctcaagtgattttcccacctcggcctcccagagttctgggattacaggcatgagccactgcgcccagcccaccgtcattttcttgccattaactgtgtctcttgcggtgtaagcttcagccattctttgccccgaacaccagcccaacctgaaacctatctagagagccagctcttggcatcatgtacccaggacagggttccacagttccaggcgctctgtcgtctgagctggttctttcgttctgcgcctgccatttagccaccagtcacaccagtggcataagacaacagaacttatcatctcttcgttctggagtccagaagtccaaaatcaaggcgtgggcaggtgtgggcaggaccccactccctctgggggccgaggggaggcccctcctgcctctcccagctccagtcatggccggtgattcctgggccctccctggcttgcagccgcagaacccggcctgttcctgtgttgtgtggcggtctgccttcccgtctctgtctccatacggccttctgctctgtgtgtctgtgtgtaaatgttcctcttcccatgaggacaccaggcattggatgagggcccgccacctccaggatgacctcatcttacctacgtctgcaagacctcatcactttttttttttttttttttttgagatggagtctcactctgttgcccagactagaatgcaaaggcgcaatctcggctcactgcaacctccgcttcctgggttcaagtgattcccctgccccagcctcccaagtagctggaattacaggcgggtgccaccacactcagctaatttttgtatttttagtagacagagtttaaccatgttggtcaggctggtctcgaactcctgacctcaagtgatctgcccgccttggcctcccaatatgctgggattacaggtgtcagccaccatacctggccaagacctcatttcacatggggtcatgattacagctgcaggggttcagacggggatgtgcctgtgggggacacagctcatctgaagcagcatccacttgtggagggggtggagcaggcaacgtgtgggctgggccgactgcacctgctcgccggttgcgcagttgggagctgtggggtctcca

SEQ ID NO: 2691 - DNA, 1127 bp, Homo sapiens
ttccatggtgttggggtcctgggatccttctggtcaccccacaccgccatcctcaatatacagctctgtgaccagtggtcccaggtggctgccaaagctcctgccatcacggctgcattccagccacaggaggcaacagaaggagaacaacagcccttccctttcggacatgaccagtgtttctgctccactcgtgtcattggctgagtgcagtcacgtgagcacacctagctgcaagaggctggggcggcatggtcctgttcttggcggccatgtgcctggccaacactgtgggccccgttgttaatgaaagaagagagggtggttactgggggacagtcccatcgggagccccctgttgcttgtgggattgggccgtttcaaggaagtcttggagctgagccgctagaggctcagctgctagaggcactaggagggaccatggcgggggtgggggagaggtgcccaccacccctcacaggtttcctcccgtccttcctccacagcgaaggcagcaacctcacccccgcccaccacttccaggacttccgcttcaagacctatgcacctgtcgccttccgctacttccgggagctctttgggatccggccagatgattacttggtaagcatatttgctgttacgggcttccaggcttgaaacagaacatgttcagggtctcggagggtctgtgggtcaggcatttgggggcagcctccctgggttcctcgtgtagggttatggtcaggttcagggccggagtctcctgtgagactcaccgggaaagcaggagagatcggcctccaagctcacatcactggcagctgcaggactccgtcctggctggcgttggctgggagcctccattcctcaccatgtgggccttgtcatcagagcaggcgagggtgtccactcaccaaacagttggtatagtcttctgcagcctggtgccaaagtgactgacccattttcagacttaagggttagaacaaggcactgggacgtgggtgccactggggaccagcgtagagtcggacctcctagctctagccatggctttattgtttcaggttagcaaagtcaaaatctaggccaacccctttgacctagcagcccattatccgggc

SEQ ID NO: 2692 - DNA, 3030 bp, Homo sapiens
tcccaggttcacgccattctcctgcctcagcctcctgtagctgggacttcaggcgcctgccatcatgcccggctaattttttgcatttttagtagagacggggtttcaccgtgttagccaggatggtctggatctcctgacctcgtgatccacccgcctcggcctcccaaagtgctgggattacaggcgtgagccaccacgcccggcctccggggcagtttttgagttacatcctgctgtcttctgtccacaaacaacacaaatgctctggaggggttgggacaggcctgctccagacctcgtttcttccctgttaatgcttaaaattccacaagcccgtggtttctgcgccggagagctcagtggagcccctgctccttgtccttgtctggagtgagatgcgcttggcactgcaacactgactccgcttcgttctgattgacgtggctctaccaggctgtatgaggtccgccttgctaggaaaagcttttaaggatgcgtctgtgtgtaaggtcacctctttctccaggcaagagtgggacttaacctctttttgcagaaatctgacccggtcgtctcgtaccgcgagacggtcagtgaagagtcgaacgtgctctgcctctccaagtcccccaacaagcacaaccggctgtacatgaaggcgcggcccttccccgacggcctggccgaggacatcgataaaggcgaggtgtccgcccgtcaggagctcaagcagcgggcgcgctacctggccgagaagtacgagtgggacgtggctgaggcccgcaagatctggtgctttgggcccgacggcaccggccccaacatcctcaccgacatcaccaagggtgtgcagtacctcaacgagatcaaggacagtgtggtggccggcttccagtgggccaccaaggaggtgaggcacggctcagcatgtgcagaccacacccgtttccaggctctagagggacctcatggtcctgcctcccgagacagagaccctaatggggccaaggcgggcaaggccccaggtccccctggtggagacctgcaggacttggcaggtggagggcaagcagccgaggtgtgtccggcccttgacggtggctctccccctcccccagggcgcactgtgtgaggagaacatgcggggtgtgcgcttcgacgtccacgacgtcaccctgcacgccgacgccatccaccgcggagggggccagatcatccccacagcacggcgctgcctctatgccagtgtgctgaccgcccagccacgcctcatggagcccatctaccttgtggagatccaggtgaggtctacccgcccaccgctgaccctgccaccgtcctgcccagcggccactgacaggttttctttcccttctggcagtgtccagagcaggtggtcggtggcatctacggggttttgaacaggaagcggggccacgtgttcgaggagtcccaggtggccggcacccccatgtttgtggtcaaggcctatctgcccgtcaacgagtcctttggtgagtgcctgcccggtgtggcctgcagagcctggcaggctggtttgggggacagaagcccagttaagcttagcaaggtgttaaaggaggcgtcctgatgggagcaggtgatggatggagcaggtggtccagtttctgacagcttgtggaccccctaaatcactgaattcccaggggaggggctctcctatccccagtgtgagaagggctctgggcctggagctctgaaggcctacgccctgggccggtagagcagccgagctgtagcacagggttgtcccaaacgagcagcggcatgaggcccatgagtggcctgctaggcccttcgtgaagtgctgggcaccaggccgagtgtctggtctgcagggtgactcaggctgaggaactagcctgagctcctgacaggactttccttctgccctgccaccttctcgatggcccagtgagcctctcgcttccctctgcaggcttcaccgctgacctgaggtccaacacgggcggccaggcgttcccccagtgtgtgtttgaccactggcagatcctgcccggagaccccttcgacaacagcagccgccccagccaggtggtggcggagacccgcaagcgcaagggcctgaaagaaggcatccctgccctggacaacttcctggacaaattgtaggcggcccttcctgcagcgcctgccgccccggggactcgcagcacccacagcaccacgtcctcgaattctcagacgacacctggagactgtcccgacacagcgacgctcccctgagaggtttctggggcccgctgcgtgccatcactcaaccataacacttgatgccgtttctttcaatatttatttccagagtccggaggcagcagacacgccctcttagtagggacttaatgggccggtcggggagggggaggcgggatgggacacccaacactttttccatttcttcagagggaaactcagatgtccaaactaattttaacaaacgcattaagaggtttatttgggtacatggcccgcagtggcttttgccccagaaaggggaaaggaacacgcgggtagatgatttctagcaggcaggaagtcctgtgcggtgtcaccatgagcacctccagctgtactagtgccattggaataataaatttgataaggtggtgactctgttctgcatttttcacggtgtcttcgcaggggagcggggctgcccagtactgggctccctggagcctagaaggggacccgggccctagttaggtgcagcctggggctgcctcagtgttaggtggaacgttctggaatggtgggaatgccctacccctgtgtcattcagagaagcagctgccagctgcgcgggtctgctgagcatttgaagtaggatcagtgcggcaaggaattacgagatgtcactttgaacgcatttggatggccctgtggagcgaggggctctggattgaacttcgcaggtttcagcaactttccgaattgctgacgagctcacaagttctatctgcc

SEQ ID NO: 2693 - DNA, 1185 bp, Homo sapiens
caccaccttcgagcacgcgcacaacatgcgggtgatgaagttcagcgtcagccctgttgtcagagtggccgtggaggccaagaacccggctgacctgcccaagctggtggaggggctgaagcggctggccaagtccgaccccatggtgcaggtgggcacggagtgcacctgctgggagcagacaccctgaggggggacggcttgtgtcctgagttgtggctgtgtgggttgctgtggttggtggattggggtgactggtcatgaaaggaggggttcttggctgtggctgtaaatggagactcctgcccaggcagccaccaccctctcctaggctgctctgcgcgtgttcactgtagcttgtgggacttaacatttcttcaggagtttgtgctggtcccagtttcccagcaccttccctgaaatcttgttctggcggggtccctagctaaagggaagctgggagcctggtcccgcctgttccgagccgcctacccctttggtgctgacccgcatccctttcagtgcatcatcgaggagtcgggagagcatatcatcgcgggcgccggcgagctgcacctggagatctgcctgaaggacctggaggaggaccacgcctgcatccccatcaaggtgaggcgccagtgaccagccttccccacgccccaccccggacacctgccctctgctttaaagctgagctgagctaggctctgcagacgcctagacttgatctcggtcttggtctcagcttcttaagttcctcaagtttcttctttgcagtcttccacaggcatgtggggctgtttttgttgttgttgttgttttttttgagatagtctcgctgtgtcatccaggctggagtgcagtggcgtgatcttggctcgctagaacctccacctcccgggttcaagcgattctcttgcctcactcagcttcctgagtaactgggactacaggcgcgtgctaccacgcccggctaatttttttttgtatttttagtagaggcggggtttcactgtgttagtaagtcaagatggtctcgatctcctgacctcgtgatccccctgcctcggcctcccaaagtgctgggattacaggtgtgagccaccatgcctggcccagggctattttttttttttttttttttttttttttgagacaagagtcttgctctgttgcttaggc

SEQ ID NO: 2694 - DNA, 2632 bp, Homo sapiens
aggagttccctgtcatgggggtggcatgtctcggacagaggcaaaggacaagggtgggttggctcttgtgggagcctctccagggatgagtcatggagggaggagcagcctggcttctgacagcatcccagactccctgggccaggtgtgtggctcctgtccccctgacgagtccctccctccatcagtgccatctccctcttctacgagctctcggagaatgacttgaacttcatcaagcagagcaaggacggtgccggcttcctcatcaacctcattgactcccccgggcatgtcgacttctcctcggaggtgactgctgccctccgagtcaccgatggcgcattggtggtggtggactgcgtgtcaggtaagcagtgggtccccctgaggcacggcctggaaccgggggccatccttgcttgaggatgacagcgccgccctgtcccccgtgtccccaggcgtgtgcgtgcagacggagacagtgctgcggcaggccattgccgagcgcatcaagcctgtgctgatgatgaacaagatggaccgcgccctgctggagctgcagctggagcccgaggagctctaccagactttccagcgcatcgtggagaacgtgaacgtcatcatctccacctacggcgagggcgagagcggccccatgggcaacatcatggtacggccctccctagctgggtggtgggcttgccgcagcgggatctgcaggagccggtggggagtggagttgagctgagggggactggaagtgtgtttttgccaggaatgttgggtgacagagaagggggctggaatgttttcatccgacttgacccagcccttgatctttgggcagctggaagagacgagctcagggaacgctgccctgggtggtggaggggctggcccccctattcgtgatgactgatcatttcttcactttgaccagatgtctactgaagaaagcctgcgtctgaggcccatgcccaaggcgcccagcccgtagcttcaggctctgcgcaggggccctcacggctgcttctcgtttctcacacttccagatcgatcctgtcctcggtaccgtgggctttgggtctggcctccacgggtgggccttcaccctgaagcagtttgccgagatgtatgtggccaagttcgccgccaagggggagggccagttggggcctgccgagcgggccaagaaagtagaggacatgatgaagaagctgtggggtgacaggtgagccccgcgggatatggtgggggattcctgacacctgggggtagtggcagcgacgtaggggcgtggtgtgctattcacagcgtggctcaagcccaccaggtcttgcccaagcatgtccccttggcgaccaccctccccaagtcatcccctggagaccctaacttgatttggcttggcctctccttgccaggtactttgacccagccaacggcaagttcagcaagtcagccaccagccccgaagggaagaagctgccacgcaccttctgccagctgatcctggaccccatcttcaaggtgagtgagggctgcgccaggcaccccgccgatgcgactattggccctcggccctgtgggctccggccggtagcctgtcggctgactgggcccgtctccttgtggggcagatgcgagatgggaggaggcacagctcctaactgaggtggagtcagggctcctctcttaagatctggactgcatagccagagccttgggacctctcctgcattgagggggttgaataacttgtggctttggcggttcagtgcttgtaagtcagaacttgggtccttgtctgagtcagagtgggctttttcctctgctccaccacgaggtttcctccagctcccgatccgctcagctggctgggcccgtggtaggcaggccaggcctgctcctgctcccgtgctgcgtccccctgcgctgacctgagtcttccaagcaggaagcagtgccaggcttcctcctgctgttcccaaatgggctttcttgtttcttggtggggaatgtaggtgtttgatgcgatcatgaatttcaagaaagaggagacagcaaaactgatagagaaactggacatcaaactggacagcgaggacaaggacaaagaaggcaaacccctgctgaaggtgcggcctgggcccagccctcggggtggagggaacacaggctgctgtttccggatgctctgacagcccaggcctgggggctgaagtcctcagctgggcagggacagctgctgcccctttcgctttagactctgggtgctgctggagacacatcccagcagccagccccatccgggacaggtgtgggtgagggccttggcaggagtgtgcatggcctttgccgccttccagaagggactgtgctttggagaacgttagtcctgactttggcttccttggcttcaagagaggaagcgtgtacggggtggggccatcctgggctccccaggtgtctcatgcaccgctctctgcccccgcaggctgtgatgcgccgctggctgcctgccggagacgccttgttgcagatgatcaccatccacctgccctcccctgtgacggcccagaagtaccgctgcgagctcctgtacgaggggcccccggacgacgaggct

SEQ ID NO: 2695 - DNA, 2632 bp, Homo sapiens; identical to SEQ ID NO: 2694

SEQ ID NO: 2696 - DNA, 1146 bp, Homo sapiens
ctgctagtttgtggctgttgtggtcagttctgctgtgaacatccacggatgcgtctttgggtagatagactttttcctcttcttctgggggcgtttcttgttaaagtttatcctcaggtgttactggtttttgtttttttttttttggagagtgtttctctttgttacccaggctggagtgcagtggtgcaatcatagcttgcagcctgtgcctccatgggttcagacgatccccctgcctcagcctccaagcagctgggaccacaggtgtgcaccaccacgcctgggtaattttttgtggagacagtttcaccatgttgcgcaggctcgtctcaaattcctgggctcaagagctccgccagccttgacctcccaaactgggtgttttcttgccattgtgagccagctgctagattcccgcatgcacgttttagctatgtttcttcgcagggagaggcacctggctgccctctctggttcagggttttgctgtggattctgttgcattttccagggaggccagcccctctcctgacctcacagccactcctctcacccagcccgtacaaaagagtcctgggcctcagtttcccagctctgggggagggagccttgtggtgtggcggtctccaccttgtcgggtgggctggggtcacgccctcctcactcagctctcctttcctttcctctggtttgctccacacccacagggaactgcagcccggagttaaagccgtgcaggtcgtcctgaggtatgcccaggtgtgcccgcgaccccagggctggacccccagccacccgcccctccccgccccccagtcctggcccaggcccttctcagtctcccctgctaacagcagagcccagctctcctcacctgctgtctatccctgtctggggatacatcaccatccgacccccactcaggccacacccgggggccctgataccccccgtgtcacattctccggtgcccccatcactgccgcctggctaccactcgtgtacccccgcagcagcctagtccctcctgtgcgccccctccccgccccatggtccctgttgtcgttgcagaatctgttactcagacaccagctgccctcaggaggaccagtacccgcccaacatcgctgtgaaggtcaacca

SEQ ID NO: 2697 - DNA, 1099 bp, Homo sapiens
ccagggccaccagggctggggcaggcagctgtgtcccatgcaggccttggcctcagcagcccatgggactcggtgtagccagggaggcttcctggaggaggggtccttggttcatactttgttccatgagccctatcacctctctgtccctggctctgagctgggtgaccccagggtccccaaaagagccccgtcccagaccctgccttcagagtcttgttcttggccaggggagcggatagaggagcagagccagacataaacgttcccgttgctgtgtgtgtcttggggaggaggaagagaagctgtggggtggggctttggagggtgaaaagcagttttgcaagcagggaagtgggcaggcagggctgtgctacgcctggggcggccctggcacggtgggctccgagcatcgcctcagagagagctcggcggggcggaggggctggcctgggtgagagcctcagaaagggtggcccagagtgggacgagggctctcctgtgtgatgagaacgatgccactgcgggtgcctgggagcagctgtagccttgacagtaacaggccagcctgggccctgcatggacccgtggggcagggggcctctcctcagacgccccccagccactgcacctttcccttcctgcgggtggggagactgaggccctttggctaagacgggttggggagcagaaccagggcctgcctccagttggccttgtggcctcagggaactcgttcccttcccgagcctctgtttctgcatttgtaaaatggggctggtaggacctccgagtaaaaaggccggacacagtgggggtgctctggagaggctgtggctggcatgggcgtggggagcccgcactctgctcccattgctaccctcacagcctctgcaggggctttgagcagccagcaccttcactccagcctgtttcctgatctggcgggcacacagtgcaatgtgaaagcaggtgtgcgtgcacacccacacccgcatgcccacacatccatacagtccacaccatcacacacacacacccacacacatccatacagtccataccatcacacacacccgcacacatccatacagtccac

SEQ ID NO: 2698 - DNA, 1144 bp, Homo sapiens
ctctttagatgttcagaatgcgaaatcgcccccactcgtctcgtttttcgagggaccgtccccatcggggcaccgaaacctctggtgcacggtccgtgttctgcaagggtgatgatccagggcctgccgtgtccgtgagggtccctgggcggggatcgggggtccccggccccactgaccgtgcccgccccgtgccccgtccacaggcaggacaagctgaaggtgcacatgcggaagcacacgggcgagaagccgtacctgtgccagcagtgcggcgccgcctttgcccacaactacgacctgaagaaccacatgcgcgtgcacacgggcctgcgcccctaccagtgcgacagctgctgcaagaccttcgtccgctccgaccacctgcacagacacctcaagaaagacggctgcaacggcgtcccctcgcgccgcggccgcaagccccgcgtccggggcggggcgcccgaccccagcccgggggccaccgcgacccccggcgcccccgcccagcccagctcccccgacgcccggcgcaacggccaggagaagcactttaaggacgaggacgaggacgaggacgtggccagccccgacggcttgggccggttgaatgtagcgggcgccggtggaggaggtgacagcggaggtggccccggggccgccaccgacggtaacttcacagccggactcgcctaaaaaccaaaaagagaaaacagaaacccgagaaagagagagacagagagagagaaaaaaaatcacccaccacccccccaaaaacacaaaaaaagaaaatctatctatatacagatatctatatctatatatatatatacagatatatatatatgacgcgtcacagaatctagggtagcgctttctcagatttccctcctttctgacgtttttctccctccgcaggggccccggccctccctggctccccttccccccaccaccccatcgctgggtttcggggcttggtttggggttttttgtaggacacaaggaatccgagaccccgcacagccccctgggcacccggcatggggcctggggcccgatccgaggccctgggctggggggagggtagacgtgggggcgctggggggggactggggtgggcttttaatttcctcccctc

SEQ ID NO: 2699 - DNA, 1192 bp, Homo sapiens
ggcgtgagcaccgagccgggcctcaaagtgccctttcaacaggcattcccgggggccctcctcggaggggtggtgccagtgtgcttgtgaaatttaagcgtccagtgtgggttttgccagcctcatctcacgctgatgagacagaacagggcatctgactgctcttgggcacagctagggaaactgaggctgatggggggcaggaaacctgactgtcctcatgcacagctggggaaattgaggctgggggcaggacagctggccgcccttgtgtacagatgggaaacaggttgggagtgggacacctgattgccttcctgtacagctggggaaactgaggctggggacatgacgtctgattgcttttgtgtacagctggggaaacaggctgggggaggcaggacatctgaccattctcatgcacagctggggaaactgaggctagaggataggacatttgactgcacttgggaacagctggggaaactgaggctggggagccgggacatctggctatcctcatgcacagatggaaaacagtcttggccgggtgccgtggttcatgcctgtaatcttagcaccttgggaggcaggggcggttggatcatttgaggccagggttttttgatttgttttgtttttttgagatggagtcttgctctgttgcccaggctggagtgcagtggcgtgatctcagctcactgcaagctctgcctcctgggttcatgccattctcctgcctcagcctcccgagtagctggaactacaggcccccgccaacacgcccggctaattttttgtattttttagtagagacggggtttcactgtgttagccaggatggtctccatcccctgacctcatgatctgcctgtctcggcctcccaaagtgctgggattacaggcgtgagccaccgcgccaggccgaggccaggggtttgagaccagcctggccaacatggtgatagcctgtctctgtattaaagacacacaaaaaagaaaagaggctggaggcagggcatgtatcgctttggtgcacagctggggaagctggggctggaaaggcgcgacatctgaccgccttcacgtgcaggtgggaatgtgaggctgggggagcagggtggaacgctgcttctcaagggcctcgggcccttgtcagtgggcacaggaacccccgcacccccactcacga

SEQ ID NO: 2700 - DNA, 1135 bp, Homo sapiens
gccagcccactgcagcccagatgctccaaggagggctcctcaagggttggaatgctggcacgcttgctctgcgaccttggatgagccccgtgacccctgcagccggggcgcgctgtgttcctggggctgtggagggtcccccagctgctgcctgcaaagccacccgtggtgtcttttctcctccgcggcggaaactcccaggtcagctcagggcatggcagagacctgagtgtggggtgtgggtcagaactgcgtgagacacctgcacccccacctgtcacctgccagaccataaactgccctgcagtagccctgggcaacaaggacaagaggaacgagcttgggtgggggtgagccttgggtgggggtgagcatggtccagtcctagcccagcccttgggtccaccccagcagtcactccccctctgccagcctcagtcttcccatccagacagtggggagatggtcatcagccctagagtgttgtctcgagggttcgctcagcggctcattgggaatgcttgttgagcgactactgtgcactgtgtcaggcccctgcggagctgtcttgagagctggaggggcagaggcccctccctgagccacccatgtcagctggactccagccctgccccaggctcctgtgtgagagctcccttgcaaggcagctctgagggtatgaggataagccgtccttcctctcagcccccagggtagggggatttcatctcctgctggtatccgggggccaggaaaggggatggaaggagccgtgggaggactagttaggcaggccagagccagacagacggcccgtgctcaaattccagttctgctgcgcgaccctggccaagctgctccccctctctgatcccgttccccgtttgcaaaatggggcacagacacagatcctgccttccagcgctgtgggtgccgtcacgtaccgtgggtctctggggcgattatcaaggcccagcctcccccagctgctccgaggagcggctctggcccttgggccccgagcgccgagtccagagccccaaagcgcagaaggcgcccctcagagaatccggcgctcgggaggagcgtggccaaaggaccagcccctccatctgtccccccagcaggctgtgga

SEQ ID NO: 2701 - DNA, 1117 bp, Homo sapiens
gccccctgggggtctggacgggcacacagcgacccgccgcctcctcccacgcggggcagcacccgcgtctcctccgcgccctcaccctccccttcccttcgtgtgctgggaagaggacgcaggcccaagacgctggtctccagcctggccgcctcccgtggcgcacagacaagcccaccacgtaggctgcagggagtgcgggccccacagctgcctgagcccccggccgcggcttgggctggcccggagcagagcctctgccgtggcgacctcaggagggccgagtcacgcaactgattcgaggatgggacgggaggcgggggaaccctgggccctgttccttccccaccttgtgggtgggtgttcagacccaaaggcagaactgtcagaagacgccctgcccttggcccgtgggtggagttgggctccggcccctgcttcccgtcaggaggcagaccaccccctcgccgggagtggggggacgcatccgtggcttcccggccacctgcgcagagcctgcactcactccttgtgtgccctctaggacggcggctccctggaccaggtgctgaaagaggccaagaggattcccgaggagatcctggggaaagtcagcatcgcggtgagtccaccgcagacccacatcgcgcccccaccgcactctgcacggacctcttccacacggccagggttccgggagccactcacagtgtggtgggggttagggtggcccctgcagaaagagagtggccaaggctgtgcccacctgctgtggagcttgaacaagtgacgtcccttttggggcctgaggtcaccatctgccaagtgaagacgttataggtccctcttcactcttagtatcctctgtttgccacactggtcccctctgcccctcgtggcagggggatgttggcagctggcacgttgcaggggacaggagcttgttgaaagggagactctggggtgggatgtgggacgccaggacctccagacacactcaccattgctgttagaaatgtcaccggggccaagggcgtctctgctgcccggtctccagcacagctgctccgtagagccgtgtggtttcagcagaccgtgcgtgttgcttcttggagct

SEQ ID NO: 2702 - DNA, 1430 bp, Homo sapiens
ggagagaggcctggaggggagccattgccctgcctccctcctgggaaaggcaagcactttgtcaaagtctgatttgatggggaaaaatgctttcacacagctcccactacaactgagtgggaattaagtgtttgcttaattggtcttttttgaaaacaggtttattgaggtgtaattcacataccttacagtgtcccctttgaaagtatgtgactcagtggattgtaggatattcacggcatcgtcctcatcaccacagtcaattttacagtattccatcaccccaaaaagaaccctgtccacatcagcagtcacccccatcccctcctccagcccccggcacccacacatccccttcctgtctctggatcagcctgtcctggacatttcacagaaatgggatcacatattatgtggccttttgtgtctggcatctcgcactaagcatgacatcctcagggttcacccacgctgtggccggggtcttggcctggttcctctttacggctgagtcctgtttcagtgaggggtgggctgcgctgggttggcctgttctgccctgggtggacgcctgggttctttccacccttgcctgctgtgagtcgtgctgctgtgagcacttgggacacgtttctgtgtggacgtatgtgtccacttctaggcagacacctaggggtggaattgcggagggggtactgagttggtcttgaccactgttgggaacgcctgcagagcagaggccccaaatgccttcatcccgttttcgggcaccccccaagccagtctcgcccctctccccttgcagctgatccaccttgagatcaagccggccatccggaaccagatcatccgcgagctgcaggtcctgcacgaatgcaactcgccgtacatcgtgggcttctacggggccttctacagtgacggggagatcagcatttgcatggaacacatggtgagtgcgtccggggcaggggcaggggcagggcctccacggaacagagcatgttggggagaaggaagaccccctcacggcccctttcctcagaggcaacagtgcgctggcttccaggggatccttctcaaggcagtcgatgccatacaagtatgtatatgtagatgcctttggttttgttttgttttctttttgtttttttgagaggcagtctcactctgtcactcaggctagaatctagtagtggcacaatctcggctcactgcaacctccacctcccagattcaagtgatacttctgactcagcctcccgagtagctgggattacaggcgcccgccaccactcctggctaatttttgtatttttagtagagacagggtttcaccatcttggccaggctggtctcaaactcctgacctcaggtgatccacctgcctcgacttcccaaagtgctgggattacaggtgtgagccaccg

SEQ ID NO: 2703 - DNA, 1158 bp, Homo sapiens
tactgaaaatacaaaaattagccgggcatggtggcgggagcctgtaatctcagctacttgggaggctgaggcaggagaatctcttgaacccgggaggccaaggttgcagggagccgagatcgcgccactgcattccagcctgagcaacagagggagactccgtctcaaaaaaaaaagaaaaagaaaagaaaaagacggaggcttcctgggtcctttgagctgcagcttatccttgaggtcctgaggtctgctagacttgttgagacaggatcaaggcagcgtcctcagttcccggggagccgccctggattctggtcattggtgtgtctatgggggtacacagcatggatcctttccttctacaccatgaacccctcaagtgcaggaatccagtctgtgtcctcctgggggccgatgcaccacggccacatagcaaacggccagatggagtctccctaggtagctaacccctaccctggggggtctctgcagggcaaacctggtggacctgcagaagaagctggaggagctggaacttgacgagcagcagaagaagcggctggaagcctttctcacccagaaagccaaggtcggcgaactcaaagacgatgacttcgaaaggatctcagagctgggcgcgggcaacggcggggtggtcaccaaagtccagcacagaccctcgggcctcatcatggccaggaaggtgagcactgcggggtcggggaggtcggggagtggtggggaaggtccccctggaaacaggaggcaggttgggaaggcagccgggtctctgcattctgattagctccaggctctgtccctcatccccaccagggactctaggtcctgagaaagggcccagcttctgggcagatgggagccgtgccagccacaccagccacacacagctgtgccctccagtgactactttctgccctggagggcacttgaaatccatattcccagaaagctagcacgtgggggtttcagaaatgcgagtgtgttatggttctccagagaaacaagcgatgaagacgaagcgtgtgtgtgtttgcgcctatgtgtacagccacctcagggcgatggctcagccagtgacagaccgcctacgcagcggtggcgacgtaagatgatcaggccatgtttttgctgtgcctt

SEQ ID NO: 2704 - DNA, 1149 bp, Homo sapiens
ctatcattgaaagcgaaggtcagtgacaacatgagtcacctcatggtggacttcgcgcaagagcggcagatgctacaggcactcaagttcctgcctggtgagaggggcacgcactagagggccaggacttccggggaatgacctgggaggctaggaggccctgaaacaggacctggagtatggtggacgacccggtgtctgaattccgcctgggggaggtggagctctgagaattccacgccctgtggggggtggagttctcatggagccccgcccctgggtggagccatgggaagaccccacccactgtgtagtgacatcctgggaaaactctgtacccaggggtggaactgtgagaataccatgtcctgtggggttggttgagtcctcatgaggccccgccctggggtggagccatgagaaggtcaaactcaccaggtgggaaaatcctgtccccaggggtggagccctgagaatagcacgtcctgtgggggtggggtattcatcaagtcccgcccatgggtggagccatcagaaagccccacccaccagggggtgaggtcctgggaaaactctgtccacaggggtggagccctgagaataccatgtcgttgggggagtggagtcctcccgagacctcctccctggatagagccacgagaagggcctgcccaccacatggtagctcctgggaaaaccctgtttccaggggtggagccctgagaaggccacgtccccgaggagaaatggactgagaacccagcctgtctatgatgcagccccaaagaaagccgcatccctcattggcagagattttggaataattctgcctgtaaatgatggaatcccaagaaagctcagccctcccccaacccactgatggaaccttagcgtctccatggccgggcgcggtgactcacgcctggaatcccagcactttgggaggccgaggcgggtggatcacttgaggtcaggagttcaagaccagcctggccaacatggagaaaccctgtctctactaaaaatataaaaaattagccgggccatggtggctcacgactgtaatcccagctactcaggaggctgaggcaggagaatcgcttgaaccagggagtcggaggttgcagtgagccaagatcgtgccactgc

SEQ ID NO: 2705 - DNA, 1113 bp, Homo sapiens
agtatctggaggggatagctgggatcccgaggagtatctgggaggaatagctggagcccaaggagtatctggagggaatagcaggaaccaaggagtatctggagggaatagcaggaaccgaggagtatctggagggaatagcaggaaccgaggagtatctggaggatatagcaggaaccgaggagtatctggagggaatagctgggtccgaaggagtatctggagggaatagctggggcccaaggagtatctggagggaatagctgtggcccaaggtgtatctggagggaatagctggggcccaaggagtatctggagggaatagctggggcccaaggagtatctggggggaatagctgcggcccaaggagtatctggagggaatagctggggcccaaggagtatctggagggaatagctaggaacttgaggcgtatctgaagggaatagctggggttcaaggggtacctgaggggaatagctgggaacctgaggagtatctggggggtacagctaggaacctggggagtgtctctgcagggagcagctgtggtgtaaggagcaccttgggggctggccctttgtggaagggcatctgtggcccagttctatccagttcccctgcccacccctcctgccctgcgccacaggggacacgctgatcgacggcggggagcattactgggaggtgcgctacgagccggacagcaaggcgttcggcgtgggcgtggcctaccgcagcctgggccgcttcgagcaactgggcaagacggccgcctcctggtgcctgcacgtcaacaattggctgcaggtcagcttcacggccaagcacgccaacaaggtcaaggtgctggacgcccccgtgcccgactgcctgggtgtgcactgtgacttccaccaaggtgaccccaagccccagctgccgtctctggctgcccctgcctgagtcccctccgtctgcccccatcccacttctgaccggtcccactgtcactctgccccccgaccccaggcctcctgtccttctacaatgcccgcaccaaacaagtgctgcacactttcaagaccaggttcacacagccgctgctgcctgctttcacggtgagctgccct

SEQ ID NO: 2706 - DNA, 1072 bp, Homo sapiens
tgggatctgcctgaggacagagaacatggtctcctgcagggccctgcctcccaagccccgccctcagaaagccaagtaccttttcagctttttaactgcccccatcccaacccagggaggcctgtgtcactctggcacaagctgccaccaccagccacccacacccaccccagcacacctcacacgggaccacagccgcgctgccgagggccaagcacaaaggttccagtgagcgcatgtcccagcccctggtggccaggctccccttgctgagccgctgccacttcaccctgtgggaagtggccccagccatctcctctagaccaaggcaggcagccccgacatctgcttcctctatcgcccaatgcaaaatcgatgaaatggggagttctctgggccaggccacattcacattcccctccccctgtggtccagtgaagcctccggaccccaggctctgctctgccctgccctgcacccccctcgtcagaagtacatgaggggcgcagagatgagcacacagctttgggcacggtccagggcaaactgaaatgtacgcctgaattttgtaaacagaagtattaaatgtctctttctacagccccttgcctcgtcttggtgcaggggtgggcctgccacccaccgccttcctgaggggccggctccaaagccacacacaccccaggaggtccctccagcaccccaggtgctcctgagcccaaggtgggtgggactggccctgaggcttttgtgccagttcccaggtgcaggggctgaggggtatcctggaagttaatgccctgccctggaagtgaggaagctggggtgatggtaccagcctgggcacccagccaccctcaccccagccttggggagaccagcgtggctggctgctgcttccgtttctttattacctgagcccatccggaccctcaagacaactggagcccaccctgccctggaaggctcagctcccctgcttgaggacgccgcacacctgttccaggacgtgacacaggctctggtccttgggcgtcctgctggccaaggagatctgaaacgagggggctgg

SEQ ID NO: 2707 - DNA, 1088 bp, Homo sapiens
taagtgcctgtcattgtcatcgctttcaccgtagctgagagccgtgaggaccaaggtgtgccaggcctgtgttgactgccttgtgaaactcagtgtccacatggggcaagggctgggctgtcccatcctgcagacacgggcaccagagcacaggagaatggcggcctccctgcccggctgcctgcacctcttctcgtaactgtcagctcctgctgcctctcccagccaagctggcaggatttttttttttaagtagaccccacatactcaaggatgggggcagatccccacattgctatctgtggggatgtttgtgtaggcgcttctggaagcagtgtcttctgagccatgtgttctcaggctgaggctctggactccaccgtggcccagatggggcctactgtggcagggtccccagtgggtatgtgagtggcagtcgggacacacacaggtgggcaggccacccccaccctccccctccccctgcaggcccaccctgctctgcaggcagcgtgtggccctggggtgcccacggcagtgcctgaggtgtgtgtcctgatcacttggcctcctgcctccagctgtggatgcgatgtggctggaaggcggctcagggcctcctgtcctcttcttcctcctacccctgggctcacagcgtttcccctcttctgtcctctagctggtcagtgagaaggtcggaggggccgaggggaccaagctggatgatgacttcaaagagatggagaaggtgaggaagaaactgcgtgctctgtgtggtggtggcactgctggggcctgacctctgccgggcatagtggaggcggccaaccttgatgggcctgggtctggagtgatggggcccggcaggtgtggagagatggggtggtgtgggggcctcgtcagctggacttgacgggcaccagctctctcccctgccgtgggcaggcagctgtggggacatggctgagctgaagacatggagagggggttggggggtcctggtatgggctcttagggcaggaggcggtgcagcagcgggggtcttgtgtgccttgggcccccactggctgtggagtcttatatgctgc

SEQ ID NO: 2708 - DNA, 1099 bp, Homo sapiens
ctgctggggatgggatcccgtccgcatctgcaccgtggccccacagccccctcttgcctcctgcgggcctgctgcacaccatttcctcctgactgcccagctgctgtgacctagtgggctttctgccgatgctcaccgtgtctgtcgggaggccatgcaaagcagatgttcacagctttacatttttttgtttctttaagatggagtctcactctatcactcaggctggagtgcagtggcgcgatttcggctcactgcaacctctgcctcccaggctcaagtgatagtcctgccccagcctccctagtagctgggattataggtgcgtgccaccatgcccagccaagatttgtatttttagtagagacagagttttaccatgttggccaggctggtctcaaactcctgacttcagatgatccgcccacctcagcctcccaaagtgctgggattagaggtgtgagccactgcgcctggcctactttgtttttaataaggcacacactctgcttttctatctgatgaactcttttttttttctccttttgaggatgatgatgacgacatgggagaggatgaagatgaggacgatggtttctttgtgccccatgggtacctgtctgaggacgaaggtgtgacagaggtgagggagtgaagggggaggtcaccggctcagcaaaagttcatttctggactggtgctcagtggcctgacctgggagggtgacgggggtcccagcccaaccatacgagatttggactgcattccaagcacgcaagctcactcgtgggaacagctgggcctgaacttggtattacctgggagggtggcagacgtaggaggagcttgcaagcgaggggagccataggagcagacaccctggtgagggagcgtggccatggtctgtgggttagaaggctggaaaccacccgagctgacatacagtcagcatgcagcaagacatgtgcattgtaagtgttgagtttgatgacgtaacaatcaagtgaatgtgggcaaccaccgcccgaaataaaacagaacttccctatctctccagaagattgcccacgtctctgcaggcgaacctgcctgccacccc

SEQ ID NO: 2709 - DNA, 1101 bp, Homo sapiens
aaaaatacaaaagattagctgggcgtagtggcgggcacctgttaaaaaaaaaaaaaaaggcacagcaaaaatatcgttgcggctggggcagtggctcacgcctgtaatcccagcactttgggaggccaaggcaggcggatcacttcaggtcaagagttcgagaccagcctggcaacatggtgaaaccccatctctactaaaaatacaaaaattagccgggtgtggtggcaggtggctgtaatcccagctactcaggaggccgaggcaggagaatcacttgaacctgggagtcagaagttgcagtgagccaagatcgcaccactgcactccagcctggatatatggcaagactctgtctcaagatttatatatattaaataaaaatacagttgtctgtaatcccaggactttgggaggctgaggtgggtagatcataaggtcaggagtttgagaccagcttgaccaacatggtgaaaccccgtctctactaaaaatacaaaaattagctgggcgtgatggcatacacctgtaatcccagctactcaggaggctgaagaacgagaatcgcttgaacccgggtggcggaggttgcagtgagctgagattgtgccactgcactccagcctcagtgacagagtgaaactcccgtctcaaaaataaaaaataaaggccaggcatggtggctcacacctgtaatcccagcactttgggaggctgaggcgggcggatcacgaggtcaggagatcaagaccatccggataacacgatgaaaccccgtctctactaaaaatacaaactgggcgtggtgtcaggcgcctgtagtcccagctactcaggaggctgaggcaggagaatggcgtgaatccgggaggcggagcttgcagtgagtcgagatcgcgccactgcactccagcctgggcaacagagcgagactccgtctcaaaaaaaaataaaaataaataaatacagttgtaatctgatggggccactatcaggtatgcggcctgtcactgactggaaattattctgcagttggcaatgatggctgtttttggagatctgaatccagttcatttgagggaacccccaaggttctctggt

SEQ ID NO: 2710 - DNA, 1178 bp, Homo sapiens
acgcaaggacaaacactgtgtgacccactcctaggaagtccctagagtcatcaggttcactgagacagtaggatgggaggtgccaggggctggggaggggggtgaggagtgagtgtttcatggggacagaatttcagtttgggaagtcgagaaagttctggagatggtggtggtgatgggtgcacaattatgtggatgttcttaatgctagtgaactgtgtgtacttaaaaacagttaagggcccaccgggcaccgtggctcacaactgtaatcccagcactttgggaggccgaggcgggtggatcacctgaggtcaggagttcaagaccagcctggccaatatggtgaaaccttatccctactaaaaatacaaaaattggccgggggcagtggctcatgcctgtaatcccagcactttgggaggccgaggtgggtggatcacctgaggtcaggagttcaaaaccagcctggccaatatggtgaaaccttatccctactaaaaatacaaaaattagccgggtatggtggcgggcacttgtgatcccagctacttgggaggctgagacaggagaattgcttgaacccgggaagctgaggttgcagtgagccgagatcacgccattgcactccagcctgggcgacagagcaggactcttgtctccaaaaaaaaaaaaaaaaaaaaaaaagagcactcaccccttgggggtgctgtgaagattaaatgagttaatttaagtacttatgataatgcctggcacctagcaagtgctttatgtttgctaggtgtttttttgtcgttgttttaatttaaattaattttattttttttgagatagggtctcactcggtcgcccagactggagtacagtggaccaattataactcattgcattcttgaactcctgggctcaagcaatcatcctgcttcagcctcacaagtagctgggactacaggcacgtgccaccatgcctggttaattttttatgttctgtagagattatgggggcgtgtctcgctatgttgcccaggctggtctcaaactcctgagctcaagtgatcctcttgccttggcctcacaaagtgctttacaaaattaatacaaaaattaaccgggcgtggcagtgcacacctgtaatcccagcttttcaggaggctgagacacgagaattgcttgaa

SEQ ID NO: 2711 - DNA, 1162 bp, Homo sapiens
ttcatatttggagaatcagcaaccaaccagccaaccatgttgcttttataagacagagctgagaaagcaaagcttggctgtcgtcttggctctggtaccacccacgagatgcgggcgattctcagctcagggcgtggaggcgtggtgtgggggagtctatttgccatttttgtttgtcagcagggggcaggggttctcaaagattgcaaaatgctgctgcaggtcaggaaggttattttgggtgcctgtgggggaggtgaaacaaggtcccatgactgttttgcagaaccttgtctgtggagggtagaggttgcggcaggggcctgtgggccttacttggtgagaaggtaggtctagctggctccattcagtatttgagacatttggaatttgtctgcatttaaaaccaagagatcacacacacctgtctggatttggagtttctcttgaaaactcgccagtccggccgtctgagcctgcactgacgcctggtgaagctgtgcaggggccgcccctctccctttcaccacagtcctctccactccctttcgcctctccctggcctgctgcactcactgataggaaattctgaccccagactcggagcagccttcccgtggttcggtttttgcttccgcgaaaaagccaaaggccttggccagagagccagctgttcctacctctaccccacgcttccaaggcaaccttctccacttatcttaggccgagagacagctcttcaagaacgtacatggatcctgattttctcacgaagtcccgatggaaccctgtgctgttgagacatcagtgtgtaaaactctctgtgtccctgttgggctgtccagacagtctggactcttgtaaatttgagatttaattaaaggaaacaaaccaaataggactgcggaacaatttaaataaaagcacacaccagcctgggcgcagtggctcatgtcagttaaacctagtgctttgggaggccgaggcaggaggatcacttgagccaaggagttcaagaccaccctgggcaacatagcgagaccctatctctaaaaatatatatatataaggccaagtgcagtggctcacgcctgtcatcccagcactttgggaggctgaggcaggcagatcacctgaggtcaggagttcaagaccagcctgg

SEQ ID NO: 2712 - DNA, 1148 bp, Homo sapiens
tgcagcctgacccaccctgcatcctgttcaggccgggatcatctccttcctgggcttcttctggcccctttctgcatctcttcttgacaacatggcacaaatgaccagggttcttcccacctcaggtctttctgtggcttcctgctgcctgccatctatgttagccccaccgaccttaccctccacatcactgttttcctgtctgtcacccgtaagactttcagtgcctggggccttttcacatgggagtctgctttggagactgctccccttgcctgcttagcccccaccatgggccccaccccaaatcctccggacttctgagaattttcaatgttgagggcccaaccatgtgtttctttcttgcagtggctcacaggcccggggcattcaaagctgagctgtccaagctggtgattgtggccaaggcatcgcgcactgagctgtgaccagcagccctgttgcgggtggcaccttctcatctccggtgaagctgaaggggcctgtgtccctgaaagggccagcacatcactggttttctaggagggactcttaagttttctacctgggctgacgttgccttgtccggaggggcttgcagggtggctgaagccctggggcagagaacagagggtccagggccctcctggctcccaacagcttctcagttcccacttcctgctgagctcttctggactcaggatcgcagatccggggcacaaagagggtggggaacatgggggctatgctggggaaagcagccatgctccccccgacctccagccgagcatccttcatgagcctgcagaactgctttcctatgtttacccaggggacctcctttcagatgaactgggaagagatgaaatgttttttcatatttaaataaataagaacattaaaaagcaaccccacagcctgggccctcccggctggccgttgcgggtcaggagctcagacgcggctgacactgccccaccgtgggcgggtgggcggtgtctctgggtgggacttctctgcaggcatcaaagcgctagatcccaaggtggctgtatgtgaacttgcccccttccccccttggcactcgctgtccctgggtcccccacatgttgtgaattcacacccgggtttctgtggctgccacaggc

SEQ ID NO: 2713 - DNA, 1164 bp, Homo sapiens
aattgctggaacccaggaggtggaggttgcagtgagccgagatcacgccactgcactccagcttggcaacagagcgagactccgtctcaaaaaaaaaaaaaaaaaaaaaaaaagagacaaggtcttgctgtcgtccaggctggagtgcagcggcgtgatcatggcttactgcaacctctgttttccaggctcaagcaatcctcctacttcagcctcctgagtagctgggactacaggtgcctgccaccacacccaatatttaaatttttattaattgaaaaaacttttttgcagagacagggtcttgcctggtatcaaactcctgggctcaagtgatcctcctgcctcggccttctgagtagttgggactacaagcatgagctattgggcctggcctagcttttatacaatgcccatgttacaaaattccaaatgtccaaaaagcaaggagaatatcttccactctgccttgaccttcagtttcccccctgtagtaacctgtctgcttccagaagtgcttgaacatgtgtgcgtttgctatgggtttttttttgtttgttttgttttgtttttgagatggagtctcactctgttgcccaagctggagtgcagtggcgtgatcttggctcactgcaacctccacctcccaggttcaagtgattctcctgcctcagcctcccaagtagctggggttacaggtgcacaccaccacgtccggctaatttttttgtatttttagtagagacggggtttcaccacgttggccaggttggtctcaaactcctgacctcaggtgatccacccaccttggcctcccaaaatgctgggattacaagtatgagtcactgtgcctggcctgtttttttttttttgagacagagtcttgctctgtcgccaggctggagtgcgttggcttgatgtcagctcaccgcaacctccacctcccgggttcaagcaattctgcgtcagcctcccgagtagctgggactacaggcatgcaccaccatgcccggctaattttgtatttttagtagagacgaggtttctccatattggtcaggctggtctctaactcctgacctccagttatctgccggcctcagcctcccaaagtgctgggattacaggcgtgagctactgtgcccagctggttttttttttttt

SEQ ID NO: 2714 - DNA, 1100 bp, Homo sapiens
tagctcactgcagccttgaactcctgggctgaagcaattctcctgccttagcctccttttccttaacacttaatttgttgaggaatcctggtcatttgtcccaggagttccaaatggctctatccagactgtagagatgaccaggagatgtcacttgctgtgtgcgtctgtgctacctgtgagctggtaggtcagtgtgttcccacactgtcccatagccaagagccacctgtgctgtgcttgaaatgtggccaggaggaactggaatgtactgtgagtgtaaaatacacatgggtgccaggcgcagtggctcatgcctgtaatcccagtactttggggggccgaggtgggcggatcacaaggtcaggagatcgagaccatcctggcaaacacggtgaaaccccgtctctactaaaaatacaaaaaattagccaggcgtggtggcgggtgcctatagtgccagctactcaggaggctgaggcaggagagtggcgtgaacccgggaggtggagcttgcagtgagccgagatcgtgccactgcactccagcctgggcgacagagcgagactgtctcaaaaaaaaaaaaaaaaacacatgggctttcagagacctggtacaaaagaagaatgtaaagtagctcattaataactttttcatattcattccatgttgaaataatcttttgtctacactgggttctatggaacatattccaattacttccacctatgtttacctctcaaacgtgcttattaggaaatttagaattacatacacagcgtgtgttcaagtgctgtttccctcggacgttgctgatggggatgtcggattattgatctcgggggatcagtttcactcacaggagttcttgtattttgatgtaggccattggatcaagcgttgcctttatgattttttttttttttttttttttttgagatggagtcttgctctgtcgcccatgctggagtgcagtggcgtgatcatctcagctccacaacctccatttcccaggttcaagcgattctcctgcctcagcctcccgagtagctgggattacaggcacgggccaccatgcccagctaattcttgtattctta

SEQ ID NO: 2715 - DNA, 1146 bp, Homo sapiens
tcacagcgggactggggcaaggtgaggcgggtccttcccacgtgcccgtggcccctccccgcctgccagggctcacgctgttgttctttgtgtctgtgcctgggacagggcatggcctgtgtgggccgcaccaaggaatgtaccatcgtcccgtccaaccactacggacccatcccggggatccccgtgggcaccatgtggcggttccgagtccaggtacctgcagcgtcccggggctccaggggccacgcgggctcatcctgcttttctgggggcagtttctcctggctttggccagccaggggtcagggtggttaccagtggtgcctcggctagccgaggaggggtgtggaaagcctgcaggtttgggtttactccttattttaccagggacctgcaatgaatccttgggggtgggggctgctgctctgctcagagacacgtaaggtcattcccaaagctcctgtcccagggaaggggtggcatctgctaagagggacctgtctcagcgctggttgtgatctatcattggggcagcccctgcctgtgactgggtgttgacagtgctgggcgctgtcagctgtgggctgtgtgtcacggcagacgagacactttggcactagtgacattggagccagatggttctctggggcggggccatcctgggcactgcagggtgctgagcagcatctctggcccccacccactccatgtcctcccaagtcatgacaaccagaaacgtctgcagacatgagtgtccccttggaggcaggattgcccctgggtgagatgcactgagctgggtggacaagctgggcctcatcatggagttcatggggccaggcgtgcagggctaggagctcctggggcagcgctgtatccctagtgctcagcggccagccggggccccatgctcaggccagggcctctcaaggcattttgtggagtgagtggcaggctgcacctcaaccggcctaatgaaggccggcttttatatcataacctcatttagaactcagtcacccccacttttattttttttgagacggagtcttgctctgttgcccaggctggagtgcagtggtgcggtcttggctcactgcaacctccctctcctgggttcaagcgattctcctgcctcagcct

SEQ ID NO: 2716 - DNA, 1158 bp, Homo sapiens
caccggccgtctcccggtttttccctcgctgtctgggcctgaaacagcccagaagagaaatcggatctcttctcagcctgagcttctcttttagcctgagctgaaagagatcatcttgggaaggagctccccagcccggcttggattggtcccctctctggtgccccgggggagtagtgatggattcaggacttggtcctggtctgacctgccgtgggggctgtgatggggtcctgatgtgccccgtgtgccatggcgctcgccaagggccagcatgtctgcggcctcacaggggcttcacgagccacattcggggcagcgcttggtttggagtctagagccagagcctggcgtgggacccgagctcgtgaactctgtcagtgccactgacttggggcagtgtctccgtgtgcctccctgtggggcgatggcggagtaaacgggtgatggccactgagcgctggccgtggggactcttggtcctggctgccaagtagaagcttcaggggtgctcttcacagtcagctgactctgctgtccctgatagcagaagacagcgaaggcacctgccccctgccatggcaggtcggcgggcacagaggagggctcgggaggctgtgtcctccagcgtctccatgtttactgtgccaggccaggtgctgaggggccggcgaggaagacgtgaggactggagagagcctggattagggccctcgaggggcggcgctgctttagccgggggaacagggagggcctctcccagcaggtgacattcagtcagagacctctgagcgactcacacctgcccacctttgcaggatttgggacaagagtgctccaaagaagtgcaggcagcacgtgcggaggccccaaggcggaacgaggcgcagctcactgagctggcaggagcagagaggactgcaggggcacagaggccggagcagcagtgcctgctgcctagtcagccgtgagggcaaaggctggaggcactgctgtcagaggtttatgcctttttttatttttattttattttatttttttttttgtgagacggagtcttgctctgtcgcctaggctggagcgtagtggcacaatctctcggctcactgcaacctctgcctactgggttcaagcgattctcctgcctcagcctcctga

SEQ ID NO: 2717 - DNA, 1200 bp, Homo sapiens
ctgcctggtgcacgctggcatgtgcgatggggcccttcctggaagggccaagctggcggtgagcccttcagaaaaggtgtctgggctgggtatggcggctcatgcctgcagccccagcgcttggaggggccaaagtgggagggaccattgagcccaggagttcgagaccagcctgggcaacagagtgagacttcatctctacacagaaaaaagtaaaaattagccaggtgtggtttctcacgcctatagcctatagtcccaggtactcaggagactgaggctggaggattacctgagcctgggaggttgaggctgcagtgagctatgattctgccactgcactccagcctgggcaagaatctcacacaggttaagaccagcccctggtctgcagggtatgaccggcccctgggggggccgcagatactggggtggaggaggatgggcagcgacccctgggactctggggagaattagcctgcaccccagggctcgcaggttctgggggtggccgggcggttgccgacgctgctctgccgccccacaggacgtggcccagtggaacatcgggagcctccggaccatcctggacatggtggagcgcgagtgcggcaccatcatcgagggcgtgaacacgccctacctgtacttcggcatgtggaagaccaccttcgcctggcacaccgaggacatggacctgtacagcatcaactacctgcactttggggagcctaagtcctggtgagtgtctgcactggccctgccgccggccggaccgagagcccctcgggagggagtcaatcccgggtacacggctgggcgccgtggcaggggccccaccaggtgaggccgcaaaggtcggcctatgacggctggagatcttccggaccgcctggggtcacccaccagctttggggtgggggatgtgcacccccagagccgaagctcccaggcccctagagcttgcgctttgtaccccggagtgccccccattgagctgtgagcggccccaggtgtccccatggccaggagcgtggtcttgagcctcctgagctgcccaggctgtgctgcctcacagccaagtggagacgttcctggtgaagggacactgtccatgctgcccagaggggcctggccaggatgaccctgcagccgctccctcgcagtctccgccctggcacgtctgggccaggccctaca

SEQ ID NO: 2718 - DNA, 1187 bp, Homo sapiens
cactcagactcagaccccaggacgggtgtagggcagccggggcagggctgggcactgagtttggccagtccttggcccagaaggccctgggtgagtggacggctctggatgtccagggagaaccaggtgttgggggaggggctcagaggaaccatgtttgggggctctggcctcaggtggcagtcagccgagacagacgtgtccccctcctgttgatgggatgggacgctgcagtgtcagcttgatgggcattgtggagaatggggcagccaggaggcaggtggagggggagctatgggccagggaccctgtgggcagccagggctgtagacccggggccatcccctgggcagttggggtgattccttggacgagtttttagggggctcaagtgtctctctccctctcccctctgttcttctagaggcatcccctttctccggggaggaagatgtgagtgacccggacgccttgaggccgctgctgtctctgcagtggaagaacagggcggccagcttccaggccgagaggaagttcaacgcagcggctgcgcgcacggagccctactgcgccatctgcacgctcttctacccctactgccaggtgggcaggcgggcctcacgggtcccagagaaccccaggcaggggcggtgggagagggcgagggaccgggcaccccacacgcctccctctctcacgcagggcagggtgttggccagcaccccgagttgtgagggcttgttcctgacagccgtaggcagagcctggtctctgggttttattggaatgaagcttactaacgtgcccatgtgcaacatgagccatggtggatggggcagagggaggctgcggaggctcggggtcactgccctcagggagcgcccgtgtctggtgggcgctgagatgggccgggtggtgtgggagtgcagtgaaggcccaggtacaccacctgggtggccgggcggggctcccgcaaaccctggcctgtctagctgagctgggcacctggctaaggtcctgtttctggtgctctttccatgctggcctcgcctgtcctctgcacccagatggggagctggcctctgcccacggccatcccaggcatcagcacccagcccagccgttttcctcggatctcttagatccccccttctctcttcccctgggcatgcagcctccccaggaca

SEQ ID NO: 2719 - DNA, 1195 bp, Homo sapiens
ggtctgggtggacagagccagggagagtgctgtgccgagggtggtgagcctgtcttggggctctgctgctgggagctggatttagtgctctggttcctgagacaaacaagacctgacagccgacaccgtctccaggcacttgctgtcctttgtgaggccagagaggctgctgggagccacagggcctggaatgccacttcagacatgcgtcttcctaattccccttgccaggcagagtgtggagactcgttcatcacacaccacccccagcataccccagcgccaggggccacccagcaccaggggccacacaggccagcctgagctctgtgtctggatgcaaccctcatgggaaggtcttcggcgggttggggacagggtcagacagtgtttggggatcctgactttctggaggagtgagaagaggggccgaggtggctctggccatctccccgacctccccctccagagccagggggtgtcgaagcctggggcaggtgccctgagagaggtccgcgccgcccgcccgcctgccccacacatggctctgtcccctgaaggtcgcctctcccctacaggccctacagactgagaaggaggcacccatagcctccctcggaaagggctgcccggccacattaccctccaaaagccgtcagaagacccgaccgctcatccctgagatgtgcttcacctctggcggtgagaacacggagccgctgcctgccaactcctacatcggcgacgacgggaccagccccctgatcgcctgcggcaagtgctgcctgcaggtccatgccagtgagtgccactgtggggcccagaggagctgcgccctccttcagggtgttggtgggggtgccggtgggggctccatcctcccctgcggagggccacaccggcccctctccccaggctgcactttcagggccagggcaggggcctcccccggtgacttcctgcaatttctgactttctcatccttcccgttgtggtcccaccatctagagcagggggaaaggctgtggccatggaagggctggatgaccgcatgccaccctggggcaggacagggcctccaccgcccccagcatccagaagatgccagtgcaggcccaggtgctggcctctggtgccagcctctgcggaggaagcctctgctccaaggggcactgggctcatcccaccctgtccc

SEQ ID NO: 2720 - DNA, 1130 bp, Homo sapiens
tgaggcctggacccccagtgggcagggcaggaggtggcagcggcagcagctgtgtttctgcaccatttccgaggacgacgcagcccctcgagcccccccaccggccccggccgccccagcgacctccctggcaccggccgccgccttcaaatacttggcacattcctcctttccttccaattccaaaaccagattccggggtggggggtggggggatggtgagcaaataggagtgctccccagaaccagaggagggtggggcacagaccatagacggacccctcgtcctcccccagcggtggtagggggacccggggggctcctccccgctctgcagcctggggacactgggctgggaccagaatccagctttcttttaaaactctcagtgtaactgtatcccgtgacatttcattttttttaaatagtgtatttttttttccatttttttttttaagagaaacaaacaaaagactcgccagtcaatgactttcaaagagaactaactttggcttattcatattctgttcaaagacagtctattttttcactgtagaaagcgtccttgtgtgatagttacgttcgcaaacgcgcacgccaggcccatggctgtaccttggcttttttttttttttttttttttttaatttttcctaccatcagaaagtgtgctttgctcacagaagaatgggatgtccttttttctttcttggctttttttttccccctttttgtttcatttttataaattaaattttcagacatatcaaatacagttctgagggtaaggtcatgggggagctcggacccagtggcgttgggtgcggttgagggggacgctgctgtaagaggagagagatgacagtggtcctcctctgagagcctgagctgtctccccgtctcccgcccccaaggagacagagaggatcctacttcttcggggacagtggctgtatggctgtgctgccccacatcagggaccctttccccctgggactgtggggcagtttgggagcaaaaccagaaggacaggcccccctctacccgcctaccctgagcaagcgagttgttcctctttgtacaagggcaggtctgcggttactttcaacactgtttattccagcggaagc

SEQ ID NO: 2721 - DNA, 1157 bp, Homo sapiens
gttcaccaggatggtctcgatctcctgacctcgtgatccacctgcctcggcctctcaaagtgctgggattataggcgtgacccactgtgcccggctgataaaactttattaataaatacagctacagggctgtttttgcggccctttaccccctccactccagcattcctaccagatgcagaggagctgcctatttcttggtcttaacagcactgcgatttgtcacttttttgtcacttgtccgttggagtggagttgggggggcgggggggcacggttattagtctgccctacgtggctgtttcctaatctcttttttttttttttttgagacagtcttgctctgtcgcccaggctggagtgcagtagcatgatctcagctcactgcaacctccacctcctgggtttaagcgattcttctgcctcagcctcccaaggaactgggattacaggcgtccgccaccatgcctggctaatttctgtatttttagtagagacggggtttcaccatgttggccaggctggtctcgaactcctgacctcaggtgatccacctgcttcgtcctcccaaagtgctgggattacaggtgtgagcccccacggccggcccatcttggtttgtagagcaccctggatgcaaggcagcccgtcacttagctggctcacctcatcacctcagcccagaagcatgttcccaccgctcagggagctctgggaccaggagattccagggacctgagtttctcctccttgtccccgctcccccccgcccccacatcaccaccggtctccatttaccatggaggggagccagaacctcaccacccaagagggataccgagcgctggagacctggtgccactcactcacctggtgctggaggattgagtgctcaaccaggattgagttgtttgttcattgattgagctcctactgtatgcccggttctgcgctgggtgctacggatgctgtggtgacacagatgcaccgttacagatagaattccctgctgcagaggagagtgaggagtgtgggggcatttagagcaagggagttggagctagtcccaggtggtgttccgatcagtagacagatgtgggaacggggattccaggctgagggaacagaacaggtgacccgagggagggggcttgatg

SEQ ID NO: 2722 - DNA, 1166 bp, Homo sapiens
ctggctctgacctcatgtcccatggtcaccccccgcccccatgctgggtgcctcagtttccccacatgtctcaccaggaaattagaccaagttattctggcaagtgctttcagggccctccagggtttggctggtcaccatggagggggggttcaggtgctgaatttagggaccccagcatctcacaggtttccccttccatctttcccagtggcactgtgtctgagcaggtgtgcccaggtgaggttgtatccactgtgtctgagcaggtgtgcccaggtgaggttgtatccactgtgtgtgagcaggtgtggctgttgcaggtggaagtggggatatgtgggcacctgggtgcccatgggtgccgtggtggggggcgaggtgggagggtgtttgttgtcatccttgctttcctcctcctctcttcattggccacatggcacttccgtgggcagggcatggaatgcaggttttcgtggctccttggtatcctagccagatgcctggacccatcagcgcccccccttctttccactgtatccccagagccccccaggtttatcaaagaacccaaggaccagatcggcgtgtcggggggtgtggcctctttcgtgtgtcaggccacgggtgaccccaagccacgagtgacctggaacaagaagggcaagaaggtcaactctcagcgctttgaggtgagttggggtagggggaggcagcctggggtcaatgctcccccaaggcagggccacagcacctcagccacagtggacttcgtggacacgttccccaggtggagcatcatctgtggccaagcaagcatggctgcgcagcctccagccagggccctgcccgccttacttgctctaccagctccatgctgtgtggcctcaagcaaagccctgccctctctgagtcttcttcacagtgcagtgtacacagcaccactgcacacagaaggaactttacaactctcaatacacgcccatgatcacacgtgcacattgacacattccgcatgtcttcacatgcctttgcatgcctgtcacatgggcttgcagacatttgtcaccctcacacatgcacacaacaccctgttcttatatgtacccaaatctggtccctgtctgcggcgcatttatactggacaccgacacacgtgcacattc

SEQ ID NO: 2723 - DNA, 1182 bp, Homo sapiens
gtcttgctcttgtgaacggaaacctggtatgtccttgaaggtacaaccttaaaaataaatgtggtgagagcaaaacaagggcattaaattcttgctgcttttgcctctgtctgttccaggctgaaagctgaagcctgagcacccctgaggtgtttaagacatcctagcacccacctgaggcttttagccttaagcccagcacagaatgacccccttgctggttgagtcagtattttgttttgttttcttgagatggagtctcactctgtcgcccaggctggagtgcaatggcccgatctcggctcactgcaacccccacctcccgggttcaagcgattctcctgcctcagcctcccgagatgctgggattacaggcgtgtgtcaccacatacggctaatttttgtatttttggtagtgacagcgtttcaccatgttggccaggctggtttcgaactcctgacctcaagtgatctgcctgccccagcctccccaggtgctgggattacaggcatgagccaccatgcctgtcccagtgttattgaatgtgactacaactgtttggggcatctcctggactttctgggaggctgagccccttctgccttcggcctgaatttcttgaactgagcgttgcttccccatggcctggggagaaggtgatttcttcctgaattcaattaatgagcctattaaaaactatttattttccctgacagttgtttactgaggagaaggagatgaattggccggtgtcctcggcaggcaggaaggaggctgaatgggggtgcttggtggctcagccccagtgcttggggagcacagattgccggtgggggcctgtccttggggacgccttgggcagagcctgtgcttgggtcgtggccactgcttctgaccttggagtcttttgggaggtggatgttggaatgagtgaaaccgtcgtggtgtggaggcagggggccggccccgatgacgtctctcttctctttccaggttaaaatgtctcagatgcgctggtttgagacccaagacctggccccatggcccacatgagatattgtggcgggatctcccaatatcccatcatatcccccgactccgtagcagttgaactttacaatttttatctgggcacatggccacctgggggaaagaaaacatttctcagtgcaccttgcagc

SEQ ID NO: 2724 - DNA, 1200 bp, Homo sapiens
gttcgggatgggggcgagcgggagggaaaaccctaaaaataaaaagggatatttataaacccagcgggtttgggggataattgacaaagcttaatgtttttcggctgagagcaattccttccccctgctacccattaagctccatttgcagagtcggtcggagccacgggaagatcttgagatgagctttaggtttggcgggcgcagtgctgaccgctgtagcccccttctgggagggtctcgtactttctggaaggagacaggggtcccagaaaggggcactccccagctctcctctgcatccagggtaggctcctggctcaccttccaatgggtgggtgtcctcttagaatttgcaaggaggatgagaacccttctcgggcaaagcctgtgcaggttgcccttcctccgtccttccctgcggcaaaagatgcccagggaggggaatttgaagagagaccctcccccccaccacccgccgccgccccaccctccaaccgctcaccaggcagagtggctcagcctccggtggggacaggaggagaggagattaagacataactgctgttcctcgcaggattcgtgtggcaagctgatacaaaacaaaacaaaaaaaccaaaaattcaccatggattcacggaccaaggcacgtatccggggcttgaaggtttcaagggctttttaaactgtgaattttgtcattttcacaccttaccttgctctggaatcggaaagctgccagcttgtggcttgcggggcagaggagaggggatgctggaaggggattgaggctcaaatgcatgtcatcttatcaccaggtgacattctgaattgaggaagggggacacggagagaggaagtgaagtgtaggggatgtgatcgagggaaagggtggctgttgtctcacgcagagagtggcagccccaaaatgtctaggaaacaggtgacacctgggtctctctaaccctgaggttcaagagtgtggagtgtgtggtttcccccccgccccccccccttttcctttaaggaaagaaaagactctcaaccaaaaagggaagaaaaaaaaaaacccgacgtaccatttctgtcttgtctctggctgatatttgagaagcgctggggagggggttgtgtgtggggaatttgaaaaatcaattggcttacacttctccaaaggcgaaaattaacgggtaggagtg

SEQ ID NO: 2725 - DNA, 1209 bp, Homo sapiens
tgtctctttcatctctctcttttgtctgtgtctctcttttatctctgtctctttcatctttgtctctctcatctcttttgtggctgtctcatctccatctcttatctctgtctccctcttgtttctgtctcttgtctctgtctcttttatctctgcgtctctcatctttgtctcctcacctctctctcttttgtctttgtctctgtctctctctccattttggtctctgttttttcctctctgtgtgtctctctccatctctgcctctgtttatttctttccctgatgatttggttgcctgtgattgtctctgtctctgtctctcttttctctgtcactctgtgtctctgcccacttctctctctgctgttttcctccctgtttctccctcatctctgtctccctctctcttttctgtctccctctctggtctctgtctccccattttggtctctgcttttttcctctgtgtgtgtgtctctgtctctcttcccctttgtctctttgtgtctctgcccatttctgtctctgctgtttttctccttgtgtctctctgtgtctgtctcttttgtctctttgtccatttttgtctctgtttttctctgtgtctgtgtatgtgtgtgtctctctctccctgtctctctgtctctttgtccatttgtctctgtctctgctgtttttctctctgtctctctgtgtctctgtctctgtgtccctgtccagttctgtctgtgtgtgcgcgcatctctctctgtgtctctgtgagtctctgtctcttttgtctctgtctctctctgtgtctctgcccattttggtctctgctttctttcctctgtgtgtctctccatttctgtctctctttctctgtctctctccatttctgtctctgctctttttctctctgtgtgtctcttttgtctctctgtttctctgcgtgtctctgtccatttctgtctcttcccgctgtgtatttctctctctgtgtctctgtctctgttattttggtctctgctctttttctcgctgtgtctcaacatgtgtgtctgtgtctctttatctctctggtgtctctgcatttttctctgctgtttttctctgtctctgaagctctgtctctctcttccttctctggtctctccctaccgccttatctttcccacagccccactccagtgtccgttacccacactcacacttggatatctgggt

SEQ ID NO: 2726 - DNA, 1170 bp, Homo sapiens
ttcacaagttttagaccatattaaaggaacactggcagaaccctgtttgatttccctttcgtctgttcccctacattgccctcctggcccccttgaggaactagatgagcgattagaactggccagaggtccttggaggaacaacagcgaaacagaagcattagtagcattgtcctccccagtctaacacttgtcggacccctgatgagcagacttccctgtggggtgttcatatccccatgccccgctcagtgggcttcatgtctgagtcatatttgcctgctttcctttgaggtggtgggcgccaaggttgtgacaaatgcccggagtcctggagctcgctgttacggttttgtcacgatgtccacagcagaagaggccacaaaatgcattaaccacctgcacaagacggagctccacggaaagatgatctccgtggagaaagtgagtggccgttttcttcccaggatatagcccacattaggaaatgggggtaatacttgattctctttttcaggccaaaaatgaacctgtgggaaagaaaacctctgacaaaagagacagtgacgggaaaaaggagaagtcgagcaacagtgacaggtacccctccttcctggctaaattaaaggggcagggtgttttttgttgttgttgttttgtttttgagatggagtcgcgctctgtcgcccagactggagtgcagtggtgtgatctcggctcacctcaactccacctcctgggttcaagcaattctcctgcctcagcctcctgagtatctgggactaaggtgtgcaccaccacacccggctaatttttgtattttcagtagagatggggtttcaccatattggccaggctggtcttgaactcctgaccttgtgatccgcctgcctcggcctcccaaagtgctcggattacaggcgtgagccaccatgcctggccggggcagggtgttttaaacagaatctcactctgttgcccaggctggtgtgcagtggcaagatctcttttcattgaacctccacctccctggctcaaccaattctcatgcctcagcctcccgatttgcttggattatagccatgcccatttgtggttttagtagagatggggtttcaccatgttggccaggctggtctcgaactcccggtctcatgtgatccgcccgcc

SEQ ID NO: 2727 - DNA, 1273 bp, Homo sapiens
gacgtctatggtccctgtgcccaggtgtcttcctgggacccgctagttgtgggtacctgggggcctcaccaaagggagtggagtgggctaaatgtgccgtgggttccacgccgtgtgcgcaagttccctgtgtgaaagcacgtctgtcttccaggtggcgagagaagcatgtccggtcactccgggcctggccacatgatgaaccgaggaggaatgtcagggtaaggcatgctgggggcggcgccccttccccctgctttgcatattggcctaccttgctggaggcttaacaaccaagtccttccagctagtgcccctccccccaagggtgacgtgaggccaggcatggggtactgtggaggctgctgccactcaggaggggagggcattaggaaggggccctgcctgcaggcaacactcagggaagctgtgcaggctgggatgggccggggagcaggaggacttcgcagtcaaaccaatgtgaatttgttcctaggcgcggcagctttgccccaggcggggcctcccggggccaccccatcccacacggtggcatgcagggcgggtttggaggccagagccgggggagcaggcccagcgatgcccgcttcactcgccgctactgagtacttggaatcctgtgtcctgtctcgtggcaacaaggctatgttctgttaggagttaccttaaactgtgtaaaaatatttttttttaatctgctgccatattgtagctcaatacaatgtgaatttgtttttcgttttggggttttttttttttgtaataaatgtgtttccgttcacataccctttatttaaagtgtcatttctttatttctgcctctttaaatgaaacgaaattagacttttagttgtattgatatacactgattgttcctttttttaattattattattatttttttttttttttgagatggagtctcgctccgccacccaggcctgagagtgcagtggcgcgatcttggctcactgcagcctccacctccagggttcaagtgattcttctgcctcagcctcccgagtagctgggactacaggcgcctgccaccacacccggctaatttttatatttttagtagagacggggtttcgccatattcgtcaggctggtcttgaactcctgacctcatgatctgcccgccttggcctcccaaagtggtaggattacaggcgtgaaccaccacgccaggccgactctgtttatttttaaatatgtgtgaaacctctgggaaggcatccgggtgtggaag

SEQ ID NO: 2728 - DNA, 1180 bp, Homo sapiens
ggtggttcacgcctgtaatcctaccactttgggaggccaaggcgggcagatcatgaggtcaggagttcaagaccagcctgacgaatatggcgaaaccccgtctctactaaaaatataaaaattagccgggtgtggtggcaggcgcctgtagtcccagctactcgggaggctgaggcagaagaatcacttgaaccctggaggtggaggctgcagtgagccaagatcgcgccactgcactctcaggcctgggtggcggagcgagactccatctcaaaaaaaaaaaaaaataataataataattaaaaaaaggaacaatcagtgtatatcaatacaactaaaagtctaatttcgtttcatttaaagaggcagaaataaagaaatgacactttaaataaagggtatgtgaacggaaacacatttattacaaaaaaaaaaaaccccaaaacgaaaaacaaattcacattgtattgagctacaatatggcagcagattaaaaaaaaatatttttacacagtttaaggtaactcctaacagaacatagccttgttgccacgagacaggacacaggattccaagtactcagtagcggcgagtgaagcgggcatcgctgggcctgctcccccggctctggcctccaaacccgccctgcatgccaccgtgtgggatggggtggccccgggaggccccgcctggggcaaagctgccgcgcctaggaacaaattcacattggtttgactgcgaagtcctcctgctccccggcccatcccagcctgcacagcttccctgagtgttgcctgcaggcagggccccttcctaatgccctcccctcctgagtggcagcagcctccacagtaccccatgcctggcctcacgtcacccttggggggaggggcactagctggaaggacttggttgttaagcctccagcaaggtaggccaatatgcaaagcagggggaaggggcgccgcccccagcatgccttaccctgacattcctcctcggttcatcatgtggccaggcccggagtgaccggacatgcttctctcgccacctggaagacagacgtgctttcacacagggaacttgcgcacacggcgtggaacccacggcacatttagcccactccactccctttggtgaggcccccaggtacccacaactagcgggtcccaggaagaca

SEQ ID NO: 2729 - DNA, 1140 bp, Homo sapiens
gggcttcccgaggtcgccaatcccctccctcctgcttcccagcgagcccttggcgttcagttcgcggtgtcagcctccgcctccgagcctcagttgtcttctctgtgaggtgggaatgccggtgaatcctgccgctggcgtggatgagaagtgaatgcgtgctcggagctgcgagtgacagcgggcaggaggcgcccagggacacttggtttctccagggctggaaggcttctagaaggtcaagatcttacgtcttcactgcccctgctcactgtgggactttgagtgacccactctccccctctgggtttcagttcatcagttcaagtggcgtccagccgccctgccttgcacgttgtaaaacgagtgctgtatataataggggtctgggtcgacggtgctgcactacagagtgtcaccctgtggacggtgagccctcaggagggtctcactctccccgtgggccttggcccctgagggtggctgtcagtgtccgctgagcttctgctcctcccgtccctgcccgcaggttcctcatcaagggaagtgtggctgggggcgccgtctacctggtgtacgaccaggagctgctggggcccagcgacaagagccaggcagccctacagaaggctggggaggtggtcccccccgccatgtaccagttcagccagtacgtgtgtcagcagacaggcctgcagataccccaggtactacgggccgggaacgaggccagggtttggcgggtggtcagctctgggaggtccctccagccctgcacgatgttgtcctccatattgatgctgacctgattctccggcctgtcctcctccctccgcctctggggatgggctgctgagccttttcaccagttctttctgcccatctctttttcccagctcccagcccctccaaagatttactttcccatccgtgactcctggaatgcaggtaaggcacccagtttctttgcttggagggagacaccccagtctagcccctctccccacttcctggccattcctttctgtccatcctccttcctgcccgacacgtgtctcttagggatctaaaagggaaaggaggccgagcacagtggctcacgcctgtaatcccagcactttgggaggctgaggtgggcgg

SEQ ID NO: 2730 - DNA, 2218 bp, Homo sapiens
atacagtttggtattattattcccgctctacaagtgaagaaattctgagaggtgatgtcgtcgatgcagggtcggcccgaaataggcggagttgggattcgaactcatttcacaggcagagggaggagagcagccatagccacctccactggttccgactccagctcccgggctcgcaggagtaaacgcgcatgctcagggagctcggtcgcgcatgctcagcgcaacggcggggaagactccagccgccagggggagcgcgtgccgttcttgcctctctggcctgcgcctcctgagccgagtagatatcccggagttccgcgcggcgccagcccttccgccacggccgtctctggagagcagcaggtaagtggtttcccgcactgccggtatccgccgccatccggactcccgggtcctctgtgcaggttggaggatggttggttgtggcgagcgaggctgaaggagccgggacgcggggctctgggcctcgggaactgagccggtactcacctccgccccttctccccgtcgctgtccgcagccatggccctacgctaccctatggccgtgggcctcaacaagggccacaaagtgaccaagaacgtgagcaagcccaggcacagccgacgccgcggggtgagtgcgggtgccgcgcggaggttgtcgggggtttcttggagggcggagggcatggcttgggcaaaggctctcgacctgaaagaacgcgcgttcgggcgcagaactaaggggggcttgaatggaagagatggggtgggggagtgggacttcctgcctggtgctcgaaggcgggcacccatctgggtttttcccaaccgtgcaatccacgctggggcagagggagcaccttgagagcggcgcggggcagcgggtttggggttctgacgcaggagtaggagttcgctcatggagctggcccgaggttgcggtgtgtgaggttgagggatttcaggtgtgtcagtgtattgggcgcctttattaagcgggcagcgggtttggggttctgacgcaggagtaaggagttcgctcatggagctggcccgaggttgcggtgtgtgaggttgagggatttcaggtgtgtcagtgtattgggcgcctttattcagcaggcagcccagactccaggtgcgtcctgccagtgttgcggagactgggacttagggaggatgggagctgctccgggcgcggcgaaaagcgctaggcgttaataccttggttctcacagctacccacagaggggaggaagtagccagggaaatcgcggcagcgcgagagaagctgcttaactagaatgcagggatccccctaccctgacggccgcccctttcccccctagcgtctgaccaaacacaccaagttcgtgcgggacatgattcgggaggtgtgtggctttgccccgtacgagcggcgcgccatggagttactgaaggtctccaaggacaaacgggccctcaaatttatcaagaaaagggtaggtgggcgctgccggccgaggggcggggtgggatgggagtcagggccgggctgacggcggcctcgtccctggcaggtggggacgcacatccgcgccaagaggaagcgggaggagctgagcaacgtactggccgccatgaggaaagctgctgccaagaaagactgagcccctcccctgccctctccctgaaataaagaacagcttgacagaagccctggctctcctgctgtccgtgggtgggtgtgggtgtgtcgggggcccgcagtcccctgtctggtgcccgctctgagccacaccctctccgggtgctgcctggtcgtgaatcaaaagccgtggcccgcccacccttcccggggcagcaggtgaggaagccgccgtactgcaaatgactttaatcattaaatagcttctatgccacactctgattaagccgactgaggtccctgggatctgggtcactggaccgagctgctcgctcggtggctccactgccaggtccgggcgcgctccccacagcgctcagttctggcccagacagggcctgacatccgccgcctgcagtcccggggtggccgtcaccgttccacggccagcgcctctgcctgctcgtccgggaaggcgatgtcgaagatctcccggtagtgttccacgaagtgcacctccaggccctcggtgatgaaggctgccaggtcgtagaagtccttcttgttctcggctggcagg

SEQ ID NO: 2731 - DNA, 1210 bp, Homo sapiens
acagaatggaacattttattggctgggtacagtgtctcatgcctgtcatcccaacacttttggaggccaaggaaggaggatcacttgagccctggagttcaaaaccagcctgggcaatattgagacccctgtctccacaaaaaaaataaaatccctgggcatggtcgcacacaccagtggtctaacctgtgggaggatcgcttgagcccaggagattgaggctgcagtgagctgtgatcgcatcactgcactccagcctgggcaacagagtgagaccctgtatctaaaaattaaaataaaaaaattcaggccgggcacggtgggctcacgcctgtaatcccagcactttgggaggccgaggtgggcggatcacctgaggtcaggagtttgagaccagcctgaccaacatggagaaaccccgtgtctactaaaaatacaaaaaaaaattagccaggtgtggtggcttatgcctgtaatcccagctactcgggattactgaggcgggagaattgcttgaacctgggaggcagaggttgcggtgagccgagattgcactattgcattccagcctgggcaacaagagcaaaactctgtctcaaaaaaaaaaaaaaaaaattcagacagccaccagcggctacactgtcctgggcagctcagcattggggcattccctgtgagaatcttgcaacagggggaagacagcgaccaaacttacaaatgtgattagaactggcaagaccccttaggggcagcgaacttgttctttttttttttttttttttttttttttgagatggagcctctgtcgcccaggctggagtgcagtggcgtgatctcggctcaccgcaagctccacctcccgggttcacaccattctcctgcctcagcctccccagtagctgggactacaggtgcccgccaccacacccggctaattttttgtgtattttttagtagagacggggtttcaccgtgttagccaggatggtctggatctcctgacctcgtgatccgcccgccttagcatcccaaagtgctggggttacaggcgtgagccactgtgcccagctgaacttattcttaaagcaagtgccccggacctccagtgggcctgttctggtgccttctaccagggtcagctcagacagttcagcgtcaaagccaaagactagagaccaggtgattacggtttctttggagacagagtctc

SEQ ID NO: 2732 - DNA, 1190 bp, Homo sapiens
acgacctgccccatggacggggcatggagggtgctgaggactccgagtagaccaggggattccctcctgcagcagaaccagcgggtgtatgagggtggggtcagagggacgacaggtcagcgcgtggggaggggcgggggcgtgaagccagatcctaagcggctctccaagcccgaatccagccgcggtgtccctgtccgacggggcgggcgcactcctgtctcctaaaacctccaagtgtgcatctgaggaacgcacggtgccctccccagaatccccttagcctctaggagggcgagacccagacagccctttagccatgtggtctccaaggggccgttggggggcttccggatcctgcagagcccgggcggggggctgccgtcgcggtccagctgcgcacagaagtaaacatctgtcagtggcgcgttccctgctcgccgccgccgccgccggggacacggtgtcctccggtgagggccgggccctctcggctcctggagcagcccgttcagccaccagagggcgtgaaaccctttggtgttgggggtgggggtcccttaagggcaaagcctggatgtgaagtggcgggaggctgtgcctgcctttcctgctttttataaaaggtgtctcctgcacggggatagccccgaattgtcccaggaggtggtttgtggattaggagttattaggcccaagggggctgcagacagattagtggggaggggggtgtgctggagagagaaatggctctcccagggtgaatgccaccactgtcccctccccagaacgcatccgacctgcccacaggcctgtgattacctgcagggctcgtcattggtccagatttggggagtggggccaggggcttaaagcaggggggtgcaggaggccggacccctgactttcctccctcttgcctgtctcccctgccctttccctgttctctacatccttgtccctgttccatggccctctttgtctgtctctgagtgccccgggctgaggaagcctgggtggggtgtgaccagcctcagaggatgtcagtgaggggcaggatcccacccacactgccagcttctcccacccccagcttcttgccttggggccctttggacacccctccctcctcccttcatcctaagactcccgaggttcatagctccggcaccgactccacccccagggag

SEQ ID NO: 2733 - DNA, 1217 bp, Homo sapiens
gtgacctcctggtagtgacctcctgatagtgagctgtgattgcacaactgcactccagcctgggtgacagagtgagaccctgtttctgaaaaaaaaaaaaaagagagaagaggccaggcgcagtggctcacgcctgtaatcccagcactttgggaggccaaggcaggaggatcacttgagcccaggagtttgagaccagcctggccaacatggcaaaaccccgtctccactaaaaatacaaaaataagctaggcattatggctcacgcctgtcatcccagctacttgggaggctgaggcaggagaatctcttaaacccgggaggcggagattgcagtgagccgagatggcactgctgtactccagcctgggcgacagaatgagattctgtctcaaaaaaaaaaaagaagaaagaaagaaaaagaatcccaacctgtcttgttgttcaggacatctgcaaagggagctgaccctgggatgtttggtttccaggggcaactcgaagtaccattactatgggattcgtctgaagccggactcaccactgaaccggctgcaggaggacacgcagtacatggccatgcggcagcagcccatgcaccagaagcccaggtgggtgccgggccgagctgggaggagctggctctcccctggagcatggaggggtgggtgtttctccaacacgaaacaaactcatcataactccccagtctccagcatcctgggaaagccaaggtatccccctctgctgagactgaggtgagtctagcaggagacacaggaggctgggatgcaacctcctccagctaacttttcagactttttttaaaaccgtttaaaactgtttttaacagacttcattttttagagccattctaggttcacagcaaaattgagtagaaagtacagagagttgttctacacccccagccccgctccccaccgcctctcccaccattcacctcccccacacagcggtgcattgctcatgacccgtgaccctccgcggagccagcatcaccccccagagtccacagtcaacatcagggctcactcttggtgttgtacattcgacagtttggacaaacctataatgacatgtgtcccccatcacagtgtcacgcagagtcctttcacagtcctacacatcctccatgttctgcctacccagctttccctccccaccccagtctgcagcaacctctaatccttctgcca

SEQ ID NO: 2734 - DNA, 1141 bp, Homo sapiens
gccaacaatactccaccatggggcgcttcctttcttctctggaaactaagacattggactgaaggaactggcctgaggggggctgaccgggggcccgtgctgctgggagctctacgcacaagaggccgccggggtcacggacaggaacctcagcccagggtgctggcctttctccttcgcaggagtcccccaaaatccacacagcgactcgagcagccttccactcagccagaggagggtcgggctcccccgcctgctctcggtggtggcgtctggcccttcctgccgtttccaaggcctccggaagcaccaacccagttctcagttacctcctctggccggaaggcctcacgttgtcctccagagctgctctgggcccagggctggctccgtgaccacctgatggacgtgctgggcagcatgggctcccaaggcagcatccccagctgctctcccaccccaccccagctgcccggcggctgggcccacgagggctctggggacacttccataggaaaggggcctggcactttgtgattgccacgtgtttcctgttaagccgcctgcccccagtgcaaatctctgtgttttgctctctcctgaacaaaaatgtaaaccgacgccggaaagcaaatggtatcgaatacctttcttgcccataagggtttttacaaagaacgtgtctcactaggaactaggacactcatcggcccgagaccaactcctggataaaaggaataaggagaatcgtgtttgtaacgagttacaggattgtttctttcctggattttaaacttttgttaaattgtgaaattatggaggagttttatagaaaaaaaaagtgaaataaagtcagatgggaaagcagacgcatgcatctgcctggttcctcctgtccagtcagtgggcaggcttgcgaggtagcctggggccccctgccccgactacgtgtcccagtgcccccagatcagtgaccaaaacagagaaggagggttgggaccaagcctggtgggggtggggagtgtgagcaaggctggagacgatgctaccagcaattcaagagggcagagaattcggctcacatcctgcttctgatgctgtgctctctacttggaagcagacagcaaggtttgggttgaga

SEQ ID NO: 2735 - DNA, 1850 bp, Homo sapiens
agtgtgggctgcgggggcccctggtgctgccccaggagcccctacctctgttagggaacagggcaaccccacccttggccccctgcccctgaagccacctgccaccaccttacagattgtgaatctgatcgaggagactggccacttcaatgtcaccaacaccaccttcgacttcgacctcttctccctggacgagaccaccgtgcgcaaactgcagagctgcctggaggccgtggccacatgaccctgggccgcgtgccgggcccccaccgccggggtcctgggaggctgcagccaggcctcgcctgccctcctctcccgtctcgcctgcccgcagcactgccttagcgacagccctgtcctcgcccgcacagcccgctgcactttcctcggcggctccctgcccactctccccgctccatcgccaggagccctggggccgggctgggccacacgggagccgccccccgggctctctgggctcccctcagagagcggctggtgttgaaggcagctctgggcagagacagggccgggggcccctcgcccagccttgggaccagcccccactgctcggcgggctgtgcggcgtcgctgccccagcctttctgagcagcggatcgacggctggggggcatctccagcctcccgaatggttcagaacacaccctccgcccaccctggacctcagaaggccctgcctgtgtgtctgcgtcgtcctccgtgtagacctagcgccggctcctccccggctcgcgctgcgctggggtctgtgctgtatagttctctctattatatatgtgtgtgcactgtctggtcaagagcagtgtccatgtgcgtttctgtggcagcagtgcacgtggggtgggtggggggtgcgtacggtggggcttgtaggttaagatgtctctgcggtggtgtggggctggaggccgagccaggcacggcagctggccctctccaggcgcatggaggaattctccctttgccgttccaaggatgccgccgcctcctaccggggctcccgggggggtcagccaacactacaaagggcagcgagtcctcagggcgcccgggagccaccagtctgctctcgggctctactcagactagcgccaacagtctccgcggacagactcgcatcagccgccctggggctcggcctcctcccataggctcctcttcctctctttcattcaagtcttcaaactttgaaaaaaatatgagcttttgccaaataagacgggatagtttatggagttttctgaggcgcattgaactctggtcagcccctcgagcgtgggctcggccatcagcaggcccggtgggttggccgggctggccctcccaggctgcctttctctctggtcgcggcctggcccgccccggcctccaccgccgcaattcatgctggtgccgcgcccgcagccccactcctggtatgcctgagattctccaggggccaagccggtcctccttcccggcccactcttccagggccaggacgctcccgcggagccagcccatcgtggctgggggtcccaggggctggaggcctgcctggttagcctctgtttcccagacattgactcgaggcgcctccagtcctctcaaccccctgactttcaagtcctttcaagtccttgtgccctgaccaagttatgaggaaaagagggctgagggcctggaggtgggctcgcaccccctcgaacccacctagatgtctcctcctccccagcctatgagttcagacttggggggctccatctgtccctccctgaggtccctcatcttgtccctgctctgattctgtcagcagatcctgaacactccttggtggggacccatgc

SEQ ID NO: 2736 - DNA, 1200 bp, Homo sapiens
gctgggcgaaggaggctgagatgaggggcagggctgcgtccagtgcccgccagcaccccgcagtgccagcgcagcctctgacttgcccaggcccagctgtgaggtgttagggcgggcgggtgcgggcgaagtggccatgctctgcctgactcaccctgtgctcttcttgaatccctcagggaatgtcagttcaattctgaggggaatcttagcctgcagctgccggggaccagctgacacttcctagtagtttaaagggacagctccatgtaaaactctcacctactgccttacctttttgctttatggaagagtttctctagctgaggctgaatcaggtggattatgctttgtaggggtcaggggtggcggagcagggcgccccgcaatgccacgtgaccttgtctctccccttgccctccctgctcttggccttgcaggacgccaacaaggagagcagcaagacctccaagccacacaaggtgaccaaggagcaccgggagcggccccgcaaagactccgagagcaagagctcctccaaggagctggagcgtgagcaggccaaaagctccaaggacacctcgcggaagctgggcgagggccggctgcccaaggaggagaaggcgccaccgcccaaggctgccttcaaggaacccaagatggccctgaaagagaccaagctggaaagcacgtcccccaagggtgggcccccacccccacccccacccccaccccgggcttccagcaagcggccggccaccgccgactcgccaaagcccagcgccaagaagcagaagaagagcagctcgaaggggtcccggagtgctccaggcacctcgccccgcacctcctcctcctcctccttctcggacaagaagccggccaaggacaagagcagcaccagaggggagaaggtgaaggccgagagtgagccccgggaggccaaaaaggccctggaggtggaggagtccaactcagaggacgaggcctccttcaagtccgaggtgagtgagtgctgggggcagggcagccaggtgcaggcagtgtggtgggacccgcctcccttctggaacagcggaaggaggtgggatctgagccaggacctcaggtctcaccagctgctcctcccactggcttcttgtaacctggggcctccacgcctcactaggcttcggtttccctgtctgtcaggtgataaag

SEQ ID NO: 2737 - DNA, 2229 bp, Homo sapiens
caggggcagccctcacccacagcctctcacctgcctttgtccacccacagcgcaagtggccaccggagggggtccaggagctcccccaggctcccagccagactacagtgccgcctgggcggaatattacagacagcaggccgcttactacggacagaccccaggtcctggcggcccccagccgccgcccacgcagcagggacagcagcaggcaagtgggaattgccaccctcctcctcctcctttctccttccaacccccggccaccgtccatcctgccttagtgggtagcgccggaaaccccttcccctgcggggtgtgcccttgatgcctgcagcgggggccgtgtggccggaggtctccgggagtccccacgcaccgccagggaagcattcgctgggtccagaggttaaacgaagaggcctccctgcgccggctgcttgttcctgtgtgccgctgtcgtgatgctggggagcgctgagactcgcaggcgggacttctgaactgctggggagtcggggggcaggcagacagcgcggacggtgggcaccggcccggccgccaccacctcgctcacaatctggccacttgggaagaaaacgtctattttttccccttctctgcatcacttttttggtttttgttctttttattcttttattttttaaacccatgatcttttttcctgtgtccaagtgactgtgttgcaggcggcctggctctggcagggactggtggggacgcggggagcggcccaggcccctgccccgccgggctcagcctcccatgcgctcgcgcttgcctgtgtcccgggcttgtctgtgaagtgggcgtgaagatcgttgccaccttccaacctacctcacaggggtgttgtggggacaccatgatctctggattgttcatgtcgtcgtgctgcgccgggagccaccgccctccggagacagggcagctcccctacgaccctagcgcctccgccctccgcggcccctctcctctcttcctgctctgtccctccttctccatcagggagcagcgtgacttcagcgagtcccgcgagcacctggctagacagttaacaagcacgtccttccagcctgagccagcgcaggtttgggagggggcttcctggccccccccacggtgttccagcccctcctctcttccgccccctagtctcccacccttccctccccgtagtgaccaattcctatctcttccctctccgcaggctcaatgaatcgaatgaatgtgaacttcttcatctgtgaaaaatcttttttttttccattttgttctgtttgggggcttctgttttgtttggcgagagagcgatggctgccgtggggagtactggggagccctcgcggcaagcagggtgggggggacttgggggcatgccgggccctcactctctcgcctgttctgtgtctcacatgctttttctttcaaaattgggatccttccatgttgagccagccagagaagatagcgagatctaaatctctgccaaaaaaaaaaaaaaacttaaaaattaaaaacacaaagagcaaagcagaacttataaaattatatatatatatattaaaaagtctctattcttcaccccccagccttcctgaacctgcctctctgaggataaagcaattcattttctcccaccctcggccctcttgtttttaaaataaacttttaaaaaggaaaaaaaaaagtcactcttgctatttcttttttttagttagaggtggaacattccttggaccaggtgttgtattgcaggaccccttcccccagcagccaagccccctcttctctccctcccgccctggctcagctcccgcggccccgcccgtcccccctcccaggactggtctgttgtcttttcatctgttcaagaggagattgaaactgaaaacaaaatgagaacaacaaaaaaaattgtatggcagtttttactttttatcgctcgtttttaacttcacaaataaatgataacaaaacctccccgtctgcgggtgctgtctgtctccccccctttccttccctccctgtagttttgaagcggatgtttgttctttatagatgttgtttaaaaagcctgataatggtgattgaaatttacaaactttgtgtttttttttttttaagaaaaatataaaatagttttcttcaggctcaatgtgctttcctaaccgtgccccccccccttttttttttttgttaaataaa

SEQ ID NO: 2738 - DNA, 1263 bp, Homo sapiens
aactcctgggctcaagcaatcctcccatcttggcctcctgagtagctgggactacaggcacatgcccggccaatttttgtagagaggggatcttgctatgttgcccaggctggtcttgaactcctggccccaagggattctcccacttgggcctcccaaagtgctgggactacagatgtgaggcatcacatctagcctggagggatctttatgtggcagatacttgaataggatcctttagtgggatttggcagatcctttggtgggatttagtaggatattgggatcttctaaggaggctgctaggttagatgctttggtgacacctggtaggacccaacaggactcttctggggtctccaagcaagagtcattggcagactctagggtatcctaggattcatagaggagactcccctatttaggactgagtcacatctccctgtccccaccatggcatgacacccccaacacctgtatctttaggtcctggacattggcgagtgcctgacagtgccggacgagttctcaaagcaagagaagctgacgggcatgtggtggaaacagctggtggccggcgcagtggcaggtgccgtgtcacggacaggcacggcccctctggaccgcctcaaggtcttcatgcaggtgaggggctctggagagacctgccccctcccccaggcctgacacctgggaggggacctccaagctgttgtctccccattcaggtccatgcctcaaagaccaaccggctgaacatccttggggggcttcgaagcatggtccttgagggaggcatccgctccctgtggcgcggcaatggtattaatgtactcaagattgcccccgagtcagctatcaagttcatggcctatgaacaggtgagggcaggtacagggaggaatgtgcttgccatagggaagactgggctgtacataaagatttacgggattggcttgggggtgggtggtgaacacaggtccccaggatcaggcatctgctcctctgcatgaatgcctgcagcaagccagttctttggaagccaggagaacagtggagtgcaaggaaggttcaacccccatggtcctacccatccctgtgtctccccgcctcagatcaagagggccatcctggggcagcaggagacactgcatgtgcaggagcgcttcgtggctggctccctggctggtgccacagcccaaaccatcatttaccctatggaggtgagaaggagggaccccagcggaggccccatggcagggt

SEQ ID NO: 2739 - DNA, 1219 bp, Homo sapiens
gaggaggaggcggaggaggaggtggcctaggctgctcccatcgcttcccacctgtcccctcgaggcttctgacctttgatccgctaggccccccatctctgaaccctagagccccgctttccctccaaggctgactccccgctgaccctaacaatacctttggagctcgctttacctctggctacttcatctccgaccctggctcccctttgagccctaatttatctttaacccccttgagctcttccaaccttgacattcccaggaggagccccgcttcaccccttctgactctggaaaccgcacctttaactttgcagaccttccttcacccctgacttctgcttcacctttgacctctgccccccatgaatcccattttacctctagacctataagttctggtttatgtttgacccctccctctgagctgcacttcaccgctgaccttgcctcacctttaaccccccacctgagccccagctcctacctctgaccccaacttctctttgatctctgaatcccctctgactccaacttctctttcaccctctatgagtcccattttacttctacacctgcaagtcctggtttatattggacccctccctccgagctgcagttcacctttgaccttgcctcacctttcaccccccaccccccacagcgtcagctcctacctctgaccccagcttctctctgattcccacaggccccatgcatcctccctgcctcactcccctcagcccctgccgaccttagcttatctgggagagaaacaaggcctggtgcctgtgaggaagagaggtcacccctaccctccctccccgcttccctgcctcaccctcaataaataaattaattgttgtcatggatgtttctgccgaatccctctttcctctcttacagcaagtgcgggcttttctctacaggatggaggagggtaccgatgacatctcatctctggatggggggcgtgctggggagggatcagacgggccaggctaggccacccactaaccctgaggttttgactaagccatttgccttctctcagcctcggtcttcccacctgtaaaatgggatcgtatgttttcccccaggatccccccacaactgttataggaatggggtcccaatccagaccccaagagagggttcttggatctcaagaaagaattcagggcaagtccataaagtaaaagcacgtttattaaga

SEQ ID NO: 2740 - DNA, 1170 bp, Homo sapiens
gcgtgaatccaccgtttcttctctttgcaaaaagaaccaccacagctgctcaaagaacacagtgaactcatcactttggttcatcaaaaaatcatcgcccatgcgttattcctgagtgcattttcttacaactttttgactgcttccttttcttcttctcttaagagttgtgggcttaagaatgggatagagtcataatggcaacctccaagccctctcaattcttgattaagaacacaggtagacatgaatcccaattgtctattgctatcttatttatatgattcgggaaaatacagcatgtaaaaatattgctgaggagcctcagtgattgggtacaagaagcaagagtacagaaattatttttgccaaatttattttgtaaatatgagggtctgtacctaaatttaaaaaaaaaacacgtagaactaggtattttgttctcttcttagtaaatttgtagtggttgtatactacactagctgcaattttcacatttttctaattcagaaaggtttttcttatattaggggaaaaagtatttattttaatatataaaatcactctgaaaatcactctcataaaaaatggagcgcatgtaaatttttatcaaagaaaaataaacaggtgaatgggggatagtgattttcttttttcagcacagtctacctcagtgtattgttaagatgtgattcaatcatggacatctttgagatttcagaattctacctggaaccggtctgaatcagggaacgtgtgtatcagctgattcgaatgccagggaccagtaagaattttgagggagggagttgggatggagaaggtatggcctttatgcgagcatagatccttttcttcctggctggtaatattcttctctgaatttaatcttcctttaaaaaaaaatcctccatctattgtcactatgttccccaaacataaactaagttccaggctgtcatgatgtatctgatatatggggtaacccagcaaggtgtaccttcctttggtgagagatggctgccggggcaaagacgggctttgattcagagcaagcattcccacctgttccatggaatccccctgaagtgagcacaaaggtgccctgggctccctgatggtttatgcccactcctttcaggctggtgatgcaccttacacacaaacacc

SEQ ID NO: 2741 - DNA, 1217 bp, Homo sapiens
tcacagaactcatttcatgagtgttttcgagggggtttgggtgagggcttgggtggaaggtggctgcagacccccaagggatcctccaaggatgctgtgtagataagtaagaagtagtgtttccatgctctgtgtacgtgccggacgagtgggaggtgtctcgagagaagatcaccctccttcgagagctggggcagggctccttcggcatggtgtatgagggcaatgccagggacatcatcaagggtgaggcagagacccgcgtggcggtgaagacggtcaacgagtcagccagtctccgagagcggattgagttcctcaatgaggcctcggtcatgaagggcttcacctgccatcacgtggtgagtccagtgggggtgggacatgggctggctttcctgacccttccctttctctgcctcctcctcctgcacagagcgacagaggacacagggtgtaacctcctacccacccctcactccactaagcttcccatcctagaggtgtgaggagggatcattcccttctcaaatcccatcctctcccacttcgcctggaaccagactctatcactgtctcatcactttctggaatgtttcattgctttccagaatctttcatcactttctggaatcttccatcattttctggaatcttccaccactttccggaatcttccatcattttccacaatcttccattgctttttagactcttccatttcttgctttttcctggcacctttgtaacccaggaccacatagaggtccacctgataccacctgccctcgttcctactctcctttgaaggcagcaccaactcttcctgcctttctgctcctttgttcctctttgagtcctatgtgctttcatccttgccacacatatttatggggcatttaaagccctgctcttgtccctgtgatacagtggatacctgcccctgtagagcttccaaaacagcaggcggagacagactccaaaacctttatttttattttatttcatatatatatatatatatatatatatatatatatatatatatatatatattttttttttttttttttttttttttttttttttttttttttttttttcctgaaacggagtctcgctttgttgtgcaggctggagtgcagtggcacaatctcagctcactgcaagctccacctcctggattcacactattctcctgcctcagcctcccgagt

SEQ ID NO: 2742 - DNA, 2067 bp, Homo sapiens
gtggggtgggctgagccggagcccgggccgccgccgccgccgccggggagaggccgaacgcgcagccggcgcgggtccctgagagagcgcggccgccgggcggtcggtccccgtccgggtcgaagccagggtgaggggcgcgccggggcgggggcggtgggggagggggtcccaggccgccgagaacaaagggagcgggggcaggggccgcggggaccgtccccacgccgcgcgcccgggccgcggccgcgctttcgcacctgttgtgtgcggcccaggccgggcgcggctccgtttcccggctctcagcgcccccacctgcgcgcacggccagagttgggtccccgcgtggtggtggcggcgatccggcgggccgggcatgggcgtagcccggggaccgaggcgcgggcgggggatggggtcgggcacgttaagggaggcggcggcggcggcggcaggagggggcgaagcggaggaggcgcgggagggagggcgcagcctcatccccggcgcccggggcgggtcccctcctccgcagggcgcgcggcgatgtgagccatgagcgcgacgtggacgctgtcgccggagcccctgccgccgtcgacggggcccccggtgggcgcgggcctggacgcggagcagcgcacggtgttcgccttcgtgctctgcctgctcgtggtgctggtgctgttgatggtgcgctgcgtgcgcatcctgctcgacccctacagccgcatgcccgcctcgtcctggaccgaccacaaggaggcgctcgagcgcgggcagttcgactacgcgttggtgtgaggggcgcggcgccccctagccggccctgcgccggggtctcagagggccggcccggcggggggcgccgcggggccaggactgcgctcaggatcccgccccggagcccccagcccgggggagagggggagggagttgggagaagcccagcccctccccctcgagacccctcccatgtcccttcctggcctggccggagccccacctcgtgcctttatccgccctgtcccttcctctctgcgcatctcacccgcccggctggcccccacccccgactctgaatcccgggcgggaggaggacccccgcaccgccccctccccagcgtgtaagtggctctgctattgtgcgtccctggaagtggggacccccttgtccctcctccctcccctgttgtctggccgtcgtcaaccccaccttgactgagtgttgagcccgtccttgggctctggtccctgcggggcaggctctcccgggcccacggggcggacgctgcataccaatttgccctgcaccgcctgtcccggagacggagcccgaaggcctgccatggcggctgtgtcgaggatgcgtggcgcctgccgtggcgggacagcgtgggcaggctcatttctgcccccaacccgggccccaggacaggtcagcgcgccctgccccggtgcccaccgctgccccccatccgccctcctgccacttgcccctgacccccctgccgtgcctcccgcagccctcccatgccgttccactcctccctgcctctgagccgaacatgataataaaagctattattgagcgcttactgcatgccaagtagcgtgctgagttggcacctcctgtttatagcctgtctcctcttcgggatcgtgagaatgagccaggccctgttagcatccctattctacaggccaggagaccgagggccaggcagctccagtgactgacttgcccacagtcacatggctagagtctggtagggctggaagtggaacccaggtctggcttttgcatgtttttaaagcttcccagggctgcaaagacaccaagatcacaagcacctttcaccggctttgggggggggggctgatgtgtaacccccagctgcctcccctccacacacaattctgttgatctggggaggcgccgggggtggtgagagagactcagccctgtggggaactgggaggcgcaccctctgccagccctggagggaggctccgacgaccgaccgtacctgcagcctaagcctcctccccctgcccaccacc

SEQ ID NO: 2743 - DNA, 1149 bp, Homo sapiens
tccaagaggtcttgggcttgtccaaggggagggtctcgagggaggcctggtcctggcctgagaggcaaggcccacggggagggaccggtgctgggcctggtgctggagccttctcctagcagggcctaggcgcaggggtttcacctccaggggagcagccgggctgtcctctgaggcacatcccccctctcggcccctctgcagctggccatgggcaagatgatggagcaggggccggtgctgatcatcaccttccaggcacagctggtgatggtggtcaggaaccccaaaggcgaggtggtggagggtgacccggtgagtgagggagtgggatggggcaggcacatgacaccgcctgtccccaagatctgtgtgtggccacctggcagagaccccagctcagagccctgaagctctgggactgggtggggatgtggagaaacctctgggccagagtttggggttgagggaggtcggagaccagcagacctgtctgtttttaccaaggctgagtggttcctgagtctaggcaattgtgctggcctctgctcccagcccctggggaagttgccggtggctcctgccccacagagcctggcccccccccagagctgcctgggtcacctcaaccctctcaacagtgcccttcccaccccaccctgcaggacaaggtgctgcggatgctgtacgtgtgggcgctctgccgagaccaggacgagctcaacccctacgcggcctggcggctcctggacatctcggcctccagcaccgagcagattctctgagtgtggtgccggagccaggtagccccggcctgggtcatcaggcacagaggcaccgcaacaccacctgcggcaactccagacctctgggaacaagactgcgggctctgcccccagctctgccaggacggctgcaagaccagctggcccgggaggggacaacgggctgttgcgggtgcgcggcagctggagacactcccccgcagggccaacccctgccctgttgctctgccctgcaggggtcccggcgcctggtcacctggggtgcacacaggtcacacagtgccaagaggccccagggcccagggactccccccacagcagggtgggacccgggacccgcggctcagtggcccgctagccacgt

SEQ ID NO: 2744 - DNA, 1096 bp, Homo sapiens
agcttgcaagcttgtggaaggatttagcttaacaactgtcactcctgaaaagcaatctctgttccatcaaggttctagttgctggccctgtgtcctcaaagttcattacatcttatcaaggcctgtttgcaaaggggagatcccttttcttaaaaaaggctcaacccaaaagaaaccatttcttaaaaaattttacatagatcagttgtatttctatttagcaaaaatgagtgctctgcttttatttgggaatttcgatgaaaaagcgttcagagtagataatgttcatttatcaaaaatctggtttgggaaataccaaagaggctttgattgaattcccttttgacccgtgtgtaacttcctctggtagttagaccccaggcagctccgaatttgtgaacctgcttcctgatgaattctcccttgttcccccttggctctgccattatttcgttttcagtgtaatttgccaagccgcagttttctgtgctggctgtgcctctagtcgcagctctgtgactgattccctcccgggtgctgagtcccctccccggccaccatcctgcgtgaatatcctgaaattcatgggcttcctcgggggcccgcccgcaggtggtgctgggtgggttccgccaccttctcctggaaggtgagccttttcctggccaagggcagctgccttaacctctgagagtctgcgcttggccttagtcctggagacccagcctccagggactgaaccgtgctgctgttgggagccaagaccggccctttggagccggcagcccaggggtccctgctggatcagagaaatagaagcacccgaagacggttagtggcaattccttgacccggtttgcttccaaatgaaggccatttgtccaccaggcattgaaaagacatgacttacccagtccggcatcggacttgaaaaatcgaaattgacatcactcagctgttacatttcacatccgattcagcccccttttatttccatgtgcttttcgcagccttcctgtgttggatgaaagagaataagaattcagctgacaggaggcctctatcctgtccctccaccccaccctccacctcaatc

SEQ ID NO: 2745 - DNA, 1293 bp, Homo sapiens
ctgggtagcaaaaaaatcaccttttagttttagtttttaatctaaagatgttagacagatgctgagtgtgcgttttctcaaccgcttcaacattgtaagcgatgtatgctttggttgacaggaagttccttttccaggcaggtcccgttgccacctcctgctcactcagtcccgggctctgccgagtggtcctgggaatggcggcgggcccgtccagcgtgggccaccactggggccgggggccacgggctgcatgctgggcgggccctccagagaaggacacaaacgtgtttcgtaagcccaggcaccaatgggaatggaccaaagagtttcagggaaactccagtatattccagagtcagatctaagctccaggcacgcctgaagatgtgttgctactctgacatcccgagtttctgtccacacattgcatgcacagcgccccacacattggatactgttgttcacgataatttctcccgttttccagagcatttaacatagcttggaggcgtaaaatggctctgtattttaataacacagaaacatttgagcattgtatttctcgcatcccttctcgtgagcgcttagacctttttctattttagtcggattttgttttggaattttgcttttgtatgaacactcagcagaaaagtacttacttcttgccagttatctattaaccaaaacctttgatttgtagttttaaagattaaccctcaaagttctcttcataactgccttgacattttgggttgttctgttctgttaattttcttttgcttttttgtgttttttgtttgtttttacttttgcatttaagaccattaaatttgattttgttttgctcgaattttgttttgttttttattttaccttttctttctttttggctagggaaggtgcaggtggcccagcattcagggaggagtcgtaagatcttaagaaaccaatccttgcctcaagcaaaagcatttctgaatctgtgacgcaagaatgtgcagttacaggctggtggcttttaaaccaggagcccggaggaagggtgaaagagaaagcctgtgaaataggcagggccagatcacccaaaactcctcaggactgggatctggcgtttataaataactagtttacagagagaatcacaaacaggataacttagtaccagcagtttttaaccttgacgtgagactaaaacgtgaccgtaggctgttttttagttattgctctcatgagatgatggctgtatttatctgtttatttatacctatttatgtatttatttattga

SEQ ID NO: 2746 - DNA, 1181 bp, Homo sapiens
atcctctggcccctccctgctgtccctctgtggccggctcgttccagccctcccagtgagctctgcacggccgggccggggcccaggaaggacaggagccagtgctaccccgtcctgcccggggaaaagctagaagccccggtttgctgcacccatgaaactcgggtccccacagcgtcttggcggggtggggagggcggcaggatggacggggctggccagaggcgaggaggacgggcggacggcgccgccttctccccttttccttggccgactctagggagcgattgcctccctccctccgtgaccgggtggcccagccagcccgtcgtccccacccagaaccgtgctctgggccaaagcccgaagaaccaggcagcgggggccggggcaggcggaccccccgggctctcagcgcccacccgctcctccgcacacagcagctcgcacaggcctcccacctctgcctgttgattgatgcagggagaagcccgtccccccctctcccctctcccctcccctctcctgcacgcaacgcgccctctcggccctccctgtccccctcctctgtctcgtctccccatctggtctggaacctgtttgcaagtgaagcaatatctccgtgttttgtatatacaaccgctcttgtagcctttggtttttgttaatgtagagaaacacagattctttatacactttgtaagatttacgccaaaccccagctctcgatctcttcttctccctgtggcccctgcgctgttgccccgtccccgtcaccccgcccgttactgaaatgtataatctgacttcctgtacagaaacctgccgctgcgcctctgtcttctttcttttccgccaggcgccagctcctaggctgaggcccctctcgctgcacgttccccaatgcaggccagaccccccgtctccccagcccaccccacaggaagcgagaggaccccagcacctgccaagggcagcgtggaagtcagccagcgcagttggggtgggccctggtcaagctgcccctgtggcagggagggatggaaggctgccgcttgtccttgactttaaactcctgggtcctaggacctcaggcctgcgggcgtcccctgatggggatgggagccaagagcagtggccagggttcatcactttgtctcctgccagggcctcccctcccc

SEQ ID NO: 2747 - DNA, 1099 bp, Homo sapiens
ctgcgccttcttttttgaacttcctgaagcgtaaaggcgtgcattgaatccgccaggaaggcttttcatggggcaggggcaggctctgttagcagaagaatggcagtgtggctgagggggccgtagtcattggttctcgccattgtattctgagcctttgtgctctaggcttcagggcctctcctttttgactctgtccaccaaaatctaacaaaatcgggactgagtgtcgtctcttcttccctccctgtcctaggccacgtgctgtacgccgacatcaagatggagaatgggaagtccaaggggtgtggcgtggttaagttcgagtcgccagaggtggccgagagagcctgccggatgatgaatggcatgaagctgagtggccgagagattgacgttcgaattgatagaaacgcttaagcagttgccttttttaaacatcgatacgagacctctgaatttgtattttttcttgttaaccattttaatttgttggctggatgtataaagatgtttaaaaaattcagttgctttttggggtaatttgaattacttttttaatgactggggttccatttgactgtttgcattgagattgcaatgtgcgcaattttttttgtagttgtggcatcttgttgacatcgaatatgactttgataataaataccggttcctgaaaacggcctgcttgtgtgtgctgtgtgggcaaccacgcgaggtgtggggagctggggtcactcgagcttccagtccaagcagcagggatctcatcccctctcttgcttgtctgaggccccaggggtgggtgcctgcccacagatggggggagactcttccctggaaactgccttcctgtgggctgtaatcccccggcttacaatggagcgtttggctgtttagagccttctgaggccaggcgcggtggttcatggctgtagtcccagctactcaggaggctgaggcaggagaatcactcgaacccaggaggcggaggttgcagtgagtgagatcgcgccactgcactccagcctgggcaacagagcaagactccgtctcaaaaaaaaaaaaaaaaaagccccccgaaagccatcctgtctcc

SEQ ID NO: 2748 - DNA, 1177 bp, Homo sapiens
taaaaatacccccccccctcgcaaaaaattagccaagtgtggtggcaggtgcctgtaatcccagctacttgggaggctcaggcaggagaatcgctttaacccaggaggcggaggttgcagtgagcctagactgcgtcattgcactccatcctgggcaacaagagcaaaactccgtctcaaaaacaaacaaacaaacaaaaaaacccagggaactcatctcagtgatggtattctttgcagtcatacctgtcctatgaaggagaataccaacagagcttttcaaggattacgacactcccgccactactctcttaataacctttgtgaagagagtgtcttctgctctgtcaacaaagggcgggggagtgggctatacagatgacacatagtaaatccagtgcaacactcctgtctctctaggattccctccttcacattatgccagggaagctctggcatatgagcctcattaattataacaatttcagccctgagaacataagaaataactttatttcaggggtgtcctaaagaagctctctgattcttttgtttttggatggaatcttgctctgttgcccagcctggagtgcagtggcatgatctcggctcactgcagcctctgcttcctgagtaaaagcgattctcctgcctcagcctcctgagtggttgggactacaggcacgtgccaccacgccctgctaatttttgtattgcttgaactagggtgggcggcggcagaggttgtagtgagcgaagattgtgccactacactccagcctgggggacagagcaaaaatctctcaaaaagaaaaaaaagagagagagagagagatgtaatactacccatgatataagaaaagctacaaaagacacaatattcgagcttttgacgatatcgtaaaaaaaaaaaaaaaaaaaaagatctcggccaggcgtggtggctcacacctgcaatcccagcactttgggaggctgaggtgggcggatcacctgaggtcgggagttcaagacaagcctggccaatgtggtgaaaccctgtctctataaaaatacaaaaaaattagccagacctgatggtgggtgcctgtaaccccagctgctcacgaggctgaggcaggagaatcacttgaacctgggaggtggaggttgcagtgagttgagacagtgccattgc

SEQ ID NO: 2749 - DNA, 1175 bp, Homo sapiens
gaagtgacgtcagtgtgccaccgccatctttaccggctgtggctcagcatggtcagtgccgtttaacctttattgtggtggagtccaccccgctgtggtgagttctacctgcttgggggtccgggacataccagcggggcggcaaaggaaggattgggcgtggtcgcccaggagcctctcagatccgcctagtttcactcgcttttctaggggctgtcagtcctcctggtgcggcctctggccagttccgagaggccgcacagtccgtctggctgcgtcgggaagtgtgtttgttccgcctccgccgggtgttttcttgagtactttcatccgctgtgctcctctcttgaaaagcttggaaagcaacctttgggagtttttttctttccgaaaggaaaaggatttctgcccttctggtgaggttggctctggccccgcattctcccgcgtctggaacctatctcttccggcatgttcctggtgagcaacggcggaaaaatggtttcaagagggctgtgacttccatttatttgctaaaaaatgtctcatctgagaatctggcgttgtcttgatgtcctttactttttttttttttttgatttggagtcttactctgtcgcccacgctggagtgcagtggcacgatgttggctcactgcaactttcacctcccgggttcaagtgattgttagatatgagttttaaatttctttttaaaaaatcaatatgtcagtatgtttaattctttgccttctacttttaaacttctccgtaaagcaacctttttcgatcacctgctccaccctgactcattctgattacctgctccacccagacttatttcgattacttactccaccctgactcattttccaccctgactcattccaatttcctgctctgttataaccattttccccaacaaaccactcaccctgtcactctctttaaattagccaattggaattagtttagcctgtggggtctaaccctagccatcggggaaggacaaagcggcaggggccactttcctcaagaataagaaccccttcccctcccttgtcctggtgtgtgctcaccattgctccatctgtgagggcacacccttctgtagaagtaaattgccttgctgagaaaagaaaatgttatatttgagtgctttttttttgtggcatg

SEQ ID NO: 2750 - DNA, 1176 bp, Homo sapiens
gccgggtagagaggggggcctcggcgggtttgtggccagggaaggggcgtggagcgagagtcagaggtcaggcgccggcgcccagctcgtttgaagtcattgtttgttgcagggagactcggtcacatggtggggacgccagagggtcccgggagtaggggtaagctcctgatcctgagcccgaagcctcttgcagcggcaactaggagcaagggcggagggtgggggtgggggacgagttctgcagtcatcccttctgaccccctgggttcattcagggctgggcttggtgagcatttggctcacctcttccctctggccatcgcgttcccccgggatacggactccagtcagtaggcgaagcttgatcctagagtagactctacgctgcccaacagctgctgttaccgcatggtgccggacagttccaggctcttggtgtcctgaagaaagatttggaccagacacacagagatggcaaagctgcaagtttattaagcacagtattccactctcggagtggggagagcggactgacctctgcgagataagatcagccccagcttggtatagtttgggtctttttttttttttttttctgagacgtagtctcgctctgttgcacaggctggagtgcaatggcgcggtgccggctcaccgcaacctccgccttccgggttcaagcgattctcctgcctcagcctcccgagtaagtagctgggattacaggcgcccgccaccacgcccggctaatttttgtacttttagtagagatggggtttcaccttattggccaggctttttttctcttcccaaggctgcctaatatctagccagtgtctacctttttgaatgataggtgtgttgcttactttggcccctgtgtgcttgagagccgcctccattcatgatatgccgtccatatgcatgagcgctaatgagctggttatccttatcatgttaaggatactttttgtctttaatgcgcgtgcttatgcctaaagagctgctccttactggtttggtcctgatttccccggccgtgggatttttactgttttttttttaattttatttatttatttatttatttatttatggagtctcgctctgtcgcccaggctggagtgcagtggcgtgatctgggctcacggcaagctccgcctcccgggttca

SEQ ID NO: 2751 - DNA, 1156 bp, Homo sapiens
tcgcctactgactggagtccgtatcccgggggaacgcgatggccagagggaagaggtgagccaaatgctcaccaagcccagccctgaatgaacccagggggtcagaagggatgactgcagaactcgtcccccacccccaccctccgcccttgctcctagttgccgctgcaagaggcttcgggctcaggatcaggagcttacccctactcccgggaccctctggcgtccccaccatgtgaccgagtctccctgcaacaaacaatgacttcaaacgagctgggcgccggcgcctgacctctgactctcgctccacgccccttccctggccacaaacccgccgaggcccccctctctacccggcgcgcctaccacaggcgcgacacctgtcaagccttgggacaccgaaaccgtacctgggaacagcaaacacaccacagactgcagacccggaagaacttgtcccagtgttgaccacaccccctggctaggggcagggcttccggcctcgaactttaacttccgcttccggttcctagcgttaactgcgaccggggttcagcgctcgggtgaggagctggtggcgtcggcaggttcgaggcgattcgaggtgagggggtcaagcggagaggctcggagtcggagaaagctgtcgcgacccagccacccagggtctggggtcggtgggaggtgaggccagggagttttgtggcagggctttcaggcggcgagaaggggcggaggcgcggctccccggggttcgcggccctgggacaggggacttggggcctgggagtattcgagtccggggggttgggggcagaacggaaggctcagtaacctggaattttagggcctgggactgggagacttgtaggctggggcttctgggcctgggagacgcctgaagctctgactttgctgcctcccacccaccccccgctttgtgtagctccagctaggatgatcgaggttgtttgcaacgaccgtctggggaagaaggtccgcgttaaatgcaagtatccactggcagccgagaggcagtggtacccgcaggggtgcttggcgtgaggcaggcaactcaatctgtgttgtcggatggttttagttaaacccgggagagggggcggatggggtcctggcagatggtattctgccc

SEQ ID NO: 2752 - DNA, 1099 bp, Homo sapiens
gatggtaaatattttaggttttgtgggccatgcagtctctatcagctctgctttgtaactggatagcactcataactaatatgtaagcaagcacatggtcatggctgtgtgccaagaaaactttactatttacaaaatctgggaggatttggcctgcaggccatcatttgcagagccctgtctaaagctgtccagtttggctgccactcccaccctgtgcgggaggatcacttgagcccaggagtttgagaccagcttgggcaacatagcaaaaccccgtctctaaaaaaataaaaaaattagctggacatggtggtgcacgcctgtagtgtcagctacttagaagactgaggtgggaggatcctttgagcccaggaggcagaggttgtaatgagccgagatcacactaccgcactccagcctgggtgacagagcaagaccctgtctcaaaaataaataagataatatcaaaaattggtttctcaattgcactggtcatactttagctggtggctgccatctttgacagcgggaatataaaacatttacattcttggccgggcgcggtggctcacgtctgtaattccagcactttgggaggccaaggtgggtggatcacgaagtcaggagatcgagaccatcctggctaacacggtgaaaccctgtctttactgaaaatccaaaaaaattagtctggcatggtggcgggcacctgtagtcccagctactcgggagataggcaggagaatggcatgaacccgggaggtggagcttgcagtgagctgagatcgtgccactgcactccagcctcggcaacagagcgagactccgtctcaaaaaaacaaaaacaaaaacaaaaaaaaacacttttccattcttgcagtaagttgtgtctgatgcctttctcagagtccccaaacctgggctgtccctactccaaacaacccatctctcaaccatgcccagacagcctgggttgctatgcagctctgccacgtcctggctatgtgctcttgagcaagttacttaacatctctgggcttcaatctttttctccttcttcttttgagacagggtcttgctctgtcacccaggctgg

SEQ ID NO: 2753 - DNA, 1198 bp, Homo sapiens
tccttgagcccaggaaattaaggctgtagtgaatcgggatcgtgccacttcactccagtctgggcgaccggaggagaccgtgttagaaaaaaaaagactagaatctggaggcagcaaagcagggttggaaactgacttctccccagtatctgatgcaagttacttaacctctctgggcctgagttcgctcatttgtcaatgggaagatgcgctgtgagcaagagacagagttagaactcaaatctgcgtccgactgactctaaaggctaagatccttttgctcctctgggcttgttgaaagggtcagatgcaagacagaccataacaggatctgcaccgtcagcttatagttgtcacaacaagggataagctatgttttctttttttctttttgtcatttccaggttcgtaagaagaactcgctgaaggactgcgtggcagtggctgggcccctcggggtcacacactttctgatcctgagcaaaacagagaccaatgtctactttgtgagtagacgccctcacccttcatctcccccagacccccccttcccctatctctcatgatgaacacatatgcctctgagctgctgtgatttctggcttcaaagtaaacgctctgaagaagagatggggcaaaggtgcctactccgggcacctctgctagacccctccagagtcactgatcttttcttctcctgcagaagctgatgcgcctcccaggaggccccaccttgaccttccaggtcaagaaggtgagaggggtggaggtggtacaaagccatgtggggtgggagctggacttggggttgtccgcagccatgtgtggttggtggtcaccccctcctctctcctgtcctacagtactcgctggtgcgtgatgtggtctcctcactgcgccggcaccgcatgcacgagcagcagtttgcccacccacccctcctggtactcaacagctttggcccccatggtatgcatgtgaagctcatggccaccatgttccagaacctgttcccctccatcaacgtgcacaaggtgggtctggcctggcgaggtggcaggtatgggggggtgcagcggatagaggtgccacaggccctcagatggattgctcactcctcccagcgctgagactgggagctcctgggtctgctgagtcctgaggtcaaatcccactcctgtgtctgatgatgctgggc

SEQ ID NO: 2754 - DNA, 1198 bp, Homo sapiens; identical to SEQ ID NO: 2753

SEQ ID NO: 2755 - DNA, 1198 bp, Homo sapiens; identical to SEQ ID NO: 2753

SEQ ID NO: 2756 - DNA, 1219 bp, Homo sapiens
ttcagtctccttaggagcccagggaggcaggaagcttttgtggttcccgttttataagggaggaagctgaggctcaggttgtctagctcaagggcccggaggtctaggtggacccctgcacatccctgagtattgcgccctggtgggagctggtccgccagactgcgcaggccccacgctgtgtagctgtcacctggacccggaggctgacagctgccctgcctcctggagctcaggcctggcgtgtactcaggaaacaactgtcgccaggactgttcagggagtgcttgaggaggatgaagatggggtttgaggcccagacactctgggggtggctgttgtaggtctagggcaccccactgtggaacccagcctgcccctgccctcaactgtcccccatccctccctgagcccagaactggaagaagttcgggaactcagagtttgacccccccggacccaatgtggccaccaccactgtcagtgacgatgtctctatgacgttcatcaccagcaaagaggtaagcggggcaatcaggtggggctggcatcctggggtggggcaaagggggtgccttagccgcctctgagctccccccaacccgcccctgccaggacctgaactgccaggaggaggaggaccctatgaacaaactcaagggccagaagatcgtgtcctgccgcatctgcaagggcgaccactggaccacccgctgcccctacaaggatacgctggggcccatgcagaaggagctggccgagcagctgggcctgtctactggcgagaaggagaagctgccgggaggtgtgggggtgggagggtcctgctgtcagtgcacgggttctgtccccactgctgccttcgtgctgtcatctcccgcacgacagtgcagcgggtttgatggtgccagactctcctcggggcgtctgtgccttcctaattggctgtacctcctatggttgggagacgggcgtctcccatatatgtgcgacttggcagctgtgactttgctggtggccctgtgactgtcctgatgagctgctgtctgtcggccccagggtgctgaccaccccacatcgtgtgtgcgcactgtgtgtatagtgtctccgttgcatgcctgtggctgtaccgtccgaattctttggtgggatttgctggtggcgagtgtgagagtgcagacgtgcacttgtcgcctgccacgcgagggggacctgggcg

SEQ ID NO: 2757 - DNA, 1188 bp, Homo sapiens
gcctcaggtatggtggggtgggccaggcttcctctggggcctgactgccctctgggggtacatgtgggggcagttgctggccaccgttttgggctctgggactcaggcgggtcacctacccacgttcgtggccccatctttctcaaggggctgctgtgaggattgagtgagttgcacgtgtcaagtgcttagagcaggcgtgctgcacacagcaggcctttggtcaggttggctgctgggctggccctggggccgtttccctcactcctgctcggtgaatttggctcagcaggcacctgcctcagctgctcacttgagcctctgggtctagaaccctctggggaccgtttgaggagtgttcagtctccgtgaacgttcccttagcactctgccacttattgggtcagctgttaacatcagtacgttaatgtttcctgatggtccatgtctgttactcgcctgtcaagtggcgtgacaccgggcgtgttccccagagtgacttttccttttatttcccttcagctaaaataaaggaggaggaagctgctaaggactagttctgccctcccgtcacccctgtttctggcaccaggaatccccaacatgcactgatgttgtgtttttaacatgtcaatctgtccgttcacatgtgtggtacatggtgtttgtggccttggctgacatgaagctgttgtgtgaggttcgcttatcaactaatgatttagtgatcaaattgtgcagtactttgtgcattctggattttaaaagttttttattatgcattatatcaaatctaccactgtatgagtggaaattaagactttatgtagtttttatatgttgtaatatttcttcaaataaatctctcctataaaccaccctgggtgggtattcgtgatttgcacgggacttctggctgaggtcagacaggaacaagctcttccatgctgaaggcgacccacgtggagtttgaagctagcacgtttgaagctagacactccgtgtgtctgtctgtgtttgttcagaactgagtcacgtgagttgatccccatgacatgcaaatggaacttgctagtgtagcttccaggaaagccttttaaaggaagtcttggctggccttccccgtggctggtaggccttctttggtctgaagtgggttgtgatgcctggcagtggagcagccatcct

SEQ ID NO: 2758 - DNA, 1091 bp, Homo sapiens
aataggcatttcagtgtcagccagatcaaatgttagtattaataaaatggattgttttaagtttctattgtagcaaagtcaaactactcttattggtggctaattggtcatggccccactgagggagaaattaagtgactatcaaattgccttcttactagtctgcgttagagaggggacagtgcgtttctctcccaaacgattgcagttctctccttttcaggcctataatgcaaagagcaaaagctttgaagatcctcccaaccatgcccgtagccctggaaacaaagggaagggcaagggaaaaggtacgtcattgtatgagtttcttttcaagttattcttctgtaacttggaggctgcctgtgaatccctcagtgtaaaaccacctctggtgttactgactctgggacagcgaggccgcctgagttaacaaggcgcttgagagcaaggtggacttggactctgaggatcgggtttagcctctggcctctctcccccagggaagggcaagcccaagtcccaagcctgtgagccgagcgagccagagatagagatcaagctgcccaagctgcggaccctggatgtgttttctggctgcggggggttgtcggagggattccaccaagcaggtgagcgcccgtaggctccatctctgaatacctggtgagcccagaccgggcaggtgctacctgaaacgacttccaaccccggtcaccttcctgactcaagaatctccttccgaggccaggcacggtggcgcacgcctgtaatcccagcactttgggaggccgaggtgggtggatcatgaggtcaggagtttgagaccatcctggccaacatggtgaaaccccgtctctaataagaatacaaaaattagctgggcgtggtggtgtgtgcctgtagtcccagctactcaggaggctgaggtgggagaatcgcttgaacctgggaggcagagcttgcagtgagccaagatcacaccactgcactccagcctgggtgacagagcgagactccatctcaaaaaaaaaaaaaaatcttctggagagttgaaagcatggcttcgtgcttgatctgccaggcatctc

SEQ ID NO: 2759 - DNA, 1151 bp, Homo sapiens
gctgcagtgagtcatgatcgcaccactgcacccaaacctggggagagagctagactcttgtctcaaaaaaaaaaaaaaaaaaaaaaaaaaagctccaaagtcacctctgtcaaagccacagtctgttccttccacagccacaagatggcgacatgagcctaagtcaagtcctgtccctcaacccacgcccctcgctggcttccccacctctctcaggatgaaagcccaagtcatcagggtggcacgtcaggccctgcacgatgtgccccgtcacctccctgccctcccgtcatttgccctgggtctcccccaccagaatgggagccaggagtcccagccaggcacaggaccgagcctggctctcggtcagcaggtgatgagctgggagcagctccttggccagaggcttacaggcaacaagcggccaggcagggtctggccccgggctgctgggctcacaaagtcacactagaccacagtgacgatctctgtaagcacaaagggactccgatgtgggtggggtgaggagagaggcagccccggcctgaccggccccccgccccgcccccaccccgcccccaggcctaaatgtgcacagcatgctcaagcaccagacgctggtcctgacgctgcccaccgtcgccttcctggaggacaagctgctctggcaggactcacgttacagacccctctaccccttcagcctgccctacagcgacttcccccgacccctaccccacgctacccagggcccagcggccaccccgtaccactgttgatgtgaagcacctcttctgagccaggccgagcccctggccgacttgggagcctcaggcccacgcccacccttcgaggaaggtgtcacctggaccccttcattccacggaggaagctgaggccacagggagcggccatcgccattgggaaggggcgactccacggaaagcccagacgggcttctgcatccattccctctttttgtttttaaaataaattgtatttttgaatcaaggaggataaagataacttctcagtgtcatttttgataattgcattgagaacgatgagctccttcccaggttctgggcactgttggggatccgccgtctcaagaggctcacggtctggtttaggggaaccccagggctgtt

SEQ ID NO: 2760 - DNA, 1197 bp, Homo sapiens
tacttgggaggctgaggcaggagaatcacttgaacctgggaggcagaggttgcattgagccgagatcataccattgcactccagcctgggcaaagagagcgaaactccacctcaaaaaaaaaaaaaaaaaaaaattagccaggtgtggtggtgcgcacatgtagtcccagctactcgggaggctggggtgggaggatcgcttgagccgggaggttgaggcagtaagctatgactgagccatggcactccaggctgggcaacagagtgagaccctgtctcaaaaaaaaaaaaaaaaaatcctggccgggtgcagtggcttacgcctgtaatcccagcactttgggaagctgaggcgggcagatcatgaggtcaggagatcaagaccatcctggctaacatggtgaaaccccagctctactaaaaaaatataaaaaaattagccaggcgtggtggcaggcacctgtagtcccagctacttgggaggctgaggcaggagaatggcgtgaacccgggaggcagagcttgcagtgagccgagatcgtgccactgcactccagcctgggcaacagaacaagactccatctcaaaaaaaaaaaaaacaaaatcctaatgcctgattccttcccccaccacactgactgctgagtcagccggtccatcctccaagagcagtggagaggtggggacacattagcccagcacagtgatagggtcacagcaagggctcacagactgcggggagcctgcctggcctttcccctctcagctacctggcagccaagtccctgctccttaatggttctgcatctcagcctgctagggagtccctgggaaatggggcctcccagatgtccgtttgtaaaccctacacactggggaacagctagctgaggacattgaggacatgacacagtgcctggtacacacagtggagctgcaggcccaggagggagacgtgaggcacgtggtggaagagaggtctactcctctacgccattcgcatagcagccccttcctgactctgccactcacctgcgcccccttcacttcccacccctaggggcctgtgaagcctccctggcctgctccacctgccatgtgtatgtgagtgaagaccacctggatctcctgcctcctcccgaggagaggtgagtgggtcagccctgtctagctggcagcttcaccctggagcattca

SEQ ID NO: 2761 - DNA, 1153 bp, Homo sapiens
ggccccatctgacagatgagaaaaccgaggctcaaataaaatggagcaattggccctaggtcttatagctagaaagtagcagaagcaagatttgaacctgaaactgttcgctttccctcagggctggggggcagtggcaggggggcggggtgggtgcttcctctggcccccagggagtgacctgttccacctctccatttctcccaggcaatcggctcttccccgctggggtccggagaagggctcctgggcctcagccccgggcctaatggtcacagccacctgctgaaggtacgggcagggggtggggacatgcagggctgggaagccccggccccccagcggcccctgacccgccccgccctgccctctgtctccagaccccactgggcggccagaaacgcagctttgcccacctgctgccctcgcccgagcccagcccagaaggcagctatgtgggccagcactcccagggcctcggcggccactacgcggactcctacctgaagcggaagaggattttctaagtggctggcaccagagataactcaagggcctgcaccaaatcgcttttgggttttctgatgttttgttttgtgttttttttaaaccattttctctctttcggtaatagaaaaatctctgaaagactttactgaccaatcagccggagccccaggagcccaaggggtgtgggggagtctggaggcctcattatgtctctggcttgctccccacgctgaaaccctgcagccttaagagagaggggccccggcctgctctccctccctccccccatctcctcctccgctgtgcccgtctctccggagccctcctgcctcattgctcctgtaattttggcctttcgagtgccttggaggtttccctgacctcccgtgaagatacagagactgtctcctttttttttaactttgacaactgacttctgtttccttttctaagttttatttttcaaaccaccccggacagcccccagctctgattccttcaaggcccggcctgtccgggccaccattccacaccttgcggtttgaaacagctgtttttcccacatttgctgcaggcatggctgtctcctgcccctgcctgcccatctggcctataccccagccgtggggcccggggtccctgc

SEQ ID NO: 2762 - DNA, 1181 bp, Homo sapiens
accagcagctccctcaagtgagaatggggttctggatgggtccatcccacctgagaactgggtctagtgtgcgcgggtcttggccttccctcccgaccttggaggggctctgctgggctcaaggtaggcggtccccggcccgccctctatcgtcccccaccggggccgcccctctccgcggcaggcgagaagtcgctgcagctggtcatggagtacgtgcccctgggcagcctccgagactacctgccccggcacagcatcgggctggcccagctgctgctcttcgcccagcagatctgcgaggttggtcggccccgcccctgcttctggagcttgccccttcctcttcagcttgggctggcctgagcgatccggtgcagtctgctctcacgctccgcccctgctcgtttgcccaggctgtcttgtccttgcactgacctccgaactgtttggcttgcttggccacaccccctcctcccaagggaccacgcacagccggctcggcccctcccaactcgccctcctgcccagctttgctcgtctagccccgtccctgctttctggctcagcctccttttgcttggtgccacgtgccatccggccctctccagcggccgggtagccaccggcctgacctgactgtcccccagccctcctggctgctcaggtcctgccgccgcccccggccgaaccccgccccactgaaactcacgagccctgccccgtccccagggcatggcctatctgcacgcgcagcactacatccaccgagacctagccgcgcgcaacgtgctgctggacaacgacaggctggtcaagatcggggactttggcctagccaaggccgtgcccgaaggccacgagtactaccgcgtgcgcgaggatggggacagccccgtgttctggtgaccaggcggggtgcagtctgagggggtgctggggtcacttggaacaggcagggtggagtagacggatgctgggtatcatgatagggcatgatcccagtgaagcgcggcggggcctagcggtgcgggggtggggcctatggaggcaaggggcggtgtatagagtgcggcttggcctggtgggcggggttaacccggcctagccaatgagcggcctagccaatgagcatatcaccccgctcaggctgcgctcttaagggtgggtcccaactgagc

SEQ ID NO: 2763 - DNA, 1312 bp, Homo sapiens
catctctactaaaagtaaaattagccaggcatggtgacaggcgtcggtaaccccagctacttgggaggctgaggcaggagaatcacttgaacctgggaggtggaggttgcagtgaaccgagattgcaccactgcactccagcctgggtgacagagtgagactccgtctcaaataggtaaaatatcaataggcaggaagccagcttggggatgtgcaagggacaacggggacaacggggaccaccggctggcggccccacctcatctgcctgccttctcctcacaggacgcaaagtaccacatgcagcgctgcattgactctggcctctgggtccccaactctaaggccagcgaggccaaggagggagaggaggcaggtcctggggacccattactggaagctgttcccaagacgggcgatgagaaggatgtcagtgtgtgacctgccccagctaccaccgccacctgcttccaggcccctatgtgccccttttcagaaaacagatagatgccatctcgcccgctcctgacttcctctacttgcgctgctcggcccagcctggggggcccgcccagccctccctggcctctccactgtctccactctccagcgcccattcaagtctctgctttgagtcaaggggcttcactgcctgcagccccccatcagcattatgccaaaggcccgggggtccggggaagggcagaggtcaccaggctggtctaccaggtagttggggagggtccccagccaaggggccggctctcgtcactgggctctgttttcactgttcgtctgctgtctgtgtcttctatttggcaaacagcaatgatcttccaataaaagatttcagatgctctctgggctgctgggagggccgttcaggcagcccatctcttgtaggtgggagggaaacttggtgggatattgggggctgagctgtgcttctctggtcctttgcccaccagccatcgtgggtcctcgcctcacacatgctgttccacaacttggaacagtcttcttccagaggcctcaaaagcccccaaccttcagtctcacccacccactcccttgtccctacttggacctccagaatgcagggtggcccaagctgatcaccaccagagggcagtagtgatctgcaaaccaagtcacattccctagggttttgtggatctggcgcacctgcccgcaccccacacctttccagcttcctacaaccttttggagcagcatcctggatggactatatctccccaccctatggccagcgctgcccccaaacagatttttttttttttttttttttgag

SEQ ID NO: 2764 - DNA, 1192 bp, Homo sapiens
ctgtcagtgttctacagtcttgtttcatccttctctactttcctttttttttttttttggagacggagtcttgctctgtcgcccaggctggagtgcagtggcacgatctcggctcactcactgcaagctctgcctcccgggatcatgccattctcctgcctcagcctccctatagctgggactacaggcacccaccaccatgcctggctaattttttgtatttttagtagagacgaggtttcaccgtgttagccaggatggtctcgatctcctgacttcgtgatccgcccgccttggcctcccaaagtgctgggattacaggcgtgagccaccacgcccggcctcatccttctctactttctgctccctggtatatttcagagcaaataccaggtatataattttagccataaatttgtcttaaatatgtgtggaacagttaaagttggttctttccagcacaaccacagtattattcccctaactgaagtaactataattccttcataaggattcacttcatgaacaagattcccagtgtcgttgcgactatccagggaaaccatagccaagggaacaggcttggcagaatcagtggcgaaagaaggccctgtggagcttgactctggctcggtgaagagacatgggtgatggaggagaggatgccctttgcacacacatcactcacgcctggccctcattgcagcctgggaaggcagatttttttcaacagtaggatctagtaccaattgttaggtctatgggatatgtgctgcatgcttcaagtaggttgacttgtttcattttcctagtcctgccgagagtagaggggcctcttccgtgttgctaatgcaagaaggaagctagtggctgggcaagtggggtttcaggtccaagtctgtgcagaagctttccttgggcgatcgatcgagtggcttgccccatggtgtgagtctcaggcatgttgagccactgagcccagggactggctttctgcccttttcatcccatgccccctcacactccttccctcctgcatccctaccctgacatgaagcctttgacctcaccatgtcctgttgctgggctttgcaggggcatcatttgactcctaggggttttttgttttgttttgttttaaatgagacagagttttgctcttgtcacccaggctggagtgcaatggtgtgat

SEQ ID NO: 2765 - DNA, 1096 bp, Homo sapiens
ggtcctattgaagttcacaataagtggaaaacaattttttcagagaatgtatttttgtgcagaattgcacagaattctagagacagcgttgttcggcatcaaggcaaaagcccacctttgctttttatggaaagcattactttatttaaagagacagacaatgacgcattttaatctacctttgtcttaatttacagcaggttttgtatgaatttttaaccttttaacaaactcccaaatctggttgatgcctttgacagtgatgaaaacgatttcaccacatctgaatccagagaaaccggctttttttcttattgcgagcatgttaaaacgttgggaacatgtggggaattgtatattgcgctgaattaacttctcccgcctcttgtaatgctctggtgggttcttgtttgggaatgcgatattttgtggctggtttagctagagagtgaactctcaaaggtatcaaaactgtgcttccattattagtgcaagaaacagacaggctttaaggggtagatgacgtgaaattttgcaagtcttaattacagctgcagatgcatgggattctggatttttttgttgctttttagtttaatgggactttaaaagtaattgaggagaaagaaccgtgatgttccctgtttctccagtaaaggactggcttttgcttgggcagaggtggtgctgctgggtgtgcagctgccacagactccaaaggcgtagaagtttgtgccaacacacggagtcattctggctctctgctgaggcccctgttttctggcaggtgccctccttggaaactggttttggctctgatcagcggttctttttgcagcaaagcctgcatctgtgttgacttgcaagattttgcgtttattcaggcaaaaactggtcaaaatggttactacatgatttgttcccagaggtttgaaacattcagtgaaactttttaaaactttgattgcatgatgtattttttttttagaaagttattgtttgagaataatgtctttttataccaggaaaatagttatcctgaatgacgttgaaaactccccctcccctttatttttttttaatcaatacatgtgaa

SEQ ID NO: 2766 - DNA, 1066 bp, Homo sapiens
tggagctgcagcctgctcgccatctggaggctcagtggagtggggagttggggttctcataccagcagatttccctagagcgtgattctcccatctgaggcaatcttgcctcccaggggaaattttgcaatgtttggaggatgttgtcacagctagtagcgggtgctctgggatctggtggatagatgccaaggatgctgtcaagcatactgtactgcccagaacagtggcccatagcagggacctgccctatcaaaatatcaggtgtatggaggtggagtcccaacgctagagcagcccttctcagctccaccctgcccggggagggaggaggagctctggtttcagagcagtgccgggattgcctttccccaggatctgtgtcggccatccaggaagaactgtactggccaagcctgggaccacacgtctgcagagatcctgctctgctggcctgagccccaggccttggcctcctgtgcttgggtaaccatggccactgggaaaagcaaggaccgtgtttgactttcttggagaggtgaaagaggtgaaagaacaagttgtgtgctagaaaacttttgaggaattcttatttgtgttagagcagaggaggtcccagataccaagtggcgcctcccaggaaaggctgggagaagaggtggcctggagtaccccgagatcccagcagcgcacacagtggagggatgaggatggatgggtcctaacccctgattttgatgggatgtgttcatgtcctatctcctctcctggacacattaaggggttgggacaagaagagactcctgtgagatcagcagacctcgtgtttaaggagagaatgcctgcctgcaacactcatggagagggacacttcctggccccacctgctaaatacctccaaactctgggcaggcgcctgcattctcaacacaggacttcccttaacagtttccggatcagtgaccaccaccacgttcaggtttctgaatgcagacccaccacgagggatggattccacccgcccgccctgctgcagatacatgcggcacagcaggcacgtgcctgg

SEQ ID NO: 2767 - DNA, 1206 bp, Homo sapiens
gggcgggccagggcagcccctcactgccattgcctgctccacagggtcctccggcgcccagggcagtggtggtggcagcacgagtgcccactatgcagtcaacagccagttcaccatgggcggccccgccatctccatggcgtcgcccatgtccatcccgaccaacaccatgcactacgggagctaggggcccgccccgcggactgacagcaccaggaaaccaaatgatgtccctgcccgccgcccccgccgggcggctttcccccttgtactggagaagctcgaacacccggtcacagctctctttgctatgggaactgggacacttttttacacgatgttgccgccgtccccaccctaacccccacctcccggccctgagcgtgtgtcgctgccatattttacacaaaatcatgttgtgggagccctcgtcccccctcctgcccgctctaccctgacctgggcttgtcatctgctggaacaggcgccatggggcctgccagccctgcctgccaggtcccttagcacctgtccccctgcctgtctccagtgggaaggtagcctggccaggcggggcctccccttcgacgaccaggcctcggtcacaacggacgtgacatgctgctttttttaattttatttttttatgaaaagaaccagtgtcaatccgcagaccctctgtgaagccaggccggccgggccgagccagcagcccctctccctagactcagaggcgccgcggggaggggtggccccgccgaggcttcaggggccccctccccaccaaagggttcacctcacacttgaatgtacaacccaccccactgtcgggaaggcctccgtcctcggcccctgcctcttgctgctgtcctgtccccgagcccctgcaggtccccccccgcccccccactcaagagttagagcaggtggctgcaggccttgggcccggagggaaggccactgccggccacttggggcagacacagacacctcaaggatctgtcacggaaggcgtcctttttccttgtagctaacgttaggcctgagtagctcccctccatccttgtagacgctccagtccctactactgtgacggcatttccatccctcccctgcccgggaagggaccttgcagggacctctccctccaaaaaaagaaaaaaagaaaaagaaagaaaaaataaatgaggaaacgtgttgcagcac

SEQ ID NO: 2768 - DNA, 1208 bp, Homo sapiens
aggggggagatggagttttgttcttgtcgcccaggctggagtgcaatggtgcgatcttggctcactccaacctccgcctcccgggttcaagcgatttcaattttcctgcctcagcctcctgagtagctgggattacaggcgtgcaccaccacgcttggctaattttttttttttttttttgagacggagtctcgctctgtcacccaggcttgagtgcagtggcacagtctcagctcactgcaacctccgcctcctgggttcaagcgattctcctgtcccagcccccacaccgagtagctgggattacgggcgcctgccaccatgccggctaatttttgtatttttagtagagatgagttttaaccatgttggccaggctggtctcaaactcctgacctcaagttatccactcgtcttggcctcccaaagtgttggaattacaggcatgagccaccaagcctggtcctaatttttttattattagtagagatggggtttcaccatgttggtcaggctggtctcgaacccctgacctcaggtgatccacctgcctcggcctcccaaagtgttgggattacaggcatgagccaccacgtccggccctgaatacttttttttttttttaatataacacttccactttctatgtgacattgtgtcatgtttggctatttctgtcactctgctgtccactcctccaggtaggaattgtgttgttctctgccagatgcctggtgtttggaaccagcttggtgcattcagcgctgttcgtatttgggggtagtcatcagtaagtcctctgctgtggcggtggggaaggcctgtcacgagtgacactgggcaggtatggattctgcatctccctgcccactcttggcctttgcatgcctctgttgtggggactcctcttgccgtctccacacagtgtcactcctcacgctcagtgttgcgtatatagctgataacacagcagacccggtggtggcgcaggacatccatccagtgggcctcggccagccgaaaagaaagaataggggccgggcacagtggctcacgcctgtaatcccagcactttgggaggccaaagtggacggatcatcggctcaggagtttgagactagcctggccaacatagtgaaaccccatctctacaaaaaatacgaaaattagctgggcatggcggtgtgcgcctgtagttccagctactt

SEQ ID NO: 2769 - DNA, 1170 bp, Homo sapiens
cggttatgccccaccacacccagctaagttgtttttttttttgagatggagttttgctcttttgcccaggctagagtaaagtggtgcaatcttggctcattgcagcctccgccccgcgagttcaatcaattgtcctgcctcagcctcctgagtagctgggattataggcatccaccaccacgcccatttaattttatttttatttatttatttatttattttagacggagtctcgttctgtcacacaggctggagtgcaatggcacaatctctgctcactgcaagctccgcctcctgggttcacgccattctcctgcctcagcctcccgagtagctgggactacaggcacctgctaccacgcccggctaattttttgtgtttttagtagagatgggatttcaccgtgttagccaggatggtttcaatctcctgacctcgtgaacatcggcctcccaaaatgctgggattacaggcttgatccaccatggccagccagtttttgtatttttagtagagacggggtttcaccatgttggccaggctggtcttgaactcctgatctcaagtgatccacccgccttggcctcccaaagtgccaggattacaggcataagccaccacgcctggcctaattttttaaaatttattttctatagagacgggggttccatatgtttttcaggctagtctccaattcctgggctcaggcatcctcctgcctcagcctcccaaagtgttaggattataggcatgagcccccgcacctggccttcacctgtgttttttcctaaactctttgagagtcaaatgcagacgtgacagcgccttacctccatgtaattcattatctacttcataaagacaaggttgtttctgcacactgtaccgaggtgacggacacaggaggtgaacattggtacagcactgttatccaatctataggccttcgtatgaggtttggccagtttttccagttatcttcacagcagcagagaatcctgggtcacatttagtggaggtccctttagtcagctttagtcttaaagagctccttgtgtgtgtgtttgtttttttgcagagatggggtctcatgttgcccaggctggtcttgaactcctgggctcaagtgatcctcccacctcggccttccaaaggctgtgattataggc

SEQ ID NO: 2770 - DNA, 1085 bp, Homo sapiens
gccgtgggaggtcagggtttctttcacctggttccacccaggctgaatgagagtcccttggggctcccggtggcagagccctccctgagaatcacccgctataagccccatgtggtcagcctggcccctgcagcgctcctggcatgagcttggcgtggggtgggtctgtggacactccagtttgtgttactcgtggagaagcagcatgcccgctgccgggggtctttctggtgaggcacagggagcagagtgctctgggtactgcggttccatgtcccaggaattacatggagggaaccagatcctcacagtttcctaaggaagagggtgccctgcctggctcccagaaagcataaagcaggctgaaaagccacgtgccaagggcaagatcaccccaggggaccccgtccaccctgtccccacatccgcaccttctagtgagacctctgtcgccctcctttggaggtaacgcttgcttctcctgtcttgggggcttccaggtggacctgaatgaggaggaaaccattctcatcatccggcgtctccacaaagtgctgcggcccttcttgctccgacgactcaagaaggaagtcgaggcccagttgcccgaaaaggtgatggagttttgaggggagccaccagtgaagcagcctcacgtgggggctttctccagggctgggcgtgctcagggcctctccccacagtcccaggcctgccctggtcaatccagcttgggggtggcgatgacgccactgggtctgtaaagccctgtgctgctgttgtagggattgaaaagcactcataggctcacatagctcacaataggttagagcacaaaatcccacttcctgtcagggggccaggtgcctgtgcgggctctcctggccacatcaggaggggccgtgggcttggggttgccccccggccccccatcatggctctgggttttcaaggcctgctgcagccacacccctgggcccagttcccacagcaagacccatggactcggggtccccggctgcagttgtccctcttggctctttgtttcctggctggctgtagagaggcccccagaagatggctgg

SEQ ID NO: 2771 - DNA, 1197 bp, Homo sapiens
ttatgctcctagcctcaagtgatcctcctccctcagcctcccaaagtgctgggattacaggtgggcgccactgtgcctgttcccgttgggaggtcttttccaccctctttttctgggtgcctcctctggctcagccgcaccctgcaggatgacacaaggggatggggaggcactcttggttccatcgacgggtcccctctgaccccctgacctcgctccccggacccccaggctccatcgcctacctcttcttcaccaaccggcacgaggtcaggaagatgacgctggaccggagcgagtacaccagcctcatccccaacctgaggaacgtggtcgctctggacacggaggtggccagcaatagaatctactggtctgacctgtcccagagaatgatctgcaggtgagcgtcgcccctgcctgcagccttggcccgcaggtgagatgagggctcctggcgctgatgcccttctctcctcctgcctcagcacccagcttgacagagcccacggcgtctcttcctatgacaccgtcatcagcagagacatccaggcccccgacgggctggctgtggactggatccacagcaacatctactggaccgactctgtcctgggcactgtctctgttgcggataccaagggcgtgaagaggaaaacgttattcagggagaacggctccaagccaagggccatcgtggtggatcctgttcatgggtgcgtatccacgacgctgagggctgcagagggaatggagggagcaggaaggagcttcaggaactggttagtgggctgggcatggtggctcaaagcacctgtaatcccagcactttgggaggccaaggtgggtggatcatcaagaccagcctgaccaacatggtgaaacctcgtctctactaaaaatacaaaaattagccgggtgtggtggtgggcacctgtaatcccagctgctcgggaggctgaggcaggagaatcacttgaacctgggagatggaggttgcagtgagccaagacagccccactgcactccagcctgggtgacagagtgagactccgtctcaaaaaaaaaaaaaaaaactaaacaaaaaactggttagtggctagacaacaggatggtatcttccaagcccatggctgactcagcagctcctgggtcaagacactgtgacctgtgtcccctggcaggaagcatcgcccc

SEQ ID NO: 2772 - DNA, 1128 bp, Homo sapiens
gggaggatcacttgaggccaggagtttgagaccagcctgggtatcagtgagaccccacgtctataataaatatagtaaagtatagcaggccaagtgtggtacctcacgcctgtaatcccagcactttgggaggccgaggtgggcagaagacctgaggccaggcgtggtggcatatgcctgtagtcccagctactcaggaggctgaggcatgagaatcacttaaccactggaggtggaggttgcaatgagccgagatcgcaccactgtactccagcctggcctacagaatgaaactttgtctcaaaaaaaaaaagtaaaggcagtatccttttccccgtggggttgtgtgaggggctgtgtgtcccgggctttccttacatctgtgcctcagtccatcatggccccagtgtggcccagcccatccacctggacagcacccagctctccaggaaattcatcagcgactacctctggagtctggtggacaccgagtggtagccaggagcctcgtggctgcgtcttgcacccagcgggcatctgccgtggtcagatccatttcaaatgaaatgtggggacatagatctttttttttttttttttgagacagagtttcactcttgttgtccagtctggagtgcaatggcacaatctcagctcacagcaacctctgcctcctgggttcaagcgattctcctgcctcagcctccaaagtagctgggattacaggcatgcgccaccacacccagctaattttttgtatttggtagagatggagtttcaccatggtggtcaggctggtcttgaactcctgacctcaggtgatccacccgcccgccttggcctcccaaagtgctaggattccaggcgtgagccatcgtgcccagctagacgtcttccttttttttttttttttgagacggagtctcactctgtcgcccaggctggagtgcagtggtgcgatctcagctcactgcaagctccgcctcctcccgggttcacgccattctcctgcctcagcctcctgagtagctgggactacaggcacctgccaccatgcgcagctaattttttgtatttttagtagagacggggtttcaccatgttagacaggatggtctccatctcctg

SEQ ID NO: 2773 - DNA, 1391 bp, Homo sapiens
ccggttcctaacggtgggatcggtgtcctcgggatgagatttggcgtttcctcggggctttggtgggatcggtgtcctcaggatgagatttagggtttcctcggggctttcgggatcttcacctaatatccggtattattttatgagaggagtggtcttggctgtcagaactggatccctggggtgatatttgggaattagtggagtgatctctgaagacctagggctatgatctggagctgctgtggctgaaatttggggcctctgaagtggcatggagattgaggtccagagagcctgagatcttgagggctgacatttggagagatggggtcgagggttgtctttgggccttgactgctttgggcctttctcactctcattcccgggatgctttgccagaatctctgctggattggccgtaaccctgtccccgagcgggctcacagggtctgaaggccacgcatgaggcaaaggtaaagttctgagccacccggtgcctccttcccaggactgcaagatggaggaaggcgggaacctaggaggcctgattaagatggtccatctactggtcttgtcaggtgcctggggcatgcaaatgtgggtgaccttcgtctcaggtagggaccctcagcttggatgtcatgggtacctggggtggggatggaaataagaggggaaccgggaagtgccctaacacccctgtggtccccataccctgcaggcttcctgcttttccgaagccttccccgacataccttcggactagtgcagagcaaactcttccccttctacttccacatctccatgggctgtgccttcatcaacctctgcatcttggcttcacagcatgcttgggctcagctcacattctgggaggccagccaggtacgtgggtttgagtgccactgccctctggagacttgttcccaggacctcagtcagcgcctatggctacaccttttccagggggggaaaaaaaaaggctaggcatggtggctcacgcctgtaatcccaacactttgggaggccgaggtgggcggatcacgaggtcaggagttcaagaccagcctgaccaacatggtgaaaccccgtctctactaaaaatacaaaaaaattagccaggcgtggtggtgtgcacctgtaattccagctactcaggaggctgaggcaggagaattgcttgaaccgaggaggcagaggttgcagtgagccgagatcatgccattgcactccagccagggcgacaaagcaagactccatctcaaaaaaaaaaaaaaaaaggaaaggaaaggagaggagaggaaaggagaggggagggaagaggaagggaggggaggggagccccttcttcctggtagatacaaagctgggctctggatacccttgag

SEQ ID NO: 2774 - DNA, 1173 bp, Homo sapiens
aggtcctgggcggacagccccaaagaatgaaagggagcacccccgtcttcttcccagggggacacggttaatcatgagaactgtggttgtcttttccatggggctcttcacctgatgagctccttgtggctgtggccggtagggcccagggggccactagccccttccgtctgtctctttgtctcaggaacccgaggtctgcaggccgcattcgacaccggcacggctcaccccatccagtgagtgttgggggagtggggggctaaacagggggacttccaggtgggcagccactgccccagaggtctcacctaggcctttatgctgcctcccgagttttctgatcccctgatatctggcttctgaccaccagagtcgcagaactgcgcccgccgtggccacctgatccccagctgtgtctcctccagggccccagccatgtgttcgtcgccccgtgtgccccgtcctcgattgaggtctgagccgacgcccttgcccctgcccctacccctgccagcgcccacccccagccagggcccctcgccttcctcccctggacctggggggccaggcgggggtggtggacgtggccggaagctgctgctgcccacgcccctgctgcgggacctgtacaccctgagtggactctatccctcccccttccaccgggacaacttcagcccttacctgtttgccagccgtgaccacctgctgtgaggcccgaccacccacccagaatctgcccagtccccacttcttccctgccacgcgtgtgtgtgcgtgtgccacgtgagtgccaaagtcccctgccccccaagccagccagacccagacattagaagatggctagaaggacatttaggagacatctgcctctctggccctctgagatatcccgatgggcacaaatggaaggtgcgcacttgcccctactattgcccttttaagggccaaagcttgaccccattggccattgcctggctaatgagaacccctggttctcagaattttaaccaaaaggagttggctccaaccaatgggagccttcccctcacttcttagaatcctcctgcaagagggcaactccagccagtgttcagcgactgaacagccaataggagcccttggtttccagaatttctagagtgggtgggcatgattccagtcaatggg

SEQ ID NO: 2775 - DNA, 1237 bp, Homo sapiens
tgggattgcgggtgtgagccagtgcgcctggctgtggatttcgtttttgttttcgtttaagatcatgctgccgggcgctgtggctcacgcctgtaatcccagcactttgggaggccgaggcgggtggatcacctgaggtcaggagttcgagaccagcgtggccaacacggtgaaaccccgtctctactaaaaaaaaatacaaaaattagccgggcgtgatggcacgcgcctgtaatcccagctactcggggggctgaggcaggagaatcgcttgaaccctggagacggagcttgcagtgagccgacatcgtgtcactgcactccagcctggcgacagagcgagactccatctcaaaaaaaaaaaaaaagatcatgctaccagactgctataaagtgctgaacaaatatgaataattttactttagtggattttgatggtggcaccctggaggggaaactttggaaactgggatcctgaattgtgccctctagcctccaaatgtatctccagacatttgtgtctttgaaaaacctgtttgtggctggtcccaaggtagtgacttatctcaattgattgttcacagttacagatcgaactccttgttctactctttccccccttctcactactgcacttgacttgtctttaagaaaggaagaaggggtctggcacagtggctcacacatgtaatcccagcactttgggaggccaaggcaggcgaatcacttgaggtcaagagttcgagaccagtcgggccaacatggcgaaaccctgtctctactaaaaatacaaaaatcagctgagcatggtggcaagtgcctgtaatcccagctcgggaggctaaggctagagaatcacctcaacctagaaggtggaggttgcagtgagccaggtccacgccacggcactctagcctgggtgacagagactttgtctcaaaaaaaaaaaaaaaagaaaagaaaagaaggccgggggcagtggctcacgcctgtaatcccagcactttgggaggccaaggcgggtagatcacgaggtcaggagatcgagaccatcctggctaacatggtgaaaccccgtctctactaaaaaatagaaaaaattagccaggcgtggtggcgggcgcctgtagtcccagctacccaggaggctgaggcaggagaatggcgtgaaccggcgaggcggagcttgcagtaagccgagatcatgccactgcactccagcctgggcgacagagcg

SEQ ID NO: 2776 - DNA, 1206 bp, Homo sapiens
taagagctagccctcagaactatcctctctaaggtttcacagtcctgcccaagatggccgtctcggctctggcaccgcccccactcctgcctctcccaacatggcgaccctgagtctccgttcccggtgcggaacgtacgaccggaagtgacggggtccagaaatttccgctttctttctgcagcaggaaccgcggctgctggacaagaggggtgcggtggatactgacctttgctccggcctcgtgtaggtgtgaacgagcgggtgggagggcacctcagtttcttacagggggcaaccggagggtgcatgtgtgggtgtggacggcggaggctgttaatccctttggtctgttggcgggaattgggtcacaattgggcacagggagcggaggttttgagatcttgagatcctcgccattgatttgagcaaagtgagactggccaggattggggagatcgctgcccctcgcccccatatcggaaacaaagtgaggcctcattgcctggaagcgatggaggaatccaattggctggaagtagccctctcccactgaccgggatccgctttcttcctgcagcgtgaagacacagcgcatctccccgctgtaggcttcctcccacagaacccgtttcgggcctcagagcgtctggtgagatgctgttgccgctgctgctgctgctacccatgtgctgggccgtggaggtcaagaggccccggggcgtctccctcaccagtgagtcctcctgttcaccctcccgccaggctggaggtgggaggggccaacattgggccttagggataggcatttacagccttttgactcagtttcccggtagtgctccgctggtggggatgggaggacagaggtggtatttggtggagaaggcgcttacctgccctgggctgagcttcctgtaccccgcagatcatcacttctacgatgagtccaagcctttcacctgcctggacggttcggccaccatcccatttgatcaggtcaacgatgactattgcgactgcaaagatggctctgacgagccaggtgagccttttctctgttcatccatcagatgtttattgaacactgctcagtgccaggccctgtctgtgtgaccaagatactacctctgctggctcccctttgagtgggcagaaacaagctcagaagtcagtggtcagtgttatggccccgggcagctggag

SEQ ID NO: 2777 - DNA, 1603 bp, Homo sapiens
aggtgtgcaccaccatgcctggctaatttttagtagagatggggtttcaccatgttggcctggatggtctcgaactcctgacctcagatgatccacctgccttggcctcccaaagtgctgggattacaggcatgagccaccacacccggccatctcctgcctttttttttttggatggagtttcactcttgttgccgaggctggaatgtggaatgcaatggcgcgatctcggctcactgcaacctccacctcctgggtgcaagcaattctcctgcctcagcctcctgagtaattgggactacaggcgccgccaccacgcctggctaatttttttgtatttttagtagagatggggtttccctgtgttaaccaggttggtctcgatctcctgacctcgtgatccgccctcctcagcctcccaaagtgctgggattacaggcttgagctaccatgtctggccatcccctgctttttaaaaaaagatttttttacttttgaaactaaataggccaggcgtcgtggctcacatctgtaatcccagcactttgggaggctgaggtgggcggatcacttgaggtcaggaggttgagaccagcctgaccaacatggtgtaaaaccccatctctactaaaaatacaaaaaaattagctgggtgtggtggtaggtgcctgtagttccagctgctcaagaggctgaagcacaagaatcacttgaacccaggaggtagaggttggagtgagccaagatcatgctactgcactctccagcctgggctacagagtgagactctcaaaaaaaaaaaataataataataagagaaaatagacaaggtctccaggctggtcaactcctggcctcaaatgatcctcccacctcagcctcccaagcagccgggactacaggcaaacatcaccatgtccagctgtccccagctttctaatctggtctttctcttgccccagaacctcaagaaggcatgaagccagcccctgcagtgccgtccacccgcccctctgggcctgcctgtggctctgttgccctcctctgtggcggcaggacctttgtggggcttcgtgccctgctctggggcccaggcggggctggtccacattcccaggccccaacagccttcaaagatgggtaaaggagcttgccctccctgggccccccaccttggtgactcgccccaccacccccagccctgtccctgccacccctcctagtggggactagtgaatgacttgacctgtgacctcaatacaataaatgtgatcccccacccaaacttgtctgtgtctgcctcgctttgctggggtgtggaccggggtgtgggcaggggttgagcgcaggggacgcagctttctgcagatcccacccgggcctcccccaccatctggggatcactcctgaagataccaggtggatggaccctggaccatttctgtcttgagcatccatccgggcccgtgtcccaccttccctgggtctcatctgtgctctgtggaggccaagggttccctcccggggccaaagcccctgctgcagacagacccaggcccagagaaggacgggggcctgggcgctactacacaggctgctcctg

SEQ ID NO: 2778 - DNA, 1151 bp, Homo sapiens
ccacgagaaatcctgtgatgtgaaaatgtgagtggggaacagggcaagggatccagcctccccactgcctcttccccgctgttctccatcctgccccttgcctcccttggtgaaggcgtcatcacccacaggcccaggacgcattgctcaccagtcccttctcttggtctgtttcagggaccgtgcccgcaacaccggagtcatctcttgtaccgtgtgcctagaggaattccagacgcccataacgtgtatccttggaaacctgggctttttccagagggtggggagggggctggagtccggaccctgctcatctggcccactgtgtgccctggtgcagggccaaagccgtccagaggaacaggtgccacctagtgatttctgtggggtgagaagatgcagggcagggttccaatgccaatgatcgcccttgacctaagtggcccagatctgtcagaacccgtggatgtgtacagtgattggatagacgcctgcgaggcggccaatcagtagcgacacagaggacccgccccctgagcagccccgcgtactgtggatccagctgttcggttctggtccagagacattccaggggtccagggtgtgggtcctgggctgtcacagccgtgtgtgtgtgtgtgtgtgtgtgtgtgtgtgtgtgtgtgtgtgtgtgtgtagtgggtgtgcgtgtgggtgtgggtgtgagtgagtgtgggtgtgtgtggctgcacgtgtcactggggtggccgtgagtgtgtgctcacaggtacgcggtggtgtcgggttcctgggcctgaggggcctgaactgatctcacttggctccgaaagcctttgctgtgttccctgcagcccctggccccccagccttggggctctggctccccccggcggaattgggggactgtttcctgacatcctggacaagggaagcccactagaggctggaacaggacctctccagcctcctcaccagcaccgtgcccatctcaactggacttcccgctctccttctccaccttctagtgcccgtggccggggattcaaagccgccgttccccaggtccctgggctgggccctgacagggagccgcccccctccccatggtaaccaggaagcccgtttcatgttcagttgcttttgtagaggaa

SEQ ID NO: 2779 - DNA, 1204 bp, Homo sapiens
ccccacattatgcgggggccacgggagggatatggggggatcccgcctcggatatggggtttgttagaaacaagtgcccggtgccgcaaagaaaaccagcatctaggcagaaaattcctcagcaaagcaaatttatttctacacaagggtgcagcttgcgccagtcacaagagcacagcgagcggggtagggcaggggtttttctccttaacgcagtttctagcacttctgtgtcctttcctcattggctagggttggacctcacaatctaaactaactcgataggctaaggtttaaaattaaatagggtctggccaggcgcggtgggtcacgcctgtaaccccagcactttgggaggccgaggcaggcggatcgcgaggtcaggagatcgagaccatccctggctaacacggtgaaaccccgtctccactaaaaatacaaaaaaattaactgggtatggtggcgggcgcctgtagttccagctactcgggaggctgaggcaggagaatggcgtgaacccgggaggtggagcttgcagtgagccgagatcgcaccactgtactccagcctgggcaacagagcgagacaactgggcaactccgtcacacacacacacacacacacacacacacacacacacacacaaattaaatagggtctatgagacgggaaggaacagggactgtccgttactaggcgggaaggcgtatctggacttgtctgggcgcggcaaaagcgggaaggttgtttacagaacaggtagctaggagacaaggaagtcggtctcaagaaacaaagaacagcttactaaagcttttagaaaagtaatttatcatctctgacaggttcgtgtgggaggagtagcggtctttggggtccccagtgcccacttttttctgttaaaaattaaactgaggtacgttaacaattaaagagtttagggccgggcgcggtggctcacgcctgtaatcccagcactttgggaggccgaggcgggcggatcaggaagtcaggagttcaagaccagcctggccaacatggtgaaaccccatctctactaaaaatacaaaaattagctgggcatggtggcgcgtgcctgtaatcccagctacttgagaggctgaggcagaagaattgcttgaacccaggaggcggcggttgcagtcagccaagacggcgtcactccagcctggcaacagagcca

SEQ ID NO: 2780 - DNA, 1140 bp, Homo sapiens
ttgtagagatggggtttcaccatgttggccaggctggtctcgaagtcctgacctcaggtgatctgcctgactcagcctcccaaagcgctgggattacaggcgtgagccaccatacctggcctgttattagttttttaagttagacactgagattattgattacagatcattctttggtggtatatgtgttcaatcgtctacatttcagccaggcactccttttgctgcattctacgtgttttgataagttctatttttatttaattcaaaataatttttaatatcttgagacttttctcatccatgcattatttagaagttcaggatttaatatccaaatatttgtgggttttcaagctatctttctgttatcaattctggatctgagaacatgttttgtattctctagtcttttaaatttgctaggaagtattttatttaccagaatgtgagatatcttggtgaatattccatgtgaacttgagaagaatgtatattctgctgttactgaatgaattattctggatttcaattaagtccagttgttttgatggtgctgttcaatttaattatgtccttcctgatttctgcctgctggatctctaaattaatgctgggggttattgaaatatacagctgtaccagtgaattcatgtatttcttcctgcagttgtattagttttcccctcatatattttgccactctgtggttatgtacatacacagtaaggattgccttgtcttcttggtgaattaacccctttgtcagtatgtaatgcccttctatcactgataatttcatgctatgaagtcagctttttctgaaattaataaggctgtgccagcttttaaaaaattagtgttggccgggcatggtggttcatgcttgtaatcccagcacttagggaggccaaggcgggcacatcacgaggtcgggagtttgccaccagcctaaccaacgtggtgaaaccctatctctactaaaaatataaaaattgaccaggcatggtgtctcacgcttgtaatctcagcactttgggaggcaggcggatcgcctgaggtcaggagtttgagaccagcctggccaacatggtgaaaccctgtctctactaaaaatacaaaaattagccaggcgtggtg

SEQ ID NO: 2781 - DNA, 2218 bp, Homo sapiens
gattactggggagtgcgctgcatccggaagtcgctgtgccctggttgaggggggttagggaggagtgagtgggactcaaatccagatgccttccccgtccgtccgtccgtccgtccatccgtccacttgccctcctggcaggtgggtggggccaccatgctcatcctacaaacggggaggtgggggggacttctggtgggcaagggcccctgggctctaatagggtcatctctggcagcccacttgggccagctacgtgggagggaggaattacacagctgaccgaatccggcttcggatgaggtgagggaggagcaggtcaggaggggggccctcgtagggacgcgtacactcacacggacacacatggccacacgcatgtgcgggtgccataaccggcgaggctgggccagccgctccaccatttccccgactgcatggagacagtagaattagtgaacccctgagttaacccgtaaggccttccgtgtaacctgcatctagagtttaagaagcttctgctgttttgccggaattggcggtgactggggagggctgggtgggtggggggcctcaggcgggatctcggggcggggggaggaggatggtgaccttgggagtcgccctgtcagcacgcacatgcttgggacccactccacacactccctgccagctttgttgcagcctcagctggtggtgtctccgtccttatcctagcctagctcgcagggtgagaaccactggagtggctggggctggccagaggtcaccgtttctccttcctgtgtgctccagtggcttttgaagacactgggttgggacctttttcctgaagagagctgggtgtagccagagctactggcacctaccccgagcatctctctctgtaagcagcttcaggggcagtccgtttctctgtgcttctgaaacccccttctcacgtttcaggccccagttttaactcaaggcctggggcaggggcgtttaattgatgatgacagaggacacaggtttttgccagcaaaaaggaaaaccaaggcttggtggaagggaaaggtggtgtgtcccctgttccctattccatctccctgggacttcctgctcatcatagtacccagtgagcccagagatcctactagactgggtcagcaattctagagaaccttccggaatagtctgggaacatggtcaaggtggaaggggctcccctagagagggtgggggtgtagttacttcccagttggccagaaaactgggccttgcagacccccttagcattttttccctttttttccttccctgctttctacttctttggggagccccttgtgttttggagtctgactggagtctcgcatcctggggcctgctccatccatccctcctgggcgccagaccctccatccaagccctgtgtctttccatagtcagggtcaggccctgcatctattccaaggggcactcagtacacattccataaattagctgggtgtccctgcacgcccaccccatgaaactcgagcaggtctctggaagccatttgttaaaaaaaaaaaaaaaagttttaaaaataccttttaattttctggtaattccagttctttgaagcatcctctgctgggtcttggggtgtgtggatggattggctgtctgatgggattggtaacccctcgctactcaagatggggggatacaaacaccttcagggaaggggagcctggttcttctcgttttcctttttttttttttttttaaaaaaaaactatttaattttttaatttatttttggttgttttttgcacaatgaagtttcagcttctcaaccttctcccctacccagggctgtggacccagactggccttgagccacagtccctctttccctcctcaccctcttccccctgcgggctcccgggtctgtccatttgttactgtgctgtgctggggattggcgccgaggtggcgtgagattccacttgtgtagaactttgttgagtaaagatcagtttcttgtgaactccttagtctgtggcttcctgtgtccttggctttggtagtgaagaaatgtcgggggcaccggggatacttgagagtgggaagatagacgaatgtgaaagatggaagattaaatttgtaacatatatgaaatgtgcagctcattctctgggacttcagctcactaagggtgagccattagtgtcacagcccaggttcaaga

SEQ ID NO: 2782 - DNA, 1208 bp, Homo sapiens
ctacaggcgtgtcccactatgcctggctaattttattgtatttttagtaaagacagggttttgccatgttggccaggctggtctcaaactcctgacctcaagtgatctgcctgcctcggcctgccaaagtgctggagattacaggcatgaaccactgcgcctggccctaacactgtgccactttatatcaaggacttgcacatccgtggatttttatatctgcagggacctggaaagaatcccccacggacactgagggatgaccgttggggcactgccatctcccatttgcagatgtgggctggaggctagggaggttaaggaacagctaggagctctagaactggaaagtggcagaggctggacatgcaccagggactgtgccccctgagctgtcctggttagaaggaggggagcctagccacactgatcttacttgaatccccaggactcgatgcctgaggtccggcagagctcctttgccctcctgggagacctcaccaaagcctgcttcatccatgtcaagccctgtatcggtacgacactcgccttgtccctaacccatgaccccagccccggcctcaagtgatggagagcaatacccggggatgactgtgaccacattgggatgtattcgtactgtctgatggggcctgctggactaggtcctgcagcttaccctggctggccctccttctcagcacccctgtttctccccaccagccgagttcatgcccattctgggcaccaacctgaacccagagttcatctccgtctgcaacaacgccacctgggccattggtgaaatctgcatgcagatgggtgagtgccctgcaagtggcaacacgcgccccccattagcctgttctcaacctgggggcgggagcctagctctgactgacagcttccttcaaggcaagtctcttgggggtcgtcaggggtggagccaagcagaaaggtcatttgtgattggcttctctaaagaggagggataggagggctgttctgattggaccgttttgtgtagttggctaaaagactcattcggattggttgggtgactttggctttttttttcctttgacttgggcagcgtgttgtcaccttagcgactccagagaagcctctgttgtttggagggtgtgggtctgtccctggttggccagggattctgggtggggattagccggagaaggtcttttgtttcc

SEQ ID NO: 2783 - DNA, 1170 bp, Homo sapiens
ggcttgccgcccacagggttagaccctgcttcttaagaaaaaaaaaaaaaaacctttctctggaggcaggagtggtatcatttatatcctaatcatagcggcagagactagattccgataattccccagagggaaatggatcaatttgcacctagcagtaccatcatgctctgcagggtctgctctgtggctgattggggggctggtcactctgttggcacctgtttgcctcctccccaagctgtgcctccccccaacttttgccacggcccctgcatccccataaacagtccctctctgtgcaggttgatccccatcttggtgaatgggatgaagtactcggaaattgacatcatcctgctcaaggtcaggcagggcccacccagcatgggtgggcatgggcgtgggtgtcgcggctgtggtccccaaagtacttaacagtctgcctgtcccccagggggatgtggaggaggatgaggctgtccccgacagtgagcaggacatcaagccacgcttccacaagtcacgcacggtcacactgccccacgaggctgagcggcctgatggctccgaggacgcggaggatgacgatgatgatgatgctctgtccgactggaatttgagtgtgtgcccctgcctgggggtggtggtggggtggcaagccctggactccctcttgggaggtgactagaagctgaggcagaagctgattagaagctgatcgtggccgggcgcagtggcttacgcctgtaatcccagcactttggaaggctgaggcgggcggatcacgaggtcaggagatcaacaccatcctggctaacacagtgaaaccccgtctctactaaaaatacaaaaaattagtcgggcgtggtgtcgggcgcctgtagtcccagctactcgggaggctgaggcaggaaaacggcatgaacccaggaggcggagcttgcagtgagccgagatagcgccactgcactccggcctgggcggaaaaagtgagactccgtctcaaaaaaacaaaacaaaaaaaaagaagctgatcgtgaagattctgagcatgatctctgatcctgggagtgcagtcaaggagggtcggccacctgcctgaggggccgccctgagcctccccattgttcccccttccccagggaagtgctcagcggctgcactgga

SEQ ID NO: 2784 - DNA, 1242 bp, Homo sapiens
cctgcccagcctcaggcagcgtcctttcccggccgccccaggcattctcatcaccaccatcgcttccaagggtgagctgcagatgtggcccgagctgctgccccagctctgcaacctgcttaactcggaggattacaacacttgtgaggtaggcaagaagccatggatggccagagcgagtactggggggctgggaccaccacccaccacccacgtttgtctctctgcccctctgcactcagggagcctttggagccctgcagaagatctgtgaagactcatcagagcttctggacagtgacgccctcaacaggcccctcaacatcatgatccccaagttcctgcagttcttcaagcactgcagtcccaagatccggtgggtgcagctccctgggggcttccagggagcctggagtgggcagggtcagggtgacccacgtgtctgctccccgccaggtcccacgccatcgcctgcgtgaaccagttcatcatggaccgggcccaggcgctgatggacaatattgacaccttcatcgaggtgggccgctgggctgggggtgggcagggcgaggactgagggcccctacaactgaccctgttcctccctgcagcacctatttgccctggctgtggatgatgaccccgaggtgcggaagaatgtgtgccgtgccctggtgatgcttctggaagtgcggattgacaggctcatcccccacatgcacagcatcatccaggtgtgcatggtcaaggccagcccaggcgggcaggcagggggccggtggcaggggtcagggagccacccccagccaggccaggcctcagcttctcccccctaccacagtacatgctgcagaggacccaggaccatgatgagaacgttgcccttgaggcctgtgagttctggctgacgctggccgagcagcccatctgcaaggaagtcctggcctcccatctggtccagtgagtgctgctgctgcccactgtcctaccccagcttcgaccccttgctatgcctctgccttcccttctggtcacctgctgtgcttctctcagtccacatccttgtcagtttacattcagtatatatttatgtgtaagtggtaagaatgccactttttgaagacttcaaaattaggtaactgataggtggaaagaaatgaaaaatcaatggccacatgtggtggctgacacctgtaatcctagcactttgggaggccgaggcgggcagatcacaaggtcaga

SEQ ID NO: 2785 - DNA, 1229 bp, Homo sapiens
agacggaggatgaggtgagccagcttggtgcagggggtccacccacattgcctttcccttccagcttttgcgcccagccttctccctccctgtctggtatccaggccttttatgagtgtgcctggcagggtaggagggctgtcaatgggtccccagataacttgactttataatcttcagctcaaacccagagtcttctgggtgacactgggaatgggtcacctgtctcagggcagtcctgaccctggttcctggcacccccgtcctaacccgtatcccctttccacaggtattaacaagtaaaggtgacgcgtgggccaagtacatggcagaagtgaaaaagtacaaagctcaccagtgcggtgacgatgataaaactcggcccctggtgaaatgacgcccctcccccacctgcccatggcctgggactctctgcgatgtacataactatttaatgcagcggcagcggcgacagccttccctgagaggacttaaaagcagaaggaaaccgagatgcttcccgcagccgtggacgattctccaggactctttttttaccttgagcacttgcctcgtgagacttcatagaacagtggtttactgtcccccccttctcacctcctcattctctctggctctttctgtcttcctcttctcaccctcctccctccccttagccatcacttctgggaagtaaagaacttgacttagtgccggagctgtgtgcttggtttgtcttctttgcgctgtcggacctaagccttccccctgttgctggcattgtacctgtcaaagcctgggcctgacccagtaaggagcgggatatggaagggttaggaaggacaggggcacatcccctcctgtaggcctggactttccccaagacctatctcccctcactgctgcatctctaccgtgccaccttaggctcactttctcttcacagttccattttggcttggccaaagctgttgcattgtgcattcagcagacacttaggagcatctattatgtgccagggctctgcaaggctctgggacaacagctgggagcacgcagaccacaccctccctgcccttacagaaggagacagacacaaacaaaaaggggaagcccttttgcagctagggaggaggcgggtatgtcttttaggtgacatttgattagagtcctgagggaggtgaggcagagtcccaggcagagggaacagccaggttggagacagcttg

SEQ ID NO: 2786 - DNA, 1199 bp, Homo sapiens
cagtaagtgttgaatgaatcagtgagtgaatacagggagatacagcatggtcacataggaggatttcaggtagtgataaatgtcaggatggaaataaagcagagtgacttggtaggtagcatggggatcctcatcagacgggagatcaaggaagtcctctaggaggagatggcagtggcgtccccttccttcccctggccacaggactctgaagacctactgggtgagcaaaggcagtgcctttagtaccagcatctccaagcaagagacagagctgagcccagagatgatctccaggtagcaggcaaccccagggtcagggcaggtgggagctggggcagggggcaggggcgggcagcccttaccaggcccttgcatcctcccccagtggctcttggcgggaccggcccttcaagccctacaacttcttggcccacggtgtcctccccgacagcggccaccttcacccgctgctcaaggtccgctcccagttccgacagatcttcctggagatggggtgagcacagggctgggggcggtgcctggtgcttctgctgggtacaggcagggcagtcaggctgtgtctcccaccaggttcaccgagatgccgactgataacttcattgagagctccttctggaactttgacgccctcttccagccccagcagcacccagcccgtgaccagcacgacaccttcttccttcgaggtgggtcagcccctagggcctccctgagacatgagagacaccaggccacggcggagcctttacaggatgggcatcccatttgatcaaattaggtctagaactgggcatggtggtgtgcacctgtagtccggctatttgggaggccaaggcaggaggattgcatgagcccaggagttcaaatccagctcaggcaacatagggaagaatctacctctaaaaaaattaattgagttaaattaaagtccatccttgttggatgtgtcaagctctgttctcattatgccacctgcagtcttttttttttttttttttttttttgagacagggtctcactctgtcgcccaagctggagtgtgcagtggcatgatcttggctcgctgcaaactttgcctcccaggttcaagcgattctcctgcctcagcctcccgagtagctgggattacaggtgcataccaccatgcccagctaatttttgtatttttagtagag

SEQ ID NO: 2787 - DNA, 1137 bp, Homo sapiens
aagttgtatagctgggatgtgaacctagctttaagggctgtgctttcaacctgggacccagcgctgcagaaagggggtgcctggctctgagcctcacccctgcctggacaccctccccacatttccctctaggtcatcgaggctgaacttcggtccaccaagcactgggagcttactgcggagggcgaggagattgcccgggagggcagccatgaggcccgtgtgtttcgaagcattcccccagagggcctggcccagagcgagcttatggtaggagctgcggggtgaatggggagtgagtgatgggatgaaggtggccctcgtgccccactcactgcagcctctcttttccagcgactgcccagtggcaaagtgggcttcagcaaggccatgtccaacaagtggattcgggtggacaagagtgcggctgacgggccccgggtgttccgagtggtgcgttcctgcgggctggtcagggggcaggtggacgggcacatgggcccctggccctcatacccctcacactccttatcctggcaggtggacagcatggaggatgaggtgcagcggcggctccagctggtccgggggggacaggctgagaagctgggggagaaggagaggagcgagctgaggaagaggaagctgttggctgaagtgtgagtgggtgccccctgcaggctcaggcccccaccacctgcgaagcatggtggaggcatggtgggagggagacatcttgcccacaccaagcacaggtgtggccagtttcctcccagctcgcttaatgccatagttgtcaagcctacgtgccttggggtctttgcccatgaggacccttctgctgagaactgttttccctctgatcttcaagataggctcctcatcaagtctctctcctgtgtccccttaaagaggccaccctgacagccctcctctccccttgagttccatgaagcccatcgcccctagtcttcatctttggtgcttgttcatttctttcactgtccttagtgtggtccaaagtttaatgaacacacaccagacaggcctctggaacctagatgggctaggggccgtcctctcacaggacaaatgtcccctttgagcagacacagagtggcagagagaagagactag

SEQ ID NO: 2788 - DNA, 1186 bp, Homo sapiens
tgtgtgctctgcctgcaggcagcagagaaacaaatgaaggacaaacaggacgaggagcagaggcttaaggaggaggaagaagacaagaaacgcaaagaggaggaggaggcagaggacaaggaggatgatgaggacaaagatgaggatgaggaggatgaggaggacaaggaggaagatgaggaggaagatgtccccggccaggccaaggacgagctgtagagaggcctgcctccagggctggactgaggcctgagcgctcctgccgcagagctggccgcgccaaataatgtctctgtgagactcgagaactttcatttttttccaggctggttcggatttggggtggattttggttttgttcccctcctccactctcccccaccccctccccgcccttttttttttttttttttaaactggtattttatctttgattctccttcagccctcacccctggttctcatctttcttgatcaacatcttttcttgcctctgtccccttctctcatctcttagctcccctccaacctggggggcagtggtgtggagaagccacaggcctgagatttcatctgctctccttcctggagcccagaggagggcagcagaagggggtggtgtctccaaccccccagcactgaggaagaacggggctcttctcatttcacccctccctttctcccctgcccccaggactgggccacttctgggtggggcagtgggtcccagattggctcacactgagaatgtaagaactacaaacaaaatttctattaaattaaattttgtgtctccctcctgtgtctccttctggggaaagacagacttaaggaaacccagcagtggtctttttggggggggggggggtttccagtatatctcctttttcagctattgctagagaggttgctgagtgttccacaagattccagggacccttatttaccccataaccctcaaaaccaacgggggaatggctgttgctgctgtaaatactccacatactaacttactgaatccttgaacctaactggtaagttttggttctgcttatttatttatttttaagatagactctcgctctgttgtccaggctggcgtacagtggctcaatctggttcaccctgccccttaaactggcctttttcatgcttctattcctttggggtcctgtggctcagccca

SEQ ID NO: 2789 - DNA, 1193 bp, Homo sapiens
tgcgtccacgggcgtctgtgcagacggacactgtgccggggcgagctgacaggagttcacggctgcgatagaacatggagatgtcatgggcgcgacagagcctggcggggataccagcagcgtgtgtgtgtggacggcaacgttgtctgtgcgcgtgtgtgtgagtgagtgagggagagagagagagaataggtgtgtgtagaggctcccggtgcctctgtctggctgctgaggctgagatgggagcaagtggctggcgaagctggtggtggcttcaaaccacactttcgtagaacaatcgcaagagaaaattgttggggggagggaggaggaggagaaggcggttttccttgtgcccccccttctaacgctgcttttctccttctctctttccccctcatcccgtcttcccctcctcccgtcctccctcgccccgcatgctcccggcttgccgcctgcaggatgagttccacccgttcatcgaggcactgctgcctcacgtccgcgctttctcctacacctggttcaacctgcaggcgcggaagcgcaagtacttcaagaagcatgaaaagcggatgtcgaaggacgaggagcgggcggtgaaggacgagctgctgggcgagaagcccgagatcaagcagaagtgggcatcccggctgctggccaagctgcgcaaggacatccggcccgagttccgcgaggacttcgtgctgaccatcacgggcaagaagcccccctgctgcgtgctctccaaccccgaccagaagggcaagatccggcggattgactgcctgcgccaggctgacaaggtgtggcggctggacctggtcatggtgattttgtttaaggggatccccctggaaagtactgatggggagcggctctacaagtcgcctcagtgctcgaaccccggcctgtgcgtccagccacatcacattggagtcacaatcaaagaactggatctttatctggcttactttgtccacactccgggtaggtcgttctcaaccatttttccctctcattttattttccttgctggcatttgttctgtttattgttcctctaatttccaagcgataactcgccatgggcctaactggtgtatgcccgtcctgcggggcctgcaacacggttctatgggcccttttcctttttcctgtcttctgtctcccccgacctgttctattctt

SEQ ID NO: 2790 - DNA, 1318 bp, Homo sapiens
agggctcctggtggggtgggtggatagtggaggggaggctgacacccaccccccacccccaggccctgagaatcgtcctgcacagcctggacctccgcgccaactgctaccagcgcttcgtggtgccgctgctcagcatcagcgctgacttctacgtgcgtgtttttgtccgtgtcttcaccggccaggccaaggtcaaggcctcagccaggtcagcccgggggcagagagcggtggtggattgagagaggagacaggaccttgccctgggggatctggggcttcttaagggacagagccagtctaagggaggagttggggtgtcgtggtcacgctgggaactcgtggccactggtaccccccacagcaagcaggcgctggtgttccagtgtgtgggctgcggggccttccaccttcagcgtctcggcaaagcgtcaggagtccccagcggccggtgagcagggaggaaggagaagaaggggagtcccagggttttcctccctccccaccaaccacccctctctgtttagggccaagttctctgcagcctgtggtccccctgtgacccccgagtgtgaacactgtgggcaacgacaccaggtagggctaggccaggggaggcaaaggagcaagagggtcttgaaggtcatagtccctgctcacctgtccccggtgcgcccccagcttggtggccccatgtgggcagagcccatccatgacctggattttgtgggccgtgtcctggaggctgtgagcgctaaccccggccgcttccacacctcggagcggatccgaggggtcctgagcgtcatcactgaggtgagagccgggctgtgacggggaagggggctccacctgtgcccgtccatctccactcatgcccatcctgtcccccatcgcaggagctcccggacgtgcctctgtactacaccctggaccagctgagcagcaccatccactgcaacacaccaagcctcctgcagttgcggtaagagcccctggggtcgggaggagcctgtcccagaccacagggtggcctggggcaagtccagggattctcatgcatagaacttgcgagggggtggggagaacccggtgcactgtctcattcctgtaatcccagtaccttgggaggctgaggcaggaagatcacttgaggccaacctgggcaacgtagtaagaccctatctctaacaaataaataaataaatatatatgtacacacacatacatatacacacacatacatacgtatgtatacacacacacacacacacacacacccattagcctggcatggtgatacatgcctatagtc

SEQ ID NO: 2791 - DNA, 1159 bp, Homo sapiens
gggaggagaggagagcggcgcggccggaggggggcggggaggggccgggcctgcaggtaccgcctgggcgctggaggaggtgggtgggtcaagttacaggcctgggggcggctgaggagaagcccaggaagtggggcacggcgggtgtgggcggagttacttcgtgtgggggcggataggagatcccagagatgttttccgggggtcacatgaggtcaggactcagatgtggggagggggaggctagatgtgggggcgatcaggtaaggtgagggactgctgtaggagttttgggagtcgagagagcagagccttttgggctaggctaggggggatgtgggggcaggtcaggaaaagctggtgtgaccagaaggtatatactaagatgcgccccccaccgcccccaactcaagtgttaaggggttccgtctttctcacacctcatccctgaagcctctagagtcctgaccctaccccttgggcaagcctctgccaactgttcaaaggcactggccagtgggtgtttgtgtgggcagctggagacagtctggaacacctagcttaggcatcttgtttatcacaaggtggcccttgcccacccccaccttatatatctacagggaggcagcccagcagacgttacctgggtattttaggatcctgcattctttctctaccttttgtggccagaagctggtggttcaagcctagtggatgggacctcacagcaaccatcgtatatattagtaccatggcctcccaggcaccaactccttgagcctgagttctgtgtgccatctccctgggggtgaagaattagagggaatgagcatgtaaaactctgttgatggtggtttggaggctcccgacggggtgaaggcagggcacagagaagagttaaggggatcaaatcaggcactcacaccctggcccagggatctacctctgggacactcgtcctgggccaggccctgtgccgagctcgctggtcggatgagctcattgatggctcaccaccaccagttcaacttaggccttctctggggtccagacgaggaagctgaggctcggggtggtgtggcttgtctcagatcacatgagcagacagtggctgaactgggattgtctgaccctcagcccaaacccatagtcactcaag

SEQ ID NO: 2792 - DNA, 1098 bp, Homo sapiens
tcaccaggcccaccaggggagggggctggcctgggggtcttgggaaggcccctccccaggccctaggccacctcgcggaagccttcagcctccgcccctcactgcagccccttgggacttgaggggggccccaggggttctcaggacccctcccaccacctcccagtgcttccacgtctccaaaagcgccttcctgtcaccctcgtctatccctgcgcctgggggctggggtaggcgaggccgtggggactacccattttatagctggggaaacaggctccgagaaattgcacaaccgacctcaggtggccggcagtggcgtgcctggtgccctttctcctcttccgcctctgttgctccctttggtcctctggggcctcagagaggcaggtcctaaaggagggggggtctcctgggggcagaccgagggtctcggaggatagaatgagaggtttccagggctggcagagtgtgtgcgtgtgtgtgtgcagaagttttgctttcaaacaaatgaagatacaagaggcagtaggacctgggttggaacccaggggagcagactggggggctgttgcccctccctccatctccccacacccaccccaccccacagcagggctcctggcccccacccccctgtacataatttttaaaacctttttttagcgaatgaaatattgaagtataagattccttttatttttcaaaccaatggggctgtgtctattgtccccctcggtccccaggggtggggggccttggaaggcagggcggtgttggggggctggggggcaggctgaatgtgtgtgtgtgggtgtgtatgtgtggagtgtgtgtgtgtgtttccatggtaggactccagtcccagctgctgcctaggctcctgtgggtcctgtgggtccccctcccctgttcaccttccccaacagggctatagtttaagggtgtcccaggccttggctggttggctgggcccagctcctgggggctgggcagggcagggcagggccgggtccacttccattgttagcagttgtttgcagaattttctcttttaccattcctctctttttgttctcgcccagagtgggtggtttt

SEQ ID NO: 2793 - DNA, 1181 bp, Homo sapiens
acgctggactggtcccgagcaagaaagcccgtctggaagaaaaggaagaagaggagggagcgtcatccgaagtcgccgatcgcctgcagccccctccggcgcaagcggagggcgcctttcccaacctggcccgcgtcctgcagaggcgcttctccggcctcctgaactgcagccccgcggcccctccgacggcgccgcccgcgtgcgaggcaaagcccgcttgccgcccggcggacagcatgctcaacgtgctcgtgcgggccgtggtggccttctgaggaccccgagcggcgctgccggagcccagagcgcgcgtcgaaccgtcggcccgagggcgcagacctgaggcgaggccacccccctccatcctgggggaagcgcccgcgaaaaccgtggagagaagccgccgcccgggctgctgagaggcccggagagggactctgtccccggggagccatcgccttcagtgtgcagggacggcaccgaggagtctgagccgggggcgcgggcgccttccgcagagacctgcgcccacaggtgctgtcttagtggactgggacgtgaacctttcgctctccttctggactgggagaagggaggcttgggtgttgtgttttttgttttgtttgtttgtttgtttttaaagatctcctcagggtcggacttcattttgtactgtgggctgtgctggccctttcaaggtttttcaagagttggttttgcgtttccaacctcggagaattccaggcactccccttccccctccgctgacatacttgtataagcggtcatcgttgcgtcatggggcaggcgtggggagcttcctgtcgccttgcgtgggtgtggggcctgggaggaggtcctggggcgtgcacccgccctgggcagtggggaggagagtggcctgagttacttcacccccgcgtgctgctggttaatgtcccgcgtctctgcaccttcgggtgggagcggggactgatctactttcacattctcaagtttttctcatctgcattagaggtgcccagtaggttcccaggttccagcgtgcccctccctcagacacacggacacaatcagccgagaagttcctggtctgaatcacgagaatgtggaggggtggggggtgtcagtggaaaggcataaggctgagctgagaccagttgctggtgaaactgggc

SEQ ID NO: 2794 - DNA, 1124 bp, Homo sapiens
aggctgcccagattcaaatcctgactccgccacttttcccactgtatgatcttgggcaagtcacttcacctctctgtgccttggtttcctcatttataaaatgtggataacaggccgggcgcagtggctcacacctgtaatcccagcactttgggaggccgaggcaggtggatcacaagatcaggagattgagaccatcctggctaacatggtgaaaccccatctctactaaaaatacaaaaaattagccgggtgtggtggtgggcacctgcagtcccagctacttgggaggctgaggcaggagaatggcgtgaaactgggaggcagagcttgcagtgagccgagatagcgccactgcactccagcctgggcaacagagcgagactccgtctcaaaaataaatataattaattaattatttaattaaaaaaataaaaaataaatgtggataatactagtacctccctcttaaggtcagggctggagctagggtgacatctccagggcagaattttaagaggacaccaaaaaagctcagcaaccaagataaaaaatattttaaagcaatattttgttttgggttttttttttttgagatcaagtatcactcgttacccaggctggaatgtagaggcgagatctcagctcactgaaacctgtgcctccccggttcaagcgattctcctgccacagcctcctgagtagctgggattacaggcatgcgccaccatgcccagctaatttttctatttttagtagagacatgatttcaccatgttggccaggctggtctcgaactcctgactcaaatgatccccctgcctcagcctcccaaagtgctgggactacaggcatgagccactgtgcctgaccttacagcagtattttttaaaaatcaaaattaatgcaaaaatccatgatgaggccaggcttggtggctcatgcctgtaattccagcactttgggaggatcccttgagcccaggtgtttgagaccagtttgggtaacataggaagagcttgtctctacaaacaaaaatttaaaaacaatgagctgggcatggaactcacacctctagccccagctactcaggctgaagtgggaggatggcttgagcccaggag

SEQ ID NO: 2795 - DNA, 1210 bp, Homo sapiens
agcctcccaagtagctaggactacagaggcccgggatgtaatcccaacttttttttttttttttttgagatggagttttgctctttttacccaggctggagtgcagtggtgtgatctcagctccctgcaacctccacctcccgggttcgagccattctcctgcctcagcctcctgaatagctgggattacaggcacccacaatcatgcctggctttttttttttttttttggtattttcagtagagacagggcttcaccctgttggccaggctgttcttaaactcctgacctcaggtgatccgcctgcctcagccttccagagtgctgggattacaggcgtgagtcatcacgcctgaccctctaatcccaacttctaacttaccagcggtgtgaccctgtgcaagccgtgttatgtctctgtgcctcagtttgcttgtctgtaaggtgcaaaggctgcgagttgcaacttccgagggtcgaggtgaggggttagcagatcatcaggtggcacacagtgggcactgcggaagtgtgtgttgctgccactgttggcaggaatattgagcctgccccgtgcctcctcaggggccctgtgggtttgcgtcgtcctgagcccccactgcaaaccagaggaaagggcaggctggctccagctactcagcaggtgggacaagctcgacgtctgcccactggaagagggcaactactccttcgacggccccagcctgcagcccaccatggcccccgccccaggtaggagagaggggtctttaccatgccccccaaaaaccatcaccactaactgtggccccacttaccatcatggtcctcttcccaggagagagagggagtggggcagagcaaagcagaccccagtccttggctgttcttccaggactaatcccaacttgtctagccaggaaagagcgagtgccaagggcaggagcaatggcagcccaagtgggcaagtgaagtaaaatgcttaaaacacctgcagtcctgggctggtctggcttggccttctgctagctatgggaccaaagagaggatgagagaggaaaaaaggaggaatcaaacagaaggggaaagtgagatattgaggagagagaaacaagtgaagagaggcagagatggatggagagagggagaggcagacagaggagcagataggaaggaagacagagagagattgaggagagagggaaaaaa

SEQ ID NO: 2796 - DNA, 1399 bp, Homo sapiens
gtggaccgtgatggatgtcgtcgaatattttactgaggctggattcccggagcaggcgacagctttccaagagcaggtgagtttccagcccaggactacacactgacagacacagagggcctccctgggatgtgccctgatcccggctctctctgttcctgtcccacccaggaaattgatggcaaatctttgctgctcatgcagcgcacagatgtgctcaccggcctgtccatccgcctcgggccagccctgaaaatctacgagcaccacatcaaggtgcttcagcaaggccactttgaggatgatgaccccgatggcttcttaggctgagcgcccagcctcacccctgccccagcccattccggcccccatctcacccaagatcccccagagtccaggagctggacggggacaccctcagccctcataacagattccaaggagagggcaccctcttgtccttatctttgccccttgtgtctgtctcacacacatctgctcctcagcacgtcggtgtggggaggggattgctccttaaaccccaggtggctgaccctccccacccagtccaggacattttaggaaaaaaaaaatgaaatgtggggggcttctcatctccccaagatcctcttccgttcagccagatgtttcctgtataaatgtttggatctgcctgtttattttggtgggtggtctttcctccctcccctaccacccatgccccccttctcagtctgcccctggcctccagcccctaggggactagctgggttggggttcctcgggccttttctctcctccctcttttctttctgttgattgtcgctccagctggctgtattgctttttaatattgcaccgaaggttttttaaataaaattttaaaaaaagaaaaagggaaaaaaaagccacggagtccattttatgaatggggtggggagagggcactaaagagcctcctaagagagcctcaggttaggacagaattgtttggggagggagaaaaacagaaacaatgaattatagctgcctcacagccatgtataacaataattgctccaggaaggtgggaatatttgcttttttttcttctgtaatctcaccgtgtccgtgtccagaacagagctaggcacacagcaggtgctcaatttttgtttttcgtttagacaggtttcattctttcacccaggctggagtgcagtggtgctatcatagctcattgtagcctcaaactcctgggctgaagtgatcctcccacctcagcctcctgagtagctgggactacaggtgcactctgccatgccgggctaacttttaaaaatttttgtccgggcacagtggctcatgcctgtaatcccagcactttgggaggccgaggtgggtggatcatgaggtcagg

SEQ ID NO: 2797 - DNA, 1196 bp, Homo sapiens
ggggcggcggcagcaggagggtccccgcagcaccctgcgagcgcggcagccccggcccgcgggcggcgagttcccggtaagtgcggtcccgagagcggagcgcgctggagaggcgtggagaggggggctgggcgccggggacgtctgggtcccgcgcccaatggctggagggcggccgagcgccgcccgcccgccctgcccgccccctctccactccccccggcactcccctccccctcccccgcccgccgctttcccccgcccccgccccgggccaactccgcggcgcctccttaaaaagcgcgcgggagttgtaagggggggccggagcgagccggagtgagcgagagcgcagggtaaagggggcgggcggggggcccgggctccaccttaaaagcgggcgcgtgggggtgggagggaggaaggcgggcggcggggaggagggagggagggaaggaaggggggccggagtgtcccgggcgcagggcgcgcgtgcggcggcggcggcggcggggaggggccggccgcgccgcgctcccctcctccccctcgcatccccggccccgcgcgcgcccagcagaagcgggtctgtgtgtgcgtgcgtgcgagtgagtgagtgtgtgcatatttttttctctcttttctttctctctcactgttttttcctctctctctctctccctctctctctcttttttttttttttttttttgcaaagaaacagcagcgccgccgccgctccgccgaggcgctgcgccccccggggggggaggcggaggaggcgggcagcggcggagggaggggagccggggaggggggcgccgcgctgggagggaggcagcgcgcacggtgcagccgggccgggcgggaggcatggcggggcccccggccctacccccgccggagacggcggcggccgccaccacggcggccgccgcctcgtcgtccgccgcttccccgcactaccaagagtggatcctggacaccatcgactcgctgcgctcgcgcaaggcgcggccggacctggagcgcatctgccggatggtgcggcggcggcacggcccggagccggagcgcacgcgcgccgagctcgagaaactgatccagcagcgcgccgtgctccgggtcagctacaaggggagcatctcgtaccgcaacgcggcgcgcgtccagccgccccggcgcggagccacccc

SEQ ID NO: 2798 - DNA, 1153 bp, Homo sapiens
ccagagcttgagagacaggaagcagggggctgggggcgggggcttggatttctgcccaagacggggaggctgcaagttgggttgcaatgagtccctcacttgggaggacactcattacctccttgctcatggtgaggatgcgagtaggggagatgagtgggcagggtcaggacaggggcatggggaagaggcttccagagggtccaaggcctgcctgggatctccccgtgagctgtcccaggaggttccagtggggaagagttggcagtctctttgcccagaggtgcccagatagctgggtctggctgctgggtgtaagggtggggggtgtggtgtgagctgcagaccccggagggggccctacagatagggctggctcgagggacgtgctggacctcagcctctcagagctactcagccaccagcaggaggagaggggagcggcctggaggccctatccccacctcagtctccctgtcctcccccaggctggtggtccaggccgtggtgcctgccaggtgatgtggggcaaagccccccgcacaggccactgagagctccggacacgcacccggctgccaccatggcccgcctagccgcagtgctctggaatctgtgtgtcaccgccgtcctggtcacctcggccacccaaggtaggtgctgctggggccggggaggggccgcggctcccaaacccttctggggggggcagataaaatgttgaaaaccctcctgatcactcagtaaagaattacagccccctgccccgccccagacctcagctggagcaggccagtggaagactcaggggtaacacacaccccagtgccaccaagaggcccctggaccatcctcttacctccaacaagtcggctgggccaggttggtaggggccatcccgctgtggcccctgggaccaggacaggccttcttggtgagccgatgctcctctctctgtctctctctcgctctctctctctctctctctctctgtgattacatcttcgaggctctcactgggaagaaggcttaattaaagcatgcccgctgacgtttatttaaaaacaactaattacccggctcggccctatgccggccctaggatcctgcacacgccactattagtgccccaagcctgcccgcccaccctcac

SEQ ID NO: 2799 - DNA, 1100 bp, Homo sapiens
ccaagatcgcaccactgcactccagcctgactctgtctcaaaaaaaaaaaaaaaaaaaaaaaagaacccctcttgttgtggagaagcagaatgctattgccttccacacatggttgtcaggtgctctctacacagtgcctaacccctctaaacattcggtacaggcactgagattgtgcctggtcttcccagcatccttttgataatcaggaacccaactgagaaagactgaaacaagtaaagaaatttattggtctggatctgaaaagtccaggagtgtgctaccttcaggcatggctgtatccaggtgctgagatgacgtttctcagttctgcttccctctgtatgggctttggttgccatctgggagtctggagtaagtggcggccatggtctctgacttctatcccccacccctccccagcctgatgtgtgagaagcggatattggcggcagtgaccagtgcgggacaccccttcctggtgaacctcttcggctgtttccagacaccggagcacgtgtgcttcgtgatggagtactcggccggtggggacctgatgctgcacatccacagcgacgtgttctctgagccccgtgccatgtgagcctggaccccagcccgggcccctgcctcccctacagcatctgacacttagtccccccgagaggctggcagcctgcttctcacccctccaccctcaggccttgcttccctcagcctcccagagctttggggagactggggggcttttgaggatgtggaagccaggcttatgtgaccctccctccttgcagggtggccccacccctctcagcagcctctctctctctgcagcttttattccgcctgcgtggtgctgggcctacagtttcttcacgaacacaagatcgtctacaggtgtgtgcgtgtgtgcatgcatgtgcacactgcccgttgtggggacaggacccagacccccgctcatccctctttccacccctccaacccccaacagggacctgaagttggacaatttgctcctggacaccgagggctacgtcaagatcgcagactttggcctctgcaaggagggtgaggggctggcctctggattagacaa

SEQ ID NO: 2800 - DNA, 1126 bp, Homo sapiens
ccgcctcccaggttcatgcagttctcctgcctcagcctcccgagtacctgggattacaggcgtgcaccactccaccacaccaggctaatttttgtatttttagtagagacggggtttcgccatgttggccaggctggtcctgaactcctggcctcaagtgatcctcccgcctcggcctcccgaagtgctgggattacaggcctgagccaccacgccgggcctccacttttcctaatccggcttctccaccaggctctcgcaggtgatccctcctgagccccagtccccccaccccacttgtcctctgtatgctcactcctctccgtggtccccgagccccaggactggtccccactgcagcacgccccctcctcagcctccaggctgaccctcccctccgcttccctcccctgcagactctgggctgggaagccctgttggcccggcgcctgccaccgccctttgtgcccacgctgtccggccgcaccgacgtcagcaacttcgacgaggagttcaccggggaggcccccacactgagcccgccccgcgacgcgcggcccctcacagccgcggagcaggcagccttcctggacttcgacttcgtggccgggggctgctagccccctcccctgcccctgcccctgcccctgcccgagagctcttagtttttaaaaaggcctttgggatttgccggatccttgcatcctccgtgtcttcttgtgtgcagtcattgggggtgggggcgtgcttggaggtgtggacgtttgcggggcaggtggctgggtggtcgtgggagtctcgactgatgggggtgtcatctgaagaggatcaaggggcggcgtggactcggggctgttcttatggtggggagcgtgggtgagccgagatgggagggggcgtcgggattgtgttggggggcgcccaggggcgtggggcaaaatggtttggggatagggttttggggctgtattggaagagctcaaagccgcagtgagcagaatggtttcggaagtccgttagggcagcggcaaggtcaggaaacgccccacacaccctctgtctctgctcccagcggagccccagccccggccgcccgcacggtgcgcttgctcctgcggctctggcg

SEQ ID NO: 2801 - DNA, 1151 bp, Homo sapiens
agacagcctggattctagtccacttctgccacttcccagctcccagggaccttccttgggcacatgggccgcagtttgcccatcagtaaaatggggatgagctgaacaccgataccaccttctcagggttgtcctgaggtctaaatacgaatatatgtaaagtggtgacaatggcagtccgtccaattactatgtatattcacattgttatgatgtcgctgtcacccctccctggcccccagccctctgcctttgaagagaaggccattgagaaggtggatgacctgctggagagttacatgggtatcagggacacggagctgggtgagtgagggctgcctgggggagggggcatctaggtctgctgggggccgaatccaccctgagccccttggtccctggtgtcatttgtgcctccgttctgacccctcccccaatagcggccaccatggtggagctgggaaaggacaaaaggaacccggatgagctggccgaggccctggacgaacggctgggtgactttgccttccctgacgagttcgtctttgacgtctggggcgccattggggacgccaaggtcggccgctactaggactgcccccggaccctgcgatgatgacccgggcgcaacctggtgggggcccccagcagggacactgacgtcaggacccgagcctccagcctgagcctagctcagcagcccaaggacgatggtgaggggaggtggggccaggccccctgccccgctccaatcggtaccatcccctccctggttcccagtctggccggggtccccggcccccctgtgccctgttccccacctacctcagctgggtcaggcacagggaggggagggatcagccaaattgggcggccacccccgcctccaccactttccaccatcagctgccaaactggtccctctgtctccctggggccttgggttctgtttgggggtcatgaccttcctagtttcctgacgcagggaatacaggggagagggttgtccttccccccagcaaatgcaataatgccctcacccctcctgagaggagccccctccctgtggagcctgttacctccgcatttgacacgagtctgctgtgaaccccgcaacctcctccccacctcccatctctccttccaggccc

SEQ ID NO: 2802 - DNA, 1247 bp, Homo sapiens
ggcctggcatgcggcgaaaagttcctggagaaggcctccccctccccaaaacacccgagaaacgtggggacctcattattgagtttgaagtgatcttccccgaaaggattccccagacatcaagaaccgtacttgagcaggttcttccaatatagctatctgagctccccaaggactgaccagggacctttccagagctcaaggatttctggacctttctaccagttgtggaccatgagagggtgggagggcccagggagggctttcgtactgctgaatgttttccagagcatatattacaatctttcaaagtcgcacactagacttcagtggtttttcgagctatagggcatcaggtggtgggaacagcaggaaaaggcattccagtctgccccactgggtctggcagccctcccgggatgggcccacatccacctccagtccctggccaggggtgagaggcagaccagcagatggacttgatccctctgtgtctttttgcttctggctggtagataatgtcaacctgcagtcttgattcccagaccctgtacactcctccttttctgttgtgtgatcagtttgtgctttattctgtatttgtctcccatgtcttgctcttctcctggagaattctgtcttctctttggccatctcaaattgagaacctaaactattcctgcagaactgcctggttggcgtccacaagcaatacctctcgttccagcaggaccaagggagccagcctccagtgagtgactccagcaagtgcagccacctctcccttgatggtctgggagcctggcctcagcaaggggccttcctgacctctggctccagtgaagctgaatgtcctcactttgtgggtcacactctttacatttctgtaaggcaatcttggcacacgtggggcttaccagtggcccaggtaattttttgtttcatggactatggactctttcaaagggatctgatccttttgaattttgcacagccctagatacaatcccttttgataaaagggtctttgcttctgattacaggagcactgtggaacgtctgtaaatatgtttttataattccatgtatagttggtgtacactcaaaacctgtccccggcagccagtgctctctgtatagggccataatggaattctgaagaaatcttggggagggaaggggagttggaacaaatgtctgttccctggaggccagtccagtgctcagacctttagactcattgtaag

SEQ ID NO: 2803 - DNA, 1461 bp, Homo sapiens
ttttcaaatttagcaaactcccttctgtcatgaattatcattaaaagcttccatatcagcagtaatgcaaggccaataagaacaattccagcaaccacaccagctacaattggaatgatgtctggaccagtgggacactctggattctccacaacatgaaccatgacctcgttgttcccattcactgaatacgtaaaatagaaccaacagtcgtcaacatccttctccttacaatgggacacaggatcaggttggaccggctggggtaatttgtcccgactttctaccttggtaatgttaaaataggaacattcctgtgtgcatgtgtctttcttttctcctttattgaaggctctgcactgaacacattctttatgctcagcacagacaccaaggcaggtctgacacatctcacacgtttgcccttgaaacttcggatctgtacacttacagacaccacactcgcagatgccccggccattgcagatctgtccgttgctggcttcacaagtactagtataatttttaaaatgttttattattttgaaaataatgttgtaattcatgccagggactgacaaaagacttgagacaggatggttattcttgtcagctaaggtcacattgtgcctttttgaccttttcttcctggactattgaaatcaagcttattggattaagtgatatttctatagcgattgaaagggcaatagttaaagtaatgagcatgatgagagtttctgttaatcatgtattaaaactgatttttagctttacaaatatgtcagtttgcagttatgcagaatccaaagtaaatgtcctgctagctagttaaggattgttttaaatctgttattttgctatttgcctgttagacatgactgatgacatatctgaaagacaagtatgttgagagttgctggtgtaaaatacgtttgaaatagttgatctacaaaggccatgggaaaaattcagagagttaggaaggaaaaaccaatagctttaaaacctgtgtgccattttaagagttacttaatgtttggtaacttttatgccttcactttacaaattcaagccttagataaaagaaccgagcaattttttgctaaaaagtccttgatttagcactatttacatacaggccatactttacaaagtatttgctgaatggggaccttttgagttgaatttattttattatttttattttgtttaatgtctggtgctttctgtcacctcttctaatcttttaatgtatttgtttgcaattttggggtaagactttttttatgagtactttttctttgaagttttagcggtcaatttgcctttttaatgaacatgtgaagttatactgtggctatgcaacagctctcacctacgcgagtcttactttgagttagtgccataacagaccactgtatgtttacttctcaccatttgagttgcccatcttgtttc

SEQ ID NO: 2804 - DNA, 1124 bp, Homo sapiens
cacccttacctgaccccatcccccgaatcccctgagcactgggccagcccctcacctccctccctctcagactggtccgaatccacgcctagcccagccactgccactggggccatggccaccaccactggggcactgcctgcccagccacttcccttgtctgttcccagctcccttgctcaggcccagacccagctggggccccagccggaagttacccccaagaggcaagtgttggcctgagacgctcgtcagttcttagatcttgggggcctaaagagacccccgtcctgcctcctttctttctctgtctcttccttccttttagtctttttcatcctcttctctttccaccaaccctcctgcatccttgccttgcagcgtgaccgagataggtcatcagcccagggcttcagtcttcctttatttataatgggtgggggctaccacccaccctctcagtcttgtgaagagtctgggacctccttcttccccacttctctcttccctcattcctttctctctccttctggcctctcatttccttacactctgacatgaatgaattattattatttttatttttctttttttttttacattttgtatagaaacaaattcatttaaacaaacttattattattattttttacaaaatatatatatggagatgctccctccccctgtgaaccccccagtgcccccgtggggctgagtctgtgggcccattcggccaagctggattctgtgtacctagtacacaggcatgactgggatcccgtgtaccgagtacacgacccaggtatgtaccaagtaggcacccttgggcgcacccactggggccaggggtcgggggagtgttgggagcctcctccccaccccacctccctcacttcactgcattccagatgggacatgttccatagccttgctggggaagggcccactgccaactccctctgccccagccccacccttggccatctccctttgggaactagggggctgctggtgggaaatgggagccagggcagatgtatgcattcctttgtgtccctgtaaatgtgggactacaagaagaggagctgcctgagtggtactttctcttcctggtaatcctctgg

SEQ ID NO: 2805 - DNA, 1192 bp, Homo sapiens
tgcagaatatctccccgaggtgttttctgaatctgtaggctctgagaacatgtaggattcactcctgtggcataatttacagaagtgtttcccttgtggactgctggttctgaaaagctgacatccccgcaatcatgggcctcctgagctctgcttacaccacgctgaccggtgtttcctctttggccagggtgaggaccctttcaccagtgaaactgttgatccagaaatggaaggagatgacaatttaggaggtgaggataagaaagagacacctgaggaggtggccgcggacgtcttagcagaggtgattacagcagcagtgagggccgtagatggggaaggagcgcccgctccagagagcagcggggagccggctgaggacgaaggccccacggacacagcggaggccggtagtgatcctcaagccgaacagctgctggaagagcaggtgccctgtggaacggcacatgagaagggcgtccccaaggccagaagtgaggctgcagaggctggaaatggcgccgagacaatggcagcagaggcagaaagtgcccaaaccagagttgctcctgccccagctgccgcggatgctgaagtggaacaaactgatgcagagtctaaagacgctgttcccacagaatgatgctcatttccctgttccagggaaggcgttgggatgatggatgcgttggtctttctcccttggtttgtaagcagtacaagggcgtgtgctcccagaatatgctgtaatctaattttggtgaagagacccagcgtttcctcctgagcagtgcctctcacggcttgtctcatgcagtcgtgtggcttcttgcccaggtttcaaagctgaagtacattgtccttagcggctgtaacatgtctcttgacagtagtgcacttggaataataaaggttgggtgattatatcttgatgatacattacttgttcaatacagccactgatggaatgcttccttttttatttttttccttaatttttttttttatttggttgggaacagctgaatactaggaatatatcttgctctatagaggatttttttttgtatgtttcaagcttcagcctttaacctatacctttgtagtgcaccatatggtgtgtgactttcacaggacttcgcagcacctggttcacatgtggcactgaccgcgtcacatccacgcactc

SEQ ID NO: 2806 - DNA, 1202 bp, Homo sapiens
catctttgcatttatctcttaagattgcctagcttttccagtttgttagtcttggttgcacagtctctggagccttctattcttggaggctggcgttttgagattcgcttctctgcatagggctgatctcaggatgactcggcagagcctggctggtttattctcttccttaatctttgccatttttaagagctcacatttggttccctttgcagttggctgctgaacagttcaagaaaaccagtctccatgtggctaagagtgttttgaacaacagacatatagtgaagatgctggaaaaatacctcaaggtttgtgcttgcaagtaccacagacaggaaaagctttcaaaagggaagatgaaccccaggagcagggagttgaatccagagtgcagcatttagcatttctgagtcttttgacagttgagggacactggaatgcatcaagctcaggaacatgacaactgggatttctaatgagtcagtgcttgcctggggactctggggatgtggcgctgcttgattaatcagtgcgtaatggatttttaccatgaaaaatcctgattgtttagccttaaaattctgagcaaatgatggttaggtgattttttaagaaaaacccaaggctagccctactcgggaagctgggatgggaggattgcttgagcccaggaatttgaggctacagtgagtgatggtgttaccactgcacttcagcctgggtaacatagcaagactggtcttgaaaataaaggaaagcggggaaccgggaattatggctcatgcctgtaatgccaatagtttgggaggctgaggcaggaggatccctgagctcaggagttagaggagttaacgattgcgccactacactccagcccaggtgacagagtgagaccccatttcaaaaaaaaaaaaagaatccaaggtacatgagaattttccaggagagaagctaaaaagagatttcattgatagagccaactgacagtgaggttgaaggtgaggggtagtgaagaaccagagccttcatgatgggagcagcatatcgaagtcccaaagtgggtgctcatggagagaaggctggttggaagagctcccagttcttccttgtgaaacccattttgctcagtgttcatcccaggactttagcatttggggcaggtggctaagtcccagcccacaacctgacttcaggacctt

SEQ ID NO: 2807 - DNA, 1180 bp, Homo sapiens
acctactccttaacaggaggccctcatcagaatgaccagggcccatctagcttcagtggctagggtcttctctctctgtgacagaagatacccttgtatctgtgtttgtctctgtctctgtctgcctcccctctgcctgcccccaccatctgtctgtctctgtctccctcactgcaggctacgagggctatggctatggctatggctatggccaggataacaccaccaactatgggtatggtatggccacttcacactcttgggaaatgcctagctctgacacaaatgcaaacactagtgcctcgggtagcgccagtgccgattccgttttatccagaattaaccagcgcttagatatggtgccgcatttggagacagacatgatgcaaggaggcgtgtacggctcaggtggagaaaggtgagtggacacctgcctaggggttgagactctgcaggggcggctcctgcctgctgcccactgcgttttcctctctgagtgcccctctgtgtctgcttcctccccgctgcttggtgctgctgtggctcccagcagggtccgttgcacttcccgtctctgacttgtgtctcctctcacccaccctcaacccctgccgcactgcctggtggtcagcctttcccagcttgcggtgagaggaacaagcccagactgggcagacttcactgtgccctcaaaaacagagtgttcagccacccctccctccaaggacagccatttggaattctctcgagactttgcctcctgcgtggtgtcagggcaggacagatggagtttggtgtgaagggtgggacgagcgtttggggctgatcactgcgagctgggccacccccacgtaagggtcggggcaggtgtgggcatttcctggttactctcctgtgccttacaaacatgtacctgatggaagcactcctgtgaggaactgctgctgtcctcattttgcaggtggggatacagaagtgcaggcaggtcataccctgaaggcacgcagcaagtacttggtggggctgggcctcgcctaccagatctgccctactccaaagcatcatgctgtgggcatttgttattaactgaactggacttggcccaggagtgcttatgcccagtgcgaggctttggtgaggagcgtgggtgtatctctaacatgggatagagtggagcacc

SEQ ID NO: 2808 - DNA, 1202 bp, Homo sapiens
gacagatcacttgaggtcaggagttcgagaccagcccagccaacatggcgaaaccatgtctctactaaaaatacaaaaattatggtgacgcctgcctgtagtcccagctactcgggaggctgaggcaggaggatcgcttgaacccaggaagtggagactgcagtgagccgatatcgcaccacagcgctccagcctggtcgacagagtgagactccatctcaagaaaaaataaaaataaagttgttctctgaagagcaaatgtctcattccagtaatgacccactcagcaggaatatggtggagttcagtccaattcaggtcagccatatccaaaagaccacaagtcattactaagttgagcaaaagagtttttatctattagcagaaagggcctctctggcagcagagattaaaaactggcccaacttcatttccatacttcagggaacagcaaattgaggatttacttatctaggacttgaattccttctttgggaccaagttaataaaagaccaagaaactcctgattaaactggataatgaaggattctgtagacagggctgcacgtatcggctttgtttgacttctcttttctcagttaacatctcagagctagaacattccacattccccagcagcgtgtgggggctgactaaagtttacaattccaactaaaaatcaccctgcttctggcttatctgaatcccttacccaccccaccccaccaccctactcctatttattcagcaccacactacccaggaaatacactagcaaattgtgcaatggaataaaatccacactttagattcttgcaactgtatcatatgtaatagtatcactttttctacattttggtcaaataaatttttacataaactacaatttgcgtgaattttagaatgtgtgggggtacacagagcattttggttcaacaaatgttaaagggatggaaagggaaaataaccagagccaagaatgtagacaaggttatctatttgctttatactgtgacttcatgatacaaggatattacagtctcattgcaggcgagagcactcagcctcggtcactcgaaaactcctggccttccttatcccctacgctgcctaagccaggctgtgaagaatgagtaggattttaagagataaaagcagggaaaatcatctctgttgcctgagttaggaagatctgcctagc

SEQ ID NO: 2809 - DNA, 1151 bp, Homo sapiens
ccagctccggacccagtgaggggctgtcgcagccaacaccccggcctcggggctcctggtggcagcaccaggggacacacctgccaaacccaccagatggaggggccctccctggtctctggccaccctcccagcctctgcccagggacccctgccttccccaggccatctgctctgccgtcgacactcgtctcagaagcccctttcccagaagaggctggtcttcaagaagtctcgtttctttgcccctgaagtcagtttcaggggaaggatgtgaaatttttccgtgtagaggttacagccttttatgctgttgagctcccaggtaccaaaaagcttggccaacgcttgccagccagccagctgcaggtggcatctgccacgaaggaagcgccagcctcgccaggccagcaggggcgtcgttttgttgccattttgttgaacgttatgggtttatgggtgttcctggaacttgtctttgtgcattcgttgctgtttgtgttaccctcactgtccccatgtcccacccacgtcctacggcactcaggaagcacttggtgaggacgagccctcacccttcttgtcttccttcccggcagcgcccgcagcgggccatttacacgtcgaggctggcacctggcgcgctcgggggccactgtagcgtctgcctgctccctggactcgcaggcctcgcctgtggcgccttcccagggccagcctgggtcacgagatgctgtcactcagccagatcagtattgacccaccaggggaggtggggtttggtgagagacgccagcctcagactttttcccactgagggtccagagagcggggccacgtgtcacccacgtctgcgcttggtcacccgtcctccccaccctgtgtgtgtttatgtcatagttacattaaattccattcattgaatactccacagccttcctctgatgcagcgtggtcccaactcctcctgcgtgaccacagggcttgcctggttttgtcgccgaccttccctgtggccccacgaggtgtcaccagctccctctgcttccccagctgaaacacaggaaaagcagctgcgggaagaggcagctgcagtgctggaccatgggccaccactcctgggccacacagaggaggccacagaggcagag

SEQ ID NO: 2810 - DNA, 1174 bp, Homo sapiens
cctgggcgagtgggtgtccgttgccagatggatcctaaacaccctttatttcatagacgggggctgggggtattgaagtgagcccctgtcaggcctggagttactggggagcttgcagaaagctcaggtttccctgtccaggttggtggcctctttgtatcacagtcaagtcaccatgaagcaacagcacgtcgtgggcagcacggtctttgtggctggcaggaggtggccagggactcagtccctggggcggccaactcagttctgccttacaggagacagagcctccacgcagttcccaaatgcatccatgctgttccatgcagtttcacactgttccatcttccacaggaaggtctgcaaagacctgaattccttgcaccctggggtctccatttgaaggcctgaagcaccaaaggtagggctgactctgtggtatgtccctcttctttcaataaatatttttagagcagtggtggagaacggagccctgtcccaggtttgaaataaaacccaaacctggccgggcacagtggctcacacctgtaatcccagcactttgggaggacgaggtgggcggatgacttgaggctgggagttcgagactagcctggccaacatggtgaagccttatctttactaaaaatacaaaaattagccaggcatggtggctcgcacctgtaatcccagctattcaggaggctgaggcaggagaattgcttgaacccgggaggtggaggttacagtgagctgagattgcaccactgcactccagcctgggtgacagagccagactccatctcagagacagacaaacaacaaaacaagacaaaacacaaacctctcactgaggccctcaaggctctgtggtctggccccggccaccctgtgaccccatctcctcctgcacaccagcctccccaacacaccagcctccccacagttccatgatcacaccaggcatggtcctgcctcagggtcttggcactgtctgttccctctgctgcaaatgctgttcccttcagccactcctttatctcctgctggtctcagcttaaatgtcacctcctcagagagaacctccttgaccttctcggctaaaatgaccctccgggtcccacctaccatgtcatgacctatttttctccatcacaaagatttcactcaatgttat

SEQ ID NO: 2811 - DNA, 1127 bp, Homo sapiens
acaaaatggtgacattgttaataaaagccagaaacaaaacctgctttatctagagtttcttgaatagcccttcatttattttctggtggaaaaatattaaacgctgatttaaaaaaaacagaactcttcacacatgactcaggtactctgtcttgggtagggaagagttaggtaagtggggtgaacggcagcttgaagaaatgactgttctctttctgaaattcataattctatttcctgtgaccccaacccgcaaagggctcgttttttcgaaaagcataaaaaaaaaaaaaacacccaaggtttcaaggtatcatttggcttagcatttctggtagttccagaacaattgttaacttcagttttaaaatagcgccagccattttatcaccctcatctcctggtgggaaagcaaattccacccaggcctggatgcagccctgttgttttctgttttttttttttttttccctaagtttttggtttttacatatttggagatgagtctcgctctgttgcccaggctagaatgcagtggtgcagtcacagcttcactgcagccttgacctcctgggctcaagcaatcgtcccacctcagcctcccacgtagctgggacctcaggcgcgcaccaccacatctggctaattttaaaatgttctgatagagacaaggtctcactttactacccagtctggtctttgaactctgggctcaaatgatccttctgcctcaggctcccaaagtgttgggattacaggcatgagcccctgtgcccggcctgttttctgtttaaaatcacttttcccactgcaaataccccagtttttttccagaggaaatgatcagatagtgtacttcagccactctgaagggatgggttgagtgaagacaggacccttaattgtttttgtttgtccccttgggtcgtatcattgtctaaaatcatccataaccagctctcctctggggactcaagatgacgtctctccatgttcacggcattcgggggctcagccgatcagctggtggtttctgggttcactggatcttgactatttgtgctaacttagaagagggcacagctgcttcctctggtttgaatgattccacttccctgagcaaatgc

SEQ ID NO: 2812 - DNA, 1261 bp, Homo sapiens
ggtggtcgatcgtgtggcgccggaggacgttccccgcggccggagccatggagatgccgctgccccccgatggtgagacccaaaccggccgagagaccgtttctctctccccggaacctcctattggccggccccgcctcccggagtccccgggtctgggagggggcggggctcggcctcgcggcttcgcctgcggcctctcccgtgggtccccgcattcccggcgagcgtgtggcccctatcgggacccgtacaagggcggcctcttcggggcccacccccttggggtccccggcaaggcggacgggggctggggcgccgagtcccccggctttgggcggtcctcgctgacgccccgcgtggccttttctccgtcctccagaccaggagcttcgaaatgtcatcgacaagctcgcccagttcgtggctcgcaatgggcccgagtttgagaagatgactatggagaagcagaaggacaaccccaaattctcgtttcttttcggaggcgaattctacagttactacaagtgcaagctggcgctggagcagcagcagcgtgagtcccctccggcactcaggccgtcccatcgagcgcttcctttctcggattccagtccgggctctgccacaaacctctttctttcgggtcgtttattctttgaagtggagcagctcggtccacacgatccctgttccgctgttcccacggccctgcacagagcggctgctgggtgccactgtaatggagaacaacgaggttttcgatcctcccccctgggctctggatcagggattttgctgttgttttgcagactgatgacggagattagcaggagtagcgtgattgttttagtgttttctagggaggaagtgatagaggccggatgggagtccatgggacaggcactgtccagccccctttgccgtctccctgtgggtccagcaaggttttgtgcatttcagatgcctgcagcagaaatcaaaaagaattatccctctgagttttagttattggcaagtgtttatcaatgttcgttcatttaggcaacaggattccagtcctgctctaaagaagtttaaagttaggaagcagagctggcctttgaataatggatagtcaccaggtggtgcggctgctcagggcaggtatcacatctgtcacgttcagtacccaaccccgtctctagattgtttaaatgaataactaggagtttgccaggtagatggacattgagaggtggttgtccgctgtttgatcgaa

SEQ ID NO: 2813 - DNA, 1171 bp, Homo sapiens
ggcggcggcggcccgggaccgagacccggccccggctcccctctccgccaccccgcgcgcccccaaccccccggcgccgcggggaacatgcggctccggctcccggaggccggcgagtgagtgacccccgtcccccgcctcagcccgcccgcccgctggcccggccgcaaccccccgcctcgcccaggcaatgacagcggctccggcgtctccgcagcagatcagggaccggctgctgcaggccatcgacccccagagcaacgtaagtacccgccgcgcgagctgggacggaggccgcatgggcccgggaccctccccctctcctgtacccctcgcccaccgggcttcgggggacccgtctggcgcccacctcccctcgagggccgctgccatccctgcctctcgcttctcgggcccgggccgggggcaggtcgggcagcccggcagcgctcggtacgtgaggccgaggcttccgtgcggcctgggcggaggaagcagacgggggagctgaggctagagtttttcctccctttctgctccagctctacgaccctcactgctctggacgaagcttctctgcctcgccctccctccgggacccgagacccccgggaagccctcccggagcgggaaggggagggagaagggctgtgaagcaactggtgtccggggtatgactcggggaacctatgtctcccatgtcttggcctcctgggtgatcagggaagtccttcttccccctcctctcggctggcagcaccttcctggcttcggagagaacccccagtctgttttgcccctggccgggtacctagggtacgtggagagtctgtctcccttctgtgactagacacgcctttgccaaaaccctcttggggtcgctgccgacgatagatgatctcggggagggtgggatccttcctgttgcctttctgggcctcagtacccattgcgtctctgaccaagccagagctccattttttaggtagtgaattaaagaggacttttctctcccgtttacccaagagctctgtttcagtaggctctttccctcacctgggggtctcagcctggtggtttttgacccagactgtcggggttaactccagagtgtcgcttcctcgggtgcccctttgctgaggctactgtttgcggagggaccgccccctcc

SEQ ID NO: 2814 - DNA, 1178 bp, Homo sapiens
gacggggtttcaccatgttagccaggctggtcttgaactcctgacctcaagtgatttgtccaccttggactcccaaagtgctgggattacaggtgtgagccaccatgcccggcccagagtagcaatttcaaagtactcccaggtacaagctggcccgtctcaccaagcctcagtctcctcttgacaatgagactcctgataataaaagccatcacttggctgggacactgatgaggatttattaagtcctaaatgtgaactagtgtcatcatcattgccacctctctgggcatgaaggaaaggactcccactcggctctctattttctctgtgcaacctcaggcatgcgtacagcctctctgaaccttggttcctcctctgaaacttacaaactgcacagtgttgggtgggcgctctggattaggataggctgaccagagcatatgggagtgaagcctgcccttggcatgctggtgatgatgggggacactcctgtgcctcccaggagcagtcgaactgtcccggcgccaccccatcgcgtcctggctgtgcgccatgctgcattgcttcgggagctacatcctggctgatctgctccttggggagccactgatcgattacttcagcaacaactccagcatcctgctggcctcagctgtctggtaagccatgctgggcatgggagagcagagccgggtgggggaaacaacaacctgggcaccagggaggagagaggttggaggaattagaatgcaccagcaacagccctcatgatggccctgaatatgctgccctccatgcccatctctggtctaggcacagcacgttggggagggtggtctgatataaccacagctccctacccccatccttcacagtctgcccatcccctggcactcactgttctctccccaaaaggtacttgattttcttctgccccctggacctcttctacaagtgtgtctgcttcctgcctgtgaaactcatcttcgtggccatgaaggaggtggtgcgagtccgcaagatcgcggtgggcatccatcacgcccatcaccactaccaccacgggtggttcgtcatgattgcaactgggtgggtcaaaggtaaataggatgatgacaatgaaaaatcatcccagtggagaacttttggttcagtggtactaccaggcaccccag

SEQ ID NO: 2815 - DNA, 1261 bp, Homo sapiens
tttttgggcgagcctagtcgggtggggaactccagcatcgggtcaggtgctatctgcccaggagtgggactccacatgccccttaaacttcctcccaccattctgaccatgcctggctctgacctcccttctagctccaggacacgcgcgccccgagcctgggaggcatgctgaagccaggcggccggcaggatgagtgtgaaagaggcaggcagctcgggccgccgggagcaggcggcctaccacctgcacatctacccccagctgtccaccaccgagagccaggcctcgtgccgcgtgactgccaccaaggacagcaccacctcggacgtcatcaaggacgccattgccagcctgcggctggacggcaccaaatgttatgtgctggtggaggtcaaagagtcgggaggcgaggaatgggtgctggacgccaacgactcgcctgtgcaccgggtgctgctatggccccggcgggcacaggacgagcaccctcaggaggatggctactacttcctgctgcaggagcgcaacgcagatggaaccatcaagtacgtgcatatgcagctggtggcgcaggccacagccacccggcgcctagtggagcgtggcctcctgccacggcagcaggcggactttgatgacctgtgtaacctccccgagctaaccgagggcaacctcctgaagaacctcaagcaccgcttcctgcaacaaaagatctacacgtacgcggggagcatcctggtggccatcaacccctttaagttcctgcccatctacaaccccaagtacgtgaagatgtatgagaaccagcagctgggcaagctggagccacacgtcttcgcgctggccgacgtggcctactacaccatgctcaggaagcgcgtgaaccagtgcatcgtgatctcgggtgagagcggctccggcaagacccagagcaccaacttcctcatccactgcctcaccgccctcagccagaagggctacgccagcggcgtcgagaggaccatcctgggtgctggccctgtgctggaggtgagcggggaagctggtcggtctgtgggagggggcatttgtttggaaaatgcgggtttcaggccaagctcggtggcccacatctataatcccaatgctttggaaggctgagggaggaggattgcttgagcccaggagttcaagatcagcctgggcaacatagcaagatcttttctctacaaaaaaaaaaaaataattagccaggcaggcatagtagtgctcacctgta

SEQ ID NO: 2816 - DNA, 1163 bp, Homo sapiens
actttgggaggccgaggcgggcggatcacctgagatcaggagctcaagaccagcctggacaacatggtgaaaccccatctctactaaaaatacaaaaattagccgagagtggtggcacatgcctgtaatcccagctacttgggaggccgaggcagaatagcttgaacctgggaggcaaatgttgcagtgagcccagattgcgccactgcactccagcctgggcgacagggtaagatccggctcaaaaaaaaaaaaaaaaaaaaaaaaaaaaatagggcctcactccgttgcccaggctggtctcaaactcctgcactcactaaaagaaaagaaaagcaacaacaaactagtaggctcaaacgatcttctctcctcagcctcccaaagcactgtgcttaaaggcgtgagctgggccctcggcctgggggttggaaattgaagcctctattttatgtatttatttattttctgagacagagttttgctctgttgcccaggctggagtgcagtggtgtgatcatggctcactgcatcctcgaacttccgggctcaagagattctaccaactcagcctcccaagtagctgggaccacaggtgcaagccacccacgcccggctagttttttgtatttttttgtagggactgggtttatccaagttgcccaggctggtctcgaaccccagagctcaagcaaccctcctgcctgggcctcccgaagtgctgggattacaggtgtgagccaccgtgcccggcctaagcctctcataaggccgtgctccctgccagaggccacccttgaagaagattccctgagacttaatgacctggggcaccccggactttcttaatcgtagctccacccactcgagccgggtgccttcgcgtttcccgtttttaaatgagatagtggcacacccggtggcatcctcccacccgggctcttatcggcggtcccagaccctgcttgagcgcctccgggtgtcaagggcccctgaggacactaaagctctcgaaccccgatgtggacccccgtgcggcgcggggcagcctggctgggaaccctgctcggccctggagaggggccccccgagccgaggggaggagcggcgcatgcccacaagccccccgcgggaagtaggaaatcgaccgaccaggcggtgcg

SEQ ID NO: 2817 - DNA, 1196 bp, Homo sapiens
tctgggctccggaatcgcccgcagccggtactgcgggacccactgcggatatggctgtcttggctggatccctgttgggccccacgagtaggtcggcagcgttgctgggtggcaggtaagtcctcagggggacccttccccaaatcagggaataagggcggcttcggaggctggcgccactcttcactgcccgcgtgacctgccagtgccttgcgcattttgcagccaggctctgtctccgggagccgaggctcagagaggttgagcgccaaggtcacccagcgccccgtctgacctttctcgccgtccctctacccacgcaggtggctccagccccgggcctggctggggttcccagacgcctggggcctccccaccccgcagcaggcccggggcaaggctcgcgggaatgagtatcagccgagcaacatcaaacgcaagaacaagcacggctgggtccggcgcctgagcacgccggccggcgtgcaggtcatccttcgccgaatgctcaagggccgcaagtcgctgagccattgaggatcgcgacgcagtcggcgggaccctcatggaagcatcgccctcgcctcggaccttgcctggcgctatttttgcagggagctggggagcaggaacgcctcggacctgagtgctctccatattgtggggttgaagtctggatgggagcttgccaagtccctttttaggctttttaattaggaagcatttcgaacctgcgcaacagaccaaagaacagtacaaagaacatccgtgtacccagtaccctgactaccgactacctacaacccgtccctgccccatcctgagttcttttgaagctgatctcaggcatcggattatttcttctgtaaatatttcagaatgtatctctccaagatgagagctcattaaaagacaattacaaagcttatcacatccaaaagaattatcaataattttgaaatattattaaacgtgtaataaatgttcaaagttccacttgccttatatgtgtcataactcttttttttttttgagacagtttcccttttgttgcccaggttggagtgcaatggggggatctcggctcattaaaacctccgccttgcgggttcaagcgattctcctgcctcaccctcccgagtagctgggattacaggcatgcgccaccacgcccggctaattttgtatttttagta

SEQ ID NO: 2818 - DNA, 1602 bp, Homo sapiens
cgggagcagcaggcactgagccgtgaggccaagaactcggacgtgctccagtccccactggacagtgctgcccgggatgaactctgaggggtagcagccagaaagccaaagcagccatcggtggcccaggctccacgtgcttactgaggacatcaggtccacctctggaccccttggcaggccacagagggctctcgtgtggggtggtgtccagccagctcttgctaagcaatcacgtgcacacaggcagcattaatggagtgcctactgcatgccagcaacagggcttggccctggggaattgggaggaaccaagccctcttcatctgttcatgtgcccagcatttattaagcacctgctgtatgcaaggttcccatgttacggcagtgaatgaggcataattgttccctccatcagcgattgattcagtcatcaagcagttactgatcagattaagaatcaggcactagtgatacacattcatttttaaaattcattcaaggatttattgagtgcctactgtgtgttgggtgccattccaggctctgggatttttttttttttttttttaagagtagagtctgtctctgtcacccaggctggagtgcagtggtgtgacggctcactgcagcctgcgcctcccagcgtccagcaattcttgtttctcggcctcccaagtagctgggactataggtgcgtgccatcacatctggctagtttttgtatttttagtagagacggggtttcaccatgttggccaggctggtctcgaactcctgacctcaagtgatctgcccgccttggccacccaaagtgctagggttacaggcatgagccactgtgcccagcccaggctctgggaatattgagataaataagatgcttctatccatttattcaagcacatattggtcacctactgtgtgcctggcactcatgtcacaaagataagttcctgattcggtacacttactgagcacctgctgtgtgcagggagctgagctatgggatgggaatgggagtaaacaaggtactttttacttttttctttttttcctcactgctagacggtgtgggaacttctcactcattggcttctttcccacacacctgaagagcactgactgtgtgccgggcactagtgatacaaaagagtgtgacagttgttcagtctgcattttcgatcatgggctacatgccgagtgctggggcacagagatgaacaagatcggttccttcacttcttcatgccacaagtgtttattgagcacctgtgtgccaggcctcacagactcccagttgggttgaagaatggttgactgagtttgattcttcctgtaccctcggtcgtctgagctgtgtgcagacaacatccccccaccacccaagagggagggtagctcttccgccaccaggggcaagcacaggtcctggtggccccacgccacatgttagcccccctggagggggcgccagttggagacgggggctgggtgtccctggcccactcccggtcccctgtgctttacctccttgcccttgtgtctcaggtgtggtccctgcctgcttgatgaagttgctctgttcaagcctttggtggg

SEQ ID NO: 2819 - DNA, 1202 bp, Homo sapiens
actacaggcatgcaccaccacacctatctaagttaaaaaaaattttttttgtagagaaggagtctcattatattgcccagggtggtctcgaacccctgggttccagtgatcctcctgcctcggcctcccaaagtgctgggattacaggcatgagtcaccatgcccagcctactactgttgttaataaaatatattacgtaagaaaaaatcttctatgaattttcaaaacatccctcagagtgttgtgtcatccccccattatggaaagccactgctaaggtgtttgagatggggaaactgaggcccagaggagcagtgcctctctcaagggtgtctgaaagcttcttcatctttttttttttttgcgatggagtcttgctttgtcacccaagctggagtgcagtggcacgatctcagctcaccgcaacctccacctcctaggttcaagcgattttcatgcctcaacttccccagtagctgggaattacaggcatgcaccaccacacctggctaatttttgtatttttagtagagacagggtttcaccaagttggccaggctggtcttgaactcctaacctcaggtgatccgtccgcctcggcctcccagagtgctgggattacaggcgtgaaccactgcgcccgggcagtttctccatctttacctcattctcctccccagggccaccatcgaggagacctactcgaaggcgatggcgaaactctccaagctggccagcaacgggacccccatggggtgagtggggtaggggtcaccaacatggggacattgggagcctcctccttggtggacatctcttcacactcggtgcatgtagaatagagtgtcatccacctcgattatggggctatttggatagagggatgtatatcattcattcacacactagctcattcattcattccacaaatattttttgagtgccttctgtgtgccaagcaccagcagcaacccagacagataaaaccccagccaccttcatgcaatgtacatctgggctgtgtgagaagagagatgttaaatacaaacaaaaacattttttttctgaggtgaaaagtgctgggaagggggccaggtgcggtggctcatgcctgtactcccagcactttgggaggctgaagtgggcggatcaccggaggtcaggagttcaagaccagcctgggcaacatggtgaaactcct

SEQ ID NO: 2820 - DNA, 1227 bp, Homo sapiens
tccctgtggcctctccttggcaggtgtttgagaagtcccccctgcgggtgaagaacttcgggatctggctgcgctatgactcccggagcggcacccacaacatgtaccgggaataccgggacctgaccaccgcaggcgctgtcacccagtgctgtaagctgcctgtcccgcctccagctttttagaccctccttgactccctcacactgaggcagggcaagtgccagaggttcccagtgcaggagagtctcaggactggtggcggggcacaggaagacaaaaggatgccccaggccccagatggcgcttttctgagagccctgccaggctcggttgtaaatcacatcacatctggaaactccctttttgggtctgcaccttgtttagactgggatccacatcaccactgttttctgggacccactgagaaccgaattgaacccctgcctagtgttgggagctggcaccttttccctggctcacctgccagggtctgtgagacccccacacctccctgattgcacctaaacccaagaatcactgtttcttatagcggtggtttaaacagaggtgcaaacagcaagcggatcttgtcgcctttggggggctgtggccgtgcccctcaaagtgaatttggaggttccacaactctagtggccagtgactgcagggacccaggccttgggctatctcgcttccccaccaccaccttcccgtgagccccgagccctcaggcagttgctgtgaccaacaggatgtgtcaggtcattgggcaggcactcaggaggtttgctgaatgcccagagcccaggcaacaccgtcaccctggccccgctcctttccacagaccgagacatgggtgcccggcaccgcgcccgagcccactccattcagatcatgaaggtggaggagatcgcggccagcaagtgccgccggccggctgtcaagcagttccacgtgagtgccctgggggactcccctggagggaagtgcctgctctgacgcaggagcccagtggggggcggctacaccttggtggccccacaggatggggtgttaagaggcttccaaccccctcaacatgcctcccttcctcacaggactccaagatcaagttcccgctgccccaccgggtcctgcgccgtcagcacaagccacgcttcaccaccaagaggcccaacaccttcttctaggtgcagggccctcgtccgggtgtgccccaaataa

SEQ ID NO: 2821 - DNA, 1227 bp, Homo sapiens; identical to SEQ ID NO: 2820

SEQ ID NO: 2822 - DNA, 1157 bp, Homo sapiens
cacacctgtcatgccagcactttcaaaggtgggaggattgcttgaggccagcaattcaagaccagcctgggcaacatagcaagaccttatgtctacaaaaaaaaccttagctgggtgtggtggtgtgcacctgtagttccagctacttgggaggctgagcaggaggatcgctagggcccaggagttggaggcagagctctgcccatctcaggcggagccaaggtctagggcagaaggggaggccaggcaccccagccccccagctctgagcacactcctaacctgcccacagtctgctcatcacctcgcttggccacatcaagctcacggacttcggcctgtccaagatcggcctcatgagcatggccaccaacctctatgagggccacatcgagaaggacgcccgagagttcatcgacaagcaggtgggcgggcaggtgggtgggcagccccgggatgcctcctcctctctcctgggacctctcttgggctgggggctggcctcagtttccccgttctccctggcccaggtgtgtgggacgccggagtacatagcccccgaggtgatcttccgccagggctatgggaagccagtggactggtgggccatgggcgtcgtcctctatgagtttctggtgggctgcgtgcctttctttggagatacccccgaggaactcttcggtcaggtggtcagcggtgcgtttcctccacgggcctgggtttgagctgcagccccaccagagctctgggcagcggtcctccacccgcatgtcagggagagaagcaggaagaggggagggagttggatgccaggtggggaggcggtggggtgctgagtgaggcgggtggctggattaattatagggtcacagaggcttcactgaagtgacttgtgaggctgggcacagtggcaaacacctgtaattccagcactttgggaggctgaggcgggaggatcatataaggtcaggagtttaagaccagcctggacaacatggtgaaaccccatctctactaaaaatacaaaaattagccgagcatggtggcgggcacctgtaatcccagctacttgggaggctgaggcaagagaatcacttgaacccaggaggcagaggttgcagtgagctgagattgtgccactgcactccagcctgggt

SEQ ID NO: 2823 - DNA, 1292 bp, Homo sapiens
cggagctggcgtccacggcgagcctgctgcgcgagcaggtggcgcagctcaagcagaaagtcctcagccacgtcaacagcggctgccagctgctgccccagcaccaggtgcccgcgtactgagtccgcgcgcggggcgcatgcgcggccaccctccccaaggggcgggctcgcgggggggtgtcgtgggcgccccggacttggagagggtgcggccctggggaccccccctccccgagtgtgcccaggaactcagagagggcgcggcccccggggattccccccccccgagggtgcccaggactcgacaagctggaccccctgctcccgggggggcgagcgcatgacccccccgccctcgcgctgcctctttcccccgcgcggccgccccgtgttgcacaaacccgcgcgtctcggctgcccctttgtacaccgcgccgcggaagggggctccgagggggcgcagcctcaaaccctgcctttcctttacttttacttttttttttttttctttggaagagagaagaacagagtgttcgattctgccctatttatgtttctactcgggaacaaacgttggttgtgtgtgtgtgtgttttcttgtgttggttttttaaagaaatgggaagaagaaaaaaaaattctccgcccctttcctcgatctcgctccccccttcggttctttcgaccggtcccccctcccttttttgttctgttttgttttgttttgctacgagtccacattcctgtttgtaatccttggttcgcccggttttctgttttcagtaaagtctcgttacgccagctcggctctccgcctccttcttcccccgccggggcctggcgggctgggcggggcctggttcgcttcccccctacacccccgcctttctctcctccctctgtccctagctcctccccttgttggagggagcagagagcgggtgtctgagagcggcccgcacatctggcgcgcagcgagcgccccctagacgcgccttggcgcggggccggctgatgtccaggttggggaggggtcttggggtctttgatctgcgtttggaactagctaatgcccccttgccttttgggaaggagagatttcgaggtggaaagggcacagccccagcccaaagcaggaaggaagagacagaaacttagtaaactttttaaccttttggtccttggtttgcctgtccgtataaaatggggagaacagtcgaaaaacttgccccataaagttgtgacgattaagagagtttatgtttacagagcagtgcttggcttacagtg

SEQ ID NO: 2824 - DNA, 1157 bp, Homo sapiens
gggcctgagctatgctgcctgcagcgctggcctctggcccctggcacccagcacatgggccacagggccagctcctcttgctggccttggctctcctgctgtttgaagctccagctttgatttcctcaagcgttcgtccagctagaaagttctctgaaacggctccctaaacggggcttacagagctggggtccccaagggagacagagagggagggatcaatgttgggtcccggcctgaccaacctgctgcgtccaggcctggcctgtggtgagggtggcgtgaaggggcgccaggcacacagagggtgtggggacaggcgtgccctgcgtgcagcctgctcaggattactggaggtgccgctgtagcgtccactcagtccctggggccctcatctcccgggaaccccctgtcacctccccagtggccacatgctcccacctcaggggcttcatggaaaatgtcatttgtcctcatggtctatctctggcctcaggcctgctggggagtcccctccccttccccatccctggggctggatacacagaaatccctctttctgttttcctcctggcaggtagatgaggggctgtgggtggttgtggcgcataggaggccccccccccgccagggagcccccagcctggcctactgccctggtctctgctccacgcctctcctacctcctcctcctcctccaggaaacccttctggctttgtcctttaggaagcctgccccaacccccaatgtgacttagtgtcctctgtcgcctagtcccccccccccgcatccctgggggctgggtctagtcccataatgaggatgccctggagttcctgccttcctcagatgctctgccccacggaggagatccaagcaccctcagtcaccacctcacacatgaggaagctgaggctggagacttaggtgacctggcctagagtttcagggcgccgggatcctgtcgaaggtcccacccacctggctctgctgcagcgccctctctctgtcctctaggtgtgtttggtggccggggccgaggtgggatcccgggcacaggcagaggccagccagagaagaagcctggcagacaggcgggcaaacagtgagcgcccacccagaccggctgctgcgccccctcctgccagggtggcga

SEQ ID NO: 2825 - DNA, 1134 bp, Homo sapiens
cccatggtggcgcccaacgacctcgtgttcgatggtgggcggagccctgggccggggtggggcgggatgggagatggggtctggaggggcccaggatccgggcagggccgagtgtgagggtccccccaggctgggacatctcgtcgctgaacctggccgaggcgatgcggcgcgcgaaggtgctggactgggggctgcaggagcaactgtggccgcacatggaggccctgcggccccggccttctgtttacatccccgaattcatcgcggccaaccagagcgcgcgcgcggacaacctcatcccaggctcgcgtgcgcagcaggtgctgtcccatcccgcatcccttgcttcctgccacctgttcttcgccacttggttccctctttttgccccaccccgcgaatccaggcctcacttgacacccggggaactgagtagcccaggcctctgtgagtccgagagtatgtacaaccaacttccctacaccctctccatcctccccacaccctcaccatccaacccacagctggagcagatccgcagggacatccgagacttccggtctagcgcggggctggacaaagtcatagtgctgtggacggcgaacacggagcgcttctgtgaggtgattccaggcctcaacgacacagccgagaacctgctgcgcaccattgaggtgggcgaacgcccgggtggagcgggtcaggcagggccagtcacagacacagctctgtgctgactgcccgccttgcccacagctcggtctggaggtgtcgccctccacgctcttcgccgtggccagcatcctggagggctgtgccttcctcaatgggtctccgcagaacaccctggtgcccggagctcttgagctcgcgtggcagcaccgggtttttgtgggcggagatgacttcaagtcaggccagaccaaagtcaagtccgtgcttgtggacttcctcattggctccggcctcaaggtgcgtgggcctagggagctgccgagtgcaggaagggggcctgggccgcgagcacctggcttgtggggccgcagggcctgcagctgctggggcttcccttgtacccacagaccatgtccatcgtgagttacaaccacctgggcaacaacgatggggaga

SEQ ID NO: 2826 - DNA, 1225 bp, Homo sapiens
gtgctgtggtggggacactgtgtcacaggggctctgctaaccaaaggtcccatgagcacctcatttcatggctgggtaaaccgaggcccaaacatctcagggcaaggatttcagcctgagggctgtttgtcctctctgagctttggttttctttctttttgaggagggtggggagactgggttcttgccattttgcccagacgctgggctgaacttgtgattctcccacattggcctctcaaatagatggaaactcggcaagtctcagttttcttaaaaaaaaaaaacaaaaaaacaaaaaaaccagaccaaccattgttcactgagctggtctctagcaccagcactgtcaccctgaagtctgtcccatcctgcccagtgtcctgcacgtggggttccccactctggtggcagagtggccattggaagtttggtttgtgccccagtgttgggccagccccctctggacagctagtgggcagagctgagggtaggagtgggggctcaggggagcgggtgcctgtttgagctgccaggtgacaggctgcatgtccctggaccctggcagggaacgggctgttgaggaagaagacgctggtcccagggccgccaggttcgagccgcccggtcaagggccaggtggtcaccgtacatctgcagacgtcgctggagaatggcacacgggtgcaggaggagccggagctggtgttcactctgggtgactgtgacgtcatccaggtgcgggctggggcgggacagggcaggggcgaggggcgtgccttgctgggtctgagtctgcctgacagctggctatccccacacaccccaggccctggatctcagtgtcccactcatggacgtgggggagacggccatggtcactgctgactccaagtactgctacggcccccaaggcaggtgagagtcagccacccttaggtctctgcaggtctcaggagggggatgggtggagtgggtgtacccctcggctcaccccatctacttgcccattttatagacaagaaactgaggctgggtgaggtggctcacacctgaaatcccagcactttgggaggttgaggtaggaggattgcttgagacctggagttccagaccagcctaagcaatatagaccgcatctctatacaaaaaaatttaaaaattagctgggtgtgggccgggcgtggtggcttacgcctgtaatcccagcactttgggaggccaa

SEQ ID NO: 2827 - DNA, 1146 bp, Homo sapiens
ccctggtaaaagattcaatttcccccagtggccttagaggctctaaaaatggcttccctaaggcctcggaggctgtcctctccacaaaaatcccagcacccttcgctcagcttataatcaggcaaagccacagggcctgaagccccaggttcaaatcctcctttggcctttggctttctctgtgaccttgggcaaatgcctttgcccctctggcctgtttcctgttctgcaaaatgttgaggggaatcttccctacttcctggagtatttgtaaacattaaataataattagctctaataatggctaacactatttgagcctgatgccaagggcttgatgcatgggttaatttctcccaacaagctggggttgttgttacacccactgtatagatgaggaaactgaggcctggagcccttgagttacacagaaagtgatcggcagtgtggggaatcagtacagtggagactttgaggggctgtgtaggattctgacccacatctctgccccccacttccagggccaattcctgtccccccagcagcatggcatcgtgtgctgaaccctctgagccctctgccccactgcccgccggggtcccaccgctcgaggacttcgaggtactggatggggttgaggatgcagagggtgaggaggaagaggaggaggaagaggaggaagaggatgacctgagtgagctgccaccgctggaggacatgggacaacccccggcggaggaggctgagcagcctggggccctggcccgagagttccttgctgccatggagcccgagcccgccccagccccggccccagaagagtggctggacattctgggtaaggagcaaaggtggatcagggtgcccttggccctggccctctcgtcccctgagcctcatttccccatctgtgctgtgagggttggaagtcacgtggtcaccaccgtgatcaccagccagaggcaactactggagatgcttcacattgatgtactctatccactgactcacacacatgcacaatgtgctgtgtccccgtttcccagatctgctaacagtggctcagagaggctgagtcacctgcccagagccacacagccagcacgccaggcgctggcagctcctaaccccatcaatgcatctttt

SEQ ID NO: 2828 - DNA, 1323 bp, Homo sapiens
aggcatccttcctggaggaagaggatgaagaccccatcccacccagcaccacgaccaccattgccacctcagaacagagcacgggctcatgtgacaccagccccgacaccgtctcgccctccctgagccccggcttcgaggacctgtcccatgtccagcctggctccccagccatcaacggccgcagccagacagatgacgaggagatgacgggcgaatagccctgctgcccggtgccttgagggggtctcagggcagcagcatacaaggtggcagcgggtaaccctgccttgttctgtcatccagggctcctttgctgccccgttctgtcacccagggctcctagggggacaaggctctctcccgaggggtgtggaattcctgggggggtctttaattctggctccttccttcctcagaacatctctattctgcaagacccctctgccatgccagggcacgcccattccagctggagtcgtggggctgggcacaggggaatttttccagagctgagcctgacgtctgctctgaagaatgcttagaaggttcccagacaccagagccagatgtcccccaccaccggtcaggacctccttgaggtgcacaagcacggtctcctctgagttcaccccagcccacccccgcacccactaattctgcttttcctgccccttgctccgtaaaagtatcaaatactttctccttggtatctcaaggaggtttctgagataggtagaagtcttgagacggaggctggccatccattcagccctgagcgtgctgagttctgtgtttctctgaatagaggtgtggaacctgaggggccagcaggcctctctgaaggcctccatggagcaaacggagccacctcgggaaagagtttaatggaatatttttgtacccgatgtttacagatgctgttgggaagttatcaataaaaagacaccattactaaaaagggaaaagtacacctagctgtggcttcttcagtccttaagccaagcaacccaaaaggagggcaagtgctggatgtggggctgggggccctgctggagggaggtgcagacaatcaggcactacagggctagaaagagatgtggcccttttttggaaccccccctggtgggagctataacaacccaagttcccgtcaccagctaggtcttccctcacgctgctgtcactgctcacaatactagtgttcccatcctcatttcataattccttctccagatctcagccttcctccagataggggagccacactagatccattccccatcagacacactcccagggttacctcatcttctgagtact

SEQ ID NO: 2829 - DNA, 1164 bp, Homo sapiens
caggcctttttgagcccaagccctcagggacaggatcaggcgctgtcctggaagcctggtcccaccccacaccccgagccccaggacagacccagcttcagaccagctctacgacagccaggacattacctattgcctgcctgcctccctcgcctcgggcaaaccaagccgcaagcttgcggtccttgtttccaaaacctgaagccgttgatttttagggccaagatagcatttttgccacacgtgctggccttcccttccttgggtcacctttttacctcttctctggcgtttgagtgggacgtccaacctcacaagcctcctcgccccagggtgagcgtgtctgtctctgttgtctgcccactgaccaccaggagcaactggtgggtttgtggccggcccctctctgggattgaggccagagactcaggcgttgggatcttcctggaacaaaggggatctctctagaacaaagctcagatggggagctccaagggagagggccagggctttgggtctgtggagacattcacctggacgccttatagggcacatgccttacgctatagctctgagaatggctgtggggcagtggcttcctggggacactagccagagctcccagccccctggatgctgccaggcctccagcagccacaaggtcacactgcagctggggttcccgaggcctcgtccacggccaccccctcctcgcctccacaccccagccagacctcatcccaccatctcttggggaggggctccgagtgtctcctttctagcgtctccaccacccataaggtcccctagccccctgctcctgtcaagggacagcccctgtcaccctgcctctgagagccctgctggcctcagatagcaggagtagggccccgggtcctgcaggctggcagccctgggcaggggctctccctgtgcctgtcctgtgctctctcagctggtggctggctctgtgcgcccatcctgtccatgtacgtggcctgcgtcgtgtcctttgtctcctgtcaggagtcaccaagtgcactttctgtcctgaatgtaacgtctgggcacttcccgccttggccctggtgacaggttctcctctggggcctgttgggtgggggttcctcatccctgtggcccccaacttccctgtgatggaga

SEQ ID NO: 2830 - DNA, 1204 bp, Homo sapiens
cacagatgagagctactcagggccatgtttgcaagttggggagttgtcctttctaaagcaaaggtgaatcccagctactcgggaggctgaggcaagaagatcacttgaacccgggaggttgcggcaagctgagaatgcactattgcaccccagcctgggcaaaaagagcaaaactctgtctccaaaaaaataaaataaaataggccaggtgcggtggctcacgcctgtaatcttagcactttgggaggccgaggtgggtggatcacgaggtcaggagttcgagaccagcctggccaacatagtgaaacactgtcttactaaaaatacaaaaaaattagccaggcgtggtggagggtgcctgtaatcccagctactcgggaggctgaggcaggagaattgcttgaacccgggaagcggaggttgcaatgagtggagatcgcacaattgcactccagcctgagcaacagtgtaagactctgtctcaaaaaataataataaactaaaataagtaaataaaataaaattgtaaaataaagcaaatgcaagtcaggtgctgccttcacccaagccaggtgatgaactgagcagtgtggggctgccccctgggagggtgcacacacagctccggcccccactacttgctgctgcctcgtcagggaggggcatggtgtccatgagatgctgtcagttctgaagccaggaaagatgtggttgctggggtcggactgggcctggaccttctatcctgaccctgtggtgctgggcaggtcacttccactccctagacctcacatggtggataatgagaatggtgacgtcctcgtggggctgccatgagggtcacggaccttgtccaccatcagtgcagtttcggccctagtcaacgtcacagaaaacagcaagcagagatcttgggctgaggcccgtcagggctaatggctggcattacttagactgggttccctggcagccaagccaaaaagggaaatcgggcagtaactaactgctgtgtaaggccagactggcagacctgcctctccccagcgacccgtcctccacacagtggtcctgcttggggtcaagcccagacactctgggctgatccctcccaagcccaagcccttgttcagcatctccaggacccctgagctgtgtagctgtcaggatctacctttattcgccccatgtcctgacgcccagcaca

SEQ ID NO: 2831 - DNA, 1158 bp, Homo sapiens
ggcttacacctgtaatcccgggactttggaaggccaaggcagggggatcacttgagcccgggagttcaagactgcagtgagccatgatggagccactgcactccagcctgggtgacagagcaagatcctgtcttgaaacaaaaaagttatacatatttattcacgtgcataagcacaggagccatataaaacattatgaaaactcaaagaagggccaggtggttgaagctgaaatacctctttgtaggggagagggcagatgggaggctgtaggtaactttagaggggaagcagatgattttaggagagatgaatggaggcaggcatcatcttgtgaatgatcctcattgagaattgaatgggactagagaacagccagtggtctgggctctaggtgtggtgtttaatgttccatctcttcttgtgtgataggagttttcaactctggttaatgacatttcagggaagggatccaaggcccttgtgttcttctttggcaagtccagtttctaggtagatagggaacttgaagaaaacagcttcctcctgtgctttgggagggaccttgaggctgctactttagtcccacctgtcaaagtgctataattcggggtatcgctttctttctttctttctttttttttttttttttttttgagacggagtctccctttgtcgccaaggctggagtgcaatggcatgatctcaactcactgcaacctctgcctcccaggttcaagggattctcctgcctcagcctccagagtagctgggattacaggggcgtgccaccacacctggctaatttttgtatttttagtagagatggggattcaccatgttggtcaggctggtctcaaactcctgacatcgtgatccacgcaccttggcctcccaaagtgctgggactacaggcgtgagccaccgcgcccagccttagggtatccgtttctgaccccctacatcttgctgcatgttgagttctcagcacctctccaggttgttttgtccctttctagggtgagaacactgaggccccaggagctccagaggcccaggccttccttatgggagcacttgctctctcctccctccctccctcctgacctgaggccctgctctctcccttctccctttcctctcccagcccctggctcc

SEQ ID NO: 2832 - DNA, 1443 bp, Homo sapiens
caaccttctctttactgttctcatcatgatgactgggtcataagatttcacacctgggccgcaggctccttggttaatgttctcttgtggttcacatcacactttccttgatgcagtcaaaagctcaccgagcactcatcctggctgggccatttaaaaggtgtcaattctgcctgccagggtgctatggctccaaggtgactggtttgtgtttccaggccatcaagagctgggagctccctcacggctgctgctgatggaaatcaaggaggaactcagttcaaactcccgattgccctgtggtcactcttagcagggcagctgtcttgggcctagctctgggtcctcagtagagccaggcagagcctctgagacaggagaggacagtgaggagttggccacttagaaagggtttgtgtttgaaggaacaatttgggacctggtggtgttttcataaatgtcccgttatgcttgttttgttatctaggtttttgtctgatgaaaatagtctggagtataaatattacaagctgaagttggcagaaatgcagcggatgagcgagaacttgcgaggagccgaccagaagccgacctcagcagactgtgcagtgagggccatgctgtactcccgggctgtccgcaacctcaagaagaaactccttccgtggcagcggcgggggctcctccgtgctcaagggctccggggctggaaggcgaggagagcgaccaccgggacccagaccctcctatcctcaggcaccaggctgaaacaccacggccggcaggctccaggcctctcacaggcaaaaccatccctgccagacagaaatgatgctgccaaggactgcccgccagacccagttggaccttctcctcaggaccccagcttagaagcctcaggcccatcccccaagccagcaggagtggacatctctgaagcacctcagacctcttctccctgcccatctgctgacagtgggtgctcactcctgtccccctcctctgggccccagtccctactctcccatctccagggtctctttagaattgggggggcctgcaatctaggcaaggcagtggataaaagctctagggacctggccaggacaagtgtacatgttggcgctttctctcttgctttcttgagagagctgcatgcgagtcctgcagctccctcctcctcttctgagagcggagctggtatgaggtgctgccccatgccttcgtgctccccgacagggtcctgctgctggggccgtgggcggtgcattgcctgaacttgggatcccatgtcctgctatatcctggcctcccttgatagtcttcgggactgccttgttctcattgcgcctcctcatccccagggtctccacagttcctgttcttggggttcgctgacctgcactgcttcctccgaatcgactaacttcaccccttctgttt

SEQ ID NO: 2833 - DNA, 1235 bp, Homo sapiens
tatcgaggtataggatgtacttttttttgagacggaatcttgctctgttgcccaggctggtgtgcagtggtgcaatctcggctcactgcaacctctgcctcctgggttcaaatgattctcctgcctcagcctcccgagtggctgggatcacaggtgcccgccaccatgcccggttaatttttgtatttttagcagagatgggatttcaccatgctggccaggctggtcttaaactcctgacctcaggtcatccacctgcctcggcctcccaaagtgttgggattacaggcatgcgccactgcacccagcgaattgtatttaatatagtgtatatcttatactatatatggtacataaatgatacaaatatattgcatatgtttacattatacaacttgacgattttatatgcatgcagattgtgaaatactcacctcaatcaacagttacctttttcttttttgtggtgagaacacttagaatctaccctcttagcaaatttcaagtataccatacaatattgttaattatagggagttccgagtttttagttgatagtacgatgttagaatcttttttttttctttttgagtcaggggcttgctctgttgcccaggttggagtgcagtggcgcaatcttggcctcccaggctcaagcgatcctgctacctcagcctcctgagtagttgggactacaggcatgtgccaccacactcagctaatttttatttttattttggtagagacagacttttgccatgttgtccaggctggtcttgaactcctgggctcaagcaatcctcctgcctcagcttcccaaagtgttgggattataggcattgacccactgcgcccagccagaatcttttttcttttattctgattcctaataagataatcattattatttgctacatccgtaatagtttcagaataacattactagtatcattatattaaagaaccacctttcttagataaaatgtagtaaactctgtgttctctcctacactttgtttttttttcccaagacagggtctcactctgtggcccaggctggagtgtagtagtgtgatcatggctcactgcagccttgacctcccaggctcaagtgatcctcccacctcggcctctcagagtgccgggattacaggctaagccatcacacccggcctcttctgtatttgcagaagttctagggaagtagggatatcaccctttcctgtgataacagg

SEQ ID NO: 2834 - DNA, 1219 bp, Homo sapiens
caggatgtgggagaaagatctcgaatctgccccagactgccctgacttaacttctgggccagtgtgaccttgggcagttctcaagcatttcttcatctgtcatgtggcggggtaggtgctcctgagctatttcgaggacggcctgcagtgctggccctgtcattcctgctccagccttgctctcagtctgcccatggctcccctttgccttctacataaaaccaaacctgtctgtggtcccagcaacttgggctaaggcgggaagatcacttgagcccaggagtcaaggctgcagtgagttaggatggcaccactgcactccagcctgggtgacggatcaagagcttgtctcaaaaacaaacaaacaaacaaaaaaatgcacttcatgccctgcagacccagtatggcccaggccttgcccatttcccagtctttccactgtactcactccctattcccccaccccagggcctttgcacaagcccccatgtgacaagccatgccctctgcctagaagtgcccttcccttggccttccccgtggccggctcctcctagcacatgaggtttcagctcacgttgccttctccaggagagacccccatctcatcacctcatgtgctctggctctgacactgggccccatctgaggtcacctcatttgtgaactctcctgtttgtcttgcccccaccatcggctggctccctgcagggaggcccctgtccccacttgctgtgccttcagcttcccgtcagtgtttttgagtgttcacctgaataaactgacaagcactcgaggtccctgccaggtggccccagcgtcctcccctgggcctgggccaagctgcaggcttcttcaggaaggggtggttctgccttatctgtccctcccaccttagcccaaggaagtgggtgtcttcagtagatgcagctagcatgtttggacagcctcaggttgggtgggggcccctcaccaaagatctcacatttccctggggttatggcctggctttccatcccccctcggccacttcaggcatatcacctcccgtctgtgagcctcggccttctcatctgaactcaggctagatctggcacactggagggccacagcccctagaaaggcgcgcttcaggggatgtccagaacataactccccccagcccccatccccgtcgccttcccttttctgtcacccaggctggagtgcagtggcgcca

SEQ ID NO: 2835 - DNA, 2166 bp, Homo sapiens
ctgacgggaccggcctgggcagagagagggacgtggaactggagggtctctgcctgggaccatccccgaggaggggcgctggagatggccctgaaggaagggcactgatggccggaattattgaaagtggggcgtcgtcccaggcggaggtgcaggacgccgtaggagatgaaggcacaggctcccgggaatgaggagggaggctgcattgattttatcagggttcttgagttcgagaatcgtaaatccagtgaagggaaaagaaggagctgatggaagactccagaaaattcttgcagatgtctgcagagccctgaccctgagacaggaggctgggtggagggcagggccatcagaacatccctggacagacctctgggagccttaggtggagagatgcacccctccaccaccttttcccttggggggttttggggggtggtggggtcattgatgaagagcccaaaggtccaggaagacctctgagactccagtggttgggtgcagggagggctgaggagagagctgagctgtggggaggtggagggatggtctctagctatgcctgcagggtgcagaaccaagttgggggctgactgtgagactgggaagggcctgaaccacctggaagggtatgggatgatgggtgagtgctagggtctcccaggagagcctggaggaggctactggttgagctcagcagagaggtctgggctggaggtgtcaccgtgctgaggttttgatgggctggctgattgggtggttaaaaccctggcaggtcacaggagagaggtcggagagagaggagaaaaacagactggggggtgggagggcagggtcctaggggaagggtggggcttcaacagccctgacccactggcttgcaggggcccatgggctggcactcatggtccctaagtgccagccagccagtctgcactagggtcccggggagggcgagcaatgaggacttagagatgagaaagatgccgccaccaacctcattactgaaaaaagatttctggtctcagtttacaagtcacaggtacagagaaaatgtcctattagtctgttattttatgtatttttattttattattattattattttgttttgagacagagtcccactctgttgcccaggctggagtgcagtggcacaatctcggctcactgcaacctctgcctcccaggttcaagcaattctgctgcctcagcctcccaagtagctgggattacaggcgcccaccaccatgtctggctaatttttgtatttttagtagagacaaggtttcatcatgttggccaggctcgtctcaaactcctgacctcaagtgatcagcccgcctcagcctcccaacatgctgggattacaggcacgagccaccgcacctggcctcagcagtcattttgaattaccgtgctaggcccggtacccatcacattagggtttttccgactaaatttagcttatttatgcctgattaaaggattattttcataattaattttactattaaataaactttatttcattttgatgataattccagaacactagtagacagctctcctgagcacataattttacataattatgtaattactggcagcaaatgggtatttactgcattcaagcaggaaaacccagcttcaccacagactgattcttctaaaacgtttaaaaataagtatatgaaaatgtgttctgaattaagaactgggtgagaaaattcctaattaaaaaaaaaaaaagccttagctgggtgtgttggcacatgactgtagtcctaactactcggtaggttgaggtgggaggatcacttgagcccaggagtttgagaccagcctggacaacatagcaagaccccatctctaaaaataaaaataaaaataggccggacacagtggctcacgcctgtaatcccaaccgtttgggaggccaaggcaggaggattgcttgagcctaggagttcaagaccagcctggcaacatggagaaaccctgtctctacaaaatagacaaaaattagttgggtatggtggcgagtgcctgtaatcccagctactagggaggctgatgtgggagaatcacttgagcctgggaggttgaggctgcagtgagcaccccagcatgccactgcactccagcctgggtgacagagca

SEQ ID NO: 2836 - DNA, 1211 bp, Homo sapiens
tgtctcaaagatgcatttgagaagcccttgggatcaagacaagtccctctgccctgtctcgtgtctggtgtctccccacaatctgagattttttggtgtgaatgtctcacttttcccaggccctggggaagggtctgagggtccctgccctttccctttgtagcagggtgaacaatgacagtgtgatgggtgcctgataaagacagggtgaggattggagtgactcagttcaaaggaagggcatcgggccaccagaaccagcagtcactgccaggaggcctggcagggcaggaggtcatggtggagaccgtgactatgacatgaccatatagtgaccctggccaacgtgggcacacaaggccagaactgctcctgcccagaatcagggacagggcctcgggcccagctgacactgcaccccccaactctcctttgcagctttctgtatgagcccaatagccaagggtacaagtactaccgacagaagctggaggagttccggaaagccaaggccagctccacaggcagcttcacagcacctgatcccggcctgaagcgcaagtcccctcctgaggccctgtcagggtccttacccccagccaccacctgccccgcctcgtccacgcctgcgcccactatcatccctgctccagctgcccccgggaagccagcctccgcagccaccgtgaagaggaagcggaagagccggtgggggcctgaagaggataaggtagagctcccacctgctgaactggtgcagagggacgtggatgcctctccctcgcctctgtcaggtgggcagaccctctccccctccctgtgttggaagggtctgacttctttcactgagcataatgtcttcaaggttcatccacagtgtagcttgtatcagaatttcattccttctgtggccatatcttccactgtgtgtacataccacatttggcttacccactcatctgtgaatgaactcttatattcacagaggttgtttacactgcttggctgttgtgaataatactgctgtgactatctgaatcgttttcagttctcttgtcggtatacctaggtgtggaattgctgggcctattgcaattctgccttttttttcttttttcttttttctttttttttttgagacagagtctcgctctgttgcccaggctggagtgcagtggtgcgatttcagctcaccataagctctgcctcct

SEQ ID NO: 2837 - DNA, 1208 bp, Homo sapiens
gagggaggggtgcagatttgctttcttgaggggttttcaccttctccctgaggcacgagggcagattgggaggtaactggagagggagagcagtcgtccccaagtgtcttgaggtgggtgggtctggagctttctttgtagaattctgttcactgcactggagaagtgatcgttcagccgatccacaccccgccctccccacagacaccggggccgaagttcccagagaagagcttccgcgtgacgaccccgcgggggtgacattctaacccgcgtttcagaggcaaccctgagttgcttgaggtcgcccagctcagctggcgcgaggtcagcagtgagcgcgtcgtgagtcagccttgggtgcggcccgcccggctttgccgccggtgagttggccacgacccttcggcctgcggagggcgctgggactcggcggggagggagccagccggagcccgcgtgggaaaccagcgcgcccaacgaggtgtcgcgtgggagcgcgccggagaggggcggtgcttccggggcggtaccgtccggccccgccccctcaactcaggggcccgccttctacgcctggaaccccgcccacgagctcctcccttctcgtcaggccccgcccctcggtcgccacgccccgcccagccgggcgcgggcgggcggcgtcgcctttaagagctccccggtgttttgggggccgcgggccgggcgcgctgacctggtgcgcatgtcccgggcggtgacgccggcgccgggctccatgtgtgcggccgaggggcgcattatctggccggcggcgcgggcgggcgggcggaccggcgcagcgagcgccgcgggcccgggcggccccacaggcggaacgagcgcgcgcggcccggcgtccccggcccctccgccgcccggccccgcgggcgaccccggaccagcagcccccgtaacctgcgcgctgccctagggcccggccgacccgcggcccggtaagttctggaccaaacttggcggggggcgggggctggggacgcacggctgagactggagcggcgcgggccgcgcagggtcggggcctcggggggctctgaaggacccctgcatgagcgtggaaaagtgagagcgagcgagttctactccttgtattctgggagcgtcttcttgcgctgccctggaaagttccttgccccgaggcggcccgggcacgtgggggccgggcg

SEQ ID NO: 2838 - DNA, 1222 bp, Homo sapiens
caacatggtgaaatcccatctgttccaaaaatacaaaaaattagctgggtgtgttggcacccacctgtggtcccagctactcaggaggctgaggtaggaagatcgcttgaacctgggaggcggaggttgcagtgagctgagatggagacattgcccccagcctgggtgacagagtgagaccctgtctcaaaaaaaaaaaaaaatttattggagacgaagtctccctttgttgcccaggctcatcttgaattcctaggctgtagtgatcctccctccttggcctcccaaagagttgggattacaggtgtgagccactgtgcccccccccacccccttaggtttctgtttttgaaacctacttttctctgtagtccattctgctataaggcttattttggaaaagcagatttgttccaacacaattgatgtgttagaggaccgtcgaggtgtaacacaaatgttgcgatggttgcgtgtggttttgttcaggagaaacactaggctagggattggaaaactatggcccacaaggtggtggcctgttttggtaaatagagtttaattcgcagacacgcccattcaggtatgtacagttgggcctccatatccttgtgttttgtgtctttgagttctaccaaccgtggattgaaaatatttggggtaagccaggcatggtggtatgtgcttgtaattctagctacttgggaggctgaggcaggaggatctcttgagcccaggagcttgagaccagcctgggcaatacagtgggaccccatctcttaaaaaaatttttttgggggctgggcacggtgactcacacctgtaatcctagcactttgggaagccgaggcaggtggattgcctgagttcaggagttcgagaccagcctgggcaacacagtgaaaccccgtctctactaaaatacaaaaagttagccaggcgtggtggcatgtgcctgtagtcccacttactcgggaggccgaggcaggagaattgcttgaaccccagaggcagaggttgcagtgagctgagattgtgccgcgccactccactccagcctgggtgacagagcaagactctgggtcttaaaaaaaaaattttttttgaaggaaaataatggaaaaaacaatacaacataaaataatacaaataaaactatagtataacagctgtttatgtagcatttacattttatggagtattataagtaatctagaggtga

SEQ ID NO: 2839 - DNA, 1155 bp, Homo sapiens
tctgcctacctcggcctcacaaagtgctgggattacaggcatgtgccactgtgcccatccataattttctttaacttctctgctacttaaaaaaaaaaaaaaaaaaaaactagtatgtactttcataaaagcagcaaaactgcttgctttaaaaaaagtgtgggggggtccggtccatgtaaatctgggtcttggtatcgttggcagacctcttcagctcggatgcccggcagtgtcatacccccgcccctggtccgaggtgggcagcaggcgtcctcgaagctggggccacaggcgagctcacaggtcgtcatgcccccactcgtcaggggggctcaggtaagcagggctgtgcacatgggggagacctggcagcctcagcagtcgtctaccttgaaagtagggcccttcccagtccttgggggcaaggtgccctgtgccttccggtcccgctccattgttgatctcagtcagatttcttgttctccccaccctaccccaacagcaaatccacagcattaggcaacattccagcacagggccaccgcccctcctcctggccccccgggcgtcggtgcccagtgtgcagattcagggacagaggatcatccagcagggcctcatccgcgtcgccaatgttcccaacaccagcctgctcgtcaacatcccacaggtgagggctgcgccacactgtgccagggagagtgtgtgtcccacctgtgactgctccccttggacccaggttctggggcacagtagtgtttccctgggctgtgtggcatgacctgccttgctctttcagagccaggcaggggcttggacttgagctcctgggggccacagggctgtctgggtcgtgggcagaagttttgtgggcagacttgctatccagcacaggtgggcagctgacgagaggggcgatgcacggacctgagctgaaggtggggtctgcttaccagccccatggctgaggaaacagcatgtggcacacagcaggtttagggggatagtcgaggcccaggagaggccggtgatgggcccggagatgccttggggggcaccggagcccatgccgccctcccggcagtggcttcttccgattgcctcctcagcaaatgttctcatgtcaccaggtgcgcctattcttagccgcac

SEQ ID NO: 2840 - DNA, 1088 bp, Homo sapiens
accaggatagctattgattaatgttaagggtgttctacccacagcaaagcacaccctcttaaaccaggcactgcctgggtcctggtcccgagagccctaccaggatcaggttcctgcaagccgtcagaatgtgggagcccccagcccaactgattgtaactgtcccctgttacctgtgacatgaacctccaacagcacctggaaacggttccctctgtcagctgctctgtagacagggctggggagatctcagagttcacacctcgcctgttgtaggggaggttgggggtagggtttggaatggccaagtgcccttggaacctcccacagctatggccgtcctgacctcatcccaggaactctacggtgaccaggaaccacccctctgacgaggtctgtagcggcccttctcagagtggaacagcccacagtgctagttgtgcctggtcttacctgtactccacggacctcggtgaagcaaaagcttcagggcagagggaatgaggcaacccagtggcagccccgctgggccccgtggctcctgctctcctattggacgtagaggcaggggagagacttctctatacaaatattctcatcacagaagggatgatccttgctgctctgccgtagggtttttgatgctgagctatgctgcacatgacgttaacctaaagaacttggactgagcttttaaaaaaggacagcaaacaattttataatccttaaagtgtaatagacggttacactagtgcagggtattggggaggctctttgggtgtggaggctgtcacttgtatttattgtgactctaaatctttgatagtaaaacaaatgtaaaaagaaatgtttgccaccagatgggaatagaagttccaataagcaggctggaatgggtggctatacgttgtatcacgaggaagttttagactctgaaggataataaatggatgatgtgtcaactggacttttcttttgtcccttctgccctggcttctctgtattgtttcgtcctagcttcccaggcaggttggagggagatggaggatgacccttagttaatgagagaagcaaagggcggggtgcat

SEQ ID NO: 2841 - DNA, 1099 bp, Homo sapiens
cctccccaccccagggccttggcttttgctattcttgcccctgcattacctgccacgatgtgccaggcctcctcctccaggaagccctcgctgactcccatcccatagcagtcctccttctcctgcactctgcctacctggccttatcatgctgcaaaattggccagagggcagacatctcccactcagagagttgaaggaaagagtctcaggattcatcccctcaaaacatccaccatctgtaggtctggctctatgtctttgttcatgtcctgtggctctggagacaccaagggggaaagacccagtttcccaacttgcttcctgcatgatcctgggcaagccactcggcttctctgaatcattagttgtttttccaacttttctaggcctggctctttttatttatgtttgtgttttttattattatcttagagacaaggtcttgttctgtcgcccaggctagagtgcagtggcgtgatcatagctcactgcagcctccacctcccagattgaagtgatcctcctgcctcagcctcctgggtcaccgggattacaggtgtccaccaccacgcccagcctagtctgaccaattgtgtaggtcacccgaatattcagttttgctccgagaggtggagacggaccccagtcattcagtgaagtggatggcagagcttcacctccagctaagtagccacattttctggcaacaaataaccttttttttttttttttttttttttttttttggagacggagcctcactctgtcacccgggctggagtgcagtggcacgatctcggctcactgcaacctctgccacccgggttcaagcgattctccaggttcaagccttagcctcctgagtagctcgtactgcaggcacccaccaccatgcctggctaattttttgtatttttagtagaaacagggtttcaccatgttgggcaggctggtctggaactcctgacctcaagtgatccacccgcctcatcctcctgaagtgctgggattacggatgtgaggcaccgcgcccggcctggccacaaataatctaattatgtcactgcccctgaaaatcggtcaccaaagggtctca

SEQ ID NO: 2842 - DNA, 1177 bp, Homo sapiens
tttgtatttttaatagagatagggtttcaccatgctggccaggctggtctcaaactcctgacctcaagtgatccacctgcctcgacctcccaaagtgctgggattacaggcgtgagccaccacggctggcctttatattgattttgtgcaaatcaaattcacatgaaatatgattgtactgcattttcataaggcgacttatctacagtcagagtggcagatctcgtttggtttgatttctcagtatggaagatctttactcttggggacaagatgatgactattcttttctcacaccctcctctgtcacctccctttcagaaagcatgctctgaattgccatcggatgaagcctgctctgttcagcgtgctctgtgagatcaaggaaaagacaggtaggctgtttagaagacactttctggccgagcgtggtggctcatgcctgtaatcccagcacattgggaggcggaggcgggcagatcacctgaggctggattccagaccagcctgaccaacatggagaaaccctgtctctattaaaaatacaaaaattagccaggcgtggtgacgcatgccggtaatcccagctactcggggggctaaggtaggagaatcgcttgaacctgggaggtggaggttgcggtgagccaagatcgcgccattgcactccagcctgggcaacaagagtgtgcggtgagccaagatcacgccattgcactccagcctgggcaacaagagtgaaattctgtctcaaaaaaaaaaaaaaaaaaaaaggcacttcctgtgtgtgactagagctgcggcagcacacctctgatcttgtctcagcccttatgtgcatggtgggccgttttgctcatcccttctgtctcgcagaagacggctaggatgttttctttctgccttatcattgccctggtttccagtatgcacactgatttattttgtagtttataactgagaaatactgttgcaaatcagtaacaagcagctgcattctaggtcgaagacctaagaggtgcttagcattcagtcatatagaaaaaggaaaaatgacagacttagggaaattgaataagaacagttttgtcggctgggcacagtggctcatacctgtagtcccagtactttgggaggccgaggcaggtggatcacgaggtcaggtgttcaagaccag

SEQ ID NO: 2843 - DNA, 1311 bp, Homo sapiens
gagagggttcttggatttcgctcaagaaagaattcagggtgagtctacagagtaaagtaaaagcaagtttattaggaaacagaaggaataaaagaatggcttactctataggcagagcagccctgagggctgctggttgcccatttttatggttatttcttgattatatgctaaacaaggggtggattatttttgcctcccaattagacaatataaagtcattttctgatgtttccatgatgtctccatggcattttgtaaactgtcatggcactggtgggagtgtagcagtgaggaccaccaaaggtcactctcatcccatcttggttttggtgagttttatccaccttctttactgcaacctgttttatcacccagatctttataacctgtatcttgtgctgaactcttgtctcatcctgtgacttagaatgcctaaccatctgggagtgcagccccataggtctcagcctcattttacccagcccctattcgaaatggatttgccctgattcaatacacctctgacatttctccttttttttttatctgagacggagtctcactctgttgcccaggctggagtgcaacggcatcatctcggctcactgcaacctccacctaccaggttcaagtatttctcctgcctcagcctccccagtagctgggattacaggcgcctaccaccatgcctggctaatttttgtacttttttttttttttttttcagtccaatcagtttactctgctttctccatctcctcctcccattagtcagccattggaactgggaaacctcctactttccccctctttgtactctttccacaattcatcttgtctttctgcagccatatcttcttaatacagactgaagtttctgtcattgagaacagagtgatccataaacctggtcatcacactttttatgagatagtaatgtgggccccagatccatggcatggtttcctctggatgcactcctggatctaatttttgtatttttagtagagacggggtttcaccatgttgaccaggatggtctccgtctcttgacctcatgatccacctgcctcggcctcccaaagtgctgggattacaggcatgagccatcatgcctggccgtaatctctgacttttttttttttttcttgagacggagtctcactgtgttgccccggctggagttcagtggcacgatctcagctcactgcaacctccgcctcccaggttcaagttattctcctgtctcagccttctgagtagctgggattataggcgcacgccaccacgcctggccagtttttgtat

SEQ ID NO: 2844 - DNA, 1193 bp, Homo sapiens
catgttggcaaggatggtctcgatcccctgacctcgtgatccacccacctcagcctcccaaagtgctgggcttacagacatgagccacggtacctggcttattttagcttttaatatgttttaaaatttggaagtataatacctctttgttctttttcctgggcgtttggctggttatagttccaaatcaaatttttaaattttagacaagttttctttctttttttttttgagacggaatttcgctcttgttgcccaggctggagtacaatggcgcaatcttggcttaccgcaacctccgcctcccgggttcaagcaattctcctgcctcagcctccggagtagctgggattacaggcatgtgccaccacgcctggctaattttgtatgtttagtagagatggggtttctccatgtaggtcaggctggtcttgaactcctgacctcaggtgatccgcccaccttggcctcccaaaatgctgggattgcaggtgtaagccaccacacccagccatagacaagatttctataatgaaactgtacttttgggatttttaaagagcttatattgaatttgtttcccactgtagtttgtactgacatcttaacaaaattaattttattgaccattgaacaaaaatacgttgaagagtgtcttttatttttattttatttgttttagagacagggttttcttacgttgtccatgctagttttgaacctctgagctcaagcaatcttcctgcccagccttcctaaatgctagtattggaggcatgagccaccgtactcaacccatgtgttttatttttagatattcttggatttgccagttttactttttaatttctagttttattcagttttggtcagaaaacaaagtgtatgattttggtcttcttatttattgtcgttttgagacaggatcatatttatcacccatgctggagtacattgacataaatttgactcactgcaacctcagcctccttgactcaagcgatctttccacctcagcctcctatgtagctgagactacagacatgcactaccatgcctcgctaatttttttggttatttgtagtaatgggtctcactagacagggtctcactgtgttactcaggctggtgtcaatcttctgatcccaagtgatcctcccaccttcatcttccaaattattgggattgtaggt

SEQ ID NO: 2845 - DNA, 1218 bp, Homo sapiens
attttctttacacgccaaaggagaggattacacagcaggtgtgcaacagattgggaatcctggcgatcatcttagaattttgtctacccacctgaatagactgttaaaatagtcttatagtttctttttttatctaagtaaacaaaagatatcatttgcaaataataattaactaccttcccattttattacaaatattaacatactttttctggcttatttttttcaagtatcattttatacatttacacacatatacaacaatgaaaattattcaattattcaatgtgttaatttttattaaaaatgattgttaggctgggtgcagtggctcacgcctgtaatgccagcactttgggcactttgggaggccaaggcgggtggatcacctgaggtcaggagttcgggaccagcctggccaaaacggcgaaacctcgtctctactaaaaaatactaaaattagccagggaaggtggcaggcacctgtagtcccagctacttgggatgatgaggcaggagaatcgcttgaacccaggaggcggaggttgcagtgagttgagattgcggtcggcgtcccccaacttcttagagggacaagtggcgtttagttggtggagcgatttgtctggttaattccgataataaatgtcaaatataacaaaaaatgcacaggtattaacatactgaatagggaaatgctgtaagattttactctaagagctaaaacaagtcaaggatgtgcactttcttcagtcttactaaacatagtactaaatgtccaagacatagaaaataaagaataaaatcaaaggcatccagattggaaaaaaaggagttaaattatcattgtatgataatcttttatctcaggctgggtgctgtggctcacacctgtaattccagcactttgggaggccgaggcaggtgcatcacctaaggtcaggagttcgagaccaacctggacaacatggtgaaacccatctctactgaaaatgcaaaaattagctgggtgtggtggcgcatgcgtgtaatcccagctacacaggaggctgaggcaggagaattgcttgaatgcggcacgcagaggttgcagtgagccgagatcgcaccattgcactctagcctacgtgacaagagtgaaactccatctcaaaaaataataaataataaaaaataatcttttatccctatacataatcctaagaaaagcctaagact

SEQ ID NO: 2846 - DNA, 1827 bp, Homo sapiens
gtgcagtggggcgatcttggctcactgcaacctctgcctcctgggttcaagcaattcttttgcctcagcctcccgagtagctgggattacaggcacgtgccaacacgtttggctaatttttgtattttttttttcagtaaggacagggttcaccattgttggtctggttgatctcgaactccttaccttgtgatctgcctgccttggcctcccaaagtgctgggattacaggtgtgaaccaccgtgcctgggaagaatttttatatttcaaattatatctactgaatgatttattgaaagatatttgcattgcttttacctatttgcttacagtaacaatgctgcagcttttccgcgctacctgcagaggggtccatacggcgttgttctggattcccgtcgtaacttaaagggaaactttcacaatgtccggagcccttgatgtcctgcaaatgaaggaggaggatgtccttaagttccttgcagcaggaacccacttaggtggcaccaatcttgacttccagatggaacactacatctataaaaggaaaagtgatggcatctatatcataaatctcaagaggacctgggagaagcttctgctggcagctcgtgctattgttgccattgaaaaccctgctgatgtcagtgttatatcctccaggaatactggccagagggctgtgctgaagtttgctgctgccactggagccactccaattgctggccgcttcactcctggaaccttcactaaccagatccaggcagccttctgggagccacggcttcttgtggttactgaccccagggctgaccaccagcctctcacggaggcatcttatgttaacctacctaccattgcgctgtgtaacacagattctcctctgcgctatgtggacattgccatcccatgcaacaacaagggagctcactcagtgggtttgatgtggtggatgctggctcgggaagttctgcgcatgcgtggcaccatttcccgtgaacacccatgggaggtcatgcctgatctgtacttctacagagatcctgaagagattgaaaaagaagagcaggctgctgctgagaaggcagtgaccaaggaggaatttcagggtgaatggactgctccctctcctgagttcactgctactcagcctgaggttgcagactggtctgaaggtgtacaggtgccctctgtgcctattcagcaattccctactgaagactggagcgctcagcctgccacggaagactggtctgcagctcccactgctcaggccactgaatgggtaggagcaaccactgactggtcttaagctgttcttgcataggctcttaagcagcatggaaaaatggttgatggaaaataaacatcagtttctaaaaaaaaaaaaaaaaaaaatgctgcaataattatgagtctataaatgactacttatatgaccatatatgtgaaagtttatatatgtgctgcattctattttattagtctactttttcacctttatactcatatcaaattgtttaatttggtagctttgtaatgtgttttgaatcaggcactttaatgcctgcagcattctttctttctttttttttttttaatattgttgggtagtttgtttttcttttgagtctctgtatacttttgaggttggtgtttctatttcttcaaaaatgcaatgagaaatttgaaaaatattgcattaaatctgtagattgcattgagcaggatggactctgcaatattaagtatttcaacctttgtgtaagagcacactcaagagtgtgttgtttagtttctatatatttgtaaatttttcagttttt

SEQ ID NO: 2847 - DNA, 1607 bp, Homo sapiens
ctaatccaaccatctagtagctggttccctctgaagttttcctaaggataacgggcgctctcgcaaaaaccccatgccacgcagttatttggtaaagcgaatgattaggggtcttggagtcaaaatgatctcaaccaattctcaaactttaaatgggttagaagcccagctcgatggcatggggccaggtatgaaatgcgagtgcctagcgggcaacttttggtaagcagaactgctgctgtgggatgaaccaaatgccatgttagggtgcctgatgctgatgcccattagaccccagaaaatgtgttggttgatatagacagcaggacggtgggcatggaagtcagaatccactaaggagtgtttaacaacaaagaatcaactcgccctgaaaaatggatggtactgaaacattgggcccatacccggccattgccagcagttgagagtggatgggagtggtgagggtggtcgctcccgctggagccccgaggatgctatgctgctatgagtgggaggaccgctgcaatgagccttgaagccttgggcatgagcctgggtggagctgtcccaggtgcagatcttggtggtagtagcaaatattcaaatgagaactttgaaggccgaagtggagaagggttccagttgaagatgggtcactcggtccccagagataggagagtgccattccgaagggatggatgatgacttccattgccctcagccaatggaaacggagtcaagttcagatttctgaatccggagtggcagagatgggcaccatgaggcattcagggaggtaatggaagtgatcctggagaagctggtgggagcccaggggagagttctttttgtgaagagcagggcaccctgtagtggattcacccttagagagaggtctgtgccttggaaagaatcatagatcaggaggcacctggtgagctctcacaggcccttgaaaatctgggggagagggtgtaaatctcacaccaggctgtaaccatatccacagcaggtctccaaggtaaacagcctctggcatgttagaacaatgtaggtaagggaaatcagcaagctggatcagtaagttcagggtaagaatttgctctaagggctttgccagtctggctggggcttgaaatggggctgggtgcaggcagtggctggatgaggtgctgtactccacccctcaacgctagcggcacccctctgcagacatcctccacccaccttgccataccttcctcttccctatccctgcccaccttgctattgccacttcctagcagccttcttagaactgatgcagaccaggggaatctgactttttaaaacaaagcatggtgaaggcctatggtgggtgttgacacaacgtgaattctacccagtgctctgaatgtcaaaatgaagaaattcaatgaagcacgagtaaatggcaggagtaaatatgtctctcttaagtgtagccaaatgcctcatcatctaattagtgactcatatgaatggatggacaagattcccactgttcctacctgctatccagtgaaaccacagccaaaggaatgggcttgacagaatcagcagggaacaaagactctgttgagact

SEQ ID NO: 2848 - DNA, 1053 bp, Homo sapiens
tattattgatactatatttatattgcatatggccaatatctttcttgcaaagataaaaaaattatcttctatattctacttatgtctgaataacctcaatatatagaagcagcataggaactgttttttgttaatttatttcaaaacatttttttgtttttgaacttagaattctagttttaaaaatactttattcaagatcttagtatttacccatggaaactaactggaaatttaaataatgtaaaattctagtatgtttgtttgatcttgttaattttcttccttgctagtaagcctgatactgtgattgcaaatggagaagatacgacatcttctgaagaggaaaaggaagatcgtaacacaaatgtgaatgcgatgcatcaagtaacagactctcatactccttgtcataaggatgttgcaagttcagaaccattcagtggtcaagtgaatagtcagttgaactgttcagtgaatggttccagttcttaccacagtgatgatgatgatgatgatgatgatgacgacgacgacgacaacattgacgacgatgatggtgataacgaccatgaggctttaggggttggagataattctataccaacaatatatttttcacatactgttgagcctaagagggtttgtatacttttaactttactaattttgcatataatttgaacattaagcattatgatattttttagaagagcaatattaacaatcattatcattgtggatagtgccagacaggaaaatcatcttttgcctcttgttctgaccaatttaagaagaaaaagggaaaaaaaatttagttagctggtattggtccattgttctctgaaacaatgcattgtttggggtctggaaggggatcagatttgagtggcaactactgtaacttcacctgtccttcattcagagagttttcttaagaatcctggagttaattatattgtggacattttggtgtgcttaggatgttgaaagtgactgcattagttaaatttttaattatgccaggttgttttctatggacataaaatgaat

SEQ ID NO: 2849 - DNA, 1199 bp, Homo sapiens
actaaccaaagacaaaccaccccacaaattagtgggctgtgcctgtgttgacacatctattctcgccctaatgatatgtttatttaactgatgactgctgtcctcattaggggctcattgttgagcccggaatagtgattatttttgctgatattccttttctgcaaagatgatttttttaaaaaatcactcttttggtgtgctatgaatccttaatgaggatagttaaatttaaaagaaacccccaaaccacccttcaggttgaaaatagaagtgtctgcaaaagcaagctgctaatttgctgattattgattgacatgattggtgacagacccaaaactttcaataaaatgaaagctcccatcactggagcatggtagcaaaaagaaacagaagcagtttcgccaatgggaaatgagtgcttggggttctagaacattctctttcctgcatgtagaaagagtcatgattctggaagtttgaatgttggtaatggcctccaaattggacccaaagctatgcgattcttggggatggatggagaaagatgtttgtaaaagcttattagctgaatactcagagtcaattaatgaacttaccaacccctgaaactcatctttctcctttagaattctaatcgaattcctgtgtggcaggtgagtattaacctcctgcttctcagacaaggagagtaagaccccaagaaacagaatcttggctaagattggggctagggttggtattaggacgtctggttaagacaaacgttttctccacccatcgctgggagcccacattttccctccatgacacaatttgaagactggttctacaaatactggcccgttcccctttacttgaatatatccaaatacataaggactgtgatcatgctgtgaggagtatgacacggtgggttgatcatggagatgttattcatgatgaaaattctatggcctcagctcaatgcccagcctttacagcagtttccaaccattttggcaccggggatctgtttcatggaaaacaattttttcatggatggagtggatggatggtttcaggatgaaactgttccacctcagatcgtcaagcattagattctcataaggagcacacaacctagatcccttgcatgcgcagttcacaagggggtctgggctcctgtgagaatctaatggccctgctgatctggcagg

SEQ ID NO: 2850 - DNA, 1222 bp, Homo sapiens
tttcaacctcctgcctcaccactgcttccttcctgagctctttccccacacctcaaaaagagtacaaagtgattccatctgcagaggtaaattctttgtttaaaaaagtactgtttttcttatcttttctggttctcctaggtatcagaacaaggtttaatagaaatccttaaaaaagtaagccaacaaacagaaaagacaacaacagtgaaagtaagtgtccccagatgcttgtggcaaatgaaaagatggatactttaaagattaatgttgagtatacatctaccacacatatttttcagcccagagacattttccttttgtcaaacacgtgaaagtttggggagaaaggctgaatctgttgggggagggttctaatttttataggctcttgactccattcccacccttttagttcacgctaagttgctttaaagacacaaatgtcttgctaaaattggtagaaatcttttctcggaaaatctgagttatgctttattagaaatgttctgacactcatttaattttcctcccagttcaacagaagaaaagtaatggactctgatgaagatgacgattattgaactacaagtgctcacagactagaacttaacggaacaagtctaggacagaagttaagatctgattatttactttgtttattgtctatatgccttttaaaaaaataaacttgttatgcaaaataaaacatttgggtaagttgttttagtatcatagccaagtggccagatctgtgttttgaatttttccccttcctaccaaaagctttttttatttttatttttgttattatactttaagttttagggtacatgtgcacaatgtgcaggttagttacatatgtatacatgtgccatgctggtgcgctgcacccactaacttgtcatctagcattaggtatatctcccaatgctatccctcccccctccccccaccccacaagagtccccagagtgtgatgttccccttcctgtgtccatgtgttctcattgttcagttcccacctatgagtgagaatatgcggtgtttggttttttgttcttgcgatagtttactgagaatgatgatttccaatttcatccatgtccctacaaaggacatgaactcatcattttttatggctgcatagtattccatggtgtatatgtgccacattttcttaatccagtctatcattgtgggacatttgggttggttccaa

SEQ ID NO: 2851 - DNA, 1149 bp, Homo sapiens
ggttgggccaaattccgctccccctacagcttgaaggggacataaccgatagcccgggaagggggcgtttgtgatcctttggagatttctttgcttatttccttctgggcagcggacattagaggaggattatcattaataggaaggggagctatagggaggctaggatatggaggtaagctgagaggtcctcctgtgggatgtaaattgcaagctttgcatacttgggtattctccttcaatgaaaagaaaacttagacataaggtatttcactccatttgccttccctcttacagaaaaggtcaggctgcaggatagtactgtagtttatacttccctcaggtggccatttttccccatcagagagagaaattggggccaggctgtagtatagaaaaaaatgagccacctctttttcagggtttgtgggtcaaattggtcccagtggcttaggatgcatttcaagggtgagcctgttgatgcctgagtgtttcccatctgaaagacaaaaccgcctgtggttttggtttgtttgtttctccccctgcccaagaacctgcaacggtccctggaccctgctgatcggaatagttgtgctcaccaatgcagcagcagaaacacctcttgcccaagaacctgcaacagtccccggaccctgctgattggagtagttgtgctcaccaacgcagcagcagaaacaacccctgcccaagaacccgcaacagtccctggaccctgctgatcagaatggttgtgctcactgacacagcagcagaaacactagttctcctagaccacaaggaggaatgaggaaggtcagatttcgtggcccttaccaacacattctcgaaaacctgcgccctttcctgtcctcctagacctcaaagaggactgagaaaaatcagatttagtggcccttactgatgcattcttggaaaactgttggagtcctaagcattctcctgttagtattgggaccttacccatgtcctataaagatgttatgcccccaaaatgaagtggagggccataccctgagggagggaagggatctccagagttggaagagtgaagccttttatccccagttatatgaataggaaggatacaatttctgaggctcccgatatcctagtttcaggaatagc

SEQ ID NO: 2852 - DNA, 1180 bp, Homo sapiens
agtgttgggattacaggtgtgagccactgcatctggcttgagtttttatttaaagccccaaacattaatgagtccctgctgtgtgctgatacccacaactgacagcttatggccacacggtctgtaggatagacaagcccataaataattctgtacacaatggtaaaacaagaactgctgttgatgtgtgtaccagaagggcagtgacgtcagcctggagagttggcctgggcctggcagggagtaaggaaagaattctgggtgcagaagacagcaaataccaaggcctaaaaaagaatgaattatttgctgtttgggaaatggaagcccacgctgagtgctgaagcacagggactctgcgcaggaagaggaggggaagcaagaaatgaatttgggtccttgtgatggcagtggctgctgccatcacgctgtgtggctagggctgcacacttcatggagccggtggaagccccgtccctcatgagttgggactggagccgcaaaccgctgctgcagacccaggccttctgctctatggagcaggcaggagccccaccctcttgggcagggctacagccacccaaactgcagctgtggatccgagcctctctgctcctgggggagccgggaacaggcagaatttgcccttccagatgcagctgcagccgcgcaggcaggagccagggacaagtgggagccctgcctcttccaagttggcggggtgggagctcccaggtgcagctgtggctgcccccccaggcacaggacgagggcatctctgtagcctgcaccatcggccatcccaggaaggacagcccccttcaccctccatccctgcaggctcaggggtgtctgcttccactgcctggcctctctccactccagcaactgctctgatcttggaggggagtcggagccaagacctgcagccatgaatggcagcaggaggaagggggtggggtccccagtaaggccccaccctcaggccagggagggcctgaattctgggggctgggctgccagtccctctgaccagagtggaaactcgtggagccttttctgggcctgccaatggcccaatcagcacacacttcttccccgctgaggtccataaaaaccctgggctcagccagagcagcgcagagaatagccagaggatgaagatggtagagacgagggg

SEQ ID NO: 2853 - DNA, 1192 bp, Homo sapiens
ggatgaagccaagcagctggcgctggccggcctcttcccttaccagccgccgccgccgccgccgccctcgcacccgcacccgcacccgccgcccgcgcacctggccgccccgcacctgcagttccagatcgcgcactgcggccagaccaccatgcacctgcagcccggtcaccccacgccgccgcccacgcccgtgcccagcccgcaccccgcgcccgcgctcggtgccgccggcctgccgggccctggcagcgcgctcaaggggctgggcgccgcgcaccccgacctccgcgcgagtggcggcagcggcgcgggcaaggccaagaagtcggtggacaagaacagcaacgagtaccgggtgcggcgcgagcgcaacaacatcgcggtgcgcaagagccgcgacaaggccaagcagcgcaacgtggagacgcagcagaaggtgctggagctgaccagtgacaatgaccgcctgcgcaagcgggtggaacagctgagccgcgaactggacacgctgcggggcatcttccgccagctgccagagagctccttggtcaaggccatgggcaactgcgcgtgaggcgcgcggctgtgggaccgccctgggccagcctccggcggggacccagggagtggtttggggtcgccggatctcgaggcttgcccgagccgtgcgagccaggactaggagattccggtgcctcctgaaagcctggcctgctccgcgtgtcccctcccttcctctgcgccggacttggtgcgtctaagatgagggggccaggcggtggcttctccctgcgaggaggggagaattcttggggctgagctgggagcccggcaactctagtatttaggataaccttgtgccttggaaatgcaaactcaccgctccaatgcctactgagtagggggagcaaatcgtgccttgtcattttatttggaggtttcctgcctccttcccgaggctacagcagacccccatgagagaaggaggggagcaggcccgtggcaggaggagggctcagggagctgagatcccgacaagcccgccagccccagccgctcctccacgcctgtccttagaaaggggtggaaacatagggacttggggcttggaacctaaggttgttcccctagttctacatgaaggtggagggtctctagttccacgcctctcccacctccctccgcacac

SEQ ID NO: 2854 - DNA, 1278 bp, Homo sapiens
agggctgagtgattctgtaaccacctgagaccttcacgtttgctgccgttgggggctcaggctgcactccccgggtcacctgacctgctgcccaggggcttccagtcctgtctgtgtggactggcacctgggctgctggagaagtctcctcccgttcggaccagcctcagggctgcacgttacctcaggaatgggccccaccatgaaggggcccatctgtcagcagcgtcttctaggtccccagctcagggagccatccccagctccagttttctcatgcgaatatgcacagttttaattcacgttgttacactagcctgccgatgagacccagacacaggcagacctggcgctcttgacccctgattccagtgaggactggccctgaggagtccttgcagacctgctgcctcccccacgacaggcccaaagatggaccccccctggccttgtgacagctccccaagtgttctccggtggagaaactgcagaggactggtgggcggggctccccagccatcaccatcctgtgtacaatggctgtagacttgtatatggctcctttaatattgtaaagatgctgatgtacaattgtcgtgcatttgtgtgaacacattgcgttcccagtccatgccataaatgatgctctcaagcaaaagactggaggctctgtcctgtgcagaagcagcagccagactcccgcattcgatgttgtgcagggaggtttgggggcggaacggattcctcccttggatccttcagttcccatcgaggaataacccgcagcagtggtggaggaaggtcagtggctgggtcctgagcttggtgttatttattgcatttgggtgcctgtcccctcagggcagcacagattctgaattctgattcacagtccctagccagatgggaactgggaaagagacagaaggcgtctgggtgcttttgaaccctgtctcaaatgtttgggattttctctctcactattctttggttggggatgatgtcctctttagacccccacgtaatggtatgagaaggtggcaggcagtggctcagccagccagggggcaccaagtcatgcagccagcgtgagacctgcagttcacctaagcacagaacgagatctcagtatgcctccatgtaaacagattcacataggcctccaatttcaatgagaccttttgcattttttctcaaagcccttatgttctaacccatgagaaccattttacctgccctctaagggccaccagcttcgacctgcctcaggggacagca

SEQ ID NO: 2855 - DNA, 1145 bp, Homo sapiens
tttcgtggaaatgagtgagacaggtttttctatgaaagtaaaagtgggggagtatatttaaagataatttaaaataaacttgagcaaagtaaaaagaaaataatacaccaataatttggaacatgagctaaatttttttttcttttttagaaagacaacaaagttgctgcatagtctacaaacaagtctctgaaaataggtgaatttctagctcttcatggtcctgaacattgatttcagtctttgcaaagaatgaagaagtgaattcgctgtacatttgtcaccagcactgggtttttgttttttgtttgtttttccgcttaatttcaaagataaaatgcagttacttttgggggtggaaggctcatcttaaaacatgagcattaaatatatttggaatagcagaaggttaagtaatttcttatgtatagttaaactaaagcagtacttcagtgggacttaacaagtattttttcatcactgaaaggttttttttttttatcactaaattgtatttggcaattgcaagttgcctgcagatagggccgtgatactgtgttttgagccacagaaggttgtgtgtgtgtgtgtgtgtgtgtgtgtgtgtgtgtgtgtatgtgtgtgtctttttcctcctttcttttggggaatcctgtaatatgaggtagcttatttcgtcaattaattagggtgctggatggtagagaattttgtcagtcaactatgtacacacagtaaatactgtttcttaggcaaaggtaacttttttatatagttgtaaaattccattatattccattgccaaagaaacattaagaactttgtatagctgtataaaaagcaactaattttttaaagaataaacattttaaagtcagcaaacatactgtgtccttgcagaagttgatgtgctgagcagcagccttatgggtgggtctttttttcttagttttccaggcttaacatttttgattttgttttttaatgtttggaacataaatgaagatttgatacattatttcattatctaaaaaggattaattattcatgctcattgtaagaacttcattttgtagcaaatggcatatcacaggatctgtccagataatcgatattttcagtatacaaatgtaaataatcacaga

SEQ ID NO: 2856 - DNA, 1120 bp, Homo sapiens
ctggctgatttttgtatttttagtagagacaggatgtcaccatgttggccaggctggtctcgaattcatgacctcaagttatccacctgccatggcctcccagagttccgggattacaggcgtgagccatggcgcccggcctctgaaagcatttattgcttgtttctgacatgtattgttgccattctctgcctttgctcactgttcctcttttctctcactgttcatgccctgagcatctctggcaggccttcggggcctgtcctaggcatatatgggtcccctcctctcctcctgactgtctgcagcacataagtccttggggagctcctactcctctaagcatacagtgggttcttggaacaaggttatggtgctaacagagacctcagggcctgcctgtctagtggatagagggccgagctatggcaccatgcccagctgggagcatggctgcctggggttggggggggcagtctttatatcctgaccgtaatccccagggtcgagccgtgctgcacgtggctctgcggaaccggtcaaacacacccatcctggtagacggcaaggatgtgatgccagaggtcaacaaggttctggacaagatgaagtctttctgccaggtaagtggctactgggccggactcacccttggccgtgtgtgtgagttatttgggaatctgggagccctaaggggcagctcttccctcttcttgtaggcaggactcaggttctcactgcagcttaagggaggggttgcctgtgtgatcgctgaccctggagtctctgctgaggcctgaatttctcctggctctgctctgaaggaatctgctgctggcagaagtggggccagtttctttcctgaattgtagacacctatggactcatggtgacaaaccacagaggcttcaaatgaaaagtggggcccctgagagacaggacagtcaggaaaggaaggagctttttcttttttctttttttttttttgagatggagtctcactctctcgcccagagtggactgcagtcgtgctatctcagctcactgcaacttccgcctcctggattcaagctattctcctacctcagcctcccgagtagctggaattacaattatgcgc

SEQ ID NO: 2857 - DNA, 2112 bp, Homo sapiens
gagctgggaaagcagctggctaagaaaatagagcctgagcttgatggcagtgctcaagtgacctctcacgacgcttctaccaatgggctcatcaacttcatcaagcagcagcgcgaggccagagtccaataaactcgtgctcatctgcagcctcctctgtgactcccctttctcttctcgtccctcctccccggagccggcactgcatgttcctggacaccacccagagcaccctctggttgtgggcttggaccacgagcccttagcagggaaggctggtctcccccagcctaacccccagcccctccatgtctatgctccctctgtgttagaattggctgaagtgtttttgtgcagctgacttttctgacccatgttcacgttgttcacatcccatgtagaaaaataaagatgccacggaggaggttgtaggctcagcctctgattttttttttcctgtgatggtgctttatgtagcagagggcaggagcgctcagcaggacgcaggctgtgcctctgcggacacttaacactaagtggtgagcgggtctagagtggagcaaggtgccctgagaagacaatagtggggtgggggcacaatcagtcaggacggcaacttggcctgtgtcaccaaatcccaagactgttttccactcctcacctctgtgactgcagaaattggatactctgttcactcgatggttctaaaaactgcattgagattatgtttgtttcgggtgaattcctggacaagaccgaggatgactgccatctcctggcaagacgctcaggtagttcttttgctttaaaaggcagatattgaaaactggaattttttttttttgagtctcgctctgtcacccagactggagtgcagtggtgcaatctcggctcactgcaacctccgcctcccgggttcaagctattctcctgcctcagcctcccgagtagctgggattacacggcgcacaccaccatacccagctaatttttgtatttttagtagtgaaggggttttaccatgttgggcaggctggtcttgaactcctgacctcaggtgatctgcccgcctcagcctcccacagtgctgggattacaggtatgagccaccacgcccggcccattttttttttttttttgacaacttttttttttttttgagacagggtcttgttccattgcccagactggagtgcagtggcatgatcacagctcactgcagccagtaatcctcttgcctcagcctcccaagtagttgagactacaggttgtaccactatgccctgctagttttttcattttttgtagagagacgggtcttttttttttttgagacggagtctcgctctgtcgcccaagctggagtgcagtagcacggtctcagctcattgcaagctccgcctcccaggttcacgccattctcctgcctcagactcctgtgtagctgggagtacaggcacctgccaccatgcccggctaattttttatatatttttttagcagagacagtgtctcactgtgttagtcaggatggtctcgatctcctgacctcgtgatccgcccgcctcagcctcccaaagtgctgggattacaggcgtgagccaccgcgcccagcaaggcgggtcttgctgtgtttcccagactagactggtcttgaattccagggctcaagagatctcccacctcagcctcccacagtgctgggattacaggcgtgagccgccacacccagcctattcaaaatttttttttcttagagacagggtctttgttgcccaggctggactgcagtgatacaatcatagctgactgaagcctcaaattcccaggctaaggtgatcttctcacctcagccttccaagtagctgggtccgcagatgcatgccagtacacccagctcatttaaaaaaaaatttttttcttttttgagagtcttgctttgttgcccaggctggagtgcagtggtgtgatctcggctcactgcaagctccacctcccggcttcacgccattctcctgcctcagcctcccgagtagctgggactacaggtgcccgccaccacacccggctaattttttgtatttttagtagagacggggtttcaccgtgtta

SEQ ID NO: 2858 - DNA, 1169 bp, Homo sapiens
aactcctggcttcaagcagtcctcccacctcagcctcccagaatgctgagattatgggcatgagccagtgctcctggcgtgaaattactctcttaacctgactcatcttttttccctagccttaaactactttaatagttccaagttgatattccacattctgccttcatttctatcatgtattatctgctagttatattagaatagtggtgagtttaggaacaccttgaaacagtgttttgtgtaaggtacagcaatagaagagaaatatggcacgttggatttttaagattatgtgtttctgtgggtacttctcctggagtaaatttgtgatataaattctatttgatattttgctaagtgaatgtctcttaaatgtctgtaattaacagttgtattattctggccatagctataagaaaattgtacaaaaaatgaagccagtaagatagttttgagtctgtgtcatcctaattaaagataactaattttttttttcccaaaaactcatactgtttgttttacttccagctgcccgaaaccatgttaatagaatgtgcctggcagctgatgttcctcttattgaaagtggaacagctgggtatcttggacaagtaactactatcaaaaaggtaaagaaaagttttatttttttaacttcccaaatatttatttgagaccttggagcaggaggaaataaactttgtatttatataaaatgaacaggtgaacatccaaaatgtaaggacttttatgcttatataaaacttaaaatgcggggccaggtgcagtggctcatacctgtaatcccagcacttcgggaggccgaggtgggcggatcacctgaggtcaggagtttgagaccagcctggcaagcatggtgaaaccccatctctactaaaaatacaaaaattagctggacatggtggccggcgcctgtaatcccagctacttgggaggctgagccaggcgaatcacttgaacctgagaggcagaggttgcagtaagctgagattgcaccactgccctccagcctgggctacagatcaagcctctgtctcaaaaaacaaacttaaaatgctataaacgtgctcaaaagactatgggcaaggaaatctttcagctctgccattttgtttcatttgacttttgtattaaaatccttagag

SEQ ID NO: 2859 - DNA, 1189 bp, Homo sapiens
ggggagggcacattttaaagatatcgcagttcagaagttctgttgtgaagcactttagtttaaaaatctgtatactttgtgtgcatgtccccatgagcttggaggcattgctgactggcatccctaggctcagtgattgtctgtagttgtacatttatttacaactacataatgtacatttatttgtatgattgtgcttcagactgatctttggagctaaatttagggaagcttttggagaggtgacttaggaaggcaggggcagtcggcagttcagggctcctttactctgcattcctcagagcacttctgcatttcgctgttttcaatgtagagattctgttagaacttccttttacaaatgtttttccttttgaaaattgttatgctgctggtatatgacatgtatctttaaatcagatttcatagtgtaatatagatcagcaatgacgttttcttgtatcttatcaattagggattatggggttcatgggatctgtctttcttttgtaagctttttaaagatgacatcaggtatctgttgacaatggacaaactatggcggaaaaggaaacctccagttccgttggactgggctgaagtacaaagtcaaggtaaagaatacattttagtcttggaacacctaagctggaaatatcctcgcgtaaagtctttgtatagccctgttgttgcttgaaaatgatatgtcttcatatattcaaacagtgcaaaaaaatatgaagaacaaaagtcactgaagtcccacacttcagaaatagccactaataacattttcaggagtgttctggtggtccgccctatgtacacagatgcaggcattcgttatacactgcgtaaatggaatcatactattgataaactctcacttgcttttgtcagtcagtatagttaactagtctcttattaacatgtagtgtttttgtattttccctgaaataaagttttgaaattgctatatatttatgtatatcttttttttttttttttttttttttgagaccgtgtctcgctctgttgccaaggctggagcgcagtggcacgatctcagctcaccgcaacctgggttcaagcgattctcccgcctcagcctcccgagtagctgggataacaggtgtgagccactgcgcctagcctatttatgtacacctttgtacccttgtgattatct

SEQ ID NO: 2860 - DNA, 1101 bp, Homo sapiens
gatcgtggtgcccacgaggtcaggagttcgagaccagcctggccaacatggtgaaaccccgtctctactaaaattgcaaaaattagctgggcgtggtagcacgcacctgtaatcccagctccttgggaagctgaggtaggagaatcgcttgaacccaggagggagaggttgcagtgagctgagatcacaccactgcactccagcctgagcgacagagccagactccatctccaaaaaacaaacaaaaaaagatataaaaaaaatgggaacattctctggccagagtattgtggggacttgggaagcaggaagtttgagtcctgggcgcaggccctggaggggctgtagcaggggattccccgcttgctgaggccaggtctggtgcgggagatcgtggctgcctccttgtggaagccaggggaactgcggaggccgagggctggtggggaatctggcgggccgggctctggctggggtgagatggaggccaaccccaggtcccgcctccccagacgctgagtccccgcgagctctggcacctggtgcatcagtgctacggctcagagctgggcctcaccagtgaggatgaggactatgtctcccccttgcagctgaacggtctggggtgagttggaggtcaaaggaggttgaagggttcgggggagaacaggacggtcggcgtgcagagttcctggagtgctggggggcctgagatggttgtatgacgtctggaggattcaggagggtgtatggggtctcaaggacacagcagtcccgcttcctcccctttcccacaggacccccaaggaagtgggagatgtgatcgccctgagcgacatcacctcctcgggggcagctgaccgcagccaggagccaagcccagtgggttcgcgccgtggccatgtcacgcccaacctttcccgagccagcagcgacgcagaccatggggtgagcggtgggttggaagaggggtgggatactgataggaagagagaggagggctgggggtgcagtgggagaagaacagcctgacagatttggaggggaatggatagggggacaggggaggcctggatggaggaacaggacagggaggggaag

SEQ ID NO: 2861 - DNA, 1336 bp, Homo sapiens
ggggctcgggagtcatccctggggtggaggccggtgggcggtgcctgccctaaggctcctggtcccctcgccccccagagtaaaggagggatcctgtccaaggcctgcgattacatccgggagttgcgccagaccaaccagcgcatgcaggagaccttcaaagaggccgagcggctgcagatggacaacgagctcctgaggcagcaggtgggtgcggggcctggagcgggtcagggcccaggagccccagatgcaaggcgctggccctcagctcccttgacctccgtcgtgtccgccagatcgaggagctgaagaatgagaacgccctgcttcgagcccagctgcagcagcacaacctggagatggtgggcgagggcacccggcagtgacgcccgccaccaccacgcagccgccgccgcccacgccggcctctgctgcccccttccccagcccttagcacagagagggacacatgcccctcccccagctgcgtttttttatagtagatttttaacaaaaaacggggagaaataatgcatttctgtggatacagtgcccaccgccctcctccacttggaaacggtatcctccctgcccatccgtctgtctgtcgcccttctcccggccctcactaagccccggcacttctagtggtctcacctggaggcaagagggaggggacagaggccctgccacgtcccgctgcctcctgctctctggaggtactgagacagggtgctgatgggaaggaggggagcctttggggggccacccggggcctggacctatgcagggaggccacgtcccaccccacctcttgtttctgggtccctgctcccctttgggggtgtgtgtgtgtgttttaattttctttatggaaaaattgacaaaaaaaaaatagagagagaggtatttaactgcaataaactggccccatgtggcccccgccttgtctgcttgtgtgtttgtccatctcaggagtggggagggggcctggggtctgcagagctccacgaggcatggttctgctgttgtgcacatggctgtgcatggtccctgccagctgcaccacccattacccagtggttggttggatggatggaggaattaaggaatgaatgtcccctttgaggccctagacgtgcatgagggtgtggggagctggggtcaaggacatgtcccatgttggaggagaggcaggggtctccgtgtcaacagttcctgaaaacacaaccagcccctggccctgccctgctgggccaaagccctcccctctgcaccagccaatagtggggcctggccttgagcccctcacccccagggagggcagatggcc

SEQ ID NO: 2862 - DNA, 1271 bp, Homo sapiens
aactgttacatgaacatatgataatcttccgaatgaaggtacatgtgtgacatccatttgccataacacattaggacacagacctctgggattaactcctgcctcttgagtgggcaggtgtaggacttgacactgggtgcaatgtggtacagtatcttttgcctgtttccatgtgacatcaaatttgttttttaatcctgctgcatttacatgagttaaagcatgaagttcttgtgcttttatgaatgcagatgataccagtaagtcagcttgttaatttgctttagtcaaaggccctagtaaattagtgtgtgctcgaatatgagtaacataaaatgggaaatttctttttcttacagtttgttgtaataaattgaatagctggtttaactgatcatccatgctatatttgattagagctgtctcaacatcccttgtagcctgtactacatatgcagaatctgatacaatattgataggttgatcaaaatcttgtaacactgtaatgactgcaaccaactctgctctttgagtcaattgatattgagttttgattactcgctcatcagaccccagaaaaggtgttggttgatatagacagcaggacggtggccatggaagtcagaatccactaaggagtgtgtaacaactcacctgccgaatcaactagccctgaaaatggatggcactggagcatcaggcccatacccggccatcgccagcagtcaatggaatgtgagtgccttagaggtcttggggccgaaacgatctcaacctattctcaaactttaaatgggcaagaagcccagctagctcagtcggtagagcataagactcttaatctcagggttgtggattcgtgccccatgctgggtgccagatgaagaggtgagttgcccctaaaaaggataccctattccttctctttcttaatttcttttagtctcaattgggactttaatgccattttcattttttcctagtccctttcctggtatatatcccatctcagtcatgattttttgatttgcggggctgtataatggagcaggcatagtgatttccgcaccccgttgttgtaataaatctcgaccccacagattaagaggaatcgaagtagtcattggctgaacagtactttcttgattatctgaccctaaacaatgtaaaatcttagtactttgatacacttctgaggctgtgcctacgccgataagtcctataacagcctttgtttaggccaattttttggccactgattgaaagcaatg

SEQ ID NO: 2863 - DNA, 1099 bp, Homo sapiens
tctcccacagctgtggccccccagagggcccctatcctgcgtccagccttcgtcccccacgtgctacagagagcaggtgaggggccagggtcatcatccctgccacataactccccccaggccctggaactccccactaacaccctgacagattccgctctctcctctgcagcagccggcccccgccctatggccctacggccccctcaccaggccctcgtgggcccccctctgcctgggccccctggaccacccatgatgctgccaccaatggctcgggctccagggcccccgctgggctccatggctgcactgaggccccctctggtgagtgtgaacagggaactaacggtcagatgtgcggtggacggggagaccatccatcctggcccaatgggctatgtctgagttggcctctctcctgactttctgtttctctaccttctcactctgcctttgtctctgtctctttctgcatctttctgtggcaaaatctgttctctccttttgtgaagggagtacagagagaaacatgctattggaatatttctcttttgattgttactgatgttcttgtctgtggctgtctctctctgcctgtgtttctccttctctgtgtttgtctggctggagactctctgcttgggtgtctcttggctgctctctggcccccaggccctttctttgttggatggaatggagatgacagtaaagtctgagcctgtgagccggcccccctcatgctctcctcttacccacaggaagagccagcagcaccccgagagctgggcctaggcctggggttgggcctgaaagagaaggaagaggcagtggtggcggcggcggctgggctggaggaggctagcgcggctgtggccgtgggggcaggaggtgccccagctggccctgcagtcattgggcccagcctgccgctggccctggccatgccattgcccgagcctgagcccctgcccctcccgttggaggtcgtccgcggcctcctgcccccgctgcgcattcctgaactcctgtccctgcgtcctcggccccggccccctcggccagagccacccccaggcctcatggctcttgaggtaag

SEQ ID NO: 2864 - DNA, 1122 bp, Homo sapiens
cctccatcattgtttatactgagcatcgcctgtggtcagtggtgggattgcactgtgtattgtttggcaccttttttgcacttgactatgtatcttgaagatccatccattcatgccagaacataaatcagcctcgttttttttcacagctgcctgctattccatctcccctgtttggacaaacagcatagtgttgacttgaggttttcaaagcagggcccacccttggagctctgtacagtgacacatctccccatcgacagctctgcagtgggcctggggttttcctgcccattactctcctcccagcatgtcagcttgttcagaacagtgatttctgtcttttggggtcactgctgattccccggcctctagaatagaggttggcacacagcaggtacctgtggatattggttgaacaaacaggtgggcaaagtgaggaagataagaagtccatccgttcagtttccccactgcggagggaataacactgtctttccacaggtcacagactgggatgagcaacgggctgaaggcacgtttcccgggaagatctgaactggctgcatctccctttcctctgtcctccatccttctcccaggatggtgaagggggacctggtacccagtgatccccaccccaggatcctaaatcatgacttacctgctaataaaaactcattggaaaagtgagactatgcgtgtgaacgggccaggcagtggcaagaagctgggctggaatcagtgccctgaccagggaggggcttgaatgagtattttctctgttttgtttttatttatttaatttaatttaattttttttttttttatgatggagtctcgttcttcacgcaggctggagtgcaatggcacgatctctgctcactgcaacctccacctccagtgttcaagcgattctcctgcctcagcctcccgactagctgggactacaggcacaccccaccacacctggctaatttttgtatttttagtagagatggggttttaccatgtcggccaggctggtctcaaactcctgacctcagatgatccacctgcctcggcctcccaaagtgctgggattacaggcatgagccaccatgcctagcgttttttaactta

SEQ ID NO: 2865 - DNA, 1221 bp, Homo sapiens
gagaccgagtctcactttgtccaggctggagtgcagtggcgtgatctcggctcactgcagcctttgcctcccgggttcaagagattctcctgcctcagtctctcgagtagctgggactacaggtgcccatcaccacgcctggctaatttttgtatttttagtagagacagggtttcaccacattggctaggctggtcttgaactcctgacctcgtgatctgcccgtctcggcctcccaaagtgctgggattacaggcatcagccaccacacccagctccctgtccctatctttcctcactgtccagcccctgaccctgtttattccctgccagctgagccctggagggcagatggaggaggtggccggggctgtcaagcagatctccgacagaggccctgtccggtctgaagatgagtcggtggaagctaagagagagcggccctcagtatgcatcgggaggagggccctgaagaagactggcgggaggagtggggctgcgggagcgcaagctgcccacacacactccgatttctcccccagggtcccgagtcccctgtgcaaggtccccgcatcaaacatgtctgccgtcatgctgctgtggccctgggtcaggcccgggccatggtgcctgaagatgtccctcgcctcagtgccctccctctccgggatcggcaggacctcgccacagagggtaggtggggagactggacagccatgtcaggtttggggatgaccccacacttgggtgacatgcaccaagagcctaggagagagggagccaagtcaggtgctcaggggttaggtggcaagtgggctggagtgctaggtcctagagcaacttcatttgggggcaccaggaacctggcgctgtgagaaagcgagagccaggttgtgggaaagcagggaagtgaggtagaagcctggtggctttgtggctccatcccctcctccctgcctgctgcaatagatacatcatcggcgtccgagactgagagtgtcccgtcacggtcccggcggggaaaggtggaggcagcaggccctgggggagaatcagagcccacaggttctggagggaccctggcccacacaccccggcgctcactgccctcccatcacggcaagaagatgcgcatggctcgatgtggacactgtcggggctgcctacgtgtgcaggactgtgggtcctgtgtcaactgcctagacaagcccaagtttgggg

SEQ ID NO: 2866 - DNA, 1156 bp, Homo sapiens
gacctttgggagagttgtggctcagataccatgagcactgcactcagcctgcctgtgtagagagcatttctaaactgcccagtttggattgtgggagtcttggtgtcacacccagccctgagttcaaataccagctctaagctgggcatgatggctcacgcctgtaaccccagcactttgggacgctgaggcgggtggatcacttgagctcaggagttcgagaccagcctgggcaacatagcaaaaccctatctctacaaaaaattagccgggtgtggtcatgtacacctctagtcccagctactcaggagggggaagatggcttgaacctggtaggtagaggttgcagggagcacagatcatgccagtgcattccagccttggtgacagagcaagaccccgtctcaaaaaaaaaacaaaacactaaaaaaacatatcccagctctgccatttattttcttgtcaccttgagcaggttatttcccctgagcctcagtttgctcccctgtaaaagacaccaccgtttacatttaccttaaaaatggtgtgatgaggccgggcgcagtggctcacgcctgtgatcccagcactttgggaggcctaggtggatggatcatctgaggtcaggagttcaagaccagcctggtcaacatggagaaactgtgtctctactaaaaatacaaaaattagctgtgcgtggtggcaggcgcctgtagtcccagctacttgggaggctgaggcatgagaatgacctgaacctgggaggtagaagttgcagtgagctgagatcgcgtcactgcaccctagcctgggtgacagagcaagactctctcaaaaaaaaaaaaaaaagaaaattgtatggtgagaaatgaatgagatgatatacatacattctttagcacatgggtggtactcaaggaagtcccttttgtcactccctttgatttaccccagttcttccccacagcccccttcctcaggtcttgaggcctccagaacaggccctggtttgctgggatgccccagacctgggcccagggtgtggatgtggcaagtccagcacccctgcactaagcggataggggtgtgttttccaggagcatctggagaatggggtccaggctgtggtgtgggtggcttcagggtcagccacggc

SEQ ID NO: 2867 - DNA, 1198 bp, Homo sapiens
gggaaccccattgtccgggaacccagagctcacagccacgatcttagacccgagcccacagagccagaggtgacactggaatcctgccgctgggaatacctaaattctcaagcccacatttgggatttcctaaaccccgccctggggccctttaggccgtggatgtttgctccgcgcccatgacctgccaaggacctctacattcaggctgggctctggatctcacattctagcgcccagacatgtcgggaacgccttacgccaacttggggtccccaccaagagaacccccaccagatctgcaccctccccttcacgcgtgcacccagtccaggctccctcaagccccacgggtgccttttagacctgaggaggttgcaaacctgatcccccatacctgccccacccatccgcggacaacccgccctcgcaaactcagacccccacccggaggcttcagattcctcccaggtccagctgccggaaatgcgtgtttgaagggagggtgtgggctcaggggcgaagcacccactggtccccttttttccccccagcagtgagtcgcagccatgttcctggttaactcgttcttgaagggcggcggcggcggcggcgggggaggcgggggcctgggtgggggcctgggaaatgtgcttggaggcctgatcagcggggccgggggcggcggcggcggcggcggcggcggcggcggtggtggaggcggcggtggcggtggaacggccatgcgcatcctaggcggagtcatcagcgccatcaggtaaggcggagactatcagaggggcggggcctgggaatgggaggagcctcagtgaggcgtggtctgggaggggcgtggtctaaaaatagaataggattaacctggaggctaacctgggtacatgaattaggccggggaggcctggtttgagagttctgctgtaagggggtggaccccagtgaggcggatatcagtcattgggggcggtgcttgatatgggagtagtctgattgtgtgggaccaggacaatgtggtcctgaggggactgatgtggagttttggcgggtggggcttatgggtctgggctcagcctgcattggctaacctggagatgaacgttaaaggtgcggagccaatgcgtctgagtgacattttacggaaggggcttgacttatgagtgtggtcagaggttttaggtgg

SEQ ID NO: 2868 - DNA, 1196 bp, Homo sapiens
tgcaggagtgagccaccacacctggcttgatttttctttgtttttctcttgcagtttatatgttcagaaaggccatgtcatttgtcctgtatatgatcaggcctggatctgaccgatcatatccctgttgcagtgtttaacttattcttctatctctgtgtttcctataaatgaatcattggatttgcagagtaggtgaatttcaggtttgagatgtacacacacacacacatacacacacacacacacacacacacacacacacacactgtttcttttttggcaggcagggctagccgtcctcctaggtgttgctgtgtatccgttagggatgtaaagctgggggcccctttctgtattggtgttagtggccgtggatgaccattgctcagagccattatttcatttggggtgtacaaaaattgtgctgttgtaattctgtccacctcttcatttattagtgggactattcctctagagagaacctgcccctcatctattattcagttatcctgagggtactggctcttttgaacttttgtttgccttagaaatgactattgaacaattgggctggtggtttctaatctgttgtgtgttttttttttttttttttcctgcagagattcaaatcttccttgtttttatgttcattcatttgacatttgccggtctccaccactgctcataccctgtcctgagcttgccaataaacagatgaaccagtccagtcatctcattgtgtgggcacggctgctccaggccttacctttgaccgggtggggccttgcgggtgtttgtcgaagtaatgagactgtggacattcccatctttctctctctttcccctgtcgtgcattgtcagaccttatagtctttggtgagttcctgctctacgccaaggaattagtcctttatgcttggggcaagaggtttttgagtatttggatttcttctgatctgaaactccattcctagacaaaagaacaataaagggctctactccattgcagaggcaagccctggtaacctggccaggggcgagccctgaccccagccactgttgtctgggtcataaattcttgagagcagtagcacgcttgaaatcatttagatgctttgggatcagttattcattatattgcacgatatctaagggcctctttgctgctagagattacaacacattcctcctgg

SEQ ID NO: 2869 - DNA, 1227 bp, Homo sapiens
gcctgactgcctgctgccactcactctgccagcttgggagttgctcaggcttgtcctccagggaggtggcattctcttctttgcatcagagactggcttaggtaggaaagccactctgttacctaggaaagaggcaacactatccagcaggtaaaacttgcccacccagttgctgggagaggcccattgccttgggctggcgaaggagataggaatgggattctctatgggaatgaaggaagagaaggagaaacgccgtgcataattggtaattggctcatcttgaagcctcacgttgggcagtcactccttagacccctgccgttgacctgcagaaaatgggagatgggtacaaacttgaggggacctgggtttggggagcctccaaagacgggaaccaaccaaacttgtctctcctttgcagatggtccatacccttacactctgaagttgtgtttctccactgctcagcacgcctcctaattaggtgcctaggaagagtcccatctgagcaggaagacatttctctttcctttatgccattttttgtttttgttatttgcaaaagatcttgtattccttttttttttttttttttttttttttaaatgctaggtttgtagaggcttacttaaccttaatggaaacgctggaaatctgcagggggagggagaggggaactgttatctcccaagattaaccttcacttttaaaaaattattgtacatgtgatttttttttttcctgttcatacatttgtgctgcccatgtactcttggcacatttcaataaaattgtttggaaaataaacacagcacttgctgggattccaggatgtctgcttttctccctctctgtcctgaagacacaggcaggcctgagcacagtcacaggccctctggaggcatacagagacccaagaggagcagggtgggctgcagactgagaatggtgctagcaattgagtctttgaggaaaatccatcaggcttagtggcattcttactgggccctgcccgagcaagctctatcaggcccagtgggtcatcacacctataattccagcaatctggggaggccaaggtggggcacatactttgagctcaggagttgaagaccagcctgggcagcatggtgaaacgtcactacaaaaaggtgggtttggtggaacacctgtagtcccagctactcgggaggctgaggcaggtgggtcagttgagcctaggag

SEQ ID NO: 2870 - DNA, 1099 bp, Homo sapiens
tcagccagttaaagggcaaggaatttggggcacatgcaaaggggatgtcctcattcaaactgtagcagatagctgttagagcccttgctgccagtgtatctccttttccagctactcttttcccatgtttccttggtcgagtggaccagtgggaagagaggggggtccctggaagaacgtaagatttgggacttgtgtggccctccctccgttataccttcctcagaagctacagcaagagccagtgggcaagtgatcacccactcaggaccactgttctgctgacccagaatccttctgggctgattggcttcaattgctgcccctagtctttcctgtgcatccttcacggatgacctccaactgttttatctgactgggtctacaacagtacagaggccagtggggcgtcatcttgtacagcaagaaaataattcttgtttttgcttcctttctcaggagaactacgatgacccgcacaaaacccctgcctccccagttgtccacatcaggggcctgattgacggtgtggtggaagcagaccttgtggaggccttgcaggagtttggacccatcaggtactgggctcagaggccaggtgttgggcttccaaagttgactcctgggtgtccttgtgtgtccacgatttctggttggaaatagtgattttgttgccatcctggtctagattctgtggccgctctgcttttgggttggccattgtactttgtgtcagattacagcaagttccatgaccctttttccttccttcgtttttcctctgccttgtagtttctagtcagtgttctctttttcagacagagcaaggtctcgctttgtggcccaggctggagtgtagtggtgcagtctcacccaggctcaggcagtccttctgcctcggcctgctgagtagctgggactataggcatgcgccaccatgcccggctaatttttacatatatatattttttgtttgtttgtttgttttgagacagtctcttgctctgtcgcccaggctggagtgcagtgacaatctcagctcactgcaagctttgtctcgtgggttcacgccattctcctgcctcagcctcccgagtag

SEQ ID NO: 2871 - DNA, 1558 bp, Homo sapiens
cacgtggccgggagatccggaaggagcttgttcacctgtaccccagggaggcccagcttgaggagcagttctacctgcaggcgctgaagctgcccaaccagacccacccagacgtggtgagcaccgtgctgggtggcagggaggccaggggcccacctagtgccacctttccgtgactcctgctgtctccctgcagcccgtcggggatgagagccaggctcgagtgctccacatggtcggagacaagccaggtgggccacaccccaggcctgggagctgacaagccctgcggtgtgggggttctggggtctcggggtgggggcccctggggtctgggaacatgtctggagcctggagaactcctggcggtacaggaggtggctccagcttcctgccttggccgagctcgagctgtctctgagaggcggtccttgggttttcattctctcccccttcaccattgggcagtctcaccctgtgttgtgtgattgtatcgtatgtgtgtgagtgtgtgtcgtgtatgtatgtgttgtgtgactgtgtgtcatgtgtgtctgtatctgtgtgtctgtatctgtatgtgtgtgtctgtatctgtgtatctgtgtgtgtctgtatctgtgtatctgtgtgtgtctgtatctgtgtgtgtgtgtctgtgtttgtgtgtgtctgtatctgtgtctgtgtctgtgtgtgtgtgtctatgtgtgtgtctatctctgtgtgtgtatatctgtgtttgtgtgtgtgtgtgtctgtgtgtgtctatgtatctgtgtgtatgtatctgtgtgtctttctctgtgtctgtgtgtatgtgtctgtctctgtgtgtctgtgtgtgtatctgcatatctccgtgtatctctgtgtgtatgtctgtatctgtgtctgtgtatctgtgtctttgtgtgtatctgtgtgtgcgtgtctgtctttgtgtgtctgtatccgtgtatctgtgtgtctgtctctgcgtgtctgtgtatgtgtctgtctctgtgtgtctgtatatgtgtgtgtgtcttcgtacctctgtgtgtatctctgtgtgtgtatgtatgtgtgtgagtgtgtgtgtgtctctgtctctctctctgacccccctgctttggtccctgtctccggggctttttctccccaactctgtgcctcctctctgattctcctcctcccttcctcgtggtgtttccttctcctctggcctctctcctctgtttctaactctgccttccccaccccgcgccctcttatttccctctctgcctcctctcatttcctctccctgtctctgtttttatctccctcccttcctgtctgtcttttcttccctttccctccctttccgtgtcttcttctcccttctctcctcctgcccctcctttattttctctcaccgtccctcctctctgctgtctctggaagcttctatctgggccccatccctctctccccgctgccttacaccggtgcttttcacccacatccagttttctccttccaacctcggggccacctggaaattggcgagaaactcgacatcatccgtcagaag

SEQ ID NO: 2872 - DNA, 1191 bp, Homo sapiens
tcttgtgcttccttccagatatgtctgcatgtaccaggaaatacttacatgcatatacagacatgtattttccttcatacagatagcataatgggccaggcacggtggctcatgcctataatcccagcactttgggaggctgaggcgggtggatcacctggagtcaggagttcgagaccagcctgaccaacatggtaaaaccccgtctctactaaaagtacaaaaattagccgggcatggtggcttgcgcctgtaatcccagctacttgggaggctgaggccggagaatcacttgaacccgggaggcagaagttgcagtgagccgagattgtgccattgcactccagcctgggcgacagagagtctgtctcaaaaaataaaaataaaaaaaatgttgaatgttggcataacgggcacatccctctgccccttactttttcctacttaacaatgtatcttggtggttgttccctgctggtacataaaaagcaattttgatcctgttagcggctgtgtaatattccattgaacagaggaaccatgaatgataggaacagccactgtcactggacatttagggggcttggagtcgtttggtgttttttattttattttgttttttattttattttgagacaaggtctcactcgctctgtcgcccagcctggagtgtagtggcacaatctcagctcactgcaacctccgcctcctgggctcaagtgattctcccacctcagcctctcaagtagctaggattacaggtatgtgccaccacgcctggctaatttttttattttattttattttattttttatttatttatttttttgagatggagtctcgctctgtcgcccaggctggagtgcagtggcgtgatctcggctcactgcaagctctgcctcccgggttcacgccattctcctgcctcagcctcccaagtagctggggctacaggtgcccgccaccacgcccagctaatttttttgtatttttaggagagactgggtttcaccgtgttagccaggatggtctcgatctcctgacctcgtgatccacccgcctcggcctcccgaagtcctgggattacaggcgtgagccaccgtgcccggccaatttttttcttttttgtagagatggggtttcaccatgttgcccaggctgttctggaactcttgagctcaagcgatcct

SEQ ID NO: 2873 - DNA, 1223 bp, Homo sapiens
ccgccagggcgtgcctggctttcaccagcaccgagtggatgctggagagtaccgtgtgagcggcgggcgggcgccgggacgcctgggtgccgcagaccaaacgcccagccgcacggacgctggggcgggactgggagaaagcgcagcgccaagacattggaccagagtggagacgcgcccttgtccccgggagggggcggggcagcctcgggctgcggctcgaggccacgcccccgtgcccagggcggggttcggggaccggctgccggcctcccttcccctatggactcctcgacccccctcctacccctcccctcgcgcgctcgcggacctcgctggagccggtgccttacacagcgaagcgcggggaggggcagggccccctgacactgcagcactgagacacgagccccctcccccagcccgtcacccggggccggggcgaggggcccatttcttgtatctggctggactagatcctattctgtcccgcggcggcctccaaagcctcccaccccaccccacgcacattcctggtccggtcgggtctggcttggggtccccctttctctgtttccctcgtttgtctctatcccgccctcttgtcgtctctctgtagtgcctgtctttccctatttgcctctcctttctctctgtcctgtcgtctcttgtccctcggccctccctggttttgtctagtctccctgtctctcctgatttcttctctttactcattctcccgggcaggtcccactggaaggaccagactctcccaaataaatccccacacgaacaaaatccaaaaccaaatccccctccctaccggagccgggaccctccgccgcagcagaattaaacttttttctgtgtctgaggccctgctgacctgtgtgtgtgtctgtatgtgtgtccgcgtgtagtgtgtgtgtgtgtgtgtgtgtgtgtgtgtgtgtgtgtgtgttgggggagggtgacctagattgcagcataaggactctaagtgagactgaaggaagatgggaagatgactaactggggccggaggagactggcagacaggcttttatcctctgagagacttagaggtggggaataatcacaaaaataaaatgatcataatagctaacgcttagtgaatacttacttactatgtgccaagcacttaagtcatttaattctcacaacaccaggacatatcggtattattatcctgttttccagat

SEQ ID NO: 2874 - DNA, 1179 bp, Homo sapiens
agccaccaagcccgacgcagtgcagcctgacagcctcccctacccacagtacctggcggtcatcaaagcccagatttcctgtgccaaggacattcacaccgccctgctggactgtgccaacaaggtcacgggcaagacacccgcaccacctgctggccctgggggcactctgtgaagtgggggacagggagtggggcaggcagtggttggtgggtggtgtgcaaagggaatgaagagcgtcctgggcctaaacacagcagcctcctctcttcctgcctgagcaccgcagcgggagccagcagggggcagcagaggccaacagggagctcgcaggccgggcccctgcgtccctgccccttcttcctgctccccctcctagcctagggtagactttgaactgtgtgtgttgatgacttctctgttccacaggccctcccccattcttgcctgggtgtggagccctggctgtcccctctccctcagtccttcctgactgtctccagctgggaggtggtctctgtgtgccactcctctgtgtctctattacagttgtgtctctctcatcctgtctctttttcccttgtttctctgttcctgttaatgtgtttctccccatggtcctatttctctcactctgacctctctctcttagtcccctttagctgtcttctatccccagctcctaactgggactctgtgtctatgcagggggccagcacccctgggttatctggggctaagggaagggacttcatttccaggggccacagccaagcccagagtcccccagcggctcgcatgtcagcccagaccccagggtccttggcctaggagaggagcagtggaggggcccaggctctgagctccacaggtctgagcagggagcaactcaggcccccacccaagcctgcgtcagcggaacttgagtgaggggcgttgtgcaatttgtggcaaggctggcccagctggatgcctgggtcccagtatttttagccccaaaggagaagtgaaaaggccccagccggggtgaatcatcagtcctggggaagaacccaggcgcctgagccccagctccgggaagcaggcactggggagggggcttcaaggagggagtgccccctcagactccctgcttccctggaagcttcaggaagctcagcctcagccttcaggcctgag

SEQ ID NO: 2875 - DNA, 1142 bp, Homo sapiens
cggtgcagaaattccggacgcccgggtccgagcctctggacccctcgggctcccggctgggtgtcacggggctcgtgtgacggcggcggcgccacatctggggcgggagagtccgatcccagctgtgaggcggggggcggtcgcccggggcttcccctcccccgctgtcgccggggctcacatcctgttcccgcctgcgggggggggaggggctgccttccggccgacccgccagcgaagggttaagaccccaccccttgttttgaatattcatgaggaggcgtgtccttctggtaggcgacacccctacattccaaacgcctcgcggacttttcccttttacagcaagggccgcgaggcgtgagaatccggaactggcaatgcactgtctcctattggtcaatgcaaaatgtttaatttgcatatataacacaaggcggggccctccggtgaggtcacgtggctatgaaccactgaagaagaccccggcgcaggggtgcggccggagctccagtggcgcaatcggttagcgcgcggtacttatatgacagtgcgagcggagcaatgccgaggttgtgagttcgatcctcacctggagcactttttttccccatcagtttttataaacttacacatctaataaaccaaccaaaacatctacatcacttagatgaatgaacgtttctatcttttgaattattgggctcaaaagactcctagggctttggcgacggtcctttgggtgttctgtattgtagggaggtgccgtttccgtcccagccaccaggtgggggtatcgtctcttattagatgctctgggcatggaattgtgtgcaaacagtttgacttctgtagagatgtgggtcctcggcaaactgtatatgactctgcctcctctgtatttctctgtctttttaatgcctcctttacagatgaacatagctatctgtcttggagttttcgacctctgttgaaaaggaaaactatgtttttgagtcgacttgttttttcaataaatattgaacattcactatgcctggcttcctttagctgtgtgtaatacagcagtgaacaagtagtccctgcccctgaggacgcgacattctagtggggaggcagattgctgtcaacataagaattaa

SEQ ID NO: 2876 - DNA, 1209 bp, Homo sapiens
gacccccatccactagtacttgaaggccagtggtggcagaagccacagaaacaagaagcccagtgagatggctaagctgcccagcatgtaacttaaatccctgttcattccccattcctttagctgctggagccagttctgcttctcggcaaggagcgatttgctggtgtagacatccgtgtccgtgtaaagggtggtggtcacgtggcccagatttatggtgagtcccaggaactgggcgcatggaggaggtggctctgggagggaggccttcacagcgctcctgtaccctttaattgtgtgtctttctcacagctatccgtcagtccatctccaaagccctggtggcctattaccagaaatgtgagtgagcatgggtccttcccatgaggtagatgggtgtgtggggatcaagtcaaggactctgtgtgattatctaaatcctcgtccctgctcttcttgccagatgtggatgaggcttccaagaaggagatcaaagacatcctcatccagtatgaccggaccctgctggtagctgaccctcgtcgctgcgagtccaaaaagtttggaggccctggtgcccgcgctcgctaccagaaatcctaccgataagcccatcgtgactcaaaactcacttgtataataaacagtttttgagggattttaaagtttcaagaactgtgtgtggccttatgtgttggtattggatgtttaaccagacagaaatcagtaaacatcctggacctattgccagtctggattttgaccctccccagaagtggtcgcgctgggcttggtgtgggtgagtggaagcagaaggcagggggtctctgtctctacacctccagtagagtccagtgtgcaggcaaagctgagatggcagtcgtttggggccattagtggctgcagaccttggcggatatatggctcatccttgtggatgtctatttttttcaagcccagcctcccaaatagcttggattacaggtacccaccaccacgccatgctaattttgtatttttagtatcgatgggtttcactgtgttggtcaggctggtctcaaactcctgacctcaagtgatccgccttcccgggcctcccaaagtgctgggattacaggcgagagccaccacccccagctgaatttttgtttttgtagagacaggtctcactatgttgcccaggcgtggtctcctgacctcaggcaa

SEQ ID NO: 2877 - DNA, 1200 bp, Homo sapiens
aggaaccgtactaccagccaccctacacgctcgttttggagctcaccggcgtcctcttgcatcctgagtggtcggtgtgtcccgggaaacccagtgggttggggatagacctgggcagtggggttgtgatgaggtggactttcagccctggctgtgctatgtgatcttggggaggagatgtcacctgtcattgcctcgctttcttcagctgggagaaggcagtcatgctaacacccactctgtagggtagtgtaggtgtgcccaggcacgctataagtgccacaaaggagccagacccgcagtcacagcctatgaacttcttgacctccaagagccacagagacagagggagagaactctgttctgggaatcccccaggctggatctttgtcctcttggggactctgaggacctctgggtcttggtgtttcactgtcctcactgtcttcccagctggccactggctggaggtttaagaagcgcccaggcatcgagaccttgttccagcagcttgcccctttatatgaaattgtcatctttacgtcagagactggcatggtgaggctctggggcaggggagggaatattggtgtggtgggaggcgtagagatctggaggaccagggctcagcctgaccttttctcgctcccttcccacccccagactgcgtttccactcattgatagtgtggacccccatggcttcatctcctaccgcctattccgggacgccacaagatacatggatggacaccatgtaaaggtgccgtgggttcatgggtgggcctctgggatttggcggagttggcaccacctgagggaaggagggcccagctctgaccctagcctcacctggcttatggttctgcccagattcgattcctgctggcaggcacatgcctgcctctagccttggccagacatctgcacccttctttgttccctggaatctgggtgtgggagtggggggaaatggggtctctctaaagaagacagttgggggttagtggtaaggtcgtacgatttagaagctggttttatcttgctgtgtctgtaacttagtgtttctgggaaggtttgcttatagttgtacatatgagactggttggggtttgtttgacccgggctctgttactgtggccagtgctgtattcaggagtccggatctgcgaatgggcctctgtgggtctggctccaagtg

SEQ ID NO: 2878 - DNA, 1099 bp, Homo sapiens
ctctattcaggaaggcagaggcctcatgacctgaatcatctctcgaaggtcccacctctcaactcttgcatttaagggttacgtttccaacacatgaactttgggggacacactagaaccatagcactgagttttacttgaattaataatgaaaacatctggtttaaagagcacacaagagaaaaacagcccaaagccctgttgtagacattagtcctttctcctctttaggccaactgcattgactccacagcctcagccgaggccgtgtttgcctccgaagtgaaaaagatgcaacaggagaacatgaagccgcaggagcagttgacccttgagccatatgaaagagaccatgccgtggtcgtgggagtgtacaggtgagcaggggcccagcaatacaccaagacagacatctctgtcccttgcaccccgagtgccatgatcctggggaccctccttcatcacctatcttcctctcacaggccaccccccaaggtgaagaactgaagttcagcgctgtcaggattgcgagagatgtgtgttgatactgttgcacgtgtgtttttctattaaaagactcatccgtctcccatgtctgctgctcattcctccccttgacctgctgacacagggagcacgcacccttggtcaattttgcggggttgggtaaattctcactcggtcacagagcgcatgctccgtttctagctgcctttgcgcagcggcagcctggatttcggttcttgggtgggattggtagctcgctgcgcatgcgtgcaggtaagcggccatctcgcgcaggcggagtgtcagtgtgggtcacgtgaggggagcggagagggagggatgggggcggagtccagggcgtgggggggccggtttgttgtggtcgccattttgctggttgcattactgggtaatcggggccctggcttgccgcgtccgccggataccctcagccagtgggcaggtctgagctcgggctccccgagcagtttgagtccccttgcccgctccttcaggtaacggcgcggggacgggtggggcggcaagcggtcgcagggaggtgggcaggacgggatccgccctgctcccgtcg

SEQ ID NO: 2879 - DNA, 1099 bp, Homo sapiens; identical to SEQ ID NO: 2878

SEQ ID NO: 2880 - DNA, 1317 bp, Homo sapiens
gggaacggggactgcctgccgccctcgccctcgtcccccaccggcggaccccggcgggcattcgagagccgcgcggccaggccctcttagccctctgccgtttggggggcacgggtgaacctgccgccccactcccaccccgccccgccccgcccgtacagccaaatcggaagggacgagcctgccctttgaaagggttttttttcttgctcctgcggagggcgccccagccatggccctcaggagctccctagaccccgcagggactgccctccatcccggccgccggggcccgccctctgcatcccgcgggcagcctgtgtgaagcggcctcccgcagcccccggcccctcccccatggaggaggaggagggggcggtggccaaggagtggggcacgacccccgcggggcccgtctggaccgcggtgttcgactacgaggcggcgggcgacgaggagctgaccctgcggaggggcgatcgcgtccaggtgctttcccaagactgtgcggtgtccggcgacgagggctggtggaccgggcagctccccagcggccgcgtgggcgtcttccccagcaactacgtggcccccggcgcccccgctgcacccgcgggcctccagctgccccaggagatccccttccacgagctgcagctagaggagatcatcggtgtggggggctttggcaaggtctatcgggccctgtggcgtggcgaggaggtggcagtcaaggccgcccggctggaccctgagaaggacccggcagtgacagcggagcaggtgtgccaggaagcccggctctttggagccctgcagcaccccaacataattgcccttaggggcgcctgcctcaaccccccacacctctgcctagtgatggagtatgcccggggtggtgcactgagcagggtgctggcaggtcgccgggtgccacctcacgtgctggtcaactgggctgtgcaggtggcccggggcatgaactacctacacaatgatgcccctgtgcccatcatccaccgggacctcaagtccatcaacagtaagtggtgtcctctccccaaaattccttccacagaacctctcaaggccaggcctaggtggtgggaaacagggtgagggacaccagatgacactgtgcctggagtgagaaggggcagcagtatgataccttcagggtgaaggtgaggtaggccttgcctgccttaagggagaaaaaggaggctcagaaaggttgaaggacttacctgcctcccaggctgcagagtcacaatcgctcagtaaacatgtatccatgaacacctgcgttccctgcatgaa

SEQ ID NO: 2881 - DNA, 1162 bp, Homo sapiens
gaaggtgggaggctcagaaggccctgccagctgtggggcgcatgggcaagggcacaggaaactcccagaggaggccgcccggggctcaggtttggggagtgggtccgtggctgagggcctccattgcggagggatgggcctttcctgtcctgtcctgtgggcagcccccgccagctggggccgtttccccagggagtctgggcaggtgtcccaggccctctcctgactggtcctccccatccacctctgccgcccacagatgacagcctgggcttactggagctggaccagcggacccacttcccccagttctcctactcggccagcatccgcgagtgagcagtctgcccacgcagaggacgcacgctcgctgccatcaccgctgggtggttttttccccctaactttttacttagcctttttggtttgtgtccccacccccacctcctcaccccctttccagttcttcttcaggcccctcccagacgcaccccagcggcccctgcagcccctgcctccagcctccagcctcacctttgtgcccagactcgcatttggaagactccacctcccgcccaggcctgggctgttgggcggttggagattcaggttttaatccacacaagccccagtgaggggtgaagcatggcgcctggggcctgcctgagtttctggcctgggtgtcgtgctggtgtctgcctccgcgctgctgcatctggacgaaggctgccttctggtgggacgcgacacccggcagacagtggtgctgccttccaggccccgtggcctaggctcggagtggccaggcacggggcggtccaatcccccacccgctgtccccctatgggggcagaaaagcaataatgtccaggggcaggcaggggcccttgggagctgcagggctgggggttagggctgctccctggtgaatggagtcagatcctaggatctgtaccatggggaaccaggagtggccgggctgggtgccgcctcctggtccggcctcctccccaccaaactgtcctcaccctatggatgaggcaggaggaacatttggggccaaacctgcctgcctcccagccccgtgccttactagggcttccttccagctggccttacctcccgctggaccctgggcctggcctggccccactgggggcta

SEQ ID NO: 2882 - DNA, 1214 bp, Homo sapiens
tatttcttctccctaaggtgcattttgctcagctgtaaacgggaaccttcctgctgagtggggcggtggggaggatgcacggagctgctgcgttggaaagcacaggcctcctgaggaggcggcgggatgaatttgggctgatgctactcctggtgattgccagacaggactgagggcacctgagagcacagaaggggctctgcagggcagtgggcacaggctcgttgttggtccttgggagagagtggtagggcctgttagctgatgggagggctccagacaggaatgtgaatcactcccaccactgtactcctgcccaaccagacgctgcatattagctctacaaacctgcacagcagcctgggaggtgggcagtgttagcactcccatctcgtagataggaaactgaggcccaggaagccacatagaatattggggtcattctcgtgagtagttcgcctctcagtgctgggcactgctgcagagcttaaggtgtctgctctcactcatcctcaccacagcctggcagctcgctgtcccgatcgtccccgttgtacaggggaggaaacgggcatagagaggttattggatttgctggaagtcagtaataggcatgatggttgaaccctgctctgtcggcgaagctgccttttgaagacagcctcatcttcttgccctgcctgctatgactggagttgtcactgttgtcatcatgatttcttttctgctttctcttctcctagacagagctggcacaaagtaggcctcagtaatccagaaatgactccattccatgcctgcttgggatgtggggtgtggctgcttctctccacccccaataccatgaccttggcccctcccaaggggggcccagggggaagagatgaggatgggaggcaccccctccccactgccctaggggcctgattgctgaacagcctcaggagccagcctttggctgttcttggtcatttgtgtgttccatctgtctccaaatattgattgaatcacttctatgtgccacgtgtagttctggatgcgatcggaggtggcagagaggttgcattggcctgtgagtgcttggtgtggctgaaggagggaacagagatctagctggactgggtgggagaggggcttgggaaggctgctgaggagcccctgtgatgtgagagcccgaggaagtgggctggacggggtgcagccaggtaaaggcc

SEQ ID NO: 2883 - DNA, 1624 bp, Homo sapiens
ggtgacccaggagccggtcacaggctcctgcctgggggcgtgggtagatttgactgagcggagcagggcgtttcacaggcctcccacttcccctccagtagcatcactgccttacagccagcaaaggcctgagggttgcctccctcctgtggttttcacaccgtgttctccagagcccgtggctgttacttttagggaaagaggaggggaggctcattgggctgatttctctgcccattcctccccaacccaaccagccggactaatactgaatagcaacgcagggcagcagtcacacctgatacagacagcacccgctgaccctgcgtccacgctgccgtgggcctgtaggcctgcgccattcccagtgctcctctggaattggaaagaccagggcttgtgactggcgcccagcacccaggtctctggttgggctcaggtgtggttgatattacgaaggcaaaataaatgagggccaggttgagagtgtgggcatgtttctccactatagctgggtgatcagggaggacctccctgaggaggtgacgtgtgggtagggactggagtgctgtgagggagccatgggaggatctgggtgaagacccattagacccaggaggaatcttctctgattcccgctttacaagtggtgagaactgaagcctggagagcctctgtagcttgtgctgagtcccccaaccaggaagtgttggggacaggctatgaatctgggcttccagagattcccccaccacagctcagtagcccctggtgagtgtgacttctgatcccacccatgggctcacccctaaggcttggtgcgggagcaggcgctctggcttttttttttttttttgaggtgtgttccagggtatcttcctagaaggagcagaacccctcagaacaaaccactagggtctccagaaggcccccgggatgggttgggatggaaaggagtgtctttcagacttgagctccaagcccctggaggacccagggtcacccctccccgggcctctcttcagcttcccagagctctcagcggaaggccctcaaccacaggcctccgggccgcacggtggggtggttccatggcaggctcttctggacagccagccaagcagcgagaggcccagctgggggagacagcctgggagcaggaccaggagggagggagtgagtgtgggaggggcgctgggtgggagctcagcctggcccccttggggcaggacccactgccaactcggcacccacagcagggcccaggtgctctgactgtgccgagcgagggacagcaagccgggtcggccaagaggagactgcatgtcagaggtcccagcaggagtttcttcagcccagccgtcctgctggagaagctcgttcgcagatgttgtttctaagggtgaggccagaaacccaagtcttcctcggtttgccactttgtgggccctttccgaatgggctggggcagttgccgctccccggttctcttctccagcctggcttcaagttcttcatggtctggtgggtttttggtgtacacttacccagctggggctgctgagtgacctggtcccgggggtagctgacgtgggtgagaaccctgctcttggcacccctctcg

SEQ ID NO: 2884 - DNA, 1419 bp, Homo sapiens
aacgccccccccacgatggtcgcgtccgggccccccgcggtgccgcgatgggctgtaccacccgtgcccggcggggggaccgcggccctcgagcccctccttcaggagctgagtgggggtggccgagcgggggcggtgggaccagcctcggggggccggggcggtggcggcgggccataccactgaggcggtggggggagcgctgcaagtttgcgggacggggagcgcaggccgcagcgtgcgcgggccgggggctggacctttcgggcgcggcgggcagatcgagcctggcgtgcgcgggctaagctatcgagggggcgcgccgcatcaagtgtagagggctgtacctttttggcgctgtggaagccgttgctgtgctgtatttacaggggtgggggcttctggggaggatgcttccccaactgtggctgggttatatcaccacggcgttgggggagccctgcttagaacgtaggggaacccaaatcagaggactgtgatgtttgtgatctttaagggactgggacggggcgggacaggccctagtgggttttaggggcgtattttgggaggactgtgatgccgattggtgaggaggggtttctgtttcctgtatttgacgtgtgtggcgttgggggtttacactgatctcagcctttattgaacttcttaacgactctggagggaacgtcatggttactggggtgctttggaccatggaggtgctgctctggattccattaccctctcagattatttaccaggcagtaacagttctttccttccataggggagggaggaaagctgtgttagaagtcactgaagttgtctgagccttaacattctgaagaggaagagggattgggcttggatttgaggagccgtgcccctgcacccgcttgttaaaacttgggaggaaggagtgtttgggggaacacctcttccccccagggaagctctctgggggcatcttgatcttgggattgtgaggacctcttcctctcatttggagacctcttggggctcagcaagacgcctgggctggagtaactagagcctccaatgggctgcttttcaacttcatccactcctaccttcccagagaagcagcaggagttcactcgtgggctgaacttggttggcagtggatgtgaagggtccaggaaccaacgcagaccactacatgctcctctgtcgctggccacgaagctgtttgtgtctcccagttaccagctcggtcacacatcatgtttacactccccaccaaggcagtaacagttggccttgcagtgaggccgggagctgttttcccagctgttcctctttgcataggccaaggggacttggagtgggggtgcccctggcccagcctggcccagggaggaaggctgctctgaagggcttgggacagtcagatcc

SEQ ID NO: 2885 - DNA, 1100 bp, Homo sapiens
ttggctaagttgttggacttgtcgaatcctgagggcaacatcataaaaggcagggtcttcctattctcatcccataaacggatgaggagatggtggtgcagcgagcccagggctcatgctgaatggcagaaccagacctgcagcagcccagcagagtgattctgtgtggatggtcgccctgagacaaggccacctctggacacatcccttcctctggtagcccacatcagtggatactaaagccagatgcaaactagcagtatctgtggcaagtggccaaggcctgggccagcctcagcccccctttctccagtgcccaagccccctgctgctgagatgagccaagagttgagctgcagccacctccacccctcctttgggcatctgacctgagttagtttggcaagtgctgcaactatagacccaactttgaaggcctgtcggggtcctgcagcagaggagacatttccctttgcaaaatcagggctaaatctctctctctctctctctttttttttttgtaatagactttatttttagaacagctttatttattcatttatagataggggcttgctctgtcacccagactggagtgcagtggtatgatcccagctcactgtagcctccacctaccaggctcaagtgatcctattgcctcagcctcctgagtacctggggctacgggcacctgccaccatgctcagctaattttttaatttaaatttttttttttttttgagatggagtgtcactctctcgcccaggctggagtgcagtggggtgatctcggctcactgtagcctgcgtctgccgggttcaagcaattctcctgcctcagcctcctgagtggctgggattacaggcatgcgccaccatgcctggctaattttttatttttagtagatatggggtttcaccgtgttaaccaggctggtctcgaattcctgacctcaggcgatttgctcacttcggcctcccaaagtgctgggattacaggcgtgagccaccatgcccggccagttgttttttttcttgtagagacgaggtctcactatattgccctagctggtctcagattcctgagctcaagcgatgta

SEQ ID NO: 2886 - DNA, 1215 bp, Homo sapiens
ggcactgtgagcgtgttcaaaagactgggccgcaggaccttctagcccacctgtgggcggggtgcaggcagcagagcctgcgggcatctgccctggccgccccaggctcctggcttcatcacgcctcccaccagctcctggatgacacagcttgtctccctcgggctctagagctaggcccgagcattcgggggatcaccccatttctcctagcctgggatggtcgtcgcagctggcctggcctgctccaggactccccttctctcatgtcctctgtgctttcttctctggctgtggccttggcagaacccacttttctacctctcccaagtgccagggggcttcttcctctcctacattccccttcttcccctgagcagggtctgctgcctcagaccccagctcatcagcctccctgtccccctcaactaagtgggtgtcacctggtgggcctcccttcccccactccccactgacctccctcactcctctgcgcctccccccactgctgtgacttctctctctccctgtcttcactttgttcatttctcttctgttttctgtccccgtggcaaggcccgactgtccgctgcgtcctgcccgaccctcctgtacctccggcctcccagcggccccctcgtcggcggtggcgtcgagcctgttgagactgttagccgccctctactcccaggctggagggacctctccagaccctgggctgcggctgaggcgcatccgttttcctgccctgggcatctgtctctgaaagtgtatggcgggtggtgggcaaggggcactgggaagggaggccagtgcctagagtgaagacagctgctgttttaatatatttttgtgactttcaaatcatttcccccactccttcagggtgagttgcaggactgtttcacactatgcgcagctgggctggggatggtggcagaggattgggctgtgtctctaaaggtcaggcttcctgcacacacatggtccatgtccctgctgcaagccctgagtcagggggagtaatggccacagtcaccattcagttaggccgccccctgcccccaataagccgtagtggttttgtcactctatcccctccccccatggatttcacctgcctgctggcacctttccaaatgatgggctccgtttgtgagaccatgagtttccactggtttggtcgcccacccctccctgctgcacagcgcccct

SEQ ID NO: 2887 - DNA, 1238 bp, Homo sapiens
tgccgtgaaaagaggtgccaccctctgtcaattaggagaggagggatgagagaggaaaggggtctccagtgtatttctccagccggggccttaaatccctcttgggagatatgggatggggtggatcggaaaataaatttttttaaatccctaccaaaatatcagctggctttttttaaaaaatcaaataccaaaatctaaatagactccaacagaaaattcaccatctcctctgaccttttcttcccatctcatgctgtgaactgtcttctgttgactttatcgctacctttcttcattctgttattcaaccatgatctctccgtttcattttataagcgttttattaatttcatttatgtatttatttttgactaggtaatgcatgtccatggtacacaaattcacaaggtttgtaaatgagaaaagacgtgaggttccttttgttctttacctgtggcctccctgccctacacggggactctagggtggaatgtagcaaagcccatccaccagccatgtactaccccccaacccggccaggctggagcgaccgtgtctggggagccgagccccgcttctcgctgcggtgagcccggactggggcacgcactgcgcagactccccgctgcagtgggcggagctcccacaggccccgccccctcctcccaccctcgttcagcctgtccagacagaagctggggcccaccggaggtagctgcagacgcctgagagcgaggccgaggcccctcaggggtaggtggggggaggctggctggggggatgggcagcggggtggcagggaggccccgatgatccctggctgagctgtgtggtgtgggggcacctgagggcggaggagccacctagaatataccccctgtcccagggctgagaaaagccaggcacaaagacctggggctccgctgacctcatccagcgctgcctttcttggggtgtctacaggttggaggagggagaagggggctgctagaggggagctgcgtgggtgctgatgggggcagggtgggcactgcagagtgaagagcaggcagcagagcgttggattttgagggatttcgaaatcctgctgaccagtgaccagcttcctctttttggggtggtgggcagtgtgccagtggcccccatgattatgaatagccccaagactaatcactcttctgtgatgtctgtccctggaaagcgtagaacaccccacacagtgcccacttttgttc

SEQ ID NO: 2888 - DNA, 1099 bp, Homo sapiens
gacaggcttctgggaggtcacagaaggtttaggcagttcagtggagtgggtatgcttacttgtggggacttgggggggtctttatcctccctacgggccttaatgtgtgcacctgataagctaggagtttgtcctggagccacagtggttcttttttttttttttttttttttcttttctttttttattgatcattcttgggtgtttctcgcagagggggatttggcagggtcacaggacaatagtggagggaaggtcagcagataaacaagtgaacagaggtctctggttttcctaggcagaggaccctgcggccttctgcgtgtttgtgtccctgggtacttgagattagggagtggtgatgactcttaacgagcatgctgccttcaagcatcgccacagtggttcttgactttgccaggaaccctcttaaactcatgagagctgctgacattcacagcgtggaccttggtggggttcatggcctcctggtgtcagtctgtggccccagaccaagcacggggatgtagataggcacacagttcacctggccgttctctgttgctgtctgtccctgtccacatccttccctgtgctcctgtcgtccatccctgtttgctggcccatgtttctagtccatccatcctgtctccaaggcaggagaagcagaagggggagggtggctgtgatgagtgagccctgggctgagggaaggaaaggggtgctgcccgctgggccgagtgcttggccctggactgcattgtgccctgggtccccactgtggcatctgcatcgaggacagtctcctgggggtggtactgggtggctgcctgttggcccaggtggagctcatccccatgtctcccacccttcactgtcccagtccctgccctccattccccctgtcctgtgtgtcacttcctccctacccatgtctgtctcttcctctgcctttatgtgtttgttcttagtccctttttctttttgctttagaacaatagttcttaatggtattttggagcctgggtctttttgagaatctgtcagaggccacagatcctctcttaagacaaatgctcatttgcttggagtttccggg

SEQ ID NO: 2889 - DNA, 1099 bp, Homo sapiens; identical to SEQ ID NO: 2888

SEQ ID NO: 2890 - DNA, 1168 bp, Homo sapiens
atggccgcctagtgtgtgtggatatggtagctggaattgcagaaaactaatgtccaaccaccctggtctccaggtacgccatcactgtctggtattttgatgccaaggagcgggcagcagccaaagacaagtatcagctaggtacctgcttccctcccttcagtccttcctattctgtgggccctcttgggcctgatgccaccccatccccctcatcagcctcttgttaaatcccaccactcatttttcttcatctctgcccaccttccttagcccactctcctggtaccccaacaggagccccatttcttcctggtcctctccccatctccccaggtttcccttggcttctttgtccttctgatgactcactgtctcctgtcccctctcacccccagcatcaggacagaaaggtgtccaagtacctgtatcacagccgcctacgcccacctagtggccagtcccagagccgcatggcagacagcttaaatgacttcaggagagccctgggcctgtgctggctgctccttccctgccaccgctgctgcttctgactttgcctctgtcctgcctggtgtggagggctctgtctgttgctgaggaccaaggaggagaagagacctttgctgccccatcatgggggctggggttgtcacctggacagggggcagccgtggaggccaccgttaccaactgaagctgggggcctgggtcctaccctgtctggtcatgaccccattaggtatggagagctgggaggaggcattgtcacttcccaccaggatgcaggacttggggttgaggtgagtcatggcctcttgctggcaatggggtgggaggagtacccccaagtcctctcactcctccagcctggaatgtgaagtgactccccaacccctttggccatggcaggcaccttttggactgggctgccactgcttgggcagagtaaaaggtgccaggaggagcatgggtgtggaagtcctgtcagccaagaaataaaagtttacctcagagctgcacacatctgactccatctgcaatttagggcctttattgaccgaggagggtatggaggtttgagggccagtgagcccaccatagtggagcctgacctcagcaggccactggctggagctggaagtctggggggacactgcccaggcca

SEQ ID NO: 2891 - DNA, 1168 bp, Homo sapiens; identical to SEQ ID NO: 2890

SEQ ID NO: 2892 - DNA, 1199 bp, Homo sapiens
acatattagtgtatctataggatgctgagttatagagcatgtgcatttatggggttttgttgtttttttcttttaatgtttttgtaaagatggggtcttgctatgttggccaggctggttcctaactcctggcctcaagccatcctcctgccttggcctcccaaagtgttgggattacaggtgtgagtcaccatccccagccatttacagttttgatagagacttctagattgccctctaaagacactgtaacagtttatctttctactagatgttacaagagtctcttaaactaaaacataaccgtattttgaaatgcctgtctctgtggccctgtactctactgatccctttggaggccctggcttcgattcggttcaacaggcttttcagagctgcttaaacgcttcttctccagcaagaaaagccattgctattttttaatgcctgatatgcttccctcctatattggctcataacctacggcctccagagaagcaaccctgagcccttttgtcctctttcctcagatcaatgaggaaatctccgtgaagcaccttccgtctacagagcctgacccccacgtggtccgtatcggctggtccctggactcctgcagcacccagctaggtaaggaggggtcagctatgcagtccagagaatagagtgactgtccctacccttggattttcaaggctcctaagcttccttttccagcgtcagacttagaatagaactaggctgaagtggaacaggtacaaggattaggtatatgccactgtctctgtcatgctgtattcaactgagaggactatggtcatgaaacaacttttctgtgaagaatcaattcttatccttcatcttttaggagagggtccaaaattctctttaggaatctattccctttctgtaaaaaggatcagtgtctcctgcccttaaaccaagctgctgataagttcccaagctccattaagttctgtctgtattttctgtccggagcctaacctagaggaaaaaggggagcagagaccagtgaggccagggctagttgggagaggggcaggggctgcctattgaaaggttttgaattttgcgggtccccaggcttcaatgaccttctggtcccaagtgactgattattctgaccaatgctgacacctcctgccttccgtttatgatcatacaaacgttccaattat

SEQ ID NO: 2893 - DNA, 1137 bp, Homo sapiens
ctggagcttgaatgccagctcggctactccctagctctgtgcctttgggcagctgactttattctctgaatctccatctcttggtttgtaaaacagggatctcaataccatctgcacccctaacgcaggacctggcacttagtagctggtgattattgttaaatactctacagaataggtagagtagctttcatgccaacagcagtgctgtaaggtaaatgctattattgcttccgtcattttctcttcacaaatacgtatgactggcaggtacatacctaagtcatattttctacctacacttcagttaatggtggagttcttaacatcagggaccttggaacctttgtatttgaacataaatattgtatgcagctgcaggtgtatcctttttatgaaaaagaagggaaaaaaaaacagttttttgtccctatctttcagcattctcaaaaggatgagtgacccaaaaatcattacagattcctgtctcagagtaatgagttccacatggttattgcctatgcaacgtcattgcctattgacatttgtcctgaaggctttcacaagtaacaaagggtgtctccttattttctatgtttggggatctgtgaatgagcctctgttcccttcagccttgcatttgtgctttcttaagaacctgtgagtgagcaaatatgtaaactaagtaacaccctgcccttgtagccttcctgaagtgccttccatacgtgtaggcctggatacttggtgaccatgagttcaaagggctcctgataagagtggaggtggggacagcgtttggctttgtcagaatggtagtttgcttgttagaaaggaatcgccagagaccgagttgccttcacataggaatgaggatcctacacaaaacagttgagcacaggatagtctaaaagccatccgtggttatccccccagctcatattgtgtacaatcagtgttctctccgctttgaagatttgtcttttaaacccttggcctcactttacctgatcctccttgtcggggcattcaagaatttttttagtctgtattgaccccagttggactcattgtcgtgaaagggagagcagtaataccattttaacactctgaggatacatacctcttttggatacc

SEQ ID NO: 2894 - DNA, 1278 bp, Homo sapiens
agtggccgccatactacgggaactacgactacgggagctactccgggaacacacagggtggcacaagtacacagtagccagtgtgacccagaggctcccggaggcccctgccggcttcctccaccagcgcctgcctcggcccctcctctgcccccgccagatcccgtggtgctggggatggggtcatcccagggctgcctccctccagcccactgcctcccctctgaggggcttccttcccctccatagggccaggcatttttttctggattcaaacaggcaacaatgaccttttattttctgtttgtccccacctccccagccttccacctcctgttcttcctaccttcttcctttttgactaaataatccccacctcccttgatcatacagtgaggctacagtgactgaggggagaatcccctcctgttcactctcccaaccctgctccagcccctcagcttcccagaccctcatgcagttggttgtaaattctcccaggagctgttttactgtctacttttcaggattaaaaaaaaaatcaaaacttaaaaaaaaaaaagtttaaaaagcaaaatggggagggggaggaagcagtgacttttttttggtaattatgcgcttttttttaatttttagaatttgtctttttactgtgggtgggctgttgatatttcatcaagataagcatttctttcctgagttcaggtgactgaggaagagccacaaaacaaaacacaacaaaaccaaaccacagaatcatctttaacccaactttttatacgatgccccagttccccataactttgcacacaagcttctgtgttcagttgaattgtaactgctttttgtatttggagagagtgactattgaacttgaaaccttttattccgggcgtcttggtagtttctggtgggattcagtgggtgagagggaagaaggggaggttggggggctccttcccttcagaacttgaagtttctcccactgcctcctctccagtggtctcccaggtgccagacccaaaagcttttcctacagtgataccctttatttttacttccccttgactcatatgttttaacatgattttaacaaactgcacttattaagaaatgtgtttgccctgttttgtttggtttcgttttgttttctttgaataaatgacatggcacctcctagcaggaaggaagcagggttgaaaccctgaagtgttactgcagttggccgttaattggggtgggggcctctttaaagggaaattatttactcattca

SEQ ID NO: 2895 - DNA, 1322 bp, Homo sapiens
tgggggaaacgggagttacaatgaaatgaaggaatcgttagattgggataagtttgcatgaggcaggtagaagtttagcctggaaaggtaggaggattcgtctagagagcaagggaaggctcagcttggtacagggaaggaggtaatttgagaagggctggtctgaggcaatgcaggaattaggccggggtagagaggtttctgttaatttgagagttagcctggtaaggaaatgaattagggacatggaaaggattggtctggaactgggaagaggttaatttcggggggaaggaatggaggaaaagaaggtcagcccgcgacaagggagggaataatctgggcaaagtagtgaagaggaccggtaaagctgaggggggtgggtgtccccctaaaacgagtcctacttcgcgttcctgggggaatcatttcctagagacaccgcaaccgcacccacccgccgcctgcgcgtgaccaagatctcacccttatcgggttccttcgccgccgtcgccgtcgccacggcctccatcctgattctctcggacttttcaaccgcccggcgggccccgcacactaacctccggcccacgcacgcaagagacactttcgcctgagaatgttccgggtccgggtgcaccgctgcgcccaggcaccgaagttccgggcctaaggcagacgttgcattgcgcatgcgtgcctctctcgggctccgccctccgcagccaggaaggaaaggggctccccggagagtgagagacccttaaacctctcctgtcagtcagtaggaaccagaatcattgttcgttttatcactgctgtgactccagctcccagcgtgcttaattttgggatggatggctaaaggactttcccccggagcctggagccgtcatacgctgagggttcgtgctctcgtttagacccccgcttgtccttttcctttcttaactccttcaggaattcaggaatattactaagccttgactcttttttttttttttttttttgagacagggtctcgctttgtcgcctagacgaatgcagtggcgcgatcacagttcaagtaacctcacattcctgtgctcaagtgatcctcctgcctcagcctttggagtacttgggactacaggcgcgcacaaccgcgcccggctaatttttaaaatttttttgtagagccaggggtcccactttgttgcccaggctagtccccaactcctggcctcaagcaatcctcccgcttcagcctctcaaaatgctgggattacgcgcgtgagccaccagcctggcttacttccgtcatcataccctgtctctggctg

SEQ ID NO: 2896 - DNA, 1189 bp, Homo sapiens
ctcaaaactgcctcctggagtccacggttcctgacctccgagcctcagctatgccctctgggtcaaccagaattagagccagacagggaaagtgagagctggatggaggcagacaagatgctcagagcgactattaaagaacgaaagcctctgctacggagcgcttctgtcctctgtcaggcccgagcgaagtgcctgacaccgggttggatcctcagatggccccatgaactagtgaagtgggtcaaaggaggcctggaaagatgttgcttcctcaaggccactcggccatcagaggcagaaatgaaacaggaacccaggcctagaatcacaaaggtcctagaaaccacttggctgtctggcctctcaggtgtcagggccatccagagtgagacagcattggagggacaagtgtgcatgcagatgtcctcagacgggaaggtttgagaagggtcagatggtaggcgggcctaacaagggctccgtgctagccactgtcccgcacacagacaggatcaggtcatcttgatatggagatcagtccccaaatcactgaattgtcccagcagtgctatgccctaggtactaccaatatcactcctctatttcccagaggaggaagcagcagctagactccaggaccttggggtcatatctctcagaaagccaagagtgcaggatgagagctgtctgtctcttacctgcctgtatttgtgccccatttttaaagagcagagggcctgggccacaggaaaggtatcagcccttggtgataggcacattttttaccagtctatcatttggtcattaaatttgtttacaatatactttgctatacgtaaatttgttgtgtaggtttttaaaaagcgatgagagacacagaaattgagtcagaattagggttagtcagatggtcaagacgtgagcatctagctgacagacagaggtggagccagtcccagggacagggattagatggggagacaggaagagaggtggagacagagtggggtagggatgacgggagacacaccccctggtcactgcctctgagacctgggggtggtgggccccagggcgggtgcctcccatccccctcccagttctcccggggtcggggtaggtggaaaggctgagtcagggagggcgggccccgctgggagacaacccctaggtgggcatccggccc

SEQ ID NO: 2897 - DNA, 1171 bp, Homo sapiens
catgcaggcagagggcgaaatgtgaaattccactactcctaccgtttttccctgacccgatggggcggagtgtcgtcaggctaagttccctggcggtaaggtggggagattgaggcgcacacctgccgaacggtaacgcaggattagctaaggcgagctcaggacagaagcctcccgaggagcaggagggcaaaataataaataaataaataaataataaataactcactccttggtctttatttgcggcaggaattcagaaggtgaaagcggggccttaggatctttctgaccttttgggttttaagcaggaggtgtcagaaatgttaccacagggctagctggcttgtggccagcaagcgttcacaatgccctcgatttttcatccctctctgtgggttctttttttcattgtaaggcagaatttctacgattgctcacccactcagagaacctgagctggtttagaccaggtgagacaggctaggtttaccctggtgatgatgtgttgttgccatggcgatcctgcccagtaccagaggccctgcagattcagatgcttggtgcctgtgcttggctgaggggccaatgggtgaagctgccatctgcgggatgatgactgaagcctctaagtcagaatccgcccaggctgagccttagggcagctccatggagcctcggctggcctgggatagagagtccaccactgtgccagcccccagccactgcctaggtcctgtgctgagagccccttgtccagggaaatggcgtccagtggaaaagggaccacccccttgcccttcactcaaggcaggttggtgacaaccctgaagctaatccgttcctagaggagctgcttctgggtccgagttttctctgcagcagagcagctccctggatgggatctgttcaaagtccgcctttcacgcggaattttccgtccttgcaattttccacctccaccactaggggatcctctctgaccgcctcatgccggctctggcctctgagcaggggtttctcttctgcatgtgcgaccttgcgcatgcctagtggccttttgggacctagagctgctccacaccccgatggggttacagagtgcctcgcctccactccaccccaccagggttccttccctggctgggatgggatttcagaagcgccgagg

SEQ ID NO: 2898 - DNA, 1222 bp, Homo sapiens
gagctttcggaactctcgcgagaccctacgcccgacttgtgcgcccgggaaaccccgtcgttccctttcccctggctggcagcgcggaggccgcacggtaagcgggggctccgagctggaccgggcgcgaggtggcagggccggacgccgaagcctcagagcgcgtgcctgagggccccgaggcgcccggcgcgggcccgtcccgccccctagagccgcggccacgtgcgagcggcaggcccggacatgcccggtcagcgccgtccgggaaccgagcgtgggccccggggggcagcggcggggtgcgtggggcgtccggagtcccggggctggggagtggggtcgcgcaggatcctcacacgcaggggccgggctctgttagtgcgatccagagaggccgtgggcgtcggtgagctccttcagacccgcaggagccggagcccggcgttgaaggggccgtgggaagtaacggggggtaccacggtttaggatgcgctggagcgaaaggattggggtggggtccgtgctcttggcagtcgtctctgccaggcctgtgttcacatgcttgactttctccctcagatgcctggagttactgtaaaagacgtgaaccagcaggagttcgtcagagctctggcagccttcctcaaaaagtgagtttggggactgaggttcaaaacgggtggaggctgtcgccttggcctgcccatctgagccccagtgtttgccggtcctggcaggggaggcttgtttggggcctccgtggctcctttcagcgtgaggcctggcttgtgttccggttccagcctctctttgtactctgggcacagcatagttgtgttgaggggagggcatttgggatatggggtagtttgtggagatgactgaatcgtgcttttcccactgttttggtcttaggtccgggaagctgaaagtccccgaatgggtggataccgtcaagctggccaagcacaaagagcttgctccctacgatgagaactggttctacacgcgagctggtgaggaacttaggtctttggctggagagtggggagctgggtgacccctggcacaaaccatacttccctgtctcctctgagctctttcccgccccaagagggagagaaacccttggttgtgtcaccacttgctttgtgtgatgtgacattcgataacttggtactccaagtttttatgacattctaagagctttgtgagagga

SEQ ID NO: 2899 - DNA, 1176 bp, Homo sapiens
agggttcatgctcttccctggaaggtagaaaaggacagaccaccagggagcctccaccgcaaactgacctgtgctgcctacacactaactttcctgggcctggggcctgcacaggctgaatggtccttgagccttcactctgcatctgagcggtcttgggcccgctgagtggcagtggcaggaagtcggtggaagcagatccctgtgcagaagttgaattaccagggcggccacacacgggctgcacaacctttgcagtcgtgcacggcaagtgggatgtggcctccgcccatgattgggcacctggtcaggctgggagatccaaatagcacccagtgggcagctgtccgacccctggaggggcaagccaggaaagaaacttagggcccgctgtgaccagatgtccctcccagttgggaagactaaactggtttggccaatatctcccaggattcccctgtccaaattattcctgggatctgacccatttcctggaaaggggcgagcctgggttttgaagttcaaactagagtttaaatcacaactctgcccctaatcccacgtaaccctgtgcaccttatcctctgagccttcgtctcctcgtgtgtaagcctgctaactcctgagagactggacaagatgccgtggagagccttggctctgagtagctctgctgctggacagttcagttggcagtccccaaacgtaaggcgtaagagtttaagaagtatcggccaggcacagtggctcacacctgtaatctcaacactttgggaggccgagacgggctgatcacctgaggttgggagcttgagaacagcctgaccaacatggagaaaccctgtctctaaaaataccaaaattagttgggcatggtggcgcgcacctgtaatcccagctactcaggaggctgaggcagaagaatcgctcgaaccccggaggcggaggttgcagtgggttgagatcgagcaattgcaatccagcctgggcaacagagcgagactccatttcaaaaaaagaatcaataaaaatgttaaaagcaccgttgtttacactcagcaactctgtgaagtaagtgccgaaaagtgctttggaggtaggtaaagtaagccataggctgggtaacttgccagatatcccacagctggagccatcatatgaacccaagcaacccag

SEQ ID NO: 2900 - DNA, 1182 bp, Homo sapiens
aagctacgctttaagcggcgctggagtgaagactgtcgcctcgaagggggtgggggccccgctgggggctttgaggatgagggtgaggacaagaaggtgcgtggggaggggcctggggaggctggggggcccctcaccccaaggcgggtgagctctgacctccagcatgccacggcccagctctccctggagcaccgagactcctgagggctgtgggcaggggacctgtgtgccccgcaccccccatgcttcttttgctgccttaagccccctatgccctggaggtgagggcagctctcttgtctcttccctgcctcctcccttttccctccccacattttgtataaaactttaatttcttttttttaaaaatggtgggggtgggtgggtgcccagggctaggggctattccctgtctctgtgggtttctaagctctgggcaaagtggtggtagggggagggagggggaagttaagggggtcacctccattctggggaatttatatttgaattgaggctttggccttaacacccaggaacttttctattacaatcgcttaggaagtaaagccttgtctccctccctgttctctgcctcttgtacccctctgacccacccgctctgccccactcccagccctcctcagccccagccctgcctgccctgcccctccagggggccatgagtgcctaggtttctcataccccacaaggtcacagcaggggagggagggacaattttataatgaaccaaaaattccatgtgttggggggtggggggcggaggagggtgaggggtgccgcccatgggccacaaatctctacaagtgcctgctatccctctcccactccccaccccagcaccggtccaaccccttcatccccagctgctcctaggactggcccatgggcaggcgggtggggggatgggaagggggtgccctgaaaccaaactggaagccccctctgcctcccagctggggcctctggggtggggtggggggctgtggtcaagccttattctgtattggggactgagggtggggggagtagaggggccgctggagaatgtattcaaaacaataaaactttggacctttggatgcagtgatcaatgtcctaggtgctcggtgcagccccctgagggccacagcttttgcttgattctgaaggaggggcccc

SEQ ID NO: 2901 - DNA, 1332 bp, Homo sapiens
cacttattgaggttgtctggtgtgcctggcggtgttctggggcacatttttggagtgagcctatgggtatggcagttctgtgaggttagatggatagttgctatggatatgcacttctatgagagtggggacactagttacttcctctttgagatgagggaaccgaggctcaggccagcggttggctagccagcaccacatgaacctctctccaggcctccttactttcaggagggctgccccccagggaatgggcctgctgcaaccccagagggcaggaatcagcaggaatgagatgctggactggtggtgggtggtggtttttttttttcaccaagtggcccagaaattccagcctgcttctgcctagtacctagaaatatctatgggttgttgggccagtctaggtgctggtgacaggcttactgactgtcatagcgccactctctactttacagtgtcctctgagctcctgtccgttgcagcccagacactcctgagctcagacaccaaggctccggggagcagctcctgtggggcagaacggctacacacagttgggggacctggctcagcccggccccgagctttctcccacagcggggtacacagcctggacggcggagaagtagacagtcaggcgctacaggaactgacgcaggtctagggtgcaggccccctagtgggggtgggcagggaacctgtccagggcagcagccccgctgaaccctctctgccacctatcctgcagatggtgtctggccctgcatcgtactctggcccaaagccttctacccagtatggagctccaggaccctttgcagcccctggtgagggaggtgccttggcggccactgggcggcccccgctgctgcccacccgagcttctcgttctcagcgtgcggccagtgaggacatgacgagtgatgaggagcgcatggtcatctgtgaggaggaaggggatgatgatgtcattggtgagcattgcagggcccagaatcttgcccaggacccagcaggccaaggctcagagggtgggcagaacttggatccaggcccctaggcccctttgttttcttttccacttggtttatggttgcatgtggccagttcaggccctgccgagtaaatccagccctgccctcaggaagcccccagccctgcaggaaatctggaggacagggggcatgaccagatcttcaggtgcagtgttaggggctctgtcctgcaggctcataggctcctgcactgggcagtgggcactgggcatgtgggcacagccctgggctgaggagtagccttcctggacagcactccctgccggtttggagc

SEQ ID NO: 2902 - DNA, 2098 bp, Homo sapiens
tcagcctactgtggcagccacggcacctgcgcctcggtgagccggtccccagccctgtttcccctggggccctgatctgtgagcgcagcctccacgcccatctcctaggtctgaccttgctcctgcatgaaactccccccaccaccccaccctcctccgtgacacccacttccctctccttccagagcttgcccctcacctgttactccaaccccaccccaccttcacctgcagggcctcccctgctgaggatatcccactctcatctataccccactctcatctgtgaacaccaccctccttcctccagccaggcccaaatctgtcctcccatccagccactctgtgtggccttggacccctgccatgacttccagcctcgcaccactgaccttacgccgaagctgtgtacatccagctttcaatctggattgcgctttgagccctccccgccttgacctccccagatctgagctctttcagtccaggctgaatgtcaactacgctgtctgtattctcccagcctgccgtctttctgtcttttctcctttttctctgtgcatcttttcctttttctgttggtcttcttttttccgtctgtctgcttccttctgattgtttctctttgtctcttgtttctgtctgacagtttgcctttcccctcttcctgtctctctctgtctccctttctctctctctctttccttttccatcctctcccttcctgtctgtctctttctctctccctttgtgccctgtctgtctcattctgcctcttttcctctctgtgtctcctttgtctctctgtccttgtctctccctctcttatctctgcctttatgtctcctttcccgcagcccctgggaccatgccgctgtgagcctggcttcttgggacgtgcctgtgacctgcacctgtgggagaaccagggggctgggtggtggcacaacgtgagtgccagggaccctgccttctctgcccgtattggggcagctggcgccttcctgtccccaccagggctgctggcagttttcggaggtgagcagatggggcgagtatctgggatctggaggcccggcagcctatggccagggcatgagactatccacccctccacaggccaggacctcaacaatgccctgggtgacctcgtcctatacaacttctccgccaacacctgggagtcttgggacctgagtcctgccccggtatggacccctcctctgccctggaggagcctttccactcaatcagacccagccggggacccccggaatgatcccctatcacctagtgctcccacagttcctgcagcttgatataggaacctacttctccctgtttctgccttttctctccggttttcttttttcttcttcctcttcctttatctgcctttgtgcatcttatttttccatgtgtctcctgttgctcaatctgtctctgttttcgtctgtctgacttttgggcttctgtgttctctgtttctgtgtctccatctctctggatctgtttctctctgccatttgtccctttaactctgtctccttgccttttctctctcttattgtatttctctgtttctatgagtctgtctcttcttttctctctctgccggtctctgcctttctctttgtctctgtctttatctcgccttctctccatgtttctctggctctgcatctctctgtctaagcctggctctggctctcttgctgtgtctctacctctgtctcttttctcttcctcacaggctgcccgtcactcccatgtggccgtggcctgggccggctccctggtactgatgggtggtgagctggctgacggctcgctcaccaacgacgtgtgggccttcagtccactgggcaggggccactgggagctcctggcaccacctgcctccagctcctcggggcccccaggcctggcaggtcacgcggctgccctggtggatgatgtctggctatatgtgtctggaggccgcaccccgcacgacctcttctcctctggcctcttccgtttccgccttgacagcaccagcgggggctattgggagcaggtgattccggcaggcggacggccccctgctgccactggc

SEQ ID NO: 2903 - DNA, 1784 bp, Homo sapiens
gaggtaggggcaggtggattgcctgaacccagaagtttgggactagcctgggaaacatggcgagacatcatctctccaaaaaatacaaaaattagctggccatggtagcatgcacctgtagtcccagctatttgggaggctgaggtgggaggatcacttgaacctgggaagttgaggctgcagtgagccatgatcgcatcactgcacttcagcctgagtgatggaatgagaccctgtctcaagaaaaaaaaaaaaaaaaaagcccctgaggaggagggtccctgggggtctcacctctgaggttctcaggatctaaggagctctgaggccctcttcttaggagggggtggggtacagggtgggtttggaggtatcaggggtctgaggaaggaatgggaagggttctgaggcccctgcctatcactcacacctaccccaggaggaggtggggcgctgggtggctcatcaggagaaggagacgcggcggctgcagcgccctgggtctgctcgcctcttccctctgcctgggcgggaccacaagtatgcagtagagatccagggccagctcaatggctcggcaggccctgggcacagcgagctaactctgctgtgggatcggactggtgtgccaggaggcagcgtgagtacccaggacctacctccaaccctagccgcaggccccagcctcagatcacctgggctttctgaaccccaggccacaaactctgaaatccctagattctggcctcggactccttaactcttggcctctgaactctggacctcctcttgaaccctgtggcccctgacctctgcctatagaccctaacctgatcccatattttgacccccatcttctgactcctcacccttgaccctgctgaccctgacctctgccctccatactttgacctataataatctccagattcctccagaccttggacctctttactgatttcctaaatcctgacttcctatgtgcctgagttctcaacctgggctccaaacccttactttcagttagcgccagactctgacccctgccccagaccttgactgctgccttcctgtgaccccttccccaggagatctccttcttcttcctggagccctaccgctcgtcgtcctgcacctcctattcttcctgcctgggctgcttggcagaccagggctgtggctggtgcctgaccagtgccacctgccacctgcgccagggcggagcccattgcggggatgacggggctggtgggtccctgctggtgctggtgcctaccctctgcccactctgcgaggagcatcgggactgccacgcctgcacccaggtgcctgtggggccaccaggggaggtcacaaggtggagggagccacagcaggcaatgggcagtcaagggaacccctggtggggggtgtgggggaaacagcaagggcttttggccttgatctgcagagcctggtggggagggtgagatggagctgtagagagaggcacctggggagtcaggactctccctgttgtaggggccagagaatgcaactccatccttttccactagcggggagtttctcagcataggcactggagcccaggagtaggccttcaggcctgccacctccaagtgatgtcaggcagccctcgacaccctgcttcctcttgttccctgggagggtttgtttccttgtgagtggcaagggagccgttaagggtccaggctctaagtccctgctctgtctcaaacagagtgaggcttcctatttctctccccccaccccaccaccatcca

SEQ ID NO: 2904 - DNA, 1134 bp, Homo sapiens
tctcatgggacttaggttctggtgaagggagacaatcagtgcacatgcacacaccccacacgcatacacacatgaacacatgcacatgtgcacacacaagtaagatggcttcagagagggagaagcactgtgaggcctccagaggatgtggcagtgagggacgatggggtgaagtcagctgggcattcaaagaagctagactgagaacgcctgagaagaaccagctacgggaagagctttgggaagcaaaggcagaggccctggggtgggagcaggcttgttttattggaaggaccagaaaactggtaagtgtgacccagatcaagtgtgaggagatgaggctggggatagtcaggggctggatcacccagggccttgtgggccccacatagggttttgggttttattctcagggcaatgggaagctgttggatggtttgatgaaggggagtgacaggatccgatgtacctatttaagaatttaagagggtcgggtgcggtggctcatgcctataatcctagcactttgagaggccaaggtgggctgatcacaaggtcaagagttcgtgaccagcctggccaatatggtgaaaccccatgtctactaaaaatacaaaaattagctgggcatggtggcacacacttgtagtccgagctactcgggaggctgaggcagaagaatcgcttgaacccaggaggcggaggttgcagtgagctcagattgcgtcactgcactccaacctgggtgacagagcgagactccacctcaaaaaaaaaaaaaaaatttaagaggtcactcagttgtgctgtggagaatggaccggagggacaagaggggcagcagggatggtgggctggagtagggtgctggcaatgagggagtctggctcagatgtgggatgtgtatggaagaatataaatgatggtgtggatgtcagggtgagggaggagacaaaaccacgatgacccctagctttgtggcctgaactgtgggtggctgaggggatcgttaattgaatggggcagactgaggcttgtgaggaagatcagagtctggttcttgacatgagatgcccttcagacatctcttcactcaggtccaactagggatacagaaacactgaatatttcaac

SEQ ID NO: 2905 - DNA, 1181 bp, Homo sapiens
tgaattttcttctcggggctctcaggaaccaatctggaacaacagcattgctgcttagatgggagagttaatacatttgataggagggagtaggacagagctttaatcgccatcttctgtgccttgcatttccactgcaatggggtgggaaaaggggtcaacagagaacagtgtccatccagctatttgaatgccagtatttctgagttgtttttcctgacaactttgggcaaggtttgggcaagggtttgggcaagggtttggtggcaggtttggagggtgcatcagaatatcattactccaaagaatgaggagtaaggcttgggtgtctgcttttcagtggctactttcccttggggaagccattttgcctctctgctttcagtcttgcctgtgagtaaaataaggctgagaataggattcaggaagcttttggaaggccaggaaaaaataaaaaggcttttggacggtagctctgggttcttcaggaaaaggataaggggcagggcgcagcctgacatttggctggctttcccctagaccttggagaagtccagttcttgcctgagagtcaggaagaaagtgggcacaggtgctgcatgtggcaggctgtggagaggggaatgggtgaggtcagctgagataacatctgcattggtctcagaggggcccaagggagagagctggggtcatggtgatgccatcgctgttgttgttgctgaattactgacctttgcactcacattcttggccgccttcctggagccatctcctagaagcctggcctcggtccctgtggcctctggcgacccctgtcggaaggaaacaggtcacatccagacactggaaagggcacagaaatgatcctcccagcattgttctacctaggtcagcacagttccatttttccatttttacttcaagaatctaggttacttcaagagatgaatattttatttttatttatatttttgagatggggtcttgctgtgttgcctaggctggtcttgaactcttgggctccagtggtcctcctgccttggcctcccaaagtgctaggattataggcgtgagccactgtgcccagctgaggggtattttaatcgataagggattgaggtttaaaatctggcctatacataagcatattcaaaaatttaatgattaaaaaaatctggcct

SEQ ID NO: 2906 - DNA, 1169 bp, Homo sapiens
actcacgcctgtaatcccagcattttgggaggccaaggcaggtggatcactggaagtcaggagtttgagaccagcctgaccaacatggtgaaaccccgtctctagaaaaattagctgggcgtggtggcatgtgctgtaatcccagctattcgggagactgaggcaggagaactgcttgaacccaggaggcggaggttgcagtgagctgagatcgtgccagtgcaatccagcctgggggacccagcaagactccatctcaaaaaaatacgataaaataaaatggaaggatacacaattgttgactataaaaggatgggaaaagatatttcatgtaataagaaagccagcatataagaggcaggaggatcacttgaggccaggagtttgagaccagcccggacaacataaggagaccctgtctctacaaaaaaaaaaaaaaaaaaaagccagatgcctggctcacgcctgtaatcctagcactttgggaggcaccttgggactgttgaattaaaacaaaacacagcttaggctgctgtgggtattgacgacttgtgatttctgtgcagggcactgaatgtcaaagtgaaggaattcaatgaagcccggatcaagggcaggagcaaccgtgaccctcttaaaagagccaatgccccatgtaattagtgacgcgcgcgaatggatagacgctattcccaccgtccctacatagcatccagcgacaccacagccaagggacaggcttggcggaacctgcgggagagaagaaccctctgagcctgattgaaaggcggtgaagagacaggagagggggatcggtgggcggtcccgcctccatcttcagttcccgcatgggggcgaggcaggtacatgggccttgcgggctgtgggtgaaattccattattaattgttttttcactaacctggtgggggagtcgggcgcgagtttcgagagagactctggcttctggcgccaagccttagccaagctcaccaggggcagcgctagatggggagactgggacacacgtctgaacgcagatgtccgaagggagcgcaggaagacagaagcctcccgttgggcaggagggcaaaagctcctgggtcttggatttgcaacaggagttcagacggtgaaagcagggcctcaggatccttctgaccttttgag

SEQ ID NO: 2907 - DNA, 1219 bp, Homo sapiens
ccagggtgcattgcttgcctcagtttcctcttctgtatggcgaggatccctacccctacccctgcttctgaaagggacagcctgaggattagccactgtgggagctctggtcattgtggctgtggcaagatggatacatgaaagaatggagcctagaggcaacctagaggcgcataggtggggacagtgtggggacagccattgagagtggctggggagtaggacgtcagtgctgattccctgatgtgccttctacctcttttcttctctcccgccagggagctcgaggacaatatgagtgaccgggttcagtttgtgatcacagcacaggaatgggatcccagctttgaggaggtgagtaccaaagaggcagagaatgggagacccgggcacacctttgcatctcctccgtcctcccctcgatgacacattcccgtatggactccaccccaccctgcaggccctgatggacaacccctccctggcattcgttcgtccccgatggatctacagttgcaatgagaagcagaagttacttcctcaccagctctatggggtggtgccgcaagcctgaagtatgtgctatacacacacacacacacacacacacacacacacacacacgatgcatttaataaagatgagttggttctcatccaagagtctcccaaaactctaagaggctccctgggacctggggaagaatgctgggcacctccgtcagagatctggtagagaaggaactctttgtctcttctgcttggccccttatccctgtgttggcaagaggcagggaactgggaatctgaccctcagcactgcccctcaactttttctggccctctgagccacacctgtatcttggctgtccctttgtggctggaggcctgggtacccatgaggcttgtctctctcctgaagcctcagcgtccccaggccagggatagtgcctttcctccagggttttcagaagtagctgtataatgaatgtcaccactgtggttttacatcacctaatttaggaggtagaatgggaggaagggacattttaagcaacctacccaaaccctgcacccccttcaaggctccaccacatttaagtgggaattgaggtgattgtgagggaatcagggcagaggatgggatggtgctctaggcagaggccatagcatgggccaggaggtgggaagcagcctgaggcaggcagaagagcattgct

SEQ ID NO: 2908 - DNA, 1135 bp, Homo sapiens
cagaatacactctctcagagccggactccgaagaggaagaagatgaggaggaggaggaagaggagaccactgacgatcctgaatatgatcctggctacaaggtgaagcagcgccttggcgggggccgtggtggcccatcccgccgggccccccgtgcagcccagcccccggcccagccttgccagctctgtggccgctcaccccttggggaggccccaccgggaaccccaccctgccggctctgctgccctgctacagccccccaggaagcaccagcccctgaaggcagggccctcggggaggaagaggaggaaccacctcgggctggggagggccgaccagctgggcgggaggaggaggaggaagaggaggaggagggaacctaccactgtacggaatgtgaggattccttcgacaacctgggggagctgcacgggcacttcatgctgcatgcccggggtgaggtgtaggcagagcccccatacggggagcttggcagaaggggtggggtgggaggagggggctgaggaaattggggttgtgacagtggtcatgggggatggggtactgccggtctgtgttgtcttagaagtagatgtgtgatggccagaataaaagccaaaatctgtatctgtgtgtgttggttcagagtgtgtgtgtgtgtgtgtgtattcccgcccgtgtgtgtgtttgtgtgtgtgtgtgtgtgtgtgtattccccctgggctccttcttggggaaccttggggtcttttgggaaagataacatttactgcgtgcttgtattcgatgaggtttccatgtatttacttacagaccccataatgtaaaggctctaataatagaattttgtttctcactcacaaaatggtgctgggtgagtcatttggggacccaggccatcccttaagcctgttgtctcccccatggtccagactgggtggccatagcctgggtcctgctggcagaagaggacaggatgcctggtgaggtgcacgtgttgtcttacaagccctggcctgccaggggcacacactgcttccattgacacgcctttgctgagaaattagatatgtggccgcagctaactgcaaaaacaacctgggagaagcagtctagccaagcgcccagaaag

SEQ ID NO: 2909 - DNA, 1208 bp, Homo sapiens
cggtgaaaccctgtctctactaaaaatacaaaaaatcagctgggcgtggtggtgggtgcctgtagtcccagctactcggcaggctgaggcagaatggtgtgaacccaggaggcagaggttgcagtgagctgagatcgtgccactgcactccagcctgggcgatagagcgagactgtctcaagaaaaaaaaaaagaaaggcctcctctgaccaccctattaaaaatacattctctccatttactctctgtgcactgccttatattgtgtgtaagcactgattatcacctcatatatgtttttgtttagtgacgtttgtctcctcactggagtgtaatctccaggagtggaggaatgttatctatttgcttctgtctcctcagtgcttagaatagtcctagtatatggcagagacactataaatattagttgaataaatgagttaatggaaatctgtcttccatggaggtaactaataggtggtgaacaaatcagcataaataagggatattgcaaaatattttttgtcttctaatgaattcctaacctaattctaatttctctttgtgtgtgtgtgtgtgtgtgtgtgtgtttgcatgtgtttgcctgtctgtacaagttgacccatatcttggggaacctatagtgtcatagttgtaaccaaactgaataacatgctttgtttatgactttctttgagcatttgtagcagagcatattcattcggggagggaatattttacaataaggacttttatttctatttcttaggtattcccccatagaagggaataaaattcgatttccttatccattatatcaggaaagaaaaagtaaaactaaaaaccaggacatgagcattagcctttccctcaaaatgtttgcacagttgcatcccatttgcttcttccaaagtccacattcataaaaagaaatggatcttacattgttgcctctcaaacatttatatcgtgtaggcttatatgtatgtctttagaaggccttttatgtaatgacaccattactgcttgtgattattctgatatgatactttatctgtttttttttcctaaatatcacaagctattaaatttatttcacaattgactagtagaccactttgtcaatttggaaaacattcttgttaaagacaaacatatctacatccagaaactttctataccttgctttcaaagagacagcattcttt

SEQ ID NO: 2910 - DNA, 1210 bp, Homo sapiens
tctcctggccctgtccccctgagagagctttccagggctccaccctcccaagctcccaccctgtcctatccccttcccatgtcctctccctctcccacaccaccacccctggggaccccaggactgacttctacacgccagcatcggtccgcaatcaagtgccatccagcccacaaactgttttcaaaaaatgtcttatcacttgccagcttttgaaattgaggcagtatcacttaaaagccacaatttctggcttattttataaaactgggttacatggtcacccacagggcagccgtgggctggagctgagccacagctgcccccttcagtggggacctgcctgccctttgcctcagtcccctctgctgaggtcaaggcaccctttagctcctcatggtgtggcctagaaatgtcccctgtcctccagtctctgtagaggggccctgttgggtctctccagacatctgaggcctgcgggtaccctggcctcctgcccgggccaaatggtgcccctgccccacgtgctgcagatgtgaagttcgacgccgtgagcggtgactactatcccatcatctacttcaatgactactggaacctgcagaaggactactaccccatcaacgagagcctggccagcctgccgctccgcgtctccttctgcccactctcgctttggcgctggcagctctatgctgcccagagcaccaagtcgccctggaacttcctgggtgatgagttgtacgagcagtcagatgaggagcaggactcggtgaaggtgagtgcggccggtgtgggcgggacttcccggtgccttcctgggcgcaagaggccaagaggaagtgtgccaggcctgggctgtgggacctcccgcctggtgctcctctgcccacagtttcacaacctcccaggtcccttctccacagtgaaaggaagtgggcacccagccctccagccctagatgactgggggtcctctccccaggctgttctgttggaccctttgggtccagacctgtcccttcctccttctgtcccagaccttgtgtccctggccctggctccaactctgtgtctctgccatctcactgggtcctgaaatgtcagcctgtgtctgtggcgtgaggctcggctttgcctcctgggctgtcgtcactgttgggtctctgctcctggctcccagtgtcccttcacccactccccgcagcact

SEQ ID NO: 2911 - DNA, 1146 bp, Homo sapiens
gtttcacgctgccattttcttcttagccacctcctcacaccattttaaatggacaggtgtgtgtaggggcccatcctgggccagccagctgctctccctgcaactttggacaagttatcgcacctctgccccatgccgcagttttctcctctcttttttttttctgaaattttttttgtagagactggctttgttggcaaggctggtctcaaactcttggcctaaagcaatcctcctgtcttggcctcacatagtgctgggattgcaggcgtgagccatgtgcccagtctcctctctaaagtgggaggatactaatactcccgtgatggaagtgatcagggaattgaagctgtgtttatttgcattggaagtgctggggatgggcctggcgggtgtgagtgctgtcagcgcgaacttcctctctgatctgcccatgctgctctttcttttttcttattaatagattggtttcttttttatttgaatacatttggcctcatttctaagcaatagtatttgtaaaatcttagttttggtgtgctcattccttttttttttttttcttgagacagagtcactctgtctcccaggctggagtacagtggcacgatctcggctcactgcatccttcacttcccaggctcaactacttgagagtgcctcagcctcctgagtacgtggaactacaggaacccaccaccacgcccggctaatttttgtatttttagtagaagtgcatttctacggcgcttctgtaagcacttgggcggatgtgacctcctcggtctctgactctggtggtgactcctgcaaggccggacctggttccagaccctgtaggtgcccagctgaaggtgtggtctgattgctgtgtggggagtgaaggttgccagcctagaaactgggcctcaagctcactcagaggctcttggaacaaagaagaggcaccatcttggctgggcacggtggctcacgcctgtaatcccagcactttgggaggccgaggtgggcagatcatgcggtcaggagttcgagaccagcctgaccaacgtggtgaaaccccatctctactaaaaatgcaaaaattagccaggtgtggtggcgtgtgcctgtaattccagcaactcgggaggctgaggcaggaga

SEQ ID NO: 2912 - DNA, 1220 bp, Homo sapiens
cagcaccgagacagttcctgggactcagtagacgctcaataaacgtttgaatgaacgcggagctccatcggcctacgcaattccataaaagaacagcaggtgtcgcaccagccctatagccgcctgctcagagcctttggggccagggtgaatcagactctaacaggaacccactcaccactcctccgcagaaagagaattcggaattttccgagaaggcgcttctgaatgccgaatcatgaatctctcctcttaaaaagctgacttttcattttggaaaaagggggtcctgggccctttaacagcttgccaggtgctcaaacgctgcttcccagaatgcgtggcgctatgtaaatgagacggtttggggagcgaggatgattcatactatatgaagtgaaggcaacgttttacaaggacatctctcacgataaatgagtggggagaacttatagcccttgaagtcaaccatctcacacctttccaaaggacgcgaccataactctaaaaggtaagcttttgcgatccttatatagctgcgcgggaataaggttgtcctgcccggatgatcctcagtggtctggggtgcaggcttcaaacctgtagctgtctagcgacagagtggttcaattccacctttcgggcggtagtaactaagcgccttaaatcttacttatcgaaccggacttcttttgcttgttgcccgggaggcgctcctccagcctgcacctggagaggtcgctgcggccttccgcatcgcaaactcattctctgtcactccgatctctgattgtcgttacttatttccccctccggagtataaaaacccactccaaaagacggagaaaaagtcatctacccagttctgggatattggcagtttggaaattatcctagatctctccccttcaattgcttactcattcagtcgtttgctcactcatttatttaatcacgcatgccgtgattaatcagtcaaatacttgcccatttgttcatctgtcattcactcatcaaacaagcatttgctgaggacgcagcggtgggtgacagccctggccttggtctcctggtgcagtcagcccagtgggggagacaaacattaagccatcatgtaattacacacttaattaacaactacaaaggggataacggctgcaaagggaatagaaaagtgaggccctctcataaggagagctgagctggtcgggtgtcatggg

SEQ ID NO: 2913 - DNA, 1213 bp, Homo sapiens
ccaccaggatcttgatgcaacttggcatttggttacccctgctgataagagcagccgttacctgccactgggaccagcaggtgaagcgttgcaacatagccccctccatcatccttcacctcctatcccccactccaaaccaggacgacctgcaaggtcccagccagcaggacaccgtgggcactctggcaaatgaaaaaatggaacctggtcttgagctgaatcaatgtgttattgttacccccacccccggtttacctgatcagtgttaacctttactgggacactcatctgttacactggaacaccttcttctttttgtcaatcggcacagaccactgtaaggaaatgcagtgtgttgcagtggccttttctccccctcaccttctaaggtcagctctagctgagcatcagtgctctcttaaggaggaaaaaaacggtgcggctgggagcggtggctcacgcctgtaatcctagcaccttgggaggccgaggcgggcggatcacttgaggtcaggagttccagaccagcctggccaacatggtgaaactccgtctctactaaaaatacaaaaattagccgggtgtggtggggtgcgcttgtaatcccagctactcgggaggctgaggcaggagaattgcttgaacccatgaggtggaggttgcggtgagccaagatggcaccattgcaccctagcctgggcaacagagcaagacaccgtcttaaaaccaaaagttaaccgggcgtggtggtgggtgcctgtaatcctagctacttgggaggctgaggcaggagaattgcttgaacttgggaggtggaggccaagattgtaccactgtattccagcccgggtgacagagcaagactgtgtctcaaaaaaaaaaaaaaaatcctggctgggcacggtggctcacacctgcaatcccagcactttggaaggtcgaggtgggcgggtcatttgaagtcgggaggtcgggagatcgggagctcgagaccagcctgaccaatatgatgaaaccccgtctctactaaaaatacataaattagctgggcatggtggcatgcacctgtaatcccagctacttgggaggctgagacaggagaattgcttgaacccgggaggcagaggttgcagtgagccgagattgcgcaattgcatgccagcctgggtaacgagcaaaactccatcttaaaaaaacccacaaaaggtcc

SEQ ID NO: 2914 - DNA, 1186 bp, Homo sapiens
tggttgggtgatctggatcccgacctgagacatgcagagttgaaaatgtctggctgggcacggtggctcacgcctataatctcagcactttgggaggtcgaggcgggtggatcacaaggtcaagaaatcaagaccatcctggccaacatggtgaaaccccctgtttactaaaatacaaaaattagctgggcgtggaggtggtgcatgcctgtagtcccagctcctcaggaggctgaggcaggagaatcgcttgaacccaggaggcagaggttgcagtgagccgagatcacatcactgcgctccagcctgggcaacagatcaagactccgtctcaaaaaaaaaaaaaatgtctgttaggcatctagctgatgatactcagaaggctgaacaggaggacagatgtggtgggacaaggttggggagacactgaagccaaggccctgatcacccatcctcacagctccagcctctcaactccagcctctctcacttattggttccatgtttgtccatgcaggagcctcctcaacaagcccaagagtgagatgaccccagaggagctgcagaagcgagaggaggaggaatttaacaccggtccactctctgtgctcacacagtcagtcaagaacaatacccaagtgctcatcaactgccgcaacaataagaaactcctgggccgcgtgaaggccttcgataggtgagtgctgggtcctgggaggtgttctccgcaggcctggagaggccactccagctccagtctgaagagctcaaagacagctgtctcagaagcctggggtgtatggccaggcgtggtggctcatgcctgtaatcccagcactttgggaaggcaaggcgggtagatcacctgaggtcaggagttcaagaccagcttagctaaaatggcgaaaccccatctctactaaaaatataaaagccaggcgtggtggtgcacgcctgtattcacagctactcaggtggccgaggcacaagaatagcctgaacccaggaggcggaggttgtggtgagctgaaatcgcaccactgcattgcagcctgggcaacagagtgagattctgtctcaaaaaagaaaatgataattttcaatggccctgtgaggaaggtaacgtgattatcttccctcttaaaaaggagcaaactggcacagagaggtgcagtcctttgcctca

SEQ ID NO: 2915 - DNA, 5101 bp, Homo sapiens
gctgcatggcctggttcctaacaggccacggaccactactgttccatggcccggaggttgaggaccccgagatacaggacaattctgtggcaagcaggactgtcccctcgccaaagatgggacatcgaggctccttggagcaccctgtggccaccttgcagcagcctctgtttccccatgtttccatgacctggtgtccatctgtcttccccagtttgggagcttctctccgaggaggacctgggcctggtgtggcacctgctgtgtgagcggggccatgtccaacggccttcttggggactttgggtcggggagaagttctgcctgggttttactgccttctcccaaccccacactgtctcccctggcagcggttgatcgacaagaccaaggtgacatatctgaagtggctgcctgagtcggagagcctgttcctggcatcacacgccagtggccacctgtacctgtacaacgtcagccacccctgcgcctcggccccgccccagtacagcctgctgaagcagggcgagggcttctctgtctatgctgccaagagcaaggcaccccgcaacccgctggccaagtgggcggtgggtgaggggcccctcaacgagttcgccttctcgcccgatggccggcacctggcctgtgtgagccaggatggctgcctgcgcgtcttccacttcgactccatgctcctgcgtgggctcatgaagagctactttgggggcctgctgtgtgtgtgctggagccctgacggccgctacgtggtgacgggtggcgaagatgacctggtcaccgtgtggtccttcaccgagggccgcgtggtggctcgaggccatggccacaagtcctgggtcaacgctgtggcctttgacccctacaccacaagggcagaggaggcggcgacagcagccggtgctgatggggagcggagcggcgaagaggaggaggaggagcccgaggctgcgggcacaggctcggccgggggcgccccgctctctccactgcccaaggctggctccattacttaccgctttggctcggcgggccaggacacgcagttctgcctgtgggacctcactgaagacgtgctctacccgcacccccccctggcccgcacccgcaccctccctggcacacctggcaccacgccaccggccgccagcagctcgaggggtggcgagcctggcccaggccccctgcctcgctcgctgtcccgctccaacagtctcccgcacccagctggcgggggcaaggcgggcggcccgggtgtggcggcagagcctggcacaccattcagcattggccgcttcgccacgctcacactgcaggagcggcgggaccggggggcagagaaggagcacaagcgctaccacagcctgggcaacatcagccggggtggcagtggcggcagtggcagtggtggggagaagcccagcggccctgttccccgcagccgcctggaccccgccaaggtgctgggcactgcgctgtgcccgcgcatccacgaggtgcccctgctggagccccttgtgtgcaagaagatcgcccaggagcggctcacagtcctcctgttcctggaggactgcatcatcactgcctgccaggagggcctcatctgcacctgggcccggccgggcaaggcggtgagtggccccacaccagcctgccggggacctggcaggacctttcgtgggaagaggcaggcattggcagagagagggctttgttgctgtcacagcctctggctccgtggggtgaggggaagccagggaaatcttagtgtctcagtacaagacctctcagatccttagagtgagggggtctagccctaggcagcaggcagcagaaagaggggtgggtgtgagagccagctaggaattggggcatccaaggctggccgtctgaagggcagcagatgggccccacatggccaggtcttactgcctgtcactcgaaccagaatctatttctgttgaacatctgttttttaaatcgtgaaacttttttgagtacttcaggccaaaactaggggcgagctcaagcctgtgggcatggctgccagcctgggtctgggactcaggatctgagcctcctgctgaaggcacaggctgggaatcccaggcctgggttccagtcccactccctctgtgaccctggacaagtcactgccccctctgacctccaactcatcacctcttagaacagagcctgtaggatgggcagtgggtggatgtgcttgcctcctgggtgggctgtggcgttgggaaggtcatagtaggcgaatcaggcctggcatcttgtaagttcggagctcgtcttgggtgtctcagcttcttagggcttggactcagttgcccagggtcctggaggccgtggcttggttcctcagatcctcagttttggaatcgtagagtcctgagtccctagaacttgagagcacagtctgagtgactcagaggcaagagtggtgggatttggggagtctggttgagtcctaaaagagacccctctgtctccgtagttcacagacgaggagaccgaggcccagacaggggaaggaagttggcccaggtcacccagcaagtcagtggtagaggtaggactgtccctgagttctttccccagcacctcagggtccctcccaagttagaagggagctccagtttccccctcccctcccacccttacccttaccccatggtctcactcaggatccgccaaggactttgattattgcgtgaaagtgctgactgccaggacaggaagctagctaagatgcaagttcccagcctagagcagtggcctctggggggtctagggcggacccaagggcaaggccagggtggcagcagctttggggactctgggctggctccctccccttgacactggctgaagcccaggtggtctctaacccctcccatctctccctctcatcttccccagggcatctcctcccaaccaggcaactccccgagtggcacagtggtgtgaagccatggatatcgggcccccccaaccccatgcccccagcctcctagccataaccctccctgctgacctcacagatcaacgtattaacaagactaaccatgatggatggactgctccagtccccccacctgcacaaaatttgggggccccccagactggcccggacacgggcgatgtaatagcccttgtggcctcagccttgtcccccacccactgccaagtacaatgacctcttcctctgaaacatcagtgttaccctcatccctgtccccagcatgtgactggtcactcctggggagagactccccgcccctgccacaagagccccaggtctgcagtgtgcccctcagttgagtgggcagggccgggggtggtccagccctcgcccggcccccaccccagctgcccttgctattgtctgtgcttttgaagagtgttaaattatggaagcccctcaggttcctccctgtcccgcaggacctcttatttatactaaagttccctgttttctcagcgggtctgtccccttcggaggagatgatgtagaggacctgtgtgtgtactctgtggttctaggcagtccgctttccccagaggaggagtgcaggcctgctcccagcccagcgcctcccaccccttttcatagcaggaaaagccggagcccagggagggaacggacctgcgagtcacacaactggtgacccacaccagcggctggagcaggaccctcttggggagaagagcatcctgcccgcagccagggcccctcatcaaagtcctcggtgttttttaaattatcagaactgcccaggaccacgtttcccaggccctgcccagctgggactcctcggtccttgcctcctagtttctcaggcctggccctctcaaggcccaggcaccccaggccggttggaggccccgacttccactctggagaaccgtccaccctggaaagaagagctcagattcctcttggctctcggagccgcagggagtgtgtcttcccgcgccaccctccaccccccgaaatgtttctgtttctaatcccagcctgggcaggaatgtggctccccggccaggggccaaggagctattttggggtctcgtttgcccagggagggcttggctccaccactttcctcccccagcctttgggcagcaggtcacccctgttcaggctctgagggtgccccctcctggtcctgtcctcaccaccccttccccacctcctgggaaaaaaaaaaaaaaaaaaaaaaaaagctggtataaagcagagagcctgagggctaaatttaactgtccgagtcggaatccatctctgagtcacccaagaagctgccctggcctcccgtccccttcccaggcctcaacccctttctcccacccagccccaacccccagccctcaccccctagcccccagttctggagcttgtcgggagcaagggggtggttgctactgggtcactcagcctcaattggccctgtttcagcaatgggcaggttcttcttgaaattcatcacacctgtggcttcctctgtgctctacctttttattggggtgacagtgtgacagctgagattctccatgcattccccctactctagcactgaagggttctgaagggccctggaaggagggagcttggggggctggcttgtgaggggttaaggctgggaggcgggaggggggctggaccaaggggtggggagaaggggaggaggcctcggccggccgcagagagaagtggccagagaggcccaggggacagccagggacaggcagacatgcagccagggctccagggcctggacaggggctgccaggccctgtgacaggaggaccccgagcccccggcccggggaggggccatggtgctgcctgtccaacatgtcagccgaggtgcggctgaggcggctccagcagctggtgttggacccgggcttcctggggctggagcccctgctcgaccttctcctgggcgtccaccaggagctgggcgcctccgaactggcccaggacaagtacgtggccgacttcttgcagtggggtgagtgcctaccctcggggctcctgcagatggggtgggggtggggcagga

SEQ ID NO: 2916 - DNA, 5101 bp, Homo sapiens; identical to SEQ ID NO: 2915

SEQ ID NO: 2917 - DNA, 1220 bp, Homo sapiens
accacgcctggctaattttgtatttttagtagagacggggtttctccatgttggtcaggctgatctcgaactcccgacctcaggtgattcgcccgccttggcctcccaaagtgctgggattacaggcatgagccaccgcgcccggccgacgaccatatttcaaattttaacttcctctcgatccccatctgtgttgctttttctccatagcatttatcatcatcacacactacatatttataagttccacgaggacagtgatttatttatttgaaatcattttttggtagaagcagagtttcgccatgttgcccaggctggtcttgaactcctgcactcaagcaatccaccctccttggcctcccaaagtgcttgggatcacaagtctcagccatcgcccccggcctagaacagggattttgttccttcactttttatattcccagcacggaagagtgcttggcacctagcaggagctcaataaacatctgctgaatgagtgaacactactgccaaacggcctccccaatcactgggttcagtattcctgccctttcactcttgaatcctaatagctatacttgttctactttttccccctttctcactactgcacttgacaagtctttaaaaaaaaaaaaaaaaaagggcatggtgtggtggctcactcctgtaatcccagcactttgggaggccaaagtggacagatcacttgaggccaggagttcaagaccagcctggccaacatggcaaaacccagtctctgctaaaaatacaaaaaaattacttgggcatggagatggatgcctgtaatcccagctacttgggaggctgaggcatgagaattacctgagcctgggaggcagacgttgcagcgagccgagattgcgccactgcactccagcctggatgacagagcaagactctgtctcaaaaataaaacaaaacaaaaacaaagaaaggaaagaaaacaaaaataggacgggtatagtggctcacaattgtaaacccagcattttggtaggtctaggtgggaggatggcttgaggccaggagttcaggactagcctaggcctaaaaactaaaaaagaaggccaggtgcaggggttcatgcctataatcccaacattttgggaggctgaagcaggaagagtacttgaggccaggagtttgaaaccagcctgggcaacacagcgacacaccatctctagacatatgca

SEQ ID NO: 2918 - DNA, 1177 bp, Homo sapiens
gaggcggcggcggggggaccccgaaccccagccagccccgtgcgccctttgcccgcagcgccggcgccccccatgcgccagacggcaggacggcggcgtcggggggcgccatggcctcggcggcggcgggcgaagcggaggaaaccacccggttgcgcaagccgcgcttctcattcgaagagaaccagatcctgatccgcgaggtgcgcgcccactacccgcagctctacggcgcgcagagccgtcgggtgagcgtggcagagcggcggcgcgtgtgggacggcatcgccgccaagatcaacggtatcaccagctggaagcgcacgggccaggaggtgcagaagcgctggaacgacttcaagcgccgcaccaaggagaagctcgctcgcgtgccgcactccacgcagggcgccgggcccgccgcggaggacgctttctccgcggaagaggagaccatttttgccatcctggggccaggtgtggcggcgccgggggcaggtgctggggcggaggagccccctgcggccccctcttcacagccgccgcccccaagcgcctgccctcagcgctacgtgttgtcggaagaccgccgggaggaccgacgtgcaggtgagtgtcttcagagtaggctgtgtgcctgcgctgttgcaagccttttacatgtctcatcaaagccttgctgcagccctgtgaggtggatgctgtccttcgccccattttatagctagggaaactgaagctcagaaaaatgaaatgacttgcctcagttccgatagctagtaactgtcaagagccaggaatggaaccagatttaggaggcctgactcaggtccacacctggggtcatcagcacaggcaggatttcattaaatgcagtgtcgagtagtgactctggaggcaggctgcctgggctccgatcacaactttgccactgaactgtgtcatctgagtaagttactgtacttcagttgctgcatctgtaaaatggagataaaaatagtctgcacctcaaagcgttgctgtgaagattaaatgagctaatatgggtaagttgcttagttcagcacctcctcaactctcattgttagttcttgatagaatcatcaatgcggtaagatgcatactatttcactatttcataaataaaagactcagacatgtttggtaattttcccaa

SEQ ID NO: 2919 - DNA, 1174 bp, Homo sapiens
agtcctgctcctcttgggatggggctggggtaggcccgactgcaccctccccttctggtagtcataggcaggattgagtgacggttgggaagggggctcagaagccccctccccagcccggaactgacccctccttcctccctccctgtgcttggctgggcctgacccttcctgtcccagggcccaggtctgtgtgatatctgtatatattgcattttgttgattttaatagaaaacaaagcgttattttctctttctttccctcctttttttttttttttttttttttggtaaggattttttccccctttataagtttttgtttccatatgggaggaggggagggagcctctgggtcacccagaatgaggggccttcccaaaacacaacaccccacctctctgctttcagttctagatctgagggaagccatgggagtagaggtagcagaggcgtctgagctgaaatggggcatttggagcaaggaccccagagttcccagatcttctcagctactctcctcccactggagctgtccctcctaggtgggaatgttcactcttttgttgtcaggttgtatgggggggcagggacagtgctgctgggaaggatgccagctctgggattgggccagtcctgtgggcaagacttgcaagaggctggatcaacttggtgtggtatctctgatggcttagagtaatggcaatgagggtctctgttgtgatgtcactgagtactttctggggtgcttctgggcaccccttatgatgtcacaggaagcagttcctcagaggttacttcctgtgaacataagggagcaggtacttcctgtgatgtctcaatgagttcttccttgaaggtcactttggtgatatcatgggaaggtgtacttccggtgatgcctagaggtcacgtcctgtgatgtcattaggctgaagcatgtacttcctgtattggacagtgaccagtctctgacctgccttctccctccacacccttctttggtgggtgttggcctgggggtcttcctaggaagagaataaggcacgggacttggatccaatctggaggactctaacggaaaaaaaccaatattgtcagggtcatctccattcaaacacgtcaagtctgcgaactcgccctggagggaggggtgggagatggacctagtgca

SEQ ID NO: 2920 - DNA, 1344 bp, Homo sapiens
caaaagatttgtcccaagctgcatgattgctctttctccttcttccctgagtctctctccatgcccctcatctcttccttttgccctcgcctcttccatccatgtcttccaaggcctgatgcattcataagttgaagccctccccagatccccttggggagcctctgccctcctccagcccggatggctctcctccattttggtttgtttcctcttgtttgtcatcttattttgggtgctggggtggctgccagccctgtcccgggacctgctgggagggacaagaggccctcccccaggcagaagagcatgccctttgccgttgcatgcaaccagccctgtgattccacgtgcagatcccagcagcctgttggggcaggggtgccaagagaggcattccagaaggactgagggggcgttgaggaattgtggcgttgactggatgtggcccaggagggggtcgagggggccaactcacagaaggggactgacagtgggcaacactcacatcccactggctgctgttctgaaaccatctgattggctttctgaggtttggctgggtggggactgctcatttggccactctgcaaattggacttgcccgcgttcctgaagcgctctcgagctgttctgtaaatacctggtgctaacatcccatgccgctccctcctcacgatgcacccaccgccctgagggcccgtcctaggaatggatgtggggatggtcgctttgtaatgtgctggttctctttttttttctttcccctctatggcccttaagactttcattttgttcagaaccatgctgggctagctaaagggtggggagagggaagatgggccccaccacgctctcaagagaacgcacctgcaataaaacagtcttgtcggccagctgcccaggggacggcagctacagcagcctctgcgtcctggtccgccagcacctcccgcttctccgtggtgacttggcgccgcttcctcacatctgtgctccgtgccctcttccctgcctcttccctcgcccacctgcctgcccccatactcccccagcggagagcatgatccgtgcccttgcttctgactttcgcctctgggacaagtaagtcaatgtgggcagttcagtcgtctgggttttttccccttttctgttcatttcatctggctccccccaccacctccccaccccaccccccaccccctgcttcccctcactgcccaggtcgatcaagtggcttttcctgggacctgcccagctttgagaatctcttctcatccaccctctggcacccagcctctgagggaaggagggatggggcatagtgggagacccagccaagag

SEQ ID NO: 2921 - DNA, 1146 bp, Homo sapiens
ccgaacccagagagcgggccgggacctgataccgatttcccacccgtcccctgccatgggcgccggacgcctgccggagagggctcccctccttaaagggccagtggcctccaagcccgacgcctgcgaccggcggtgggtgatagtgtttcccctccctgtccagccgagggaaaagttaactttccaggcttggctgtgttcagggaaggaactggtctcgcctgcctgccctccatccctcacaccatcccttgtcccggaccctggaggcggaggtccagcccccaactcggaggccccgggcccaccctccccttccgcccccggcccctcggcaggctccgcccctctctgacgtcgccgaggcccgcgccgattggtcgactgcactgtcgctccggacacttcctcctgggccgccgccgccgccgccgacttaaactttggagggggaaaaagagctactggcgcctggcgaccctccctgccccccacccaaccccgctccggcaacgcccccttcctcacggctcccgaccgaacttttctccaacttctgcgactcgtgagattcccttctacccactccggccctcgggacccctctgcccatcccctggccggtcgggtccctgcgaacccctttatctctggaatccactcggtccccgactcagagactcctgccctccacccccaaggtgaattcccccgggccgccttctgagtgggatcctcttcttggagcactggatcctgggattccctctgcccccttctcaatccctcctctagggaaggggcctttgaatcgcgggctctcctgatccctgtgaccccgacctactagatttcctctcaggcttcttggaatctcaatcgctgggacctccaacccactacttttctcctttctgatcttctgggagccctggattccgggcctctgacccactatagtgcctttctctccttcccaggaccccgccatcctcaggtcccctccgcctgccagatcttttctcggatccccgctctcccaccacctgctcacgagatcccgcggatctagaacccagggtcccccggggccccccggccgggtcccgggtgggctccaggcggccggtccccggcctcccc

SEQ ID NO: 2922 - DNA, 1181 bp, Homo sapiens
ggaacaggatgaggacccagtcggggagaggcaggtgggagggccgcatcttcctccctgtcctgtgactcctagctaggagggctctcaggatacgtgggatgggtggctggggcctgaggcctaggcaaggcagtgacctgcccactgccccacggaggggcccaatcaacctcctctcctctgcccattccccccctcccccagggccagagcttcacagccccacagagtggcagggggccctcagtgtggggaaggcgtcacctatgccagactgggttggaactgctgggtgactccggccctatgcctcgaccctgcagaaagccgtcgggtcaaactccaaggcattctggctgacctgcgggatgtggatgggctgcccccaaaagtgactggcccgcctcctggcacaccccagccccggccacatgaaggtaagaggcaccccccacctggtcccagtcctgcgggcccatggcagagggaggctgcagagctgagcccagggcttctgtgtcttcagggtcgaggcccagcctccagtctgcagcctccctgccccaaaagttcgtctgtctgtctgtctccctctctttttgtctgtcctgccctgtctgtctctctgtctctttccagctgtgattcttcatcttgtcctctccccgtctctctctcttgctctttatctctttctctgcctctctctgtcattctctctctccctggccctctctgcccctccctcccctccccctaccaggttcctttggcttctcctcagacgtcttcatcatggacactatcgggggcggggaggtgagcctgggggacttggcagatctcaccgtcaccaacgacaacgacctcagctgcgatgtaagttctccgggtgccccccacactgtccccattggcattgcgcccagggccagcccctgcaagctctgactgggtgccgcccgtgccctgctcatcctgtttcacagaggggtgcagatgtagacagtggagggacttgactgcggtcgccaaggcgcagggcctggaagactctggagcctgtgttttaatcacagttccacggctcctccactctgcccctcccaccctggtgatttggaatgcaggaagatgacctgtagccaccccctgctctgccaagtcaggccaatcta

SEQ ID NO: 2923 - DNA, 1206 bp, Homo sapiens
aggagagacgcagcctgcacagaagcagcacgaggccggcatggccgcaggcagtgaggcgtgggctgcggggaggttgtggtctcaggagtcagccactcagggccttgggctgggatagagtctgagtttgactcagggttgtgggaagccagtgctttcgagcagcggggtgacataatctgacgtacctgatccactctgagaaggagaggtgtgggagggtcacagaggaggcaggcggaccagttaggagatggctcgatgtctgggacagagctgatggactttagcggtggtgaggcgagaggtgtcagcttccccagaggctttcaggcagtcgacactgaaggactgcagctaaggggagaggaaaagaaacgagcgactccagggtttggtgtgagccattggagcagcatcccctgagacggggaagcctgggagtggaagttctgggggccgccgaggttgtgtgaagtgtgaggggcctgtttacccccatgtggagaagcagagctcgtctggagctgcggggcatttggcccctaaacataggtctagttgaacaagcacatgggcattctttggaaagccatggccgtctgcagtgcctgcaggagtgagtgtagatgacgcagagaagagatctggggactgcccgggtgctctcccacttagaggctggagggaggaacaggaggaggaagctgagaaagaggctgagcctgtgcggcgtgtcagtgtcgttgtgggaggaaggccggtgagaatggagtcctgtgtcccgctgcaagtgcagcgagtgttctgaggatggagtggagctctggtgatggcagccgtgaggcgagagggtacatctgcagtgacctctgcacccgttggtaactggcagttgacaagacctccagggcatcaacctgatggcagaaaggggggacgttttcgtcgatctgcacttggaattgcaccctgccttctcccgcagtcaggctgggtcagtacctcctctgctataacttgtcatgaagttggaagccaggaggtggaaggaggagtgccatctgttgctggggatagtgcaggctcctgggtagcagggatcgccggcgcccctgcttgcgcgaggctggctggctttcggcgcctcccagagcatttgtagaatggccggttcctctttcctgcagggcgtgtttgcct

SEQ ID NO: 2924 - DNA, 1528 bp, Homo sapiens
atcatggttgtgatcactgcagcctccacctcccaggctccagcgatcctcctgccccagcctcctgagtagctgggactataggtgtgcactaccatgcctggctaattttttttttttttaaatatatataaagatgggatctcactatgttgcccaggctgactccaactcttaatttttactttttagattccagggggagagaggcaggaggcttaggccttggccctttccttccctctcaccctctcccctcccgcttactttgctgtcatttctacccctttagcgaccggtcctgtaccgtcctcaatgtagaaggtgacgctctgggggcaggactcctccaaaattacgtggaccgtacggagtcgagaagcacagagcctgagttgatacaagtgaagagtgagctgcccctggatccgctgccagtccccactgaggaaggaaaccccctcctcaaacactatcgggggcccgcaggggatgccacggtcgcctctgagaaggaatcagtcatgtaaaccccgggagggaccttccctgccctgctgggggtgctctttggacactggattatgaggaatggataaatggatgagctagggctctgggggtctgcctgcacactctggggagccaggggccccagcaccctccaggacaggagatctgggatgcctggctgctggagtacatgtgttcacaagggttactcctcaaaacccccagttctcactcatgtccccaactcaaggctagaaaacagcaagatggagaaataatgttctgctgcgtccccaccgtgacctgcctggcctcccctgtctcagggagcaggtcacaggtcaccatggggaattctagcccccactggggggatgttacaacaccatgctggttattttggcggctgtagttgtggggggatgtgtgtgtgcacgtgtgtgtgtgtgtgtgtgtgtgtgtgtgtgtgtgtgttctgtgacctcctgtccccatggtacgtcccaccctgtccccagatcccctattccctccacaataacagaaacactcccagggactctggggagaggctgaggacaaatacctgctgtcactccagaggacattttttttagcaataaaattgagtgtcaactatttaatcaggtgttcttgagaatttgacttaaagcactggccactgcaatgacagtatctgctcatcaagaaacaccactgggctgggcatgggggctcacacctgtaatcccagcactttgagatcactccaggccaggagttcaagacaagcctgggcaacatagtgagacatcgtctctacaaaaaaatacaaaaattaaggccgagcacggtggctcacacctgtaatcccagcactttgggaggccgaggcgggcgaatcacgaggtcaggagttcaagatcagcctggccaacatggtgaaaccctgtctctactaaaaatataaaaattagccagacatggtggtgggcgcctgtagtcccagctactc

SEQ ID NO: 2925 - DNA, 1099 bp, Homo sapiens
agctgaggcccggggcgacctgccctggcctgccgtgggaggccagcattcctcaccccgaacccacaatgcctcagggctagcacgccagcctcttggggctgaaggaggctgactccccaagtcctgcaaaggggtgcaagcctagttccaaccctgccgggctgaggcatgagtaggggctgtatttgcgtgcaggcgggcccccaaagcttccactcgctgccttaaaacgccaacccagcctctcagacaatgctgccctcccactatggtatctaataaccctctgtgtgtctgtctctgcagaaatatcttcccttccaacctggtgtcagcagcctttcgctcagtgagtcctcaggggtgtcctgaggggatgggggtggacagggagggatgccagccagggggagcccttgctacctgattttggttagttcctggaaaaatgcatgtcaatgagaatacgggctcagagcctcctgtgagttttaattctagctgtgtgactctgggtaaatgtgtttacctctctgagcctcggttttccacctctggaaaatgggggtattgatcatcctgccccatggggttgccagcagatgaaatgagatcacattgaaaggatgtggaagggcaggctttgagcattgttagcttggcatggggttgggaggccctggtaacgatggacactgactcttcccaaccccacctacagtactctaccacctatgaagagaggaatatcaccggaaccagggtgaaggtgagagcagtgggaggcagcgggggctctacctctttgcctattgctataattttttggttttatttctgccttagtctttgctgtggaatttgattgacactctgcagtccttccccaatttctgtcttttctgccttctggataggtctctactttgtcccctcttttcccaccccaggtgcccaggctcttcctttctccctcaccccccaaccccattccatgctgccctctccctgcccccttccatccaccctcaacctgctcaaactggcagccagccagaggtttttgttgttgtttttctgacacaggatctctctc

SEQ ID NO: 2926 - DNA, 1179 bp, Homo sapiens
ttctatgggggacctggcccatctcgggtatcagccccgcccctactcgtccagtctccgaacgctctgcagccaatcggcgcccgagggtcggtccccgccttctcaagccccgccccctacccttatccctggcagcttccgctaaacgggctcagagccacgcggcacgcccgggaggctttctctggctggtaaccgctactcccggacaccagaccaccgccttccgtacacaggggcccgcatcccaccctcccggacctaagagcctgggtcccctgtttccggaggtccgcttcccggcccccagattctggcatcccagccctcagtgtccaagacccaggcagcccgggtccccgcctcccggatccaggcgtccgggatctgcgccaccagaacctagcctcctgcagacctccgccatctgggggcactcaacctcctggagccaagggccccacgtcccacccagagaaactctcgtattcccagctcctagggccaaggaacccgggcgctccgaactcccagctttcggacatctggcacacggggcagagcagagaagcctcagcgcccagcctggggaatttaaacactccagcttccaagagccaaggaacttcagtgctgtgaactcacaactctaaggagccctccaaagttccagtctccaggtgctgttactcaactcagtcctaggaacgtcgggtcctgggaaggagcccaagcgctcccagccagcttccaggcgctaagaaaccccggtgcttcccatcatggtggccgatcctcctcgagactccaaggggctcgcagcggcggagcccaccgccaacgggggcctggcgctggcctccatcgaggaccaaggcgcggcagcaggcggctactgcggttcccgggaccaggtgcgccgctgccttcgagccaacctgcttgtgctgctgacagtggtggccgtggtggccggcgtggcgctgggactgggggtgtcgggggccgggggtgcgctggcgttgggcccggagcgcttgagcgccttcgtcttcccgggcgagctgctgctgcgtctgctgcggatgatcatcttgccgctggtggtgtgcagcttgatcggcggcgccgccagcctggaccccggcgcgctcggccgtctgggcgcctgggcgc

SEQ ID NO: 2927 - DNA, 1119 bp, Homo sapiens
cacacccttgttttagcacttagcacactgtttacttatgttttcctccactggactagattgtacctctctggggacacatagatgtgagtcttacttgctcttgtatcttcacccagcacaaggcctgacacatgagatgtttactaaatatttgttgaataaaaaattaatttttactgtagttaattgattaaaatttggttctaaaattatgatgctgatgggttttctttttttttcccccatctaggaagaaatgttggctatttggcgatgagaggtggtgaacagtgaccatactggtatacaacactatgggacctggcatttttgctgcatgtccagcccacccccactaataatgtaggaagctgtctggtccattggaaacactaatctgatctcagaagtggctgatcgtggcaggatgtgtcgacgatgatgatggcaagaaagcaagatgtccgaattcccacctacaacatcagtgtggtgggattatctgggaccgagaaggaaaagggccagtgtgggattggaaagtcttgtttgtgcaaccgcttcgtgcgcccgagtgctgacgagtttcacttggaccatacctccgtcctcagcaccagtgactttggagggcgagtggtcaataatgaccactttctctactggggagaagttagccgctccctggaggattgtgtggaatgtaagatgcacattgtggagcagactgaatttattgatgatcagacttttcaacctcatcgaagcacggccctgcagccctatatcaagagagctgctgcgaccaagcttgcatcagctgaaaaactcatgtacttttgcactgaccagctggggctggagcaggactttgagcagaaacaaatgccagacggaaagctgctggttgatggttttcttcttggtattgatgttagcaggggcatgaataggaactttgatgaccagctcaagtttgtctccaatctctacaatcagcttgcaaaaacaaaaaagcccatagtggtggtcctgactaagtgtgacgaaggtgttgagcggtacattagagatgcacatacttttgccttaagcaaaaagaacctccaggttgtg

SEQ ID NO: 2928 - DNA, 1624 bp, Homo sapiens
tagctgaggttggcagaaacgttcccaaactcccccagccctggaccccagcagatgaggaaacggccccatttactgaccccgcccccttttcgaggttatgctcacctggtcagctcctcacgtaattgggggtggagggaaagcatggtggtgccctgggccgtccctgtgtgaacgcaggcaaaagcagcccagtccccctcactgcttgagctaacactgccacctcttttgtgtgagcacaaaagccacgtcccaagccacctggcccgattccacagatgtatgtgcggccagtgacttccccaggagtgtggagggggtggtgaggaggagcacctgggctctctacccctctcctcacagaagtacctgaaactaggtctggggcactcccaatgcagcgccttgtcagccaaggtgggcaggcagggactgtggcagcttatgtccaaagggagcccccatgcacaggaagccacagggttcctcttgtttcccccgctaacttcagcctctcatctgctgctccgggctgagggactagaggacatctcggtcgtttgaggggcatggccagtcgtggcaggccggccttcagcgtccggtcagggaagcgtgcagcccaaatgggcacttgcatgggagccacagaggagcgtccctggggattgttgggaccatgctgcccccactcccgcttttgttggggctctaagttctggaaggtgtgtgcacagagggtgctcatgggactcgcatgcagctctcagcactgggtgggagggcgttggcttgtccagaatggggacgtggggcagccacccctgcccagcgagagcgcagacaccgtgtgaggggacagcagcccttggtgcaaagccagagactgatcctggctctgacggctgaagagggaagacccaaggctgggtggcgtggctcgtgaatccacttagaattcttggcttgtgtcgcatactgggtgtcacggcacacatttactctgcattgtccccgtctttcccatcgcctagcgtttggggaggaacagggagagagcttcggggcgtctgtctccgtgctctcctgcctccaccgccttggttttgcttcctgctggaggcagggcacctgctgcgacccagattcttctgcaggatgtgtctgtctttgtcacggtggacagagggtgacatcataggagcagctcgctggccagaaggggatgggggcatccctgtgcctcactcagctcctgctgctcttagggaaaggaggcctgggtcaagccagcatccccttggtaaagacccccgcaggccaccaggcattctggacacgcacacacacacacacacacacacacacacacaaaacttcacagcaggccagctgcagtgacttgtcatcaagagtcacctcagctgcgcccccctcccatcctttcctatgagaagccactgctttgggggcgccggctagaaaaagtagggtgcggtggccaggagggcccctgccgcgcggggggctgggtctggttgagtcgctgctttcccgagggcagcgcagggatccggggaagctgcggcagggagcgggcgccggcttcgtggctctg

SEQ ID NO: 2929 - DNA, 1158 bp, Homo sapiens
gggccgctctgttcccctgagacctggggagggcaggcaggggcaggctgtgcgtccttctccatcgccatcggtgtgggtttgcagtgaggggcaggggggctggagttggcacctggaggcccttcccgacatgaaccctcggttcttccctgccacagaggactacgggcactacgaagagctgccaggggagcctggggagcacctcttccctgagcaccctctggagcccgacagcttctctgagggagggcccccaggccggccgaagccaggcgccggtgtccctgacttcctgccctcagcccagagggccctgtacctgaggatccagcagaagcagcaggaggaggaggagagagcgaggaggctggctgagagcagcaagcaggaccgggagaatgaggaaggcacgtgtccgccccaggggccggggcacaggccccaggccgctgtgcaggggagcggcggtggtggggtgttccaggttgggtttcctgtcaggaaggagcccatggctagggaggacccctgtccagggccatgaagccgggctggggctgctgcatgtccctgagaaaactggcagtcaggggtggctttctgtgttgggttcaggagagaccctgatcccatggagtaggatggagggctagttcctggaggagacagtggccaacaggattgaccgcctgtgccctgccagaggaggctttagggagaccctcacagcccctgttttcctaccgtgttctcaaggagccaacaaacaagagctagtcattgaaattaaccagtaataatcatagtcacgagccaccgagtctcagttgctgcatggttgacttagtggtgtccactttggggtaaaatgacaagtggtgtctagatcctgaagccagaggccacaggtggccctgactgtagcgcaggagccagtgggacagcaggaggaggggccgctcccctgatggcccaggctgtactggcctaggttttgcttgagcccatgtctgagtctgcccagccggccctgcctcttatcagctggtgactgcggttggtccacaccagcccctccctgggacatggggacatcacgagccggtttggggtcaagtgtctctgagccccaggcccagccagaactgagtc

SEQ ID NO: 2930 - DNA, 1236 bp, Homo sapiens
ctatgaaaaaaaaaaaaaaaaattgacagttcaatgtcacctctgataagccttccctgaccacccctgttactctgtagccccatgtcctgctttatttttctccaaagcatttatcatcgctgggtttatatttatttctcttcgggcttttctcactggatcgtaaactccatgaggacagggctttgtcgatttcactcaataccgttattttacaacatccctattgctgggatctcagtatgcactccttaaatatttgcagaatttaagtgccacataagtgaccacgtgggcaacgccctcggggccttaagccgcgccatttttggggctaggattggttggaccctccgtcacgtgacatgcagtcgccggatcgcctttgagtctcgtgaggtacttttggtcccaggctccgcggacgaggtactgcgcaggcgtgggagggtctgcgcatgcgcagaagcactccgggcgtgctgccggcggcggtaggtggcgcgcgggtccggcgggcggttggcttgagcgggaccggagctgaggcaggaagagccggcgccatggtggagaaggaggaggctggcggcggcattagcgaggaggaggcggcacagtatgaccggcagatccgcctgtggggactggaggcccagaaacggtcagggccggcgcggcttgaggccgctagggtctggagggggcgtctattctgaggcgtttgcggcccggaaggagcgggaaggtgtgatttgaagggaggaggcgggaattctgtgctctgggatcgtctctctcttggggggactggaggagttgattggggatgtttctggaaggtctgggaagtggttgggagggccgttccgaaggatgggagctctgaagggggcgttggggagtcctgagagagcgggagaattcaaactcaggaaatccgaggcccgaaagcggtgattgtggggtttgatcgcggttaggggataagaggggctggggatacgtggaaagggtgaggtgagggacgcagttcattcattcgagggtatgggacctggttccgtgctgcacacaggggagactggactggccaaccggacagacgggagcttacactcttgtgggagctcacgggcgggccagtctgagagaatgcgggttttgaggagttttggagcaagttatctcaaatgggaatcttgagaggctcggagaggctggagggggacg

SEQ ID NO: 2931 - DNA, 1245 bp, Homo sapiens
gatggcattgcctgcccaaggtcagttggcactaagtggcagaggtgagattcaaacccaagctgttggactccagagtctgatgggtaggcatggtatttgcttagattttctttttgctttttcttttttttgagatggagtttcactcttgttgcccaggctggagtgcaatggtgcgatcttggctcactgcaacctccgcctcccgggtttaggtgattctcctgcctcagcctcccaagtagctgggattacaggcatgcgccaccacgcccggctaattttgtttgtatttttagtagagatggggtttctctatgttagtcaggcggatctcgaactccctacctcaggtgatccgcccgcctctgcctcccaaagtgctgggattacaggcgtgagccaccgcacccggcctgcttagattttcaatttgggcagggccaggggctggtacccaggctcagggtcctctcctgatcctttctttctcccaccccaggtcggctaccagatccgctttgagagcacacgttcggcggccaccaagattgtattcctgacagtggggctgctcctgcgacaaatccagcgggaacccagcctgccccagtatgaggtcctgattgtggatgaagtccatgagcggcatctccacaacgatttcctcctgggcgtcctccagcgcctgttgcccacgcggcctgacctcaaggtcatcctcatgtcggccaccatcaacatctcgctcttctccagctatttcagcaatgcccctgtggtacaggtgcctgggaggctgttccccatcacggtgagtacttccccctcctcccacatccccagacctccaacctggtctctgtccaaacctggacatgcctcttctctctgctgctgtatctcccatctctttcatttaaagatgttctctttttttaaagctaccattttctgagcattcataatcagctggttagagtgctaagtgcttgttagagtaaaagctgttacaagaagacccaaaaatggctgggcgccgtggctcatgcctgtaatcccagcactttgggaggccgaggtgggtggatcacgaggtcaggagattgagaccatcctggctaacatggtgaaaccccatctctactaaaaacacaaaaacaaaattacccaggcatggtggtgggtgcctgtagtcccagctactcgggaggctgaggcaggagagtggcgtgaacctgg

SEQ ID NO: 2932 - DNA, 1203 bp, Homo sapiens
gggggctacgcagtcactgacttcctcacctacaactgcctcacggtaagcatgaaccctccttccctgaaggtgggatttcaggaagaccccaccaccccgtttcaccttagtccagggacatagttcccaagtggggcccgtggccctgagggcttctgggaagggtcccgggggggcacttgggtggtgggtggcacttggcgggggcccagccctgacagctggcctgccacagaatgacacagacctgtacagcgactgtctccgaaccttctggacctgcccccactgtggcctgcatgcgcccctcacgcccctggagcgcatcgcccatgagaacacctgcccccaggccccacaggatgggcccccaggtaagcacaggactgtggggacccggccacctctgcccagccgtctgcccatcccatgatggtctcctgtgcgtgtgagcacttgctagagcttcgaggactgacgacctccacccgctggccctggctggtgccacacacaggccttgtcctgaagatcaggagcccaaggcagggagagcctggagcgccacctctttctgtctgcctgtcccctgtggtgtctctgtgttgctgtctttgtctctgtttctgtctctctgtggctatgtctcttgttatttttctctgtcctgcagctatctctgccttggtcacctccaccctgttgtcacccagggatgccacacactggggttcagtgggggagatagcactggggccacatgcctccatccccggctggctgtgtctgcctctcagtctccatgtctctccttgtgtctttctctctgtctctctcactggcagggatgcggagtaaagacagacctgtgtatttttattaatctgggagggcttcctggaggaggcaaaactgggttctccaaaggccaggagagaacctgagccccacaggtgcctggcatttgggtgcaggtagacctgtgcactggaacacgcccctcacagcctcctccttttcctcccttaggggctgaggaagctgccctcgaaaccctccagaagacatctgtcctgcagaggccctaccactgcgaggcctgcgggaaggacttcctctttacacccacagaggtgctgcgccaccggaagcagcacgtgtgagctgggccaggagccctgcccacctccgtgcagctga

SEQ ID NO: 2933 - DNA, 1176 bp, Homo sapiens
cccacacagctcagccaacaagtgtctgctgaaggtggctggttacgctgcgctgctggagcagtatcagaaggccattgacatctacgaacaggtggggacaggtggggatggcggcttccaccctgccccctctcagggcctgtgcctcctcctaagccccggcaccttgttctggaaccacccctcccccggctcaccctctgcctctcccccgacatcccttgccatgtcatccccccaccctgtcttcagcctggctgaatgttctccacctacgactccatgccgtgccagcaccgtctctctccctggctgtgcccctcccacacccctcgcagagcttcctggaggggcccagagtgaggctggctaaagaacccagagggagggaatgggaagaagtgccaagaggcccagggtggccgtgggcaccccaccccatggcccgatggtcctcatccacagtgggagggagggagtgtcacatggggtccccccagcgtgcacggagccctgggtgatggccgagaaaaaggcaggcagctggccccctgggagagaggggcgggcgccgcctctcatgttcccaccgcctgccgccgctctgcccaccgccatgccagcctcccgttggtcctgacagccaggctgcctccttcccactgtctcaggctctcagaaggcccacgaacacctggctacagcctccacccccacccagccaccatcacaccctgatcttggtcgctcacgcactggccgctgacctctccaagctggtccctggctccctgcccttggggtcctgggttaacagggcctcacctcgggacatgaaccagctcccagctggccccccagtgcctggcagtggctctggccctctggctgcttgccctgagctcaccagtgccacttctccatggctacaggtggggaccaatgccatggacagccccctcctcaagtacagcgccaaagactacttcttcaaggcggccctctgccacttctgcatcgacatgctcaacgccaaggtagcacaccccacgcccgcaggaccaccgcaccaggccaccatgtgcttatctccaggccaggtcccgttgcccccgaagagggacgtgctcctccctcacgtctggcccctgccagccagcctttggatgagaa

SEQ ID NO: 2934 - DNA, 1194 bp, Homo sapiens
gactatgccggtcccatgactaagtgccagttgtccacaccacggtggccacctccttcctccttctccctcttctgttgctgctttccccccttcaccttttcctccccccaccttccttcggcctcccccctccccgcctccccttcctccttccccccctcaccctccccgccttccctcttcatcatcagaacacgcattcaccaaacacttattatacgaccagcccttccttgttatcttcatttagttctcacagctataatatcatattccaaatagcttatctttcataatataaatgatgaggaaatgtagtaattatataatgttggtctatttacaggcccagtaacagtggtgatcctgttactattttgtgatcacacttcttaccacgaccatcatttttgtataccctaagatccccattcaggttctaaacactctccacacgtgacatcagtgaattttcacaggcatcccaggaggcaggttggttgtgaccatctggcagttaagagctcagggggttacagtggcctgcctggtcctcagtcggttggaggctgagccagagccctgtctgcctgccactccccgccactcaccagtggttgacccaggcagttccctcgtctgtgaaatgaggaagggagcagcacccgcctcatgggactgtcaccaacaacagcatggagaatcacaataataatgagtgatgatgatagatgcttctcgagcacctgccaggggccgggtgataccgtgaaccctccatgtggatttactgagaatcctggaagctgcagattttgatgggttatctggtcagtattggtggagatggaaatctgtatcataagtattgtttgtggggctttccacacatatgcctgcagatatttttccatgcgtgtcctgggttgcagtccaggatagcatgaaaagcacttaaaaagcattgaggctgggcacggtggctcacgcctgtaatcccagcactttgggaggccgaggtgggcggatcacctgaggtcgggagttcgagaccagcctgaccaacatggagaaaccctgtctctaccaaaaatacaaaattagccgggcatggtggcacacgcctgtaatcccggctgcttgggaggctaaggcaggagaattgcttgaactcgtgggcggagattgtgg

SEQ ID NO: 2935 - DNA, 1199 bp, Homo sapiens
cattctcagaggccccttcttctccaggagggggctttggactgggtgtcctgggccccgcgggggtgatatttctgaacacccgccctgttctgcaggtaccaggcacctgacatcgacgtgcagctgagctcggagctgacagactcgctcaggaccctgaaggtgctcactgtgtcctgccgtggagccccgtgcccagtgatgacaccatccttgctccccgtgccccccaggggctatgggcgacaccatggctgcccctgggctgggccagtggggccaatgcccaggggctgagggcacgggatgctgggatgagatcccagggtgaggggccaggctaaggtttgagtccgggaccctaagaaggcctttccttccagctggtccctgttgcagtcccggtcacctttaggactagagggaccttcctgaagctcagaaccaaccctgtccctcccctgctcggaacctgctgtggctccccagtgcccctgaggaagcccagctcctctgtcagccacacgcctgggccgacccggccgtggggctccagccagttgtgctcatgagcggactgtgccttctccctctgatccagcctttgccctcgctgtccccttttctgtgtcgtcaccagcccacttcccgtgactcctctaagcccagcttagagatggccataggttggtggctgtcatcccaacactgagccccagcagctgagggccaggctgagtccctggtgcccacaggctgccctggggggagactgcatggggctgagccctgccaggaccccgaggagaggtccaggcccttgggcttctgccaggccctgctgaggcctccctctctgtcctgtagcccgagggcaacatccttcgagaccggttcaagagcttccagaggaggaatatgatcgagcctcgagagagagccaagtaaggggcggccggggctgctgtggggcgagggcatctgggattggccccgggcactgattgctccattgtccctgctccaggttcaaacgcaagtacaaggtgaagctggtggagaagcgggcgttccgtgagatccagtgagtccacccggcttcggcgcaaggaagggagcccttctcccaccccgtggtgcccaccgagtcccagggccccttccagagtgtggctagtggctgagccacaccccct

SEQ ID NO: 2936 - DNA, 1199 bp, Homo sapiens; identical to SEQ ID NO: 2935

SEQ ID NO: 2937 - DNA, 1191 bp, Homo sapiens
agctgaatgcattgtggactgttgctgttgagcgtggggtggggtgccaccatgcaggctttgaattcttttttttttttgagacagagtctcgctctgtcacccaggctggagtgcagtggcgcgatctcagctcactacaacctccacctcccaggctcaagcgattctcctgccacagcctcccaagtagctgggactacagttgtgcaccatcacgcccagctaatttttctagtttttgtagagatgggtttttttcaccatgttgcccagactggtctcaaactcttgggctcaagtgatccgcccgcctcagcctcacaaagtgctgggattacagacgtgagccaccacacccggctatctttcttccttttaacatgggccccacgcctggcctctgttcctgcaaactgactccctaccccaaccacctctttttctctccacagtccagggaccttgacccagcccctctcagcagacgcttcatgataggaaggactgaaaagtcttgtggacacctggtctttccctgatgttctcgtggctgctgttgggggcagagattgacgcccccggtctttgcctctgagcgggagagtctgtgtgtatgtgtcttccccggaatccacaccaccccaccctcctcctgtcccgtggtttcatcatatctctttgcataccccatgtcttccccagttgtcccctggagtttggggggacatcccgcctcaggcatccttctcaaggggaagccaagagaggcatcaggatgggtgggtttctgattgtggcaacgtttgcaaccgttcacgattcaataaatattggatgaatttaactgaatgtgcctgtgaggagtgtatcttgttttacccctgtgcctcctccctccaggaccccgtcccagaaattagcaaccacgtgttgagtgctcagtgcaccaaccctctgtagggaagcaccttactgcaatgctgaggttgttattttttaagacagtcttgctctggagtgcagtggtgcgatcccagcttactgcagtgtccctctcctgggttcaagtgattctcccgtctcagcttcccgagtagctaggaccacaagtgtgaactgctatgcctggctaatctttttctttttctttttctttcttttttttttttttttttgagacggagtctt

SEQ ID NO: 2938 - DNA, 1224 bp, Homo sapiens
ttttgtatttttagtagagacagggtttcaccatgttggccaggctggtctcgaactgctgacctcgtgatctacctgcctcggcctcccaaagtcctgggattacaggtgtgggccactgcgccggccatgtttctcgacttctgctggcaagcatgttccagtatttgcatggctcctagccctcatctccatttctctgcacagatgttaccttccccatgaggtctgccttatacatgaggcctgtattataaagtgcaactccgcattccccaaccccgttgtttcttctctccagaacactaggcaccatctgatctcctatgccttttccttattgtcagatactgaactctcagatacagttccccttcctccctccagggggcgccatggaacgcagggccctcactggccctggggactgggtgacgacaggggggagcctctggtgattggctccctcaccctgcgtaagatcaaagggactaaaggacagccccgacacccggagccattgtggctcaggccggttgcgcctgccctcgggccctcacggaggcgggggttccagggcacgagttcgaggccagcctggtccacatgggtcggaaaaaaggattttttttatcgttcccaatataacgacaaaacgtaaagggaggacgccttgataggaagaaatgacatcttcctaagtgtttttaaattacttccatgtgtctttttttttttttttttttgggagaccgagccttgctctgttgcccaggctggagtgcagtggtgtgatcttcgctcactgcaacctccgcctcgtcggttcaagggagtctcctatctaagcctcctgagtagctgggattacagtcgcctgccaagagatggggtttcgccatgttgaccaggctggtcttgaacacctggcctcaaatgatccactcgccttggtctcccaaagtggtaggatgacaggcgtgagccaccgcgcccagcctcttctattcttttagagacagcgtctcactctgttgcccaggctggagtgcattgatgtgatgtgtgatcatagctcattgcagccctgaccatccgagctcaagcaatccttctgcctcagcctcctgagtagctggggccgcagatgtgcaccactgcacctggctaatttttaacatttttgtggagccagagtctgtataaaataaagtgtaaatagta

SEQ ID NO: 2939 - DNA, 1224 bp, Homo sapiens; identical to SEQ ID NO: 2938

SEQ ID NO: 2940 - DNA, 1224 bp, Homo sapiens; identical to SEQ ID NO: 2938

SEQ ID NO: 2941 - DNA, 1224 bp, Homo sapiens; identical to SEQ ID NO: 2938

SEQ ID NO: 2942 - DNA, 1224 bp, Homo sapiens; identical to SEQ ID NO: 2938

SEQ ID NO: 2943 - DNA, 1224 bp, Homo sapiens; identical to SEQ ID NO: 2938

SEQ ID NO: 2944 - DNA, 1224 bp, Homo sapiens; identical to SEQ ID NO: 2938

SEQ ID NO: 2945 - DNA, 1224 bp, Homo sapiens; identical to SEQ ID NO: 2938

SEQ ID NO: 2946 - DNA, 1224 bp, Homo sapiens; identical to SEQ ID NO: 2938

SEQ ID NO: 2947 - DNA, 1224 bp, Homo sapiens; identical to SEQ ID NO: 2938

SEQ ID NO: 2948 - DNA, 1176 bp, Homo sapiens
agtgagagcaaatccattgagggctcacatcatggagcatttcttgggagccctgccctgtgccccgtgccttacctcatcagttcctaccagcaactctgtgagactggtcttgttaccctcacctccagtttatagaaggggaaatggagacatggggaggcaaactaagccacttgtctcctgccactggctcaaagcaaggaccatgctggggtcctgaccattacagtcaccagggcgggcgccaggctcagttctctccctgactcatcctcctcaagcctcgccaacccctcagggcagctgagatgggaggtgctggtgcacctacttgtgcccctccccagtctatgctagtgggcaggatcattactgcctggctcagtttcctcatctgtcacatggggctgtgtgatatctggggtcccttccaggctctgaagattcttctggtttttgaggagagggtctacatacatcaaggtcgaggagatcagagaagggaggaggcaagattggggaggtgcagacaagcccccttccctggcctgctctctccccaggtccctgagcggacggctgcgccttgggctggcagagcagtcggtgctggctgccctctcccaggcagtgagcctcacgcccccgggccaaggtgagctcctgtggcccgtctctgcatccctcgctggagttacctcaggcttcccccctcctcttcagaggcccatgcccgccccttccccagcgggcccctgccataccaggctcctctctcctgggtgggggggagggggcgtcttgggccgcggcatctgcattccttgccatacagcaaaccacccactgcaccctggtgtagccaaggatgtgggtgccttccaaagcctctggtgggtcttttcttagaattcccaccagccatggtggatgctgggaagggcaagacagcagaggccagaaagacgtggctggaggagcaaggcatgatcctgaagcagacgttctggtgagagctgggcagtgggtggagttgccaggggctgtgggcagagtgccagggtgggggtggagccagaggagcagtgggtggggccagtgaagtgacggacaggcatcacgagtgccggtcacggggtgactgagagcagaggtggtgatctagacaaggct

SEQ ID NO: 2949 - DNA, 1099 bp, Homo sapiens
gtgttggttctgataggttgagagctgcttgtcacagctgtcaccgtgacttgaggctccatctccccagctcttacacccaggcgcccatgggacccagctctggacagtaagtggggccagagcacatcccacgtgtgtaagctggtggctccaaaacaagccgaagggtctttggtcactgccagagatgttcatgacccgccagaggaaagggtcccttggccttctctgctctgtccacactcacttccctagtgaccttgtcccgcctgtggctttaaatcccatccgcgccctgatgacaccggcccagatgtctcccctgagtgtggtcatgctcgttcatccaccgctttcctggctccacgtgcatgtttgctgacttcctacagccagcgtggctgggggcacgttccccaagccatttctaccaagtgggtgagcgttagacacagggaggtgcagggactcgccacaagcacacacagctggagaaaattcatccaggccgcgagagaagggagacacgcagccacaactgtcaccctcgacacccccacccgcgctctcccctgaaggtcggcagctggagtccgtccgggctgaggcagccgagaaaggcgacgtggggctggtggccgagaacagccgcagcacccagaggctcatgctgccaccacctccgctcactgcctccggggtcttcagcaagttccgcgacatcgccaggctcactggcagtgctgtgagtggggcgggccgctcatcccggaccccagacatcttggggacctgaggccacgcgtgtgtcaggaaggcttctgggtagaccatcagctgggtcgcatcagtccttctcatggggtgcacagcttcctctcctccttcctgcacccaatcctaggggagtctcctcttcagagtctagcagacctaatgccatggctgccacatgacaggactcagtaaatacttcctggataaagggagagggaggcaaggaggagagctagctcgttcttactgccctaagagtgggcggccatgggagctgggacatggggatggggtgagggaaggagggcaggtattccaa

SEQ ID NO: 2950 - DNA, 1196 bp, Homo sapiens
ccaaattccttcccaaagttagttctgcctatgcccaggactgaacaaggacagcttaaaggttagaagcaagatggaatcggttaggtgtgatttctttccactgtcataatttcctcagttacggttttgcaaaggcggtttcacctccagcaatctgtgattgtcctcatggctccaggccccagagcctgggactgttctgagccctttcctcttctttctccatttctttctagtgtccacccccttaaacccaccccaccccgacaccacactttgaccttgaggaaccacgtgttcatacccccgtcccctcctccaggctccggatggtggagacgctgagcaacttgctgcgctccgtggtggccctgtcgcctccagacctcctccctgtcctctacctcagcctcaaccaccttgggccaccccagcagggcctggagcttggcgtgggtgatggtgtccttctcaaggcagtggcccaggccacaggtaagggggactgtggttggagggaccagaaggacaggagctcagccagagaaaatgcagaggtcaggtggatcggagagatggtggagagaggctgtgaaacagggttgaggagaaggctgagagggaggagagcctgatggggacagatttgcaggggtgtgggagagaacacaggggcagcagttcaggtgagggaggaccaggcatgtgctgggacagggggtgtggggtgcagggaaggggagggctggggaaagatgctggaggcagagacagcaggatttgggggctgagatggaaggttggggcttagagaggtctgaaaggactttgactggagggattggaaggagtgggaggaaagaacatggtgtgtggggggccagcagcctgaaggggcccagccgccagtgctgggtggaaaggctggtgatgcggatggcccgcctgccaagggcctggagtgctcggtgcttatcatgaggacactggggagccatggaaggattgtgagcaggcaaggggcagcatccagggggaagaggagctggaccccagctgtagagaagagagaagagggcaggagagatctggcagacagtggatgtcagggtgaggaggcaggaggaatgcctccaggatctccctgggtgactggatggatgacaaagccgtcggcagcttgggaccctggt

SEQ ID NO: 2951 - DNA, 1193 bp, Homo sapiens
taggctgaaactccagcacagccatgtggtggaagatttatggacagaaaaaggaaagtgacatacagaaaacgtaagtgaggtacagaaacagctggattgattacagctcggcgtttgctgtacacagttcgaacagttggctacatttgattgcccaaaactcggtgattggcacaagcgtaggccaccttctgtttacacctccacttgttatagttcacgacgtacagaaaaaccttcaggccgaacttaaaatatgtaaggaggcagctttaggctaaacttgatttaacactgtgagctatatatgtggggcatatagagggttaaggtttactaacctttagtttcctcttgccttcctgaagggccaaatactgtaatacgtgcagttccctccaataggaacgtacttcttcattctcttttcctggcaaacacattcttcaaggtccagttctgtgaagatccttctgcctgttttttaaaatttatttttatttgtttgtttatggtcacatacgtctcttcctggtctggactcatccaatccatttgtcacagtaaagcttctggggtaggggaggtggttattctaatgtacatccaatcaagccactctctgtttaaaaccttttgaaggcttcccatacctcccaggataaagactcacctcatcttctatctttaagggcttgcggatttcactgtccaaatctctccctctttcacactctgacccatctacactggcccatcttctctttaccttatgggctgagctcttttccaccccagggttctgtgtgttatttggtgaatcaattaatgaattaattcagcttcccgtcactaaccagatagcccacatctaagaatctaatgataaaacaggcaagtggagaagttttggatttggtttgcgctcaatagctgttgtttgccttcccaggatccctcctgcctcctttcctttctctctttctttttttttttttattttttattttaagagatgggcatctccgggcgcagtggctcacgcctgtaatcccagcactttgggaggccgaggtgggcgaatcatgaggtcaggagatcgagaccatcctggctaacacggtgaaaccccgtctctactaaaaaatagaaaaaattagccgggtgtggtgccggccacctgtagtccc

SEQ ID NO: 2952 - DNA, 1224 bp, Homo sapiens
cctgtggtcccagctccttgggaggctgaggtgggagaattgcttgaggaggtcaaggctgcatggagctgtgactatgccactgcactccagcctgggctacagagtgggaccttgtctcaaaaaaagaaagaaagaaaattgccagtagtgagaaagggtaggaaggaaagaaaccaggaatgtatctgtgagtcctgggggacctccctccctgtggatctgcccatctagcgtgcctgccctgctctggctgtgggaggctgtcccctccctgcaggggccccagcggtaatgccctccctgttttctctcctcacagtcctaaaggggaagaagttgagtttgccggcatagccccggtcctctccatctctctcctcggcagcagcgggaggcagaggaaggcggcagaagatgaagagctttcccatccaggggtgacttttttaagaacccacctcttgtgctccccatcccgcctcctgccgggtttcagggggacagtggaggatccaggtcttggggagctcaggacttgggctgtttgtagttttttgccttttagacaagaaaaaaaaatctttccactctttagtttttgattctgatgactcgtttttcttctactctgtggccccaatttttataaagtgtttttgagtgtcctatgggccggggcagggtccaagatcttttcccttccccaggcccctcggctccctcccagatcccacccccagccccactggttgccaaacactaaatctgccgacacccatctgccccacctcctgccatggccatgaaccgcgacccccactaaatttctagattggggatagggagaaagggaggcccaggaaggtctcccctgattttttttcatagtaatttttttccccagagtttgaattttttggtcttctcctggttttttggcaaattaggggggcccggggctcaagtgcgggaagggggctggcccgaggatcccatggctctcacaccatgtttttgtacagaactgatggttgaatctttgttctcttgaaataaacagaagaaaatgaaacctttcttttgctgctccttgccactctgtccctggtgtgtatggggtcccgcccccgcccctctttctgcttctgcttttgccttattgactatctgtaggcgacgaggcctaggaggagcaggaagaggagaaactgggtctcccaa

SEQ ID NO: 2953 - DNA, 1232 bp, Homo sapiens
gttccacccccactgcttgctggggatctctcttctaggttctgggtctccaggggatcagctcccttccccagactggcgggggtgcatacagtttcatgtgaatggctttaggcccccaattcagccacccccagccccaatctgggcagcccgagggttcatggaccgggaacagggaaccatggcaggcggggaggtggctgtgagttggtgacgtggaccgtggcggccaggaagggaacgggagggaggtgaccggatccggggcctgaggtcagggaaggtcctccctaggcctcacctcaggtccagactgcgggaggaccctgaggggccaggggtagccatgaggcctagtctgggacggagcctcgggctggagtagcttcgggggcctgggctgccccctggctgtggtccgtgggaaagggccctgctcaggcggggcgggctggggaggcctccggggacagctgcactccagagctgcctccaggctggtcccgggcgccctgccttagtttattgcccatgcagcccacccccagcttcctctctccttctgtctgtctgtctgtctgtctgtctctctctctctctctgtctctctctctctctctttctctgtctctggaccacaggaatttcagggaagagccaggtcctgtttgctgtggtgttcactgcccgatatctggacctcttcaccaactacatctcactctacaacacgtgtatgaaggtagaggctccaccccacctctctggcccccactgaggcagaggagccgggtgtgggtcccagactcctaggtctgagggaggaggggctgggggcctggactcctgggtctgagggaggaggggccgggggcctggactcttgggtctgagggaagaagggactgaggcctggactcctgggtctgagggaggaggggttgggggtctggactcctgggtctgagggaggaggggccgggggcctggacttttgggtctgagggaggaagggactggggcctggactcctgggtctgagggaggaggggctgggcctggactcttgggtctgagggaggaggggctgggcctggactcctggatctgagggaggagggaatggggccctggactcctgggtctgagggaggaggggctgggggcctggactccagggtctgagggaggaggggttgggggcctggactcctgggtctgagggagga

SEQ ID NO: 2954 - DNA, 2025 bp, Homo sapiens
ttcaaccaggttgtgttgaagaggttgtttatgagtcgcaccaaccggccgcctctgtccctttcccggatggtgagtggctggtccagagagcacggtagacctgggagccgctgggtcttgtctgtctggaagggaggcaggacttggagctctgggagcaaccagggcatcaagggtttgtctcagccagtcgcgagcgtagagcttggactgttggttggaactgagtgtccatgggcagtgggcaagtctcctggtcctcctctccttctctttgtgaggtggaggtgtcctggtggcttcaggagattgccccaagtcataactgagttttatgtcaaaggctctgctgagggaggccctattgaacagtctgcatttttttttttatctggagctttccccagctggacctgaggagaggcctgtggggtttaaggggtgtggtgtgagtggggggtcccgttagagggcacagctgccctggcctggggatgcctcaagcggggctgaatgtaaacaccagaacaacttacgacgtacatcctccccaccctaagatccggaagatgaagcttcctggccgggaaaacaagacggccgtggttgtggggaccataactgatgatgtgcgggttcaggaggtacccaaactgaaggtgagctggcgggggctgggcagacccatcagacccttgctgtactgtgctgtgctgtgctgtgctgtgctgtgctgtgctggtccatcctcagtcttgccaccgctggtgaggcaagcatcctgcctgtctgagtggctttgaggattggtgtgggtcgtctctggcatggttgatggtggggtcccctgggcaagcttcttctggggcaagttgtaaactgttagtgctggcccctagagccagacagcctgggctcaagtctagactcctttgtcacctctgcacaggtctttttttggcccagcttccttgctgtagtttctagcataacaccagggatgtggtggtgaaagttccggaagtgttgagaactgctgctgtcagcccagggtgctccgggtagtaaacgatagtgttggttaccagggctctgctgcgccaaggcagtggagggtgagtcctggcagcccctgggtgaccacgcaggggtctgacccgccagccttgtcctctccaccaggtatgtgcactgcgcgtgaccagccgggcccgcagccgcatcctcagggcagggggcaagatcctcactttcgaccagctggccctggactcccctaagggctgtggcactgtcctgctctccggtgagtgatacgtggtcgacgggtttggactgagctgtgtggctactggcagccttcaccctcctggatctgggaggccagaagctgggcgccagatccctgtctcacccggttctccttccccttccctaggtcctcgcaagggccgagaggtgtaccggcatttcggcaaggccccaggaaccccgcacagccacaccaagtgagtatcaggcccccagccctgccctctccccagactcagcctgcagggccaggcctggccacacttgggctgcttctcctatccctcgtaccagccagccccaggccttctggaactctcagctgcctcatcctgcctgcttttcccttcaacactgcttggagctgtgttttccagggcctgagcaggcatctcctggggagcatgcagttcaccggcctttgccagcccaggctgggaccctccaggtggtggggcaggtgcttccatagcccctcctggctccttggcttcccactctgccaagcttttccagcagcattgactctcctggggctgaatgtgacaggcttgtggtgttcctgtgccactccacaatggcctcctttaagagggcccccctctcactccctcctctccccacagaccctacgtccgctccaagggccggaagttcgagcgtgccagaggccgacgggccagccgaggctacaaaaactaaccctggatc

SEQ ID NO: 2955 - DNA, 1143 bp, Homo sapiens
ttttccaagagccttagaggcctggccataattcctgtcttcagaactacatctcccggaagcctctgcgccgccttagccttgattccccgttcccatcattgttggggccctctgggaagtggactacatttcccgtgagccgctggggcacagctccgtaggcactcggcctggaacaccccagggcctactgggagttgtagtgcagcttccacctcacgcactgcctccgttgttccgcagtacggaatcagagcccacgagtggatgttcccggtgtgaagctgcaggctgtgctccagatccaccgacccgtagcatctcgtcacgccagcactcgcctccctaccaatgactcacctgaagtgcaatacgaaataaaaggccagcgggcggcgtctgggtctctggcgcccccatgtggttgcgacactcccaaagccgtaagggccgacccaggcatcttggcccccagcccctcgtcgcgggttcaggtccgcccattactccttgtcgtgcggtcaaggatacaccttggccccgattccggatctctccgttctcaggccagacccctggtgctgccgttgatttttttttctctgtctttgctgcaattttgaaataaaatgccaaagaacacacattgtcgggcttcttcagtgacgtgactctggggctttaacccaggaatcctgcttcctcagcccattttattctgaaggactcagtcatccgagcccccagtgttctgatggtttctccaacctgggggagcatttcatgtctccggcactgaacttactatctgccccccaccaaccagctcctcccctactttcccgtctcccagtctctaggccggacccctaggtgctgcatccttttctctcaaagcccacgaggccccgatccctgttcctcctgcccccgactctgctgtccgttcccccgcctctttgtcccctaggccctggcctcagctcagctgctgtcttctactggcacccttgttccagcctgcagtctgctacctggcccaaagggtcttttctacacccagacgtggcccagtgccctcagccaggactgtagtcacgggaccctagtgggtgtggagtgaggcacgatactctcacc

SEQ ID NO: 2956 - DNA, 1179 bp, Homo sapiens
gtgtgaaatagagattcaacgtagtttttctctagatggatatttggttatctattccattattcagtctgtccactcatatagcagtgtcactctgttttaagtattgtagatttataatgttttactacctgatatggctactccctgcccctgccccatcttgcccctcatttttgtggtggtggtttttatccccccaaaatattgtagctagttttgcttgtcttccattcatttatctattcattcatcaaaaacccactatgggaaaaaaaaaaaaagtctggctgggtgcagtggctcacccctgtaatcctagcactttgggaggctgaggcgggtggatcaactaaaaatacaaaaattagctgggcgtggtggtgggcgcctgtaatcccagctacccaggaggccgaggcacaagaatcacttggacctgggaggcggaggttgcaatcagcagagatcacgccactgcactccagcctgggtgacagagtgagaccctgtctcaaaacaaaacaaaacaaaacaaaacaaaaaaacactctgtgccaagcgctgcctaccctggtgcatgggactgcaggagaggctgtctggtaaacgtgtcaagggtaatccctgccttccaggctcttccactctgcagtggagcagatgctgaacaagcaaacttggaaccatggggcagtgatcagggacagagtctccagaaaaaaaaaactaggtcccaggctggagtgcagtggcatgatcgtggctcactgcagtctcaaactcccaggctcaagtgatcctcccaccaccttccaaatacctgggactccagtcacgtgctaccacgtctggctaattttcgtattttttggtagagatggggtcttgctataatgcctgggctggtcacgaactcctacactcaagtgatcctcctgcctcggcctcccaaagtgctgggattacagtgagccactgagcccggtcgtgtcctttgctttctagagtctccgtgtgtctctacctgtttgtctccctgtctatatctgtctctctttttctccatctctctgacccagctgctaaatctccccggtgctctcctcttggcctccatctttcagttgtctgtgtctttgtgtatctgtctctgtctgtcttggtgtctctcatgac

SEQ ID NO: 2957 - DNA, 1301 bp, Homo sapiens
ggaggggctgggggctggacccctgggtgtgagggaggaggggctgggggctggacccctgggtgtgagggaggaggggctgggcctctggggtcctgggggaggaggggttcggatgtcctgtgccaccattccctccctccatttccagacgatgtacctgtcccagctccagccggtgaccagaaggaggtggacacttcagaaaagaaacttctcgagcggctccctgaggttgaggtgccccagcatctgtgatcctccgggaccccagccctcaggattcctgatgctccaaggcgactgatgggcgctggatgaagtggcacagtcagcttccctgggggctggtgtcatgttgggctcctggggcgggggcacggcctggcatttcacgcattgctgccaccccaggtccacctgtctccactttcacagcctccaagtctgtggctcttcccttctgtcctccgaggggcttgccttctctcgtgtccagtgaggtgctcagtgatcggcttaacttagagaagcccgccccctccccttctccgtctgtcccaagagggtctgctctgagcctgcgttcctaggtggctcggcctcagctgcctgggttgtggccgccctagcatcctgtatgcccacagctactggaatccccgctgctgctccgggccaagcttctggttgattaatgagggcatggggtggtccctcaagaccttcccctaccttttgtggaaccagtgatgcctcaaagacagtgtcccctccacagctgggtgccaggggcaggggatcctcagtatagccggtgaaccctgataccaggagcctgggcctccctgaacccctggcttccagccatctcatcgccagcctcctcctggacctcttggcccccagccccttccccacacagccccagaagggtcccagagctgaccccactccaggacctaggcccagcccctcagcctcatctggagcccctgaagaccagtcccacccacctttctggcctcatctgacactgctccgcatcctgctgtgtgtcctgttccatgttccggttccatccaaatacactttctggaacaaatgcatggctccatgcctgtgtatctggactggtccctccaaaacgctattgccacgtcacctgccggagtcctcatctttgaagactggattcaagcatcacttctgagaggctcaatcctggtatttttccatctgcccctgatgagtctgcagccttcactcagggtcccttcagccacaaggacagaaaaccc

SEQ ID NO: 2958 - DNA, 1138 bp, Homo sapiens
cttctatttcgaccgcgatgatgtggctctggaaggcgtgagccacttcttccgcgaattggccgaggagaagcgcgagggctacgagcgtctcctgaagatgcaaaaccagcgtggcggccgcgctctcttccaggacatcaaggtaactagtgtgtgggtaatggactacatctcccagcaggccgtgcgcgcgaggagccttgatttgagggcgtaggtgtcgcgtgggcttctgggagattgagttcggtcttgtgagccctcttaaccgctggaaatagaggcgcacctcgtgcagtgcccacaacacgcggcagtccacaccgctgcgtggtcttagggacgtatagctgtaagagctaggacagggtgcggagagtgataaatacaagctgtcacatgtctttgtggcctgggcctctgacccccaacgactcttgggaaatgtaggtttagttctatgtgccgagtgtgtgtattctgagccatttctcccttctatatagaagccagctgaagatgagtggggtaaaaccccagacgccatgaaagctgccatggccctggagaaaaagctgaaccaggcccttttggatcttcatgccctgggttctgcccgcacggacccccatgtacgtacccgctgcatccatggctacccaaccatacccctcaagcctctgctccctttgggcaaatttccttcagagcctcatttcacacctgtcacattttaatctgcaactggctgctctctccccctcttttccagggattgggtttctaatttctccctcttctctctcagctctgtgacttcctggagactcacttcctagatgaggaagtgaagcttatcaagaagatgggtgaccacctgaccaacctccacaggctgggtggcccggaggctgggctgggcgagtatctcttcgaaaggctcactctcaagcacgactaagagccttctgagcccagcgacttctgaagggccccttgcaaagtaatagggcttctgcctaagcctctccctccagccaataggcagctttcttaactatcctaacaagccttggaccaaatggaaataaagctttttgatgcagctggtggttttgtgtgtggtgtggaagat

SEQ ID NO: 2959 - DNA, 1178 bp, Homo sapiens
tcctcctttcccctagtactatatgtctgcgcgccacatggcgctgtccaaggcctttccagagcacttcacctacgagcccaacgaggcggatgcggtgagtggaccctggatttctgcttagccaggagctaaagggctgggcttcggtggggtgggggtccctcctggagtgggaaggcctagaggtggctggatgcctgggtgggactgtgaggtcctcagctcaccctggtttgcacccacatcgccgtatgcaggcccaggggtaccgctacccacggccagcctcggtgccaccgtcgccctcgctgtcacgacactccagcccgcaccagagtgaggacgaggaggatccccggaacgggccgctggaggaagacggcgagcgctacgatgaggacgaggaggccgccaaggaccggcgcaacatccgtgcaccagagtggccgcgccgagcgtcctgcacctcctccaccagcggcagcaagcgcaactctgtggacacggccacctccagctcactcagcaccccgagcgagcccctcagccccaccagctccctgggcgaggagcgtaactaagtccgccccaccacactccccgcctgtcctgcctctctgctccagagagaggatgcagaggggtgctgctcctaaacccccgctccagatctgcactgggtgtggccccgcagtgcccccacccagtccgccaaacactccaccccctccagctccagtttccaagttcctgcactccagaatccacaaagccgtgcctttctctggctccagaatatgcataatcagcgccctggagtcccctgggcctggaccgcttcccagaggccaggaatctgccattactctgcggtggtgccagaggttttaggaaacctggcatggtgctttcaggtctggggcttttagagccccccgtgtggcttacaaattctacagcatacagagcaggccacgctcaggcccggcatgcgggccaccaagttctggaaaccacgtggtgtccctgcgaatggggcgatcaagtccagagccggggcactttcagagtttgaaggtaactgagagcagatggtcctccatttcaactccagaagtggggctctgggagggatgttctagccctccctggcatgtcagagccaggctctgcct

SEQ ID NO: 2960 - DNA, 1198 bp, Homo sapiens
tgctgtacccccaaagcccagacagtgcctagcacacacgagatgctcgatgaatagttattgattgaatagattagacatcaacgcaatcaggctgttcacctagggactctttgctaggcggcggagaggtacgttacagttctctacgcaaaacgcatgcgcgaaagatccgggaagtgtgatcggaaaggggcggagcatcagggagagtctcgcggacataggcggttcggcgcggaaagcgggaggtggaggggcggcttggggcaagcgcgcgcgcgcagtgcagaagccagccccccgcggctgaggtactcaaggtgcccaaaggcggggtagtgacctcgcgcgtgcgctgtgcccgcggcagcgccgggtcctagtgtgtgggttgttgttggcaccgcacggcgcgtgcgcagtgaggacggcggagggatttgcggccgggacccaccccctgctccagtcgctatcggaggccgcgcgggtggctgagcagcggcctggtgcgctcgcttagcgggcgacggaatcagacggacgtggacgcccccggagtggaagccgaagcaggagttgttgttgctgaggggctgccgcagccgccgcgagcctccggacagacgccagagcgaggagggcgctacgcggtgagtgagtgtgactgagtggcccgacggggtgcggggccgctacccagaagccccagcggtgggcccggtcctcttccccgcggccaggcccctttcccgcgtccccgccacaggtcccttctgcatccctttcccggaccccgaaatctctgggcacccacgcccgcttcccacagcgccctcgtggttccctacccacaggcccttgcggtgtgtggccttttttctttttcgtttgtctatgttgtcctggacccttacccataattcctttcgctttttgcggggtccaggtctgttacccacaagcacttggttttggggcttcgctccttatgtttctctttctttgcttggaaacttccgatccccaggaccctgcaaactgcatctcgtaatttgccctccacggcacgggacgagcagccacagctgctctgggcctccctcctcgggtccttgatttccccagaaattcccagggaacctctccgccccacagctcgtgtcagaggactctgagacttcactcttcagga

SEQ ID NO: 2961 - DNA, 1148 bp, Homo sapiens
ttgatgagacctttaagagctgccttggccctcagagggtgtgcagttgtgggctttggagccctgttctgtcagcttatgttgctttaggcctggtcatcctcactggcactcataagcagggccctgccatcactccactcccatcacatcctctggcactttgttcaatgtgagtgatacttggagctgtgagaagcaatgtctttcctaaatatggaagacagggtgtttcctaaatactataaagctagatgtcacctgtaccagtgcttttcaaactgtctttggtgaaggacagatactgtttccaatctgtttgcttttgataaatatgatagaattactttttaaagaaagatctacagtcaggagttcaagaccagccaggccaacatggtgaaaccctgtctctactaaaaatgcaaaaactagccaacatgctgtcgtgtgcctgtaatcccaggtactcactcaggaggcttaggcaggagaaccgcttgaacgattctagtcagttgctgggttccttttagagagacgggcacaggggggaaagcagggcttagaatcgcttgaacctgggaagcggaggttgcagtgagcccagatcgcgccattgcacaccagcctgggcaacagaccacaacttcgtctcagaaaaaaaaaagacctacagaataaaagaccaaatttgtattaagagtcagtggacatcaaattgtgaaattactgtagaagttcctgaacacttagtcctggtttctgtacttatcacagtccagcaacagtttagatagtactggtccatggaccatgcttagtttttgagacaggattttttttttttttttttttttttgagacggaatcttgctctgttgtgcaggctggagtgcagtggtgcgatctcggctcactgcaacctccgcctcctgggttcatgccattctcctgcctcagcctcccgagtagctgggactacaggcgcccaccaccacgcccggctaattttttgtatttttagtagaggtggggtttcaccatgttagtcaggatggtctcggatctcctgacctcatgatccgcctgcctcggcctcccaaagtgctgggattacaggcgtgtgcactgcacccggcctttac

SEQ ID NO: 2962 - DNA, 1169 bp, Homo sapiens
tgctgcaggggccccgccaggccccctgggagtgtataacccgcctctctgctccctgccatttcctgaagatttctcccacccccttctggttcattttctgttctgatgtctgttccccccacactcacccccctccaaaaaaaacaaaaacagaaaaaaccggtgtggtctggggtgcggagcgtcccagctgggcctcctgccccggcttggtgtctcagggtgcatgcttggggttgtggaggagccccctcccccacagcagagtccagcgtggagttaaccttcagtttctttgcagcgattttggccgccctggcgggagggggctgttccatcatgtgggagaggaagggccggggagcctagggggtggcgggtgagggtggacgtctcccccgaccaggagtggttggggcgctgagaggaagcagacgctgagatggagcaggcccttcaccggtttgggagagggttggtctggctgtcagttgcctggctgtctgttgggcgtgtgcgtgtgcgtgatgatggggacacggggcggggattctgtagagctgggcctgtcctgactagaggaccctctggggactcctctcccctccccctccccacatctgttacagccgcttacaaacacgcagatggcaagaagattgatggcaggagggtccttgtggacgtggagaggggccgaaccgtgaagggctggaggccccggcggctaggtgagcacatcctgccttcgacgggctctcgggggccctgggcctggtggccttgttctcccttctctgctgctttctgcttctctgtctcctgccggcccacctctcccatcgcgtcctcatctccggcttctctctcttgtggccatcacatttctgacagctgcctgcctcctcgttctgggttactgtgaggagcaggggcaccagcctggagaggcctgagcccacatgctggcgtccgcccttgctagctgggggtccccttttcctgcctcattgtactcctcttagtggaaataaccccgagttcactgagctcagtgtactgggcgcccagcttggcagtgacgcatgctggggttgtaaatgtcactcgctcatctgcttctgctgcttgctgttgctcttgttcactcttttactgattcagca

SEQ ID NO: 2963 - DNA, 1191 bp, Homo sapiens
acagattcacatgtattttttgaccttctgccgtgttttgtacattcataaaagctgcgtgtgcgtatgtgcatgtgtgtgtgtgtgtatgtgtgctgatgggggccatccacagagcagggggtctccatccctgacagcttctatcctggccccttcacccttacaggcatgaactcctggaggaggcctgccgccagggcctaccttttgctgcctgggacgggcccaccgtggtgtcctggctggaggtactggggcccagaaatgccctgactgttggtccccaacccctctgacagccccactggtaggggctgcctggtcctcctggcgcaccctgcttctagcccagaggtgggggtggccatgggcctggcaggtgaggacccaggagggctcgggcttcctgttcacctaaacagtttctttctccttctccttctgcccctgccactctggccttgcccacctgggtcatggtctcctgtcgttctctctactctctctttctggattctctgtctctatttttcggcaccattcccatctctgaccacgcttttgtcattccccatatttctcctcatgtctccgatcgccctgccgatgtctccctgtctccggcttcctgtctctccccaccctctatttctctctctctatttctttctctctctctctctttctctctccctctccctcttcccccacccgccccccgccccccgtttctctccctatttgtctccctcggactctccctcatctcgtccacgtctcttttccctgtcctgtttcttctccttgcgaactttcccacgtctctgtttcgctccccacccccttgcctttccccacctccctgttcccccatctctccgattttctcctcctctgtccctctgtcccctctgtccctctgtccctccgctgcagctgtgggtgggcatgcctgcctggtatgtggccgcctgccgggccaatgtcaagagcggtgccatcatggccaacctgtcagacacggagatccagcgcgagatcggcatcagcaacccgctgcaccgactcaagctacgcctcgccatccaggagatggtctcgctcacctcgccctcagcccccgcctcctcccgcactgtgagtgtccggcggccaattccagccttcgcttcctcagagccccgcctc

SEQ ID NO: 2964 - DNA, 1172 bp, Homo sapiens
gggtctctgtcccatctctctgggtctctgtcccatgtctctgggtctctgtccctctctctctgggtctctgtcccatgtctctgggtctctgtccctctctctctgggtctctgtccccatctctctgggtctctgtccctctctctctgggtctctgtccctctctctctgggtctctgtccccatctctctgggtctctgtccctctctctctgggtctctgtccccgtctctctgggtctctgtccccgtctctctgggtctctgtccccgtctctctgggtctctgtccccctccctgtgtgccccgctcccatgtgtccacagttcctccggctctctgaccgaacggatccagctgcagtttatagtctggtcacacgcacatggggcttccgtgccccgaacctggtggtgtcagtgctggggggatcggggggccccgtcctccagacctggctgcaggacctgctgcgtcgtgggctggtgcgggctgcccagagcacaggtgaccgagggtgggtgggggctgtctcctgggcctcggcctgcctgccatctcccccacgactgtgggtggcctcccccgccgcccagtgtgtgtgtgtgtctctgtcttattctttgtttctctccccctgcctctgcatgttcctcggcgtctgtgtaggagcctggattgtcactgggggtctgcacacgggcatcggccggcatgttggtgtggctgtacgggaccatcagatggccagcactgggggcaccaaggtggtggccatgggtgtggccccctggggtgtggtccggaatagagacaccctcatcaaccccaaggtgtgacccagggacttggaaaagggggctggaggcctggactcctgggtctgagggaggaggaggggctcgtgtttgtccttctggccccgatgaggagacgccctggtctggccatttttcccctagggctcgttccctgcgaggtaccggtggcgcggtgacccggaggacggggtccagtttcccctggactacaactactcggccttcttcctggtggacgacggcacacacggctgcctggggggcgagaaccgcttccgcttgcgcctggagtcctacatctcacagcagaagacgggcgtgggaggtgagtggtcgaacccatgacc

SEQ ID NO: 2965 - DNA, 1299 bp, Homo sapiens
agcccctcccctgatgggggttgtgggaagctgggggaggggacgcctgggccctttgttctggctcttctgatggcagggcgcccctgtcccccagcttgtggttctgtgggtctctcctggtctcggcctcagctgctgccctgagtctctgtccctgccctttctaggtctccgtctccctttctctgggtctctgttgccctctctctgagcctctgtccccctctctctgagtctgtgtccccctctctctgggtctctggtcccctctctctctgggtctctgtccctctctctctgggtctctgtccccctctctctgggtctctgtcaccctctctctctgggtctctgtctccctctctgggcctctggacccctctctctggtccctgtcccccccccccggtctctgtccccctctttctggtctctgtctccccctctccctgggtctctgtctccctctctttttgggtctctgtccctctctctgggtctctgtccccctctctggtctctgtccccccctccctctggtctctgtccccccctccctctggtctctgtccccctctctctctgggtctctgtcccctccgtcactggtctctgtcccccccttcactgggtctctgtccccttctctctctggtctctgtccccctctgtctctgggtctctatccccacctcactggtctctgtccccctctctctctggtctctgtccccttctctctctgggtctctgtcccccccccttgctggtctctgtccccatcccctctctgggtctctgtccccctccctctctgggtctctgtccccctctctctagacctcccctcagtcttgcttggcccctcttcttttctggcagctgctgctcacatcttaccacctgttcttggggtgggacaggggaagtttcacccacaccttccttccccaccactaacttttgcctcctgtcttctttaaaacccgtaattcatacccgaacctttagccttcatggccctcggcattactctagggtaatcattgtgacttcatcacaattgagttcctctggaaactctgagaacactcccatcctcagctttccaagaaatccagctccttctcctccctcagactcaggagtccagaccccagccccttctccctcacacccaggagtccaggcctccagcccccgctccctcagacccaggagtccaggccccagatcctcctccctcagtcctaggagtccgggccccagcccctcctccctcagactcaggagttc

SEQ ID NO: 2966 - DNA, 1177 bp, Homo sapiens
gaccctttttttttattactattttttttttagacacagtctccctttgccacccaggctggagtgcagtggcgcgatctcggctcactgaaacgtacaccttctgggttcaagtgattctcccgcctcagcctcttgagtagctgagattacaggcgcgcaccaccacagctcggctaatgcttgtatttttagtagagacggggtttcaccaaattggtcaggctggtctcgaactcccgaccttaggtgatccgcccgcctcggcctcccgaagtgctgggattacagccaagagccatcgtgcccggccacgccgatcctcataaatccggagccctcctaactattcgcaaagtacccacatcgccgtctccccttcctccccgttttaagcagtgcgcatgctcctaaatacgcttccccgtgggggacgtaggcggggccatcgggtcctaaggaaaaagtgtgggcgtggctgctctctgtatcttgtagccccaccccattcccattagccccgcccctttgggctggaaccggaggtgtcgctcttcggacctcaaggttccccttaacacagagcgccccgcagtcttcgcggaaagcgttcggggtaggcgatggctgcgacgcgtgcagggccccgcgcccgcgagatcttcacctcgctggagtacggaccggtgccggagagccacgcatgcgcactggtgagagtctgcccggccggcgctgctcgctgcgttccccaggcctgggcgcccggtttttcgcggggagtcccgtcatccactgcggtagctcagccgctccgcctctcttagtccccgtgattcccgccgcccaataggatcgcgccctgtaggacgctcccttgagccttggcggtggcagccttttagtctgttccggtcttccccactggttctcttgccccttgatcctgaactcctcgtagtgtttccgcggttttcctgaactcctctagacgctctcgtgattcctcagggtcccctcagaacctgacgccacccaccagaccccttaggattcctgtgaggctccagtgacccacaacccccattgtctttccacgactcttcaaaacatcctatggcttccatgggcctccagagcaccccagacctcctgagggactcccttcatccctttg

SEQ ID NO: 2967 - DNA, 1097 bp, Homo sapiens
agcctgtgcaacagcgagaccctgtctcaaaaccaaatcctacagtttattagttacaaggtcttgtaactgggtagtcagtgggcagagccttgctggtcttcgttcaaatccaattgctttgcaaaatacaatctgagcataaaatactcatagaagaactcagatatgaggggagtttgggcctcttaaactgctcactcactgatcctgaggcagccttgctttctcagtccctgttcctcatctgtagaacggggctccgtgcatagttcccagctctgatggctgggtgcaaggcacgctgttggcacggtaggacaaaagaagggaatgcttgcttgtgaggacaatcaaaggctgtccttgtctctgagtccttttgcccttgtctcccacaggtcctggtgcttgatggtcgaggccatctcctgggccgcctggcggccatcgtggctaaacaggtactgctgggtaagtcgctgctcgtggcccctctgtcatgggcccccgctggaggtcagtgatgagcaacattcaccatctttcgtttgagtctcacggccatgagatcaaccccatgcaccgctctgagacctgccagccactcttccccagggttggggactccaggctcaagaagtaattatgtattaggctagtttttcatttaaacaggaacttagctctggcaagtactgcgctgtgtctggagggtgactgcataggcagtggtgggaccctcaggcggctcggccctgctaagcctttccctccctctaggccggaaggtggtggtcgtacgctgtgaaggcatcaacatttctggcaatttctacagaaacaagtgtaagttaggacctgggaggagcactggagagggtctccctgtggggtgttgaggctctgaaagcaattgcagccgtgttgggagaggctacttggggtttctgagaaggcccttggaagtggggttttgggggtgctggtagactgggcaggcctcacactctcccctctccctagtgaagtacctggctttcctccgcaagcggatgaacaccaacccttcccgaggcccctaccacttccgggcc

SEQ ID NO: 2968 - DNA, 1097 bp, Homo sapiens; identical to SEQ ID NO: 2967

SEQ ID NO: 2969 - DNA, 1097 bp, Homo sapiens; identical to SEQ ID NO: 2967

SEQ ID NO: 2970 - DNA, 1087 bp, Homo sapiens
aacaggcctgcagagaacagttgcattatgatatgcccagctgtcagtcacctcccagctctcaacagctccggctcttcagggtgtgggggcttagatatccttacaacttcatttgttcaccccccccccccccccccgcagtttgcctatctggggcgcctggctcacgaggttggctggaagtaccaggcagtgacagccaccctggaggagaagaggaaagagaaagccaagatccactaccggaagaagaaacagctcatggtgaggccaggggctggtgctgaggggggcatctcactcctggacaggcctggcaggtgccttgctcacagagtactcttaactggcaaaggaccagccggggttggggtgggatgcagtccatgtaatgagggcaatgcaacccctcctgaccaccaccacctgcacttattcttggcagaggctacggaaacaggccgagaagaacgtggagaagaaaattgacaaatacacagaggtcctcaagacccacggactcctggtctgagcccaataaagactgttaattcctcatgcgttgcctgcccttcctccattgttgccctggaatgtacgggacccaggggcagcagcagtccaggtgccacaggcagccctgggacataggaagctgggagcaaggaaagggtcttagtcactgcctcccgaagttgcttgaaagcactcggagaattgtgcaggtgtcatttatctatgaccaataggaagagcaaccagttactatgagtgaaagggagccagaagactgattggagggccctatcttgtgagtggggcatctgttggactttccacctggtcatatactctgcagctgttagaatgtgcaagcacttggggacagcatgagcttgctgttgtacacagggtatttctagaagcagaaatagactgggaagatgcacaaccaaggggttacaggcatcgcccatgctcctcacctgtattttgtaatcagaaataaattgcttttaaagaaatctggcgtctttgcactgtgtctgctgtggaggcaggcccctggcaaatggggggtgag

SEQ ID NO: 2971 - DNA, 1087 bp, Homo sapiens; identical to SEQ ID NO: 2970

SEQ ID NO: 2972 - DNA, 1247 bp, Homo sapiens
gggaacctggcgttcctgcacgtgtgcccacgacgagttgccctgcctgcatctaagtggcttctggggctgctgggaattgtagttgcttccctgaggccacgcccctggctcttttaaggaaccgcccgcccaaggctcactcctttatctttcctatcctttcaggctattgagggcacctacattgacaagaaatgccccttcactggtaatgtgtccattcgagggcggatcctctctggtaagtgcgggagttactggtgtctggggcctgaaatactgaaagaagggtcttggggcccagactcctgggtcctgggtgagaggggtggttaggaatgcaaacttgtaggtccaggtacattggcagatgatgtttgttttcacgatggtcttcagatgcccacgtgggcactgctgagaaagccacttggtaaaactgatgccggaaatggggctttttgggatccctgctcagctgcttctgagtcccagcatgccctgggttacctatggccctctttcccatgggacctgacctatgatcggcccccgctcctaggcgtggtgaccaagatgaagatgcagaggaccattgtcatccgccgagactatctgcactacatccgcaagtacaaccgcttcgagaagcgccacaagaacatgtctgtacacctgtccccctgcttcaggtgagcgcagtggcccatcaggttgctcaggccacgctctctcagccttcagattccagatcggaccaatttaaggccaactgagggagggaaagactgaggtggcatctctgggaagccccagaatctcaggatttgtatatcatatgttcttcagaatcaaagcgttctacagggtgaatatctctacctgaaatgcttggaaccagattttggaatgttctcgcatacatagtgagatgttttggggatgtgacataggtctaaacaagaagctcatttgtttcatatacaccttattcacatagcctgaaagtagtcttacgcagtgcgttttataattctgtgtgaaacaaagtttgcgtacattgaaccattggaaagcaaaggtgtcacgctggtattgaagaagtttcagattctagccaggcaccgtggctcaagccagtaatcccagcactgtaggaggctgaggcaggaggatcccttgagcccaggagtttgagaccagcctgggcaacatggcaaaaccctctctctacaaaaaataca

SEQ ID NO: 2973 - DNA, 1247 bp, Homo sapiens; identical to SEQ ID NO: 2972

SEQ ID NO: 2974 - DNA, 1152 bp, Homo sapiens
agtggtgagccaggaacaaagtcctgctccctcagagggcaccttcaagcagtgtgggtgccagatgacagccaagtataaccagaatggggatgtgggcagctgatattggtggccctctgggcggggaggatcttgggagcaaggtgaggagtcctgtgggtggagaggagggtggcccaaactgatgctgagcgataagggacctgtggttgtcagtgctgcaggatccccctgctgctctgctggggaagggtggtgaggctgctgacaacttgggggcctccagtttgcttgtgaaatggagctcgtccaccccagcggtcctcggaggggtggtggcctgctctgtgtacagcgttgagcttggtgcttggcacaaaacttgtacgaaaggaggggacaggttgaattggcgagtagagcttggttggggtttggtggagccgaagcagagagcctttagcctggtgaaggggagggagggcctcctggggtctgctggggtggcccctcctgaggacatggccctacctgcctccacagggacgtccagatcggtgacatcgtcacagtgggcgagtgccggcctctgagcaagacagtgcgcttcaacgtgctcaaggtcaccaaggctgccggcaccaagaagcagttccagaagttctgaggctggacatcggcccgctccccacaatgaaataaagttattttctcattcccaggccagacttgggatcttccgcgcctttaccagagcattggtgggggtgggggtgtgcctcggggaattgggcagagctgctgtcagagaggctgcctgcccatgtctgtgggtgaggacagtggagcctgaactgagatgcctgccttcccctgggtctccttctttggtccttgtcaccttttcggtgtctgaataaggctgattacctggcgttgcgctgtccccccgccccctccggtctctggggaggaagtgagtgacggcggaggcccctgggtcctccaggccctggtctgtctctttcctgaccacctcgggtggggaggggaagaagctgcagcccccccctgctgtgggcatgggctcacccaggtagagtgggatgtgctgaggccctgttgtctggctgtgaagtgtaaaggtct

SEQ ID NO: 2975 - DNA, 1168 bp, Homo sapiens
gacagaaacccagagatgggagaacagaggtgcagagagagggggacggagacagagacccagagacgggggaacagagacccagaggggacagagagaggtgcggacagagggagggggagacagacccagaggagggaggcaaagatgtagaaagaggggggacggaaaattgggagaaggggagacaaaggcccagaaggaaggggatagagactgaggaagagtgtgtgagacacacacacaaatgggggacgccagtcagacccagagcgcctcagagattctgatgacctctccctctctctctctcctcagccccttggatctcccttcgtggagacgacaccggggtcctcctgcccaccccaggggaggcccaggatgctgatttgaaggatgtaaatgtgattccagccaccgcctgaccatccgccattccgactgctaaaagcgaatgtagtcaggcccctttcatgctgtgagacctcctggaacactggcatctctgagcctccagaaggggttctgggcctagttgtcctccctctggagccccgtcctgtggtctgcctcagtttcccctcctaatacatatggctgttttccacctcgataatataacacgagtttgggcccgaatcagtgtgttctcatcatttttcaggcaggggaggtaagggaataagtcgggggactgaatggcggctgggcctcggatctctcctacaggtaacatgctgccacaggggaacctgccagttttatacatcaggtcatgtattttctttttctttttcttttttctttttttttagacggagtcttgctctgttgctcagtccggagtcctgtggcgcgatctcggctcactgtaagctccgcctccctgggttcacgccattctcctgcctcaggctcccgagtagctgggactacaggcgcctgccaccatgcctggctaattttttgtatttttagtacagacggggtttcaccatgttagccaggatggtctcgatctcctgacctcatgatccacccgcctctgcctcccaaaggggtgggattacaagtgtgagccaccgcgcccggcctaaggtcactttttttttttttttttaagacagagttttgctcttgttgctcagactggagtacaattgcg

SEQ ID NO: 2976 - DNA, 1223 bp, Homo sapiens
gcctgggtgggccagcagccgcctatgccactgggaaggcctctggggctggaggggcagggggccaggcttattcccccggtcagcctcaagggcttctgggaccccaggcctacgggcaagggtttggaggggggcaggcacaggacttgagcaaagcccccagctactcagggggccccccacagccccccagcggcccccctcctcctggcctggccacatgtcagagctactccccggaccagctgcaggggcagctgtatggggtgcagggcgagccatacccagggccagccgcccactcccaggggctgcccacagccagcccctcgctcagctacagtaccggccattccccagcgctctcgggccatgggggtggctggggacccagctccctgggaggcggcggtgaggccagcccatctcacatcattcgtccgctccagtcaccgcctgccaccggccgtccacctggagtcggctctccaggagcccctggcaaatacctgagctcagtcttggcctcagcgcctttcctggcacctccgggagctggcagctatgcagccggagcaggtggctacaagggcaagggggatggctcggagctgctggcgggcccaggtgggcctcctgcggagcgcacagaggatgaggagttccttatccagcacctcttgcaggcgcccagccctcctcggacctcaggggcggacggcttggtgggcgaggacggggcagcagatgcctctaagggacttggggggagtggcggggccgggggaccaccgggtacaccctacgagttggccaaggaagacccccagaggtaccacctgcagagtgtcatccgcaccagtgccagcctggatgagggtgccactgcggcactggagctgggcctggggaggctgaaggagaagaagaaagggccagagcggggtggcgagacccccgaggggctggccacctctgttgtccactacggggcaggcgccaaggagctgggggccttcttgcaaaagagccctccgcccccacctcccacggcccagtctacccagcccactccccatggcctccttctggaggccgggggccctgacctcccactggtgctgcctccgcctcccccccagctgctcccctcggtcctcagccatgcccccagtccctctcccagcgcctccaaagtcggcgtccacctccttgagcca

SEQ ID NO: 2977 - DNA, 1191 bp, Homo sapiens
ctgatagggtagaagggacactgggagctgagtggtagttacagaggggcttttggtatagaaagcagtgtttaaaggacaagaggaaaggtgccaggaatgatgaataacatccaggcctgatgtccctgtctcccccagagcccccgctgctggaggagaaacccccacccactccacctcctgccccgactcctcagcctcagcctccgccaccccctccgccgccacagccagccctgccctcgccacccccgctggtggcccccacgcccagctcaccaccgccaccgccgctgccgccgccacctccaccagccatgccctcgcctccaccaccacccccaccagccgctgccccactggctgctcctcctgaggagcccgccgccccgtctcccgaagaccccgagctgccggacacccggcccctgcatctggccaaaaagcaggagacggcggcagtgtgtggggagacggacgaggaggccggcgagagtggcggagagggcatcttccgggaacgggacgagttcgtcatccgtgctgaggacatcccttccctcaaggtgagtcccagccttctccagaaactgggcctgatgggtttggtcacctgtttgttgagtgcccgctggatgacaggcttgtgctgagacctgcagatccagtcgtggccgggccgccctggaatttgcagtcctatggggctgatagaggtgtcgaggacctgcgggcctcagaggtgttatttgcgtttgtgtctgtacatgcattacctgtatataaggtaaagcgattgttaacgcgtatgtgtctatatgtgcgttacctgtatataaggtgaaccgcttgttaatgtttatgcagataccctgctgtgggtggtagaggaccagtactgtacaagcagatgaggctctggccctagggagcttctagtttaatggaaccagccagagaggcgggctgctttgccatttatggcacaatggtggaaatgtgtcattgacatagactacctgcagatacacacttatgtaacctgtaaatataatcatgaattgggccggacgcggcagcttacacctgtaatctcagcactttgggagtttgagaccagcctaggcaacataatgaaaccttttctctcaaacaaacaaaaaaagtgaatcatttaggaatggttat

SEQ ID NO: 2978 - DNA, 1242 bp, Homo sapiens
cgtctctactcaaaataaaaaattagctgggcgtggtggtgggcacctgtagtcttagcttccctggaggctgaggcaggagaatcagttgaacccaggaggtggagcttgcagtgagccaagatggtaccactgcactccagcctgggcgacagagcaagactgtctccaaaaaagaaaaaaaaaacaggccaggcgcggtggctcacgcctgtaatcccagcagtttgggaggccaagacggatggatcacgaggtcaggagatcgagaccatcctgactaacacagtgaaaccccgtctctactgaaaatacaaaaaaattagctgggcgtggtggcgggcgcctgtagtcccagctactcaggaggctgaggcaggagaaaggcgtgaacccgggaggcggagcttgcagtgaggcgagatcgtgccactgcactccagcctgggcgacagagcgagactctgtctcaaaaaaaaaacaaaaacatatatatatatatatatatagagagagagagagagagagagagagagaaagagagagagagagagatattaatatgactgagaattttgagtgagatagtagttttctcagaatgatgggtgggacgttgggatgaccgagaattctggaatggattcttagactggtgtggagaaatctaagctggaatgttatgctgactctgaaaattcgtgggtagagtgctgggtgggttggaaaattctgggtagcattaggttataaaaactctggaggatatgaatctagtctacaaattctgagatggattgttaggctggcactgaggattgtgggtgagatgttacactagggtagataatcccagtgtaggatattagagtaggtctgagaagtatgtgttattagtcgggagttagaattctgggatagatggctgggcgcggaggctcatgttggtaatcccagcactctaggaggctaagggaggtggatcacgaggtcaggagaccaataacaacccatcctggctaacatggtgaaaccccgtctctactaaaaatacacaaaaaattagccgggtgtggtggtgggtgcctgtagtcccagctactcgcgaggctgaggcagaataatggtgtgaacccgggaggcggagcttgcagtgagccaaggtcgcgccactgcactccagcctgggcgacagagcgagactttgtcttaaaaaaaaaaaaaaaagaattctggggtaga

SEQ ID NO: 2979 - DNA, 3154 bp, Homo sapiens
gctgactgtgcatggctccagggaggccagggacagggccctgagcgggtgatccctgggctggacaccaaggttgagaagttaggccggcagcgtggaggggacagcactgtgggggtggcccggtgtggggaggggacatggggttttgggacggtcacaccacttcatctagacaccacagccaggcacatctgtcaggcttagttctcccatgcgccatcctcaagaggcaccagcactttatctgttgagcctttatgtggcaccaactgtgtgcactattacccggttttacagatgatggaggcccagaagcaggaggtggctggtgttaggtcacacagctaggaggcagcagaacggtggggcgctgcctgtgctcttaacccccaggccaagtcaccccatcaggcagtcaggagggctggcggcagggggtgatgtgggtgggaggtagtgccttcttggcattctcaccgcagcctgggtgccgggtgccactctgacctcagccatggcagggtcgggggatgccgatgggcgctgcacgggctctcagaggcccctcacctatggccatggccttgactgtgggggcctctgtccaccgatgatctcccttcatcccctacaggtggggcggtccagggtggtgggggcacagtggccccgggcagtgaccacagggtcctgacccgcggcccccgcaggcgggctgcatgctgttcccccacatctccccctgtgaggtgcgcgtgctcatgctcctgtactcgtccaagaagaagatcttcatgggcctcatcccctacgaccagagcggcttcgtcagtgccatccggcaggtcatcaccacccgcaagcaggtgtgccagccaagcacagcccctctggggacagagggggattagaccccactgccctggttgggcagccagacttggtgtgggcggagtgtgatgcgatggctggagcaaggagctgcaggggagcccggaggatgccgggcgggttcccaccagggctccatggaaaagcggccactgggcggctctgcagggctggagggtgggtcttggcgcggcggcagggaagccagcggagcggggagctgggcaggggttgggatcgtcctgcggctggaaggccctgcctggtaaccacgtgtcctggtcatgccttgccagttgaggcagactctgcaggtcctgtgcaccaggtgagggccgggacctgtctcaggccactggggagccatggggggctgtgagcagatgaggggcagggcctgttcccctgggactagagaatggacccagctggggctaacaggccaaggctcggagggagggatggcaggccccaggacagacagacaggtttcccaggagcctgggcccctcttcccaccccgttcccttccaacaggcagtgggacctggtggtgtcaactcaggcccagtccagatcgtcaacaacaagtttctggcatggagtggtgtcatggagtggcaggaggtgagcactcggcagcccagggacttgggacccccagatcctcacggactgtggctgggaggggacactggcattgggggtctccagccctgagggctcctctttgcctctcccccaaaagcccaggcctgagcccaacagtcggtccaagaggtggctgccatcccacgtctacgtgaaccagggggagatcctgtgagtgctgggctggggggtggaggcagcatccaggggagctggggcttcctgaccctcgtccctttgtgccccacaggaggaccgagcagtggccaaggaagctgtacatgcagctcatcccgcagcagctgctggtgaggggctggggccgggtgctggagcctgcacgcagtagctcttccagagggcggggctgggggcaagagcgcctccccaggtggcctgagctggctgtgagggagcggagctgagggtgctgaagcaggtgtggtgggtagctcctcaggcttggcttcaaggggtcccaggcagccagctggtggctgtgcagggactgagcggggcaggggcagccacgacctgcacctggggggctgccaagggatctgagagcggcttccacagcactccagggttgggctggttgagcggtggagatgacgtttcctgaggtagggaggacaggggagtctcagtttggtcctgggcccgggggactcagcgggctgggagccgggaggccgtggtgggagaagccagagctgggggtcccctcgcttccccgcagaccaccctagtgccgctgttccggaactcgcgcctggtccagttccacttcaccaaggacctggagacactgaagagcctgtgccggatcatggacaatggcttcgtgagtggtgccagcagacgcaggggaggggccggccagggcagagcgagcccggaccgctcacgggggcggacatgggagaggaacagagcaccatgtcccagaccagctggggagagagggtggctagtgtgggcgtgacttctgggggctctgtgctgtccccacggcactggatggggcactgaccctggttctgcgggggcctgctcctcctctgccacatcagggctgactcagcaccaactccgcgctctccactcctcagggacaggcgcccttgtcactcctggtttcccgggagcttgtgccacatcccaaaggcccattgctgggcagggagggctgtctgcccccagcaaggtcccagaatatttggcgattgtcttatctgggggaggctcagctgactcctcttctctctctcgggctcagtttctccatctgtgaggtggagaaggttggactttggtgtttctgagccctccccccgatgtccaccttccagctgggccatacttgggtaatatcccgaaactaccttaaaattaccttcgactcagtctgagtaaactgtccacgaagctgttcgtgggtggggggggcctgggtgtaggtgcttttacatgaaagcaatttcaagcattccctcaggggccgggtgcggtggctcacgcctgcaatcccagcactttgggaggccgaggcgggtggatcacctgaggtcaggagtttgagaccagcctggccaacatggtgaaa

SEQ ID NO: 2980 - DNA, 1427 bp, Homo sapiens
tcagggcgcagtggctcacccctgtaatctcagcactttgggtggccaaggcgggcagatgacttgaggtcaggagttcgagaccagcctggccaacatggtgaaaccccgtctctactaaaaatacaaaaattagtcaggtgtggtggacgcctgtgatctcaatctcagctactcgggaggctgaggcaggagaatcacttgaacccaggaggtgttgcagtgaaccaagatcacaccactgcactccagcctaggcaacagagactctgtctcaaaaaaaaaaaaaaaaaaaaagaaactcccaggagacagcagcctagttttcgagtgtgagcttgtgcttgtgaaagctaaccatgctaaccaccaaggcaaagcagcacagtgtgaatagaacagagcgggatcaagaatttcacagaagacaggtcagctgaggggcctgcacacacagggtgttgaggaaccacagatgggcgccgagaggcctgccttttgcctggcccaggctcacccccaccttgggcctcacctcctccaggaagccttcccagctacccgaagctcaggtggccttcttgcaggtccccgtagcaccctgagcctgtaccttgggtggcacttgttatgctatcctgtgctagccgtttgtgcctcgtctcgctgttagattgtgagttcccatgggcagagacccactgtcgttccccgtgtgtccccagcccggtccctgtcacatttgttaaatgaaagaacaatgaagcccagtgtaacgtcagtccacagaaatagccacagcttccagtggtggccgtagacttggctcggaacttagtggcaccagagtaactctagtcagttacagtaaaatccactgtgtgtggaaggcagaagctagcggttgtatcccaagcatcttttgtatttgtctttatactttgctgaattctctgaaatacctattactgtatgttgcttttctaaataaatgtattgtgaaaccaaaacagctgctgttaatatggataaatgttaggaggagaaagctgagtaaaaagagcaggttccaggagactctgcaggggtgccattcacatgaaacgcacaggcaagcaaatgaagtagtgcttgcatagacataggggtatgcgatgaagcagcttttgtttgatgagacagagtaatagacaaatgcaaatcgtggtttgctccaggaaggggtggtgctagtggtagaagaggaacacacgagtgaagccgccacggggagtgggctccaggtgttttgtgacagttatgtcgtagaatatacacaaatatggctgggcgaggtggctcacacctgtaatcccagcactttgggaggccaagatgggcagatcacttgaggtcagggattcaagaccagcctgggcaacatggtg

SEQ ID NO: 2981 - DNA, 1137 bp, Homo sapiens
tcccgactttgtgatctgcccacctcggcctcccaaagtactgagattacaggtgtgagccaccacgcccagccgtattattacatttttaaaatatgtcttagatcatatattatttgggagcttaattttttgcatttaagagactgccttggagatcattgataatcatgtgggtatgtatacatctacctcattgattttaacatttttgcagtatattatagcatggaggtgctgtaatttaaccctgtctgcttttgatagacatttagattattggtaagtttttcattatgagaaacaaaggaataatgaacagtcttattacatgttgtttcatatctatgctagtactgccttcgtgcttttagggtaggcagaattggtggaattccatggtcctttggtatgtgaaatagccatggtgtgcatacgttgtcatggagaaaaggatcaagacatgtccccgtccctcttctccgcatcatctattgttatccacctcagattgcattggaattgttattataggggtcattgtcattcgaagatgtggctgtgggcttcaccagggaggagtggcagtttttggaccagtctcagaaggtcttgtacaaggaagtaatgttggagaactacatcaacctagtatcaataggtaaggacagcattgccgtcacttaccttttctttcttatttggtgaccactgtacggtcccataaatatttaatggtttagactaaagtattatatgttatagattttttgttgtggtggtaaaatatataacataaaatttaccgtcttaaccataagcgtgcagttcagtgggttaaatgcattcgcgcacatagtgttatgcagccaccaacactaccttctgtcttctaaaactgaaactctgtacccacaaaacaacaactactcattcccccacttctccccagctcctggtgaccaccattcactttctgtctttaggattttgacttctctaagtacctcgtataagtggaattatatagtgtctgtctttttgtgtctggcttatttcacttattatgatgttctcaaggtttatccatgttgtagcatgtgccagagtttcctttttaaggctgaataatattct

SEQ ID NO: 2982 - DNA, 1175 bp, Homo sapiens
gaccaggatgtggacgtcaaatactttgcccaggaggctctgactggtaagacctagaaagcacggagccctagcaggagggtggactttgaggacaggcactgggcctgtgggcagcagcttctgggagggggaggtaccttggcattgtgggcagagagagggctctggttctgattcttgcctgttcctgttttcctagttctgtctctcgcctgatgctggaagaggagcaaacactggcctctggtgtccaccctccaacccccacaagtccctctttggggagacactggggggcctttggctgtcactccctgtgcatggtctgaccccaggccccttcccccagcacggttcctcctctccccagcctgggaagatgtctcactgtccacctcccaacgggctaggggagcacggggttggacaggacagtgaccttgggaggaaggggctactccgcccacgtcagggagagatgtgagcatcccgggtcactggatcctgctgctgtaatgggaacccctcccccatttacttctccacctcccgtcctccccatcattggtttttttttgtgtgtcaactgtgccgtttttattttattccttttattttcccccttttcacagagaaataaaggtctagaagtagttggtcctctggccttagtcatcagcttggaggagggggcaccaccccagagccacaacatctgcgcttttctctggagaagatcttgttacaggacccattatacccctatgtcccgaaagaatactctggggatccccccaggagtgctgctggcctttggggtagagggtccatgaggtgctctgggtggtgtcctgtagtgcagttcagattcatagatgtcggccgagtatttggggggttaagagcaggtgccttggaaccagactgcctgggtccaaattgtggctccttcagttaatagacgtgtgactaggagtagcttgttaagtctttatgagctcagttttgtattgtgtaaaatgagagttacagtaatacctagattgcagggtgggtggcgaggaccaagtgaattagtacctggaaagtgtgtaacagtttcaacatgagaagtacacaacatgagaagcagagttagctgtacattgccagagaaccccctgtgggccatt

SEQ ID NO: 2983 - DNA, 1150 bp, Homo sapiens
gatatggcctcgtgggaagggaaagacctgaccatcccccagccagacacccgtaaagggtctgtgctgaggacggttagtgaaagagatagccctctttgcagttgagataagaggaaggcctctgtctcctgctcctccctgggaatggaatatcttggtgtaaaacccaatcgtatgttctgtttacagagataggagaaaactgccttatggctgtaggtgagacatgctggtggcaatactgctgtttactgcactgagatgtttgtgtaaagtcaaacataaatctaccctacatgcacatcgaggtacagcatctttccttaaacttatttatgacacagagagctttgcttacatgatttcctgctgaccttctccccaccattaccctacagtccttccacatccccctctctgagatggtagagatagtgatcaataaatattgagggaactcagagacctcggctggtgcggatcctccgtatgctgagtgctggtcctctgagcccactgttctttctctatacgttgtctctgtcttatttcttttctcagtctctcatctcacctgatgagaaatactcacaggtgtggaggggctggcccccttcaataaggaccagacgctgtggctcatgcctataatcccagcactttgggaggctgaggtgggcggatcacctgaggtccagagtttgagagcagcctgaccaacatggagaaaccccgtctctactaaaaatacaaaataaggcaggcacggttgcacatgcctgtaatgccagctactaggaagtctgaggaaggagaattgcttgaacctgggaggcggaggttgcagtgagccaagatcgcaccattgcactccagcctgggcaacaagatggaaactccgtctcaaaaaaaaaaaaaaaaaaaaggttaaataagttgtgaggatggagcagaagaggtggaagagaagcaatagagggaagaaggggataaattgcaggagaggagagaggtacaaaataaggagcacaatcccagggaaaaagaaaagaaaacaagagctagaaagagaaggggagaatgagagatatgcacagaattagggagggaagcacagtaatgaagaaagaggggccaggcgcagtgg

SEQ ID NO: 2984 - DNA, 1176 bp, Homo sapiens
ccagctccgcactttacccagcgacacgagaaccaaattgtctcctcaccttttttttttaatatatatatcccgaccctcactcccttggggcccaggctcagagctgccccccagccccagcctgacctcagcacccccattccccatacgcctcctcatctccactccccgaaccaggtcggacgcctgggtccctcactgctgggggagggggaagcagcgagaattgggagccaaaaggtttttctggggggggtgccaacagggggggctcgacgtcccctcctccgtgcatcggagagttgacctatcattaacagaggtgagacagatctttttattaatcggaggtgggtggaggtagaattaatgttctgtgatccccccccccgaattctggagaaaagagctggtccccttcctaaggagaaaggagagtgaccccctcatatccggaagctttagaattgggggtccccagctctcttctccctggcagctgctgaacgatggactaagagtccctaaaaccagattgtgccccaaattgacaaaatgaaaagatcttcgaatctttttttttttttttggacggaaggagaatttccctcctttccctcctcttcccttcccctcttatcccaggttgttaggggcctggggtcacaggcttaccccactgagagcagatatctgttaagacagggtaggtggccctgctggtggtgaggggcaccaattcggggagaagaggccaagagatcaagaagagaggaaactcagcatgcggacagaaaagagaggaaggggccggcgcccaggccgggaggctgggggttgccctgtccagcgggctgctgaactgtggcctgaggaagggctgtgtgtgggcagacgggagttgaggtgggggagggaacacaacgtgtggggcactaggcccagttgccatggagacaccccccatagacaacctttttccacagcccctcctcggagcagccccagtctgaggccagctgatggggggcagtggagacgggcaagcaatcaggaggccaaggtcaccctgtactgggacctaggttctggtttttgttttgtttttttttaatcccctcttcgtctaaggtttccaggctcttaactatagtgggtttgggggaagaagtt

SEQ ID NO: 2985 - DNA, 1154 bp, Homo sapiens
gactaaggagattccacgcaggtccgcaaagtcaggcttgcgcttgctcctgacaccacttcctttacctccacggctccatctttgttctgcgcgagtgcgcacgcgcaggctccgaaagcgggccgtcgcacagagggaccacaactcccagagtgctccgcgtccttgctttcgcctctacttgtgctccagggcgcacgcgcagccctgggagcgggttctcgcgcatagggaccacaactcccagggtgctccgcgtcctcgccgctgtcgccgccgcggagacaaagatggctgcgagtaagtgcaggttccggtggcgcacggggctcgggtagttctgggaacctctgggcggtcctgggactgaggtgcggcagggcaggggtggaagcgatggggtccgtgctggaggggaacgcagaagtcacgagggggctcctccagggcaggggtggcacgagagggttagaggtcaccgggggcagctacttgcaggggtgacgcttcttgccaccccttcaggagtcggcgccttcctcaagaatgcctgggacaaggagccagtgctggtcgtgtccttcgtcgtcgggggcctcggtgcgtgagtgctccaggcgcaaacttgcatcgtccacccccgtccccctacatccctccatcttgtacccctaaagccctatcgccgccctcgggtcccctctagtgtgtctgcacccccacggcatccccttatctatccccatacccattataacctctccaccatcgccccccgcgttcctctccacctacccaatacgctcttaacccctctaaatgagacgttctcaaccctgcttatgccttaacacctgagcaccaaaaaaaagtccagatcctcctcctccttttcatctttcctctcccccattctgaattgagttggcttgggtggaggtgggactggggaatctgtgtcttgtgaaaatccccgtatgatcccaatgtgccttgctgattgaaaatctctgccctctgccctggaactgccctactcacactttaattagcaccggagttcctgcagggatgggggcgggggattgttaaaatgtagcttttttttttgcgatggagtctcactctcacccaggctgaagtgcagtggc

SEQ ID NO: 2986 - DNA, 1135 bp, Homo sapiens
aaggttctccctacttctcaggtttccactccctggccggaaaaaacctagtcctcccaggttagcacgccgctctagcccagcctcacgtctccactgcttctcagccagccaacgcctcttctgattggctctgacgtgcgtggtgcgtgaaaacgtcacgagacgccggcgttactataagagcgcagccgtggcgcttgcgcgcctctttctcagtgaccgggtggtttgcttaggtgaggtgcggcggtgtgctttttctctagggtttgggttggatggtggcccgggccttccgagtttccatgagtaagctaaagacgttaggaaacagagcagggtggttgaacgggagtgcagcacggttgtgggggcagatactgactatgagagcgttggaggttattctcgcgagatcggatctgggctccgcgaggttttggcgtagttgtgggactgcgcaggcgccgtttggagcccttacgctcacacttctctcccgcgcaggcgcagacggggaagcggagccaacatgccagtggcccggagctgggtttgtcgcaaaacttatgtgaccccgcggagacccttcgagaaatctcgtctcgaccaagagctgaagctgatcggtgagtggccaaggcttccgggaagtggttcggcttccgggaggcggttagcacgtggatgaaggtgcccatgtactctatctagtccgtcccctaaatttggtactattcgtggtttaggaaggttttgtgattccaaagctgccagtctagttgttgtgccagtacgtgggactacacttgtccacccccttctccccaccaggcgagtatgggctccggaacaaacgtgaggtctggagggtcaaatttaccctggccaagatccgcaaggccgcccgggaactgctgacgcttgatgagaaggacccacggcgtctgttcgaaggtgcgtatgggagtccacagcagagggatggggtgcagggcttgtgaggttcattctcccttctgttgcctctgttccagtgatgagagttgtgtcattggataaatggaaccagccttctaacttttagtggcacttgtgaagtaggaaaagtgtatctggatcagtctttgcc

SEQ ID NO: 2987 - DNA, 1100 bp, Homo sapiens
gtgggcattgctgctgcacgtggtaatacagctcagtgtcaggtgtggggttcacgatatttcagactcggaacttgggggctctcacatggccatctcatttgctttgtggtcttaggtgggatactttcagatttctcctataaaatggggttgagaaagtcatctgaagcatttttggggattaaggtgataccctaaaaccccggagggcgcacgtaggatcaggtgcacccttcctgcagcgccttggtgtctgcagccgtggcggcctcacggggtgggtggagaggaaagagtggtgcggtagctggggttagcgtccgtttctcctccagtccacctcaccttgtcgcttcttccagggtccgcaagcaggtggtgaacatcccgtccttcattgtccgcctggattcccagaagcacatcgacttctctctgcgctctccctacgggggtggccgcccgggccgcgtgaagaggaagaatgccaagaagggccagggtggggctggggctggagacgacgaggaggaggattaagtccacctgtccctcctgggctgctggattgtctcgttttcctgccaaataaacaggatcagcgctttacaattggtgtgtgggggtctctcatccttgactctttcccctgctctaaacatgcagccttccctgggaggctcactcacttgggagtgcctaccagctagtggtccctggcctctcagtactattctacagtagtgaacacacatctttaccagaaacttctgtcatcaggggagagacgagtggtatttttggaaaaactgtgtcaaaaccagaaggaaattccaagtaagccggtgtttgcatataggggtgggagggagccggtcattgctaggcagggcaggcgccgagtggaggtgggggccttccctgcctgctggccctgggaccctgaccccgccaggcaagagacaggtgggacgggagctgaccagaggctgacgggttgctggggaaggtgaactgttggtgattgttggggaacacttcacagaatttgcttgctagtttcaaagcttgtgatgcggttgatgttgggcaagttc

SEQ ID NO: 2988 - DNA, 1138 bp, Homo sapiens
ttgcctggcaatgtgggcgagtttactgcctaccgaatcctctactacatcttcaccaagaactcgggaggtgaggcccagtccccaggacagaggccatggtacccagggttgagccctgctgacttcaccctctttgtcttggtgctagacatcaccacggagctggcatacctcacacgagaactgaaggcagatccttgcgtggcccacgccttggcattaaggacagcctgggccctgggcaactaccaccgctttttccggctctactgccatgcaccctgcatgtctggctacctcgtggacaagtttgcagatcgggagcgcaaggtcgccctcaaggccatgatcaaaacgtatgtggtgccaagctcccttctgcctttgctcttcccatccttccgcctcgcaccgcccctcagaccagctcctggccgcaggcctcccccagcccccaacccttgtcctggtccttgcttccccatcatctttctccattcagccctcccctctccagttcctcttgctctccttgttggtcacctctgtgttccgggtcactcctctccctctccccactgttcccagctcactgcctctggggcctcttctccaccccatctgtgtgtctcttcctcctgttctctcctgcctggaccccctagttcactccttgccctgggcttcctcagaaccctgaggtctctgctttctcagcttgtcgctgtgctcccaccatagagaccatctagacagcctctggtctaccaggacaaggcccagtcccactcagctcctttgagagcaccagaaacgcttagggagacacctgtgttgaggccacactgggcgcggtgccagaggcccctggtcaggccatgcccctgcagtgtccttcgttcactagacattgcgcctggcttgctgtgggtggggatgagttgcttgactcatgtttagacgcatggttctgtctggtgattgaggtgcccaggcgacgctgggcaatgtcaagagaggttttggcttgtcacagcaaggggatgctcttggcatctagtgagtggaggccagggatgctgccctgccactgccattgggcctcagagctcagtcttgccaaggtggagaaatt

SEQ ID NO: 2989 - DNA, 1324 bp, Homo sapiens
atgggattggggaggaggggatgggcagcggagggttgggggcatggtctgcaggctcatctgtgtccgcctttcactccactaatgctgtctcagtgttttctctctctctctttcgagcttgcactccggtacccgacccggcgccctggcccatcccatgccggggggccagtggaaagaagacaggccgtccagcccgtgcccgcctgcggcgggggcacccagcaagcccgcccaccgcccgctgcctcacctgcttcgccacagactcttgttcccagccccttggggcctccgtgtttggggtgggggagctgcttagagactgtgcccgtcctcggccccccaccctgaagtgccagcaccaccagcaccagatcctccgccgccacaccgcactgaggacacgccggccgggccgcctcgtctcaagttgtataaagttgtctccgtgtcccctcctccctctgcccccagtgtttcttctgatttttttttcccctttccctccctccctctccgcattcttcccttggttcagcacaggtaaaacggttcccctccctccctgccttcatggatcaccagctcacgtcatgttgccttctcttttctttgtgtgtgtgtttatttaagttatttttcttcctcctctcccttttctttttggccctccctccctccctcttctgccatgtaactggaggatgtgctatgagtttgcaaacagctggactgtcaggctgctttttttccagatgttcctcctctgcctccccttcccctcctctcccctccttttccttccttccttcctttccttggagcactgagcaccatttggaagcttgagagaaaccaaaattaaagagagaaagagagagcgtgcacgctcctgctttgtctttcctgtgtgggctgtttgcatccattgtctcctccagaggtctgggggtgtcactccaggcggatctcagccaggggctggaaaggcccccctgtcctccctatacggcacagccagagtgtctgcaggggctggcaccccacttcctggctgagggtgaactccagcttggggaggtggacctgggaaccatggggcaccttggccacggtgaggtgggggtgcagctgccctggagactgtagtgtactcagcccctcggcttccagcctctggctcagcacttgtgccatgctttccagtgtgggagagggtggggcacacagcacatgcgggcccaggaggaccagctttctaaagctcagccgagggggtgcatttagccccggggccaagagggcccgtctcagagct

SEQ ID NO: 2990 - DNA, 1177 bp, Homo sapiens
ggctgtgacctgtgagacgggccataatcctcccagcctcttccacttccagcgggggcggcccaccctcaccttggagctgtgcctctccggtctttgcctctgtccacacatggccttctccccatgtgtctctgtctctgttttcccttcctataaggacaccagtcattggattagggctcaccctaatgaccgcatcctgacatggccacttcggcacagaccctgtttccggcacaggccacattcacaggttgtgggagcacaggagtgtttctgctggtgcatcaggctggggtctgtcctcaccgggatgtctcctcctccacccctctcttccagaggaggagcgagtggacattctaatcaacaacgcgggtgtgatgcggtgcccccactggaccaccgaggacggcttcgagatgcagtttggcgttaaccacctgggtgaggcctgggcaggggctgcaccatgggttcaagcgatcctcccccgtcgtcctcccaaagtgctgggattttaggtgtgagtcaaaagtgaccttttcatcatccttaatccaggtcactttctcttgacaaacttgctgctggacaagctgaaagcctcagccccttcgcggatcatcaacctctcgtccctggcccatgttgctgggcacatagactttgacgacttgaactggcagacgaggaagtataacaccaaagccgcctactgccagagcaagctcgccatcgtcctcttcaccaaggagctgagccggcggctgcaaggtacgggggcgctaggctcggcctccctcttgctttactctgagcctagagcggcctttccatgatcctaggctgatgggaggccaaacggtggatccagaacagagtcagcaaaagtagagcatgtggaccacgctgcccgcttctggtgcctgaagcagacatcactaatcgatcgttcttctgaggattgtctgttcatcccaggtggtctagtctgcctggatcagatgtccttccctgctgctgttgggcaggcagctcagccttttggctccagccagtgagtctcaaccaggggcagttttgacccgcagttgtcaatgcctggaaacacagtgatcacagctggcttggggagagattgctctgggcatctggagggtaaaggcccaga

SEQ ID NO: 2991 - DNA, 1199 bp, Homo sapiens
cctgccttctccccttgcgcctcaagggtcattggcggaccccaacccctccccgtgaagtcgttgtgaattttcaagttattttcccctcactctcattcgccgcagctagtctcggctgcctgaattcggtcccgccgccttaggtcactcagtcccgcctgacaagagttctaggtcgctgtctgccctcaggggtctcccattcacccaagttcccagtcgctctcttcctctgctgtccgagcgtggcccgtggcctaacgctgctttagttctctgtgtctgacgctttccctgtgcccgtttccccgcagccgccgccatgtctgcgcatctgcaatggatggtcgtgcggaactgctccagtttcctgatcaagaggaataagcagacctacagcactgtaagtggggcccggatgcgtggctcctgcgggaggagggtcctgagtctcttgactctgggtcagagggcgggaccttcgcatgtctccgggtcccttattcacgatgccttgtgccgcctccttcccaggagcccaataacttgaaggcccgcaattccttccgctacaacggactgattcaccgcaagactgtgggcgtggagccggcagccgacggcaaaggtgtcgtggtggtcattaagcggagatccggtgagttttgtctggtttgggccagagagcggcccctttcccgggtctgggagctgtgattttttactgtcaggcaggaagagcggtaactgccatcgcggcgggcatccctggcgccagggtgttggtctgggtaccggcttccctctcggccgacttgtcagctctgtgagccgcgcgcgtctgagcccgtgtcctcacctgtaaagtggagaaatgaaaaaggacctgaacttcctcggtggttgttgagagttaaggcacggggttgatgttttcagatgaaattctcaaagcaagtcagggtggggatggatggtttcatcccacaggtgggaagattgaggcacaacaggggaggggccctcgctaccacacttaggaggggacaggctgggttggttgcagccatttgattcccattttgcctgtgtaggttagagaagaggtcttggggaccccactccatacattgtgctgtcaggtgcaggcctttttggggattccctgaatgttcgtgtgagtcgggggtctctaa

SEQ ID NO: 2992 - DNA, 1151 bp, Homo sapiens
ggtgggaaaacagctacctgctggcctgcccaggcacccgccacgggcccacgctgctcagcttctcaatgtgagactgtccacacctgcgaggtgtgctaaaggtgcaggttaggtggactgaccccaggacctccctgacccccaaccaggccagcggaagcctgccacctcctatgtgcggaccaccatcaacaagaatgctcgcgccacgctcagcagcatcagacacatgatccgcaagaacaagtaccgccccgacctgcgcatggtgagctggggtttggggatcaggcttggggagactggccagtgctgtggggaagggcctcccactactggttgcaatatgggctggagagggatggattcttgctttcagcctactccccacacccagcattggcctagggggcggcttgtggagtgtatgggctgagccttgctctgctcccccgcccccaggcagccatccgcagggccagcgccatcctgcgcagccagaagcctgtgatggtgaagaggaagcggacccgccccaccaagagctcctgagccccctgcccccagagcaataaagtcagctggctttctcacctgcctcgactgggcctccctttttgaaacgctctggggagctctggccctgtgtgttgtcattcaggccatgtcatcaaaactctgcatgtcaccttgtccatctggaggtgatgtcaatggctggccatgcaggaggggtggggtagctgccttgtccctggtgagggcaagggtcactgtcttcacagaaaaagtttgctgacttgtgattgagacctactgtcccattgtgaggtggcctgaagaatcccagctggggcagtggcttccattcagaagaagaaaggccttttctagcccagaagggtgcaggctgagggctgggccctgggccctggtgctgtagcacggtttggggacttggggtgttcccaagacctgggggacgacagacatcacgggaggaagatgagatgacttttgcatccagggagtgggtgcagccacatttggaggggatgggctttacttgatgcaacctcatctctgagatgggcaacttggtgggtggtggcttataactgtaagggagatggcagccccagggtaca

SEQ ID NO: 2993 - DNA, 1183 bp, Homo sapiens
ccagctcctcagaggttgagtagaggctgaggtgagcggagcacttgagccaagagtatgaggctgcagtgagcccatgagccccaccactacactccagcctggaagacaccatgacacacagtgaggcctggatggggaaagagtcctgctgttgatcctcacatgtttcctgggcacctaactctgtcagccactgccagggaccaaggatccagcatccatggcacccctggttcctgccatcctggggtacccgattcaaagaaggactctgctccctgtctgagaccacccccggctctgactgagagtaaggggactgtcagggcctcgacttgccattggttggggtcgtacggggctgggagccctgcgttttgaggcagaccactgcccttccgacctcagtcctgtctgctccagtcttgcccagctcgaaggagagcagatctgaccacttgccagcccctgtctgctgtgaattaccatttcctttgtccttcccttagttgggtctattagctcagattgagaggtgttgccttaaaactgagttgggtgacttggtacctgctcaggaccccccgcactgtcccaatcccactcaggcccacctccagctggcctcactccgctggtgacttcgtacctgctcaggagcccccactgtcccagtcccactcaggcccatctctggctggcctcactgcgctgggactccgccttcataaggagagctcactgctcacgttagtagatggccccttctcgtgaggcctctcccctggcacctgcttcagttgtcctccacagcactgatttgcagcccacaagctggcaggtttatctgtctcatgtttgtcttgtgctggtgggcaaggggtttgtctagcacaccagcatataatgagatgcttgatgaatggtgcatattgaatgtataaagcccaccggtcctgagagtttgctcactggagactttctggagatggagtctcgctctgttgcccaggctggcgagtgcaatggcgcgatcttggctcactgcagcctccacctcctgggttcaagcgattctcctgcctcagcctcccgagtagctgggattacaggtgggtgtcaccacacccagctcagtattgtatttttagcagagatggggtttcaccattttgcccag

SEQ ID NO: 2994 - DNA, 1241 bp, Homo sapiens
gtgtggttgtgtggtgtgtgtgtatggtgtgtgtgtggtgtatatgtggtgtgtatgtggtgtgtgtgtggttgtgtggtgtgtgtgtggttgtgtgtgtatggtgtgtgtggtgtgtgtgtatggtgtgtgtgtggtgtgtgtgtggtgtgggtgtgtggtatggcgtgtgtgtgtggtgtgtgtggttgtgtgtatggtgtgtgtggtgtgtgtgtatggtgtgtggtgtgtgtgtatggtgcgtgtgtgtggtgtgggtgtgtggttgtgtggtgtgtgtggtgtatatgtggtgtgtgtggtgtgtgtggtgtgtggtgtgtgtatggtgtgtgtggtgtgtgtgtgcgtgtgtgcatggtgtgtatgtgtgtgtggtgtgtggtgtgtgtgtgcgtgtgtgtatatgtggtgtgtgtggtgtgtgtgtatatgtggtgtgtgtggtgtgtgtgtatatgtggtgtgtgtgtatatgtggtgtgtgtatggtgtgtggtgtgtgggtgtgtgtggtgtgtgtggatggtgtgtatggtgtgtgtgtggtgtatatgtggtgtgtgtgtgggtgtgtggctgtgtggtgtgtgtgtggtgtgtgtgtagtgtgtatggtgtgtgtggtgtgtgtggtgtgtgtgtatggtgtgtgtgtggtgtgtgtggtgtgtgtggtgtatgtgtatggtgtgtgtgtgtggtgtgtgtgtatggtgtgtgtggttgtgtggtgtgtatgtgtgtgtggtgtgtgtatggtgtgtgtgtatgtgtgtgtgcgtgtgtgcgtgtgtgtggtgtgtatgtgtgtgcgtgtgtgcgtgtgtgtatatgtggtgtgtgtgtatatgtggtgtgtgtgtgggtgtgtgtggtgtgtgtgtatggtgtgtatggtgtgtgtgtggtgtgtgtgtggtgtatatgtggtgtgtgtgtgtgggtgtgtgttgtgtgtgtgtgtgtgtgattgaaatattaaaggatgagatttagtttaaaagaatccatcaaggtcagatgaggtggctcactcctgtaatcccagcactttgggtgattgaacaggagggtcccttgagcccaggagttcaagaccgacctgggcaatatagtgagactccatctctacaaaaaaaaaaaaaaaaaaaaaaaaattagctaagcatggtggctcatgcttatagtcccagttactcgggaggctgacgtcggaggattgcttgagtccagaa

SEQ ID NO: 2995 - DNA, 1222 bp, Homo sapiens
gggtttcaccatgttggccaggctggtctcgaactcctgacctcaaatgatccgcccgcctcggcctcccaaagtgccgggattacaggcgtgagccaccgcgcccggccgtacatttcatggccttttatatgtttttcatcacttccttaacctcactttatctcttgtaagttagttgctcatccttgcctaatctttctttatctcttttgaccaaattgctcatctttagctttatttttcgtggccaaactgctactgcaagtccttctggcttattttccttatcctgcatgttccaactcactgcttcctcccttatttcgcatgtcctgcttctgccatttgacacgttttgcttctgcttaagctaacctatgtccaacggtccccttcgccccccgaatttctctgctattctcctgcctcaagatgtccgtgagtctggttcacgcctgtggtattgggggtggcctgaaggtgaaggtttcctgtcctgttctgctccaggtctcaggtacagagggaagggtccagggtcccttggcaagaggccgaagggagaagacccctgggtctctggaggatgggaagggaaggattggctctgagggccgggaaggggcccgccgccacgtggctggggtatgacctttgctaccttgatacacactttatcgtgtgtattcacatctggtagctcttatttcaaaatttgcattccacagtccaggggccaagagcaacatccgccggccagctctgtcccactcaggccggccagcaatgcacagggcggccgcctgcaggctgcggcctcgggactgtccaccagggggcgcccacccggccggtgctgggcggcccggctcaaggggtgcggcccgagaacttggggccctctcctgtctcctgtcattgagaacaatcaaccacagcagggagctggcttcatggggtctttgttgaggacctgcacttccaggtgctggaaggtcttccccagcctcctctcccctatcccagcccttgaaattctgtgtgtgttgggggtggatttagtcattcaacaaacatttattgagcaccttgctttactgagcagtggaggaggtgaagtcagagaagccgagggggcgcggggagcagacctgccgggctttgtgagccaggcaagggttgggctatgagggtaagcatgatggagaaccatagaggg

SEQ ID NO: 2996 - DNA, 1354 bp, Homo sapiens
tcggatggctgagccacccctcctgcccacaggccggcgtgaaggacacggaaaaccgcgtggccctccatgccttgacacggccgccggccctgctcctcctggcggcggccagcagcggcctgcgctttgtcctggcttccttcgccctggccctcctcctgccggtgttcctggctgtggccgccgtgaagctgggcctgcgggcccgatggggctcgctgcctccgccgggtggcctggggggcccctgggtggccgtgcggggctccggtgacgtgtgtggggtcctggctctggcccctggcacaaatgcaggggacggggcccgggtcacccgcctgtctgtctctcgctggcaccgccgccggggcgtgggcaggaggctgctggccttcgcggaggcccgggctcgggcctgggctgggggcatgggggagccccgggcccggctcgtggtccccgtggctgtggccgcctggggggtgggagggatgctggagggctgtggctaccaggccgaggggggctggggctgcctgggctacacgctggtgagggaattcagcaaagacctgtgaagctacagactgacagccagggcaggggaggagggaggggcgccagcacctgatgatcgcctactgtctgcgggttcttttacctgctctccctcagtgagtcctcaaccaccctgggcccagaaacagaggcctgccgaggggaggagcctggcctctgtccacccgtcagcagtgtgaagtctgttgtgtttgagcttctcagagtggaatgactccttttccttcctggccctcgggggcctctcgaggtcagcctctccaacccctacctcagctcctgtctgcactgagaaacctccccgggtgatgtctgcaaagtctgtgctgtccgtgccccaggctgggagagctatctggggagggggagaggaggccgagcagaatacaccccagagttagggtttgcgactccgcctccctgggacctggattgggtcagatgcctgtccttggaggggacaaggttgactgcttaggaggcgcgacgcacagggctgccaggcctggcccctctctgggaaggttgagagctgagacgggcagccctgtcccttcctccagatccgtctggttttttacaccgtttgttaataaagcctgaaaccgctgtgtgcctgtctcttctctgatggctttcccagtctgtctccggacacccccgcccatttctgtctggcttctcctttccccagttaacattaattgttgggggacggtgctggactgggagaaggggaggctgtgagctcaggggcagcccgaggccctgc

SEQ ID NO: 2997 - DNA, 1360 bp, Homo sapiens
ccctcccgagtccaggggtccggccctcagtcgcctcctccctggggattcccggcagctgggtccccagcccccgcctcccccttgtcctgggagcccagccccctccccagcccctcctccaccgggacccaggaatccacacctcctccataccagagtccagattccccaatccgtcatgacctggacccaggagtctcaatccccagctcccatccccatcagtcccaagagtctgggcccctagccccctcccaactcagaccagaagtctgaaccctcctactccccgacctctcccagcccctggcatctgagaacacactctatttccggggcctaccggcttcaaatcccaccccctccactcaggccccatgggctgtgtcccagcccctcccaaaacgttcagcctggccgggggacctggagcagaagcggttcgctgactttgtccccctccgtgcctctgcccagttcactccctctgtgtctctgtctccctgtctctccggcccccaacccgccactgctcttctgatctctgctcttgcactatctctgcctctggttctccaagtctctttgtttcctcttctctgtgtctctgtctctctgctgggtgttcctcactctcctctgtctcttctctgctctgcctttcaccatcctgtctttctgcgactcctggtctctgtctgtccatccccacttctctgtgtctcccatctctgccttctcctgtctctattccctgctctgtcgctctgtctctgatctctctcctcctgtctctccatctctggcctcccctcggtgtctctcatctttgtctctgtctcatatctctctcctggctaaatacctgaccctctctgcctctccatctctgactgtctctgcttctctttctgccacaccccacgcacctctttttatctctgccccgcttcccatctctcccctctctccccacaggcatggatccgcagcctcctccacccgcccagggcagcccacctcaccgtggccgaggccggggccgtggccgaggccgtggtcggggccgtggccgtggcagggggggcgctggagcccctagggcgcccctgccctgccccacctgcggccgcctcttccgtttcccctactacctctcccggcaccggctgagccactcggggctccggccccacgcctgcccgctgtgccccaaggccttccgccggccggcccacctttcccgccacctgcgcggccacgggccccagcccccgctgcgctgcgccgcctgcccccgcaccttcccagaaccggcccagctcaggcgccacctggctcaggagcacgcgggcgg

SEQ ID NO: 2998 - DNA, 1081 bp, Homo sapiens
cacagacgcacgctgcccctcagtttttttctgacacgcctctcgttctctgccgcctgtcccctatcctctcccccacgtccctcccatggtcgctgttcttttatttttgatcgcccctgacctcccccttccccaccactccttttccctctcccctctccccaaccccttcctgtggcaccccctgagaatcccgagatcaaagagttgtttccatttctctttaaagtgaaatattgtggggctgagatccctcgtagcaacaaaaagtttgctaccatcgtcgaaggcaagtaaggtccattctgactttctcaacctgcactttgctacatttgataaaccagcccccggactccagggccagattcctccacatcactcttttctcctcccctcccgtccctgcccctcctccctacactcctcctctcctgcccctgcactcttgacttcctcctcctcgctcgtctctgtcctgctctccctttctgtcctttgctcgtctctgcccctgcctgccacttcctttctactttcctgccacttttctgtctgtctccactgggtggcccttcctgtgtgctctgtctcttcatctcttgtgtttcgtgtttttcttcattttgtgttgtcatcatgccctctgccttttcttgaacaatcttctcctttcccctgattttttggggcccctgtggctgtcccccaacgcctgtccatcgcctgcccttggccgtctcttgctactgcttcctccccattttctctcttgcttctgttcttactattgacttctacacccccacccatattccactgttccttccccccctcctccctcccctcatccctctccccttacccccaaacccctctgtgtctccctctctcacccttcccctcctctctccacctcccttcccccgcccccccccttgtctcctattccctctgcaggaggccatgatggatttcttcaacgcccagatgcgcctgggggggctgacccaggcccctggcaacccagtgttggctgtgcagattaaccaggacaagaattttgcctttttggagg

SEQ ID NO: 2999 - DNA, 1241 bp, Homo sapiens
ggtggacgctgactggctgttgggcgtgagccttgttcacaaacctgcctctcctttccccacagatctttgtggagttcacctctgtgtttgactgccagaaagccatgcagggcctgacgggccgcaagttcgccaacagagtggttgtcacaaaatactgtgaccccgactcttatcaccgccgggacttctggtagaggcggctgggggagggtgggggcagggctggctgggggcttctccccactcccgccccccccttatccccctctgaagacgatgggcagaggagtgacagccgcagacacacgacagccggcagcaactggaatggcagcaattaagggtggggggcgggggttggggggttggggggttagggcagggaggggactggggaagtgcgcacacagcccacacagacaacacgcacccacacagacacagagggaaggggttgggatggggacagggtgcacagcagggcggggtaggaccccagcccctcccaaaacagcctctccttctcccatagacccctttcttctccccttccccacggtaggaacatagcgtgtttatattttatggccaaactattttgaattttgttgtccggccctcagtgccctgccctctcccttaccaggaccacagctctgttccttcggcctctggtcctctctggtcccctcctgggtttcttacgtagttgatttttcctctttagtctcccccgacctgcgcccagccccgtggcccctgcccctctcctactctctgtggcagtttcatatttgctaagacgaatttgctcattaaacattttgttgtattttactttatggagcggctgtgtgtccagtatgtccgaccctcttcctcggttctgggctcgggtgggggttcccttggcaaactgcgggcccctggctgggacgcccctgctgccggcgccggcagcctcgaggccttccctgcttgcgcggtgcccttctcggggtcggcacaggcacagccccgggggacgtgaggttcccgagtgctctcccaccccgccgacaggagggatggtggccgagcgggccggggcgggcgtggcgtgggtgtgccaggagctccgcggttgccgccaagcgagctggagctgactctcggcgttccgtgagcaccgcgcggatcccccgctgcagcgggcggaagtgacgtagaggcgcctagcaacggggcccagcgcg

SEQ ID NO: 3000 - DNA, 1106 bp, Homo sapiens
ccttttatggagacttggttgagaggcataactgaagcatggacagccatgtagaaatgtgattagataaaacgggtgtgatcgaatccgagtagaccgagcggggaaacctcgcaaggcctgtgtgttcagacccttcttggcctcctttggctttctttcctccagggtaggggcaggaccccttctgaaggggggtgttatggcccacaatcagacaaattaggtcagaaaaattttttatggccagaggtgggggaagatttaaggatatttttagtttttaaggcctgccttgtggagaaagaagagcaggtgaaagtagggcagaaggtcagggagagactctttttctgaggcctaaagcttcccatcgttagaacaagaccgtaacaagggctgtgggagtcatgagccaggagccgtggacagagcccaatgtatacgtatcataaaatcacagggagggttaggaccccggggctgctccatgctccccccttctgtgtgcctggccccacaaggcgcgcctgtccccgcatgggtgtgccctggatgtctcttcctgtggacaatgcctggccagcgtcccctgtctctggggcctcaaaccaggaagttccccgaggaatgggtggatctcaggcttttctgtgcccaagatctctgggagaaccgtctgctggcacggcttcccaggctccactctcaggtgtgtcaaccccggtgcccttgagctgaggccaggacagcacccctgcccagcctctgcctgtggctgacaccacacaagggtcatgggagccccgccaagggccaaggagctggagggtggtccagggtggtgctctgggcccgagtgagactgtgctcttctgactctctccgatgggccccagagcccatcacggtcccacagccaggttgcgaggcacctaggatctagtcagcgttgtgccaagcccccatcctcatgcctcagctgcctgagtcactgggattacagtcatgagccaccaggcccacgctcttgtattttgacccccttatttaggaaacgttttcttgtctgtcagagtgagggcaggtggtttgcccctgccgct

SEQ ID NO: 3001 - DNA, 1099 bp, Homo sapiens
agggtttcaccatggtgcccaggctggtcttgaactcctgggctcaagcaacctgcttgcctgggtctcccaaagtgctgggattacaggcgtgagccacagtgcacagcatgttcagtttttcatcatgaagtataatgtaagttttataaaacatatgtcctctataagggtaaaaaatttcctctgttcccagttttctgagactctgtgttgctatgaataagtgtggaattttgttcagtactttttctccaccagttgatgtcattatgctattttccttctacatcctattgatggaatgtattgctttgatcaagttttgaatattgagccagccttgcatccttagaataaaccatacttgtttgtagagtataattgtttttatatatcatttgacatcattccctttgtttgtattttgttgaggaaatattcctctaatttattggctaataatgtgtagttcttttttcttttgtttcttatgttctaaatgtcttatgtgtggttttgatgtctaggtgatcttgacctttcaacatgaattggaaggagttctcttctaatttttggaagactgtgtagaattggtgttatttgttcttgtcatgtttgatgacctctagtcaaccattgggccagagatttttcttctggaggcttttaaattacatatttattttattggataggtagaactattcgaagtatctatttcttgtgtaataaattttgatagtctgtcctgttgaaggaatatttcatctgtatttgtagcactcccttattcttttgatagcaggatctgcacttctttttatttttaatatttaaaatgtgcatactcattttatgattgagtcttcttagacatttatcagttttattgcgcatcatgctgaaagatgtaatttttgcttcatctctcacttcagagaactagcactttatattaatgatttgtctctattcttgatttctttgatttctgctctgatcggtattatattccacttgctttggttgtatttggctctttctaacttttcaaggtggggttttagattattgatttgagatttttttgctt

SEQ ID NO: 3002 - DNA, 1152 bp, Homo sapiens
gagttcacaccggagaaagaccttataagtgcaatgattgtgggaaattttttaggtatatctccacactcattagacatcagagaattcacactggagaaaggccttatgagtgcagtgtatgtggggaattgtttaggtacaactccagccttgttaaacattggagaaatcacactggagaaaggccttataaatgcagtgaatgtgggaaatcatttaggtaccactgcaggctcattagacaccagagagtccacacgggagaaaggccttatgagtgcagcgaatgcgggaaattctttcgttacaactccaacctcattaaacattggagaaatcacactggagaaaggccttacgagtgcagagagtgtgggaaagcctttagccacaagcatatacttgttgagcaccagaaaatccacagtggagaaagaccttatgagtgcagcgaatgccagaaggcctttattagaaagtctcacctggttcatcaccagaaaatccacagtgaagagaggcttgtgtgctccatgaatgtggggaattctttagctaaaactccaacctcattaaacatcagagatttcacaatggagaaagtttaccattgactattgtaattgggtagtaatgttatataaattccacatttttatgcaactaatctccagaacatttttcctcttaccaagaagtaaaatgctgtacccattaacaacaactcattccccttccctacttccccagaaatgtctcaactatatttctatactctatggtacttatatgaggtaccaatagatatctatgaatttgatatatatttgtacctcatataagtggattctacagtatttatcttttgagactggcttatttcacttaggataaggtcttcacggttcacccatgttgtataatgtgtcagaatatccttcctttttaggtgaaataatattctatggtatttatataccacatttatttatccattcatctgttagtggatacttgggctacttccaccttttgcctattgaaataatgctgctatgaagatgagtgtacaagtgtctattcaagattctactttcaattcttatagggtatatactcagaaatggtggtgctggatcatataggatt

SEQ ID NO: 3003 - DNA, 1603 bp, Homo sapiens
acaggtctagctatatttatatcaggtaaaataattatttttaaataatgcagtttttcaagttaaaaactaaaaaagagaaagtaattatataatgaaaaaagtcaatttagaaagatgtaacaattgtaaatatatatgaccccaacattagggcacgcacaaacacataaagcaaatattagtagatcaaaaggatagacttcaatacagtaataccagagaacttcaacacctcatcttcagcaatgggcagatcattcagagaatacattaacaaagaaaaaaacccaaaagaaactaaagcaaaaaacctaaaactaaaacaaagaagaaaactaaaacaaagaaattaaactcaaaattggtagaaggaaataaagatcagagcagaaataaatgaaatagagattttaaagtacaaaagatcaacaaaacgagttttttttattttaatttttagttctggggtacatgtgcagaatgtggaggtttgttaaataggtaaacatgtgccatggtgatttgctgcacctatcaacccatcacctaggtattaagcccagcatatattagccatttttcctaatgctctccctcccccagccccatccctcgacaggccccagtgtgtattgttcccctccctgtgtccatgtgttctcattgttcagctcccacttataagtgagaacatgtggtgtttggttttctgttcctgcattagtttgctaaggataatggcttctagcttcatccatgtccctgcaaaggacatgatctcattcttttttttttttttttttttgaggtggagttgcactcttgttgcccaggctggagtgcaatggtgtaatctcggctcaccacaacctctgcctcccgggttcaagtgattctcctgcctcagcctcctgagtagctgggattacaggcatgcgccaccacgcccggataattttttgtatttttagtagagacggagtttctccgtgttggtcaagctgatctcgaactcctggccacaggtgacctgcccacctcggcctcccaaagtgctgggattacaggcgtgtgccactgcgcccagtctagctcagtactttgtatgaacacatagtttgcattaaggttgaactgcatatatggttttacttaagggtatatgcttaagtgaaaaaggcatgggtcagaagagtgtacaaaggatgctgaattatttgaagccagcagaggcatatgtatatagggacagacaggtggggaaacagaaatgaaagttaggattctatggaattattctgtgatatatctttgggtttttacaaacataaatactttatataattcctaaataatgttcaattaaaatgaaattataaaatccataaaactcaggggttctacactcacaaaggaatagaaataaaacaagggaaatatttaaaagatataagatctatcaaagttaataacattattgtgatattatactataatttgcaaatgtaaccatgaggaaaaactgggcgatatgggccaggctctttctgttttatttcctacaactgcttgtgaatctataattatttcaataaaattt

SEQ ID NO: 3004 - DNA, 1155 bp, Homo sapiens
ggatggccctctatatctctgaagttttttctctcctgtactctgctctgtagactccagctaccttggcaaaccgagactcttagctatgtctccttaacacaggatgacttttgggctctgagctctccatctttgtactagggcctcagaattaattttcacagtaaccttatttagttttttcttttttgagaaaatctatgaacccatgttttttctttctgatatagtggaaggtctatcaattttaataatttattcaaggtgtctcctttttttaatcagaaagaacgtaaatcacatattacagataggagcaatgaaacatagtatagtactagataactttgaaacatataatggataatgtgtgattgttttaaacaaccctttctcagtaagttgaaacttggaaaacaaaaatccattgaaagataccaactgaccaggctcactcgagatctgaaaaatcctctactaaagatatttaatacatatatctatatatctcttagagagaaagaataagtcatattctagtgagatttgttaggattttttttttttttgagacggagtctccctctattgccaggctggagtgcagtggcgcgatctcagctcactgtaacgtccgcctcctgggttcaagcaattctcctgcctcatcatcctgagtagccgggattacaggtgcacgccaccatgcccagctaatttttgtattttttgtagacacagggtttcatcatgttggccaggatggccttaatctcttgacctcatgatttgcctgcctcggcctcccaaagtgctgggattacaggcgtgagccaccgcacccagccttgagatttgttaggatcttaaagttggtttaacagtagaaaatctattaattattatattaaatacagtctgtggtgtaataaaaaatatatctggatctttgtcccaggcttagtactacaaaaatcttgtaattctttgagtgagagaagtgtattttttatactaacgaagtgattcattataggctcctagaaaggttcagaatgggggctcttcatcagaaagaccaaccatgtaataagagggttgaaactttgagccagattgacctttggggagaggaaaggaactagagattga

SEQ ID NO: 3005 - DNA, 1107 bp, Homo sapiens
atgtcatactgggccttaattttagactttacaccataacttagcacacagcgtccagagtatgctcgacagattcaaacggatctaatactaccctagatctcccagggcatccactagtggtagcagccccaaatcctatgagggctccctggctggctccattctttgcctcagatttaggccacacagaaccacatgtgcatctcagatacccatggccctattccacttccgtgctgcacttgctagcccctcagcagtaacaaccttcctctgtccacttaacactcaaagactagctccactgatcacctaccccaggccaagtgactgtcacagatgaccacattggcacctggccttatcctccaggttgaataaacaccctaggccccatcaaagtcatcaaaaaatcctggtgattccacagagtgctgaataagcacaaaggaaaaaaaggacagccatttgcctcaaatacacctatgcctctgcatccaccttatatccactcttcccttgaaagtgtatgccacctgcccaactatcctctccaaacaccctacctccatagccactaacctcccttacctctgtttagaaagcccaagaatatcacccacttatccaaccaaaaggcttggtccttagcccccattctgcccttcctggccaaataacctgtaccaccatgcctaaagattaacccttgtaggccggatgcggtggcttacgcctgtaatcccagaactctgggtggctgaggcgggtggatcacctgaggttgggagttcaagactagcctgaccaacatggagaaaccctgtctctactaaataaatacaaaattagccgggcgtggtggcgcatgcctgtaatcccagctactcgggaggctgaggcaggagaattgcttgaagccgggaggcggaggttgtggtgagccaagctcgcgccattgcactctggcctgggcaacaagagagacactccatctcaaaaaaaaaaaaaaaaaatagaacaacccttctaaatgtaatccacagctcactcaccttagtccacacaatgaccaccacattttggatgtctccattctgaagc

SEQ ID NO: 3006 - DNA, 1194 bp, Homo sapiens
tgaataacatcggcttctaaatcataagttgatttttaactactgggtttaggccaggcgggcctaggcctggtttcgggcctggcgcggggttgcctgtctttggttttacttccttgttgtttttactgaatataaaacaatgtgagagggtctctctcttctctcatgcatacatactccatgtttgaacaccgcagccattgtcctgtaacataatagcatttgtctcattagctttttgatgttgatatcagatttctagaggaatctgtaggttaaagatataaataaaagtgttgctaatgggctgagaacggtggttcacgcctgtaatcctagcacttcggtagaccattgcaggcagatcacttgaggccagaagttcgagaccagcctggccaaaatgaggaaaccccgtctctactaaaaatacaaaaattagcagggtatggtggcacacgcctgtaatcccagctactcggatggttgaggcacgagaatcgcttgaacccgggaggcataggctgcagtgagccaagatcacaccactgcaccccagcctgagtgacagagagaactatgtcttaaaaaaaagacaaaaaaaaaaaaaaaaggaagaagccgagcatcacaaattctgaaataagaagtctccaaacacgcgggcaatcagttgcacacagtacccccagaaatgtgcgtatggcctcttctaagatgggagaccctcctccgcatctggacctggagtcgccatttcctagcgcccctcgcagtggagcttgcccctttcttcggaaagtcggaagaaagccaccttaagcgctgcccatgtctgggaactacattacccagaatccgccctgcgaaatggtaacgtggctgagccaatgaagcttcagagaagccgtgccattgccggggcacgtaaagtcaagccaggacttccggcgtcctagccgtggcagccattttggcctgtcaggtccatccggcgatgctgggtctggacgagctcgggaggagtggttgtggccattgcacacaggcggatctgaggttcggcgacgccgctggtcgcgacccgggacaggacaacgacaggaacaccgccgagcccgcgttccccccccgcccagagtcatggcggcagcagccgctctgagggcgcctgctcaggtgagcgctgcg

SEQ ID NO: 3007 - DNA, 1205 bp, Homo sapiens
tgcacagtggcaaatgctgttagagtacattattctacatactgaatcttctgtttccatagttaagtttctggtttattaggagacatttttttttctttccagaattttaatgcaagttttactttttcaaattaataaaatgttagcaacagagaataacttgggaaaacaagtagcatttttatttcaatcattcttcatttgaatgcactaggaagctggagaattttagactcttaagaaatttactttaaagccaggcaccatggctctgtagtcccagcttctcagaaggctgaaacaggaggattacatgagctcgagtttgagtaaggcctgggcgacatagtctctttaaaaaaattcagttcatgcgggtgcggtggctcacgcctgtaatcccagcactttgggaggctgaggcaggcgggttgcctgagctcaggagttcgagaccaccctgggcaagacggtgaaaccctgtctctactaaaatacagaaaattagccggacgagccggcatgtgcctgtagacccagctactcaggaggctgaggcaggagacttgcttgaacccgggaggcggaggttgcagtgagccgagatgtgctactgcactccagcctgggcgacagagtgagactcatctcaaataaataagataataaaatccagttcagtaaaatgtgcctgataaaatataagtgactactggcctggagcagtggctcacgcctgtaatcctagcactttgagaggccaaggcaggtggatcacctgaggtccggagtttgagaccagccgagtcaacatggtgaaaccctgtctttactaaaaaatacaaaaattaactgggtgtggtggcacattcctgtaatcctggctacttgggaggctgaggcaggagaattgcttgaaccctccgggcggaggttgcagtgagctgagatcacaccactgcactccagcctgggcgacagggcaagacaccgtctcaacaaaacatatatataagtaatgaatgaatattatgtcaatattctaagtcagaatgttactgtaatactttttaattctcattccatttaaaataactggttaattttcaaatcataatgaaatttttacaaatttatgtgtagtacaaagcatgcatatacattcatatgtattatatgtatatatagcctttaaaaatatt

SEQ ID NO: 3008 - DNA, 1185 bp, Homo sapiens
aacccaagatggaaatgacaaaagttacttaaaatgtgcaacataaaaggtagtcatttaggctgggtgcagtggttcatgcctgtaatcccactttgggaggccaagacaggtgggtcacttgaggacaggagttcgagaccagtcaggccaataccgtgaaacagtctctactaaaaatccaaaaattagccggatgtggtatcatgcacctgtaatcccagatgttcgggaggctgaggcatgagaatcgcttgaatgcaggagcagaggttgcagtaagctgtgatcatgccattgccctccagcctaggcaacagagctagatccttgtcttaaaaaaaaaaaaaaggaaaggagtcatctataattttactacttatacagattacattgagataaatcgcaaaatattaggcaaaactttaaaacaatttttaactatccagtatatcaaagagagatgccacacattgtatttgtttgcaagaatgtcattgtgattacaaaactgaccactaaccattcagttgaagttgattgagaacttaaaactatttccgtctatggccataccaccctgaacgcgcctgatctcgtctgatctcggaagctaagcagggtcgggcctggttactacttggatgggagaacttaaaactatttccttttttttttttttttgagatggagcctcactttgtcgcccaggctggagtgcagtggcgtgatctcggctcactgcaacctccgtctcctgggttcaagtgattctcttgcctcagcctcccaagtagctgggattacaggtgtgtgccactaagcccagctcatttttgtatttttagtagagacagggtttcaccatgttggccagagccaccgcattatttttcagccaggtgcagtggctcacacctgtaaccccgcactttgggaggccaaggtgggtggatcacctgaagttgggagtttgagaccagcccgatcaactttgaagaaaccgtctctactaaaaatgcaaaaacctagccgggcgtggtggcacgtgcctgtaatcccagctactcgggaggctgaggcaagaggatggcttgaactcaggaggcagaggttgtggtgagccgagatcacagcactgcactccagcctgggtgacaagagcaagactccgtctcaaaataa

SEQ ID NO: 3009 - DNA, 1176 bp, Homo sapiens
agaacaaattccccttcccactttgctcccatgaataagctctcttagccaaatgaacccttcttatccattcttatccagggaaccagaacagttcctgcttattactttgtagtgggtttcagttccctatcaattttttgagttattcaaacaagccagtcccctcctctggggaccagtggagcttctccatcttgatgctacaaaacttacattctacagcacctggttgttactcttttctggagtactacctccgtatggccctgtgtggagtgtggtattctttcacaggctatgagtatttgtctttaattaataagctgttcagccaggcgtggtggctcacgcctgtaatcccagcactttgggaggccgaggcgggcagctcacaaggtcaggagatcaagaccatcctggctaacacggtgaaaccccttctctactaaaaatataaaaaattagccaggcgtgatggcgggtgcctgtagtcccagctacttgggaggctaaggtaggagaatggcatgaacccaggaggtggagcttgccccactgcactccagcctgggcgacagagcaagatttcgtctcaaaaaaaaaaaaaaaattaataaactgttgatctcatttgtccaatgtcacgtgtcttatatttggctgttggttatccactctttttttttgttctttgagacgcagtctcgctgtgtcaccacgctggagtgcagtggcgtgatctcggctcattgcaacctccacctctccacctcctgggttctagtgattctcctgcctcagcctcctgagtagctggtactacagccgtgtgccaccacgcctggctgatcttttgtatttttagtagagatggggtttcaccctgttagccaggatggtctccatctcttgacctcgtgatccgcccacctcggcctcccaaagtgctgggattacaggcatgagccactgcacccggcccaggttatctactctttcactcaggtagcatgtggggaagccaggatttgcctgtggtataggacgtagtggtggtcatggtcatgtggcagtgggatctggagacctgaggtatgtgcagtgtaatgaatgatatgcacttggagagggagtgtgcctgatggccccagtgtcctgattgagacttacatg

SEQ ID NO: 3010 - DNA, 1199 bp, Homo sapiens
atgcgctccgccccttcctgcacccggccagcctctgcggcacacacccaacagctacacaggcgcctggggctgcccgggtcgcggacgcaagtcgggccaacgtagcttctccctggcggtcctcctccggccccaggccgtctttaccacccctggaaccttgctgagttgacgccactgagctgcgtctcacacccacgcgctgtggaacacccaccaagctggaatccacgcggtttttaaaatagagtcgggggccgggcgcggtgactcacgcctgtaatcccagcactttgggaggtcgaggcgggcggatcacgaggtcaggagatcgagaccatcctggctaacacggagaaaccccgtctctactaaaaatacaaaaaattagccgggcgtggtggcgggcgcctgtagtcccagctactcgggaggctgaggcaggagaatcgcttgaacctgggaggcggagcttgcagtgagccgagatcgcgacactgcactccagcctggggcgacagaacgagactccgtctcaaaaaaaaaaaaaaaaaattgagtcgggatctcagaagctaagcagggtcgggcctggttagtacttgggagaccgtctgggaacaccgagtgctgttggctaaaataaataaataaaccgggcgcggtggctcacgcctgtaatcccagaactttgggaggccgaggcgggcagatcacgaggtcaggagttcgagaccagcctgaccaacatggtgaaaccccgtctctactgaaaatacaaaaattaggcttgttggcgtgtgcctataatcccagctactcgggaggctgaggcaggagaatcgcttgaaccggggaggcagaagttacagtgagctgaggtcgtgccactgcacactccagcctgggtgacagagcaagactccgtctcaaaaaacaacatagaccagatgctgtaagctaaaataaatgaatagctagagacggggtctcgctatatggcccaggctggtcttgaacttctgggctcaagtgatcctcccaccttggcctcccaaagtgctaggattacagacccgagccactgcacccggcctccacgagctctttttgtaccaatttttcccaatttgtactagggagctctcacctcagcccaggtggtttgggcaggtgtgggtacatggcccaggtcc

SEQ ID NO: 3011 - DNA, 1218 bp, Homo sapiens
cataccaggatcccagacagctgttggactaccccgaatgggtacttgatctctcctctggtgtctggccaacgcccatgctgctcctgaccattttcccttcatttcctgctccctgctgccccaggattacattgcagtgaaggagaagtatgccaagtacctgcctcacagtgcagggcggtatgccgccaaacgcttccgcaaagctcagtgtcccattgtggagcgcctcactaactccatgatgatgcacggccgcaacaacggcaagaagctcatgactgtgcgcatcgtcaagcatgccttcgagatcatacacctgctcacaggcgaggtagggctctgtggcctggtgagggcaggctgtgccctcagtacacccgaaagccccacggagtgtatgtcaggcttatcccctgtgtggtgtggtcactcttgttttaggtatgaggaaaggggaggaatgcatggggctggatgtcaggctcatatcccccttctctctagaaccctctgcaggtcctggtgaacgccatcatcaacagtggtccccgggaggactccacacgcattgggcgcgccgggactgtgagacgacaggctgtggatgtgtcccccctgcgccgtgtgaaccaggtgagcctggggcttatgcacgtggcagggtggacacagccacgggagtgggtggggtcttgcctggggcaggaaggctcctctctgtctgcatgttttacctgcagcatcacttcctctaggaagccttcctggattcccaccctgcataggggctgatccaggctctgggtcctcttcgggaacacatttggcagaggtcttctttctttcctttgggtgtatatttttacactgtgtgtatatgtactttttttttttttcttggacattttgagaatcagttgcagacattttgattgtgttttccctgaacactgcaggtgtctttaaaaacaaagatgacctacccccgtcgtcacccccaggaaggaatttatattcacagcaatagtcgttgttccatttagcatctgtccccagaatgccagaatgccctttatagtggcgcattgtcaattgggtccaagttaaaagcaaatatattgccttgttttttagaaataattgagatggaatctcagggtgttcttgaattcctggtctcaaatgatcctgtcccctcagcctcccaaagtg

SEQ ID NO: 3012 - DNA, 1178 bp, Homo sapiens
cctgctaggtccaggagcccaggtgggggtggggtggggtgggggcggggagctgtagagtctgacttgcgttcgcggcccgccctgtcttccgcaggggagaagccgcaccagtgcgccgtgtgctggcgatccttctctctacgcgactacctgctcaaacacatggtcacgcacaccggcgtgcgcgccttccagtgcgccgtctgcgccaagcgcttcacgcagaagagctcgctcaacgtgcacatgcgcactcaccggcccgagcgcgcgccctgccccgcctgcggcaaggtcttctcgcaccgcgcgctgctggagcgccacctggcggcgcaccctgcgccctgatggcgctggggcctggcctcgcccacggtggatccggggcctcccgcacagtcggccacgcccgctgcgggacccgtggttcccgccactagaccacgctccctcctgagcgcaggtcctctctctcccttcaccctttctccataccagggcctaagtccgccttactcctctcctccatgtacttgaaccctccaggtggtgccgggctggggctggggctggttagaccacttctgagaactggactatttcctgcgtaaaccgggcgctcaggcgcttggacccggcccaagatttgactccggttctcaccccgccctctcctggggtggtggtgggggctggggggccgcttgcctgccccagggtcaggctgggcaaggtccctagctctctacccaagctgttactccctcatggggcgcctaaggagactcaagtggacccatcatatatgggggctgggcctcgggactctcgctctaataaaggactgtaggccatggggcctaaaccacgaagctgtgagcacctggatcagtgcgtgccttgccctcatagacaagatgtgagtgtcagggttcagcgtccctgttcttgggtggcatccatgcggcccacaggctgtcctgggcaggaacaggatggtccactttgccatctaggacctctattctgtaggggctaaggtgggctgcatatataaccagcacttggttctcttggatccctcagtcctgtggggagtaggataggcaggccacatctgaggtgggtctccgagagggaggccacgtgaaagccccatcatactcctggtt

SEQ ID NO: 3013 - DNA, 1404 bp, Homo sapiens
gcagacagcactggcgtggtggccaagctctcaccagccaaccagcgggtgagggctggggttacttaggtggggttgcccagagaggctttataggtgctgcccagagctgtgacatcccttacaatgtttgtagaaatgtgagcgtgtactgctggccctattctgtcacgaaccctgccgccccctgcatcagctggctaccgactccaccttctccctggtgagtcctaggatgggaaaggggaagggggtggtggctgctgggtctcgccctcaacctgtgcatgtatatgtgtgtctttgtgtgtgtatgtgtgatctctgcctgcaggaccagcccggtggcaccctggatctgaccctgatccgtgcccgcctccaggagaagttgtcacctccctacagctccccacaggagtttgcccaggatgtgggccgcatgttcaagcaattcaacaagttaactgaggtgagccagtggaatggagaggctgtgggcagggggagatgtgaaggaaagaactaggacccattcatccactgcattcctgcttggcccaggacaaggcagacgtgcagtccatcatcggcctgcagcgcttcttcgagacgcgcatgaacgaggccttcggtgacaccaagttctctgctgtgctggtggagcccccgccgatgagcctgcctggtgctggcctgagttcccaggagctgtctggtggccctggtgatggcccctgaggctggagcccccatggccagcccagcctggctctgttctctgtcctgtcaccccatccccactcccctggtggcctgactcccactccctggtggccccatcccccagttcctcacgatatggtttttacttctgtggatttaataaaaacttcaccagttcctcaggcgttggctggttgggggactgtggtcctggggcctggtttattgactgtatctactagtcagccttatcaagcactggtggcacaagggaggggggtcttgtcccccacctatcgaagcccatgtgtatggatgcctagggagtggggaagactgcctccttgccctttctgggtatggggagggtcacccagggcaaaggatgtacacactagaggcttgttgggtaccctgtgggatactgggtaggtgtgacctacatccctgtgtaggcagggttagccccaggtgtagcacagccactctactgaatgcttcctaaattttggtgctgtagctgtttctcatcttcagaaggtcccacagtgaactgagaccttccagatgtggtttttttccctgtctccctttgctgagtccacttaacattatcattcatctctgtgttatgatttagttactctacagtcgagcctgtgtgaatcccaaggccac

SEQ ID NO: 3014 - DNA, 1128 bp, Homo sapiens
cccaacattgacctcgagggcaacgtctgcctcaacatcctcaggtgaggacactggccctctaatgccctcctcagcgctgcctgccaggcctccctcatggtcttgtgggcactacatcagactctgtcccttcccacccctttgttgtctgtggtttcttgatttcccagtcatcttcctcatggcctgaccttggttttctccttggcctgtcctgctccacaccctccctcccagcctctcacatgctcactctcctatgccctggatctgacctgcccaacaccagaggggcctgtggcagtctcccactcaccaagccctgaccctgatgctctctgtccacagagaggactggaagccagtccttacgataaactccataatttatggcctgcagtatctcttcttggtgagtaggaataggtggttgggtctggggagattggccttctgtccctctggcctgttgaccccccctacctgtactggccacaggagcccaaccccgaggacccactgaacaaggaggccgcagaggtcctgcagaacaaccggcggctgtttgagcagaacgtgcagcgctccatgcggggtggctacatcggctccacctactttgagcgctgcctgaaatagggttggcgcatacccacccccgccacggccacaagccctggcatcccctgcaaatatttattgggggccatgggtaggggtttggggggcggccggtgggggaatcccctgccttggccttgcctccccttcctgccacgtgcccctagttatttttttttttttaacaccatgtgattaaggtcggcgctgcctcccccgacccactcagcgatgggaaatgaattggcttgtctagcccccctgctgggtgcttgttcagcccccactctgggctgtggagtgggtgggcaacgggcctgggtagctgggcccaggcaacccacccctccacctctggaggtcccaccaggctattaaaggggaatgttactgcatggcctctgcttcttacttctatggggtgggaggggcagctgaggtccattagggcctgcaaagctggggtggtggaaggtgtggtcacaggtggcattggagcaccct

SEQ ID NO: 3015 - DNA, 1158 bp, Homo sapiens
cggggcgcccgaggccgttgccgacctccgcgctaaagccgctgctgccgcggaagacgatcctccagtacccgcccgccgtcaccgcagctgccgtgtcctcctcccacccctagccgcaccccctcgcggagggatcagctgagcggccaaacggcacggtcgggggagccccgagtccgcagctgcagcggggcctgagaccagagttggcgagggcaaggaaggagcggccccgggcagtgggggcggggccgggcgggcccgagaacagccgaatttggccgagcgctgccgagcgagtccgaggcgctgggccaggccggagccggactacgggagccgaggcgggccgcgcggtgggcgcggagaggagcggagcggcgcggcaggccgggcgggtggcggcagcagcggaggaggccgcagctgcgggtccgaggagcggaggcgacgcgggcggcggcggggggccgggtggccggggtcccgggccccgcggcggcggcagcggcggcggcggcggcaggatgatcaagctgttctcgctgaagcagcagaagaaggaggaggagtcggcgggcggcaccaagggcagcagcaagaaggcgtcggcggcgcagctgcggatccagaagggtagggggtcaggggatggggttggagccggaggtcggaggtcagggcctgaggcagggtgatgtgggagtcaggaaggggtaatgcggttgctgagggtcagaggtgaagggccccgagcgtggggggggtcggaggtcaagtcttgagggttgggatcatgcagtcacggggagggggtcagagataggggcccggtatgtggtggtttaggatattaggaaggcctggtgtctgctactagggactcggaatctcagagtcaggcagtggagtggaggaactgacgactcgagagtctgggggttagacgggaacttgggtttggggtgacaggcggagaagagagggatagtagaggccaggggttggggatatgagtggaagaggatttagtttattatgctggggtctctgggaatctctgagtcaaacgggtgaagtaggttggaggaccagggactcatgggcctgcctgagtcacagcaatttggggtttggggtgacaggtggaggagg

SEQ ID NO: 3016 - DNA, 1229 bp, Homo sapiens
aagagaataatcccattccacttagatctctacaaacacccagttctctggcatgtgtcctactctgataagggcaggggccacgtgtttaagatctggaggtccttaagtcttctcagaagccagtgctgccttcaacacccggcagttctggtgggggtgtcttccgtggtgcccagccctgggccgccccctccacgggcacgtaggtgaatcagggtggacccactgctaagcagatgaatgactacctaaggtagctctcctgagtttgctctgatagagaacaagggctgctgattttcggaggcaccctgacacccctccccatccaacagatgtgcggagcagctctgagttgccttctctgggtggaactgcatctgctccttctttcctgggaattcagaatcattcttgagaaatcactctgcatctgtgtcattctcccaactcacttctctaggctccgttacgctttctctggggcagtggtccccacccgcactgtgtgacactgcttccgagattccccgggtgctcctctgtctctgagtctgtctctgcctctgcctctctctgtctctcagaggtctgtctctgtctctgcctctctctgtctctctgtccctctctgtctctgtctctccctgtctctgtctctctgttgctgtctctgcctctgtctctgcctctctctgtgtctctctgcccctccctctgtctctgtccctctcagtctctggttttgtctctgtctctctctgtctctgcctctgcctctctctgtctctgtctctctgtctctgtctctctctgtctctctctgtctctttgtccctctctgtctctctctgtctctgtctctagctctgcctctgttagtccctctctgtctctccctgtctctgtctgtcactgtctctgcctctgtctctgcctctctgtgtctctctgcccctccctctgtctctctctgtccctctcagtctctggttttgtctctgtctctctctgtctctgcctctgcctctctctgtctctgcctctgcctctctctgtctctctgtctctgtctctgtctctctctgtctctgcctctgtctctctctttgtccctctctgtctctgtctctctctgtctctgtctctagctctgcctctgttagtccctctctgtctctccctgtctctgtctctctgtcgctgtctctgcctctgtctctgtc

SEQ ID NO: 3017 - DNA, 1189 bp, Homo sapiens
cgatggcagggagctgcggactgcagaccaggaaacacccagaactcgtgacatttcatgacaacgtccagctggtgctgttacagaaggcagtgcaggaggcttccaaccagagcatctgcggagaaggaggcacagcaggtgcctgaagggaagcaggcaggagtcctagcttcacgttagacttctcaggtttttatttaattcttttaaaatgaaaaattggtgctactattaaattgcacagttgaatcatttaggcgcctaaattgattttgcctcccaacaccatttctttttaaataaagcaggatacctctatatgtcagccttgccttgttcagatgccaggagccggcagacctgtcacccgcaggtggggtgagtcttggagctgccagaggggctcaccgaaatcggggttccatcacaagctatgtttaaaaagaaaattggtgtttggcaaacggaacagaacctttgatgagagcgttcacagggacactgtctgggggtgcagtgcaagcccccggcctcttccctgggaacctctgaactcctccttcctctgggctctctgtaacatttcaccacacgtcagcatctaatcccaagacaaacattcccgctgctcgaagcagctgtatagcctgtgactctccgtgtgtcagctccttccacacctgattagaacattcataagccacatttagaaacaggtttgctttcagctgtcacttgcacacatactgcctagttgtgaaccaaatgtgaaaaaacctccttcatcccattgtgtatctgatacctgccgagggccaagggtgtgtgttgacaacgccgctcccagccggccctggttgcgtccacgtcctgaacaagagccgcttccggatggctcttcccaagggaggaggagctcaagtgtcgggaactgtctaacttcaggttgtgtgagtgcgttaaaaaaaaaaaaaaaaaagaatccctatacctcatttgtatttttaaaatgcgtgatgttttatgaaattgtgtccattttttaggtattagatatggcagaaaaaccatttccactatgcaaagttcttttagacgtcagtgaaaatcaactctcatacctcatggtctctctttaattgaccaaaaccttccatttttctctaaatacaaagcgatctgtgtt

SEQ ID NO: 3018 - DNA, 1200 bp, Homo sapiens
aataagtgtatatatgtgtgcatttatcagttagtatacatacatatatttcctagctctgtctgctaagatagtagcagtgacacccagcagcaataagctcaccccaaatgcagatcttggtttctaatactattctcctataaaagaatccagggatccttggataagttaccaatttcagggctctacaggaaatacataacatgatcccaaagcatcttttagttccagaaagaaaggaactgctgaaacagcacaattatgtggacatgttaaagggacaaaggtgtcaacctgctagagctcccaaggatgaaagctgaaaaactttgagcagcaaaataaataagagtattggattaaaacccaaagtataaaataaatattcatgagttcacactgatataaataaatgattgaatatgtaaataaaaaagatttcttagcctgttttctgatgttattattgaatactaaagactaggtaatttataaaaggataaatatatatttctcactgttctggagactggaaagtccaagagcaagacactagcatatggtgacagtcatcccatggtaagaaaccaagcaggagtgagcatgggagacagacagtgaggaagcaggggggagagagacagtgaggaagggcggcaaacattaggagaccactcctgaaattactatcccattctccaggaaatggtattaattacttcatgagagtgcagccatgatgacttgattccctcataaaggttctgcctctttatactgttacaatggcaattaaacctcaacatgggttttggaggggacattcagcccggagcagtgagagaaggaacaaatctgcctcacagatgaatttcaaataaattatgtagacactctaccctcaaggagttggagcataaattaccaccacttaagtatgggctggtgacagtgacttccttccaaagagtacagtacaaaaagggatgaggggaaagacccttatagaggagcaacttggccaacactacctcagtcaggtgatcaagcccaacatcaatagccctaaatcatgttgatggcacttacctttgataggatattatgagtgttgaaatttacctctatggtcttcctctccaaaatatagccctccagtctagctttgagagaaatgtcagacaaatccagattgag

SEQ ID NO: 3019 - DNA, 1154 bp, Homo sapiens
ccctgcgtgcgaggcacacagtaggccctcagctcggtcagcaccttgtgcgctcctggggctccatgctccaccccgcgtgcgaggcacacagtaggccctcagctcggtcagcacctcgtgcgctcctggggctctgttctctacccggcatgcaaggcgcacagtaggtcctcagcttggtcagtgcctcatgtgctcctgggtctctgtgctccaccccatgtgcaaggcacacagtaggccctcagcttggtcagtgcctcatgcgctcctggggctctgtgctccaccccacatgcaaggcacacagtaggccctcagctcggtcagtgcgtcatgcgctcctggggctctgtgctccaccccatgtgcaaggtacactgtaggccctcagcttggtcagtgcttcatgtgctcctgggtctccatgctccaccccatgtgcaaggcacagaatcctcagctcacacatgcactatttctgtgcgtctgactcttggtggtacctgacagcacatggtctgttttcctgaggcattttgagtctctcactgttgggactgtgtctagactatggcaagaggttggcgtggctggggaaggtgtggaccaggtcagggggctgtgaggccaaggagcctggtggcctggctagcgtctgttctgcagccaactttgtggtttgttacttgaagttatctgtacagcaaccctttggggaaaaaagtagtaattacacagcttcattgtgaaaagtcaacgtgaagacagaaaaactgggtgaaagttgaaaagcaggaacttgaggaatgggtctcatagaacgtgtgagtgtggcctgtgagttgggagagaggcaggattctgtccaaatagtaatgaatttgcaacatcaggtataatggctgcctgtggattgcctcataggaagtttgtgtagaagtatgggacttaaatgtacctaatcaaggtctatttcaggcattaaataaataaataaatagataagtacttaagccaagctggtgtgccacagtggctttgcaaaaacatggtaaacagatggtgaggagattgttcctctgggcaggtgctgcagactccaagataaaagcatgagggtagaggggtcctgggtgtggtggaggggg

SEQ ID NO: 3020 - DNA, 1141 bp, Homo sapiens
tttgctgacagataactaaccgatgatgaggccgaggtaaaagagacatctgcagtgtgacagaagggagcatgagaagcatggctcaccagccagcctctgtggtctttgtaattagaagcttcagaactcactaatactactgtacctttcattggcgcattaccccataaaactttttgagacgaggtgagatctgagtataaagataggtcagaagtattttaaagggcttaatgtgccaaaaagaaaaaaagctagagaccctttttgcaaacatttggtgaccacacatttgagggaagacgtggcgttaggtgaagcagaagcaaaccctgctcttaggggctcacctaggtgagtgcacagcctgtgacgctacagggagaggctgagtaaaccgagatccagcgttctgtatggcaggggtattgcttatcacagaggttctgaagagtaggaagtacataatgaagagggctttaaaaattgccaacaaagtgagtcaccagggctggcagtagtgtgacggggctgtcctgagctgttaggagagtagatgcggggagggctggtgacctccgtgggtttatatgtcggaaactcttctctccaaatcccaggcctggcttccagcaccatccagctgtgcccaagaagccaccctggtctgttctccaactcttttaaatggtgcccaacttttctaagtgagcttagcaatgagaagaaaaaaaaacatgaattctttttctggaaaatcagggagacatgggtaataataggtactaataaatatttatagatgagtgaatgaggaaataattacatcaaaaaggtcagtgacaattgataaatgacaaggaaatatttaattaggtaaaactaaatcattgctctctatactaggatagactttatctacttcatctgttcctaagtcagcatgttagttctggggaaggatcataagaaaggaaatactttttaaaaaaaaatttggaaacatgtaacaaagcaagggtaaaatatatatatatatctatataagtgctgtgactgtaaaagtgtactttccattaattattagccgagttaagagaatggtcacattgaagtactgtgtggactagaaatgtac

SEQ ID NO: 3021 - DNA, 1127 bp, Homo sapiens
aattatatactactcagggaaaaaatgaacaaaaataactactcatccttcaatttcattttcttgaaacagtaagagtataatttggtatgcctcagctgtcaccattttataagtggctcattctgttcttaaagtaagtatttttattggaactcagggtaattgggggaatttatttagcttctaaaatatccggcaggatagagaagatttatttggcttcaaaaatgtctggtgaccacttctcttattagccactactgcccatttgcttcaaaaatatatttattggtctccaccatgtgtgacacacacaggatttccaaacataccacttttgagaaaaatgtgcagtaaaaaggaggtttctagaaagtgacagtaactcacatttaagcactagctgacctaggaggagacctggatcttcattctggttctgcctttcatgagacttaagacttggaggagccacctgtcctgtagaccccaagttcctcagccataagcaaacgggttaatcctaagagttcaggaccagttgggtgtcgtgaacggagccattagcaaggtctgtaggattcaaggacttgggcacattcacagtccacactattgtcatggtcattgacttactacttgagctcaaagccctgacatttcaaaaggttgtcatgataacagtgaaacctctgaatcccttaaatcagaaggcatggcaacatactttttctactggcaatagctcttacaatgagtgtttcataatgaaatagtctctgctgaagaaaacatgttttccttttgctctctctgctttgttggtttctgtgctgtgtggaattggagaagatatatgctctgaaatattttatacagattactgactactggacagggtttaccactatataacatctcaaagttattcaaggatatttaaagcatatttagtttagttacaccttattttaaaccgcagaaaacaatagctttaaaatttttgccattaaaataattataaatttatacttttactcaaggactagatcacagttttaggacaaaaatctctcctatttaaagttcataccttgtaagtatttagtttgtatattcatgaa

SEQ ID NO: 3022 - DNA, 1224 bp, Homo sapiens
attgcctgcacattcttggtatcttagtattattgttgttgccagtgaaaaaaactcaaagaagaaagaatacacatgaaaacattcagctctcacaatccaaaaagtttgatgaaggagaaaattctttgggacagaacagtttttctacaacaaacaatgtttgcaatcagaatcaagaaatagcctcgagacattcatcactaaagcagtgatcgggaaggctctgagggctgttttttttttttgatgttaacagaaaccaatcttagcaccttttcaaggggtttgagtttgttggaaaagcagttaactggggggaaatggacagttatagataaggaatttcctgtacaccagattggaaatggagtgaaacaagccctcccatgccatgtctccgtgggccacgccttatgtaagaatatttccatatttcagtgggcactcccaacctcagcacttgtccgtagggtcacacgcgtgccctgttgctgaatgtatgttgcgtatcccaaggcactgaagaggtggaaaaataatcgtgtcaatctggatgatagagagaaattaacttttccaaatgaatgtcttgccttaaaccctctatttcctaaaatattgttcctaaatggtattttcaagtgtaatattgtgagaacgctactgcagtagttgatgttgtgtgctgtaaaggattttaggaggaatttgaaacaggatatttaagagtgtggatatttttaaaatgcaataaacatctcagtatttgaagggttttcttaaagtatgtcaaatgactacaatccatagtgaaactgtaaacagtaatggacgccaaattataggtagctgattttgctggagagtttaattaccttgtgcagtcaaagagcgcttccagaaggaatctcttaaaacataatgagaggtttggtaatgtgatattttaagcttattctttttcttaaaagagagaggtgacgaaggaaggcaggaatgaagaagcactgcgtggcctccggtggaatgcacggggcacagccgcgactctgcaggcagcttcccccccatgccagggctctgcgccgtcatgtgagacttaaaaaaaaagttgaatgacttcgtgatactttggacttctaaattaaatttatcaggcataaattatgtagaattagaggctttgaaaataatactggtaggttgctcaaaggttttgaa

SEQ ID NO: 3023 - DNA, 1134 bp, Homo sapiens
ctgctttctatccctatagatttgcctcttctggacatttcatataaacagaatcatataatatgtagtgttttgtgtctggcttctttcacttagcctaatgccctcaaggtttatttgtgttgtagcttgcatcagaacttttttttttttttggcagagggtctcactctgtcacccaagctggagtacaatggcacggtcatgactcactgcatcctcaaactcctgggctcaagggatcctcctacttcagcctcccaaatagctgggattacagatgtgcaccaccaccctcagctgattttttagagatggggtctcactttgttgtccacgctggtctcaaactcctgggccagatgatcctcctgcatggcctcccagagtgctggaattacaagtgtgagccaccacacctaaccttttttaaataaaactcttatagtgtggtaagataacacgtaacataaaagttagcgttttaacccttcttaagctacagttcagtggtattaagtacattcattttgtcgtgcaatgcaaccagcaaccatcgtctgcaactcttcatcttgcaaaactgaaactctatacccattaaacagaagctctccattccccgctggcaaccaccattctactttctatgaatttgactactctaggtacctcatataagtggaattatagaatagttgtctttttgtgtctagcttatttcattttgcataatgtttatgttgaaacatgtatcagaattttgtgcttctttttgtggctgaataatattacactgtatagaaatactactttttttggacggacgtggtggctcacacctgtaatcacagcactttgggaggccgaggcgggcggatcacgaggtcaggagatggagaccatcttggctaacatggtgaaaccccgtctctactaaaaaaaaaaaaaaaattagccgggcgtagtggcaggcacctgtagtcccagctactcgggaggctgaggcaggagaatggcgtgaacccaggaggcggagcttgcagtgagccgagatcactccactgcactccagcctgggcaacagagtaagactctgtctccaaatacaaaacaaaacaaaacaaagtacta

SEQ ID NO: 3024 - DNA, 1072 bp, Homo sapiens
ctcttctaacattatcctcttgtgctaattgattgaccattttaaataacttagctgttacagaaagaccgaaaggtgttcttcagtaaaatatattcaagtaagttacttaagtaacgccttaaaagatacagaaaagcaaaaaagtattggcgtattaaaaagaaatcaaaactttccaagtttaggcctgaacattgccttaaaaatatttaataaggcctcaaatgacccagtccgagactgcatgagcctatttattattaaattgtaaatattcttcatataaacaaaaatatataaccatgtctgtaacaaaaatggttttgctagcgttgttactctcttcccttctccgaggggtgatttaggcaacttcggaggttgacaatgccaagcagtcacaatagatagagctttaaagcaaattctatgcatgggtttggatttatgacaggcccgtcaccctgggcctgtcatagtaccccatgccagagcaaactgtgtccccgaaccattgcctggcctctgtgcccgtaggctgctggcactgaagtgggttgcacagtggaaaagaagaaagctctacctggcagaaatttttaaaggttaaaataaataattttaagaaagctggttcacaaggtgccacatttgatgaaagcaaaatacagtggcttttattgttactagagtgatgttcttgcttgtttttcttttttggtgaagttagccccaaattattctcatagctaagcaaatacgagagtgactgtaaggacagttggcattcccggaattgctaaacttggtaggcaacgctggtttaagaatactgagttctagccgggcgtggtggctcacgcctgtaatcccaacactttgggaggctgaggcaggcggatcacctgaggtcgggagttggagaccagcctgactaacatggagaaacgccatctccactaaaaatataaaattagccaggccccgggtgtggtggcacatgccggtaatcccagctactcgggagactgaggcaggagaatcgcttgaacccaggaggcggaggttg

SEQ ID NO: 3025 - DNA, 1278 bp, Homo sapiens
aattcttgatattttgaaccattcacgaagatagtttgagtcatgagcatgctgttgtctagagtgggcggggatgactcattggagtggatgcgctgctctgtacttgatttttttgagtctgaaattagctttccaggctggggcagggaggggagcacaggtggatcagtactgcccccaagcggtggagctgtggtggtggatcaaatactgctgccgcctgtctgcacaaacatatttctctcttccagcccttcagaagtgtattggaatatgtcgataacaataatgatggtagtgaagatgatgatgatgtgggtaattctggctaccttattgggtccaagctccccacaattcgttgcacaaagcactctacatacattctctttagtcctgatcaaaccacctttcagagtaggatttagtgtcctattttaaagatgaaggagctcgggctcagagagagatcgtttagacacacacacaactttggaatgaaacatttacagccgggcgcggtggcgcgtgcctgtagtcccagctacttgggaggctgaggctggaggatcgcttgagtccaggagttctgggctgtagtgcgctatgccgatcgggtgtccgcactaagtttggcatcaatatggtgacctcccgggagtggaggaccaccaggttgcctaaggaggggtgaaccggtccaggtcggaatgaaacatttacaaaaattgacatttccttatgcatagatatttcactaggtccttaaaacccacgtgaatctgtgattagaaaaaaaaaaacaaaacaaaacagatcattgttctccaaaccaagggtaaattttattggagccctgtcctggtgatagcctaatccacactctgaatattgtctaggtatcttgtcaaactccgggccccccaaaaaacgccacaaagggtggtctccagaatctccatcagctccagatggtggctgcccccaaggtggtgggaacagagctaagtatggtaagtgatggcagccttgcccagaattccagacttgggtactggtggtagtgctgctgccagttgtgtgtatgtgtgcgtgtgtgcgtgcgcacgagtgtgaatgtgcgtgtgtactgatgagggagttctaaggaggcagagtttggtgtgacaaaagacctctttctcacatgttaaaattgctttgcaaggtctaggatccgtgtatgatagtgagttctctgatccttgagaaattttaaaaggggctatttatgac

SEQ ID NO: 3026 - DNA, 1190 bp, Homo sapiens
aaaaacgcagagcagcttcttttgttgataccagtgcacagtcttttgaaagggctggtttctgtttggcccttagggaggaaagcgtaatggtggttactgaggtggggtatgaggaagcctgtcctatctcccattccatcatggcctggaactcagttcttaaggtttctctggcatctccttgtcccagagggggtccgttcagtcagttgcgagcttagaattttatttctagtttattttcaggagtggcgaaggttctggaagagcaggtaggaccaggatattgatgtggctagttttagaagacaatctgccacacaaatggaaagaaacaaatccttgcaaatagacatttcatgcccccacctaatgtggattttgggatgatgtctcctgattggtcctttgagttaagttcaagaggaaactcttccttgagtatgtgtgaaggatcccagccaatagttgatgagttttccagggtgtaatttctaatgtctggggctggggaagctttgattgcagcttgaactctcaccagccatgtgaccctgggctggttactcctcttgtctggcctcagctcctcagccaaaaaaggaggagctagaccaggtggtctcggaggaatctttctattagcttgctgcaaaaataattgcagtttttgccattatttttaataattataataatggccaaaactgcagttatttttgcaccaacgtactgttttgggttccatctttcctggtcagggacctgccctcccgaacccagaactcctccagtcctcaagtgacagttcccttggatgggacggcctgactgagactgggagttgtgtggcacttcagggtgtatgcgatgatagcgtatctgtggagacttggccgtccccatgaggtctcctgtcctggtgaaggcagttcattcttttcttaaccatgttttcccttcaggttgacatagaaatcaatggggaatctgtggatttgcatatgaaattgggagataatggagaagcattttttgttcaagaaacagataatgatcaggtaaggaagcctgggtggtcagggttacttcctagttttgagctttgagtaatggttatctggaaacacggcagaagtttgtgcaaagtaataccggccgtggctgtgtggacgatggggcagaga

SEQ ID NO: 3027 - DNA, 1133 bp, Homo sapiens
acctgtatacccagccatttccctatccacccttccctggattatattgaagtaaatcctggacagcatattattttatctgtaaatatctcagtgtgtatttctacaaaataaagactctaaaatataaacataataccattagcacatctaaaataattaacagtaatctgtcagtatcttcaaatatccagactgtgttctcccctgcctcttttttagacaggttctcactcattctgtcacccaggctggggttcagtggcacaattatggctcactgcaacctcagaactcctgtcctcaagcgattctcccacctcatcctcccgagtagctgagactgtaggtacctatgactacacctggctgatttttttttttgtagagatgagatctcactatgttgcccaggctgatcttgaacccttggccacaaacaatcctcccaccttgtcttcccaaagttttgggattacagacatgagccactgcatccaacctatgttttcttttaattcattgatctgctctccatatcctccttctgtctgttgctcttttgctttgattatgtgtgtgtgggttctgaaaaaaaaaaaacccaggccatttattttgtattttctcactgtctagtttttgttgattgcatctttgtagtgttgtttaaagtatttttcttttttcatcaatattttctccaaattgagagttagattctgagggataatatgattttatctgcactagatatactcctttttttgtgaaatattttactgtaatagaatcatttgagaagaatgaatgctctgggcaagtaatactcataatactagcctgactttggaccacagtctcttttgccctggtgagcagggttaattacgtgttagctctaaggatttgcttagggtaggaacaaccaaaataggttgcttcaaggcatcgtctcaaagttttttacttccaatttgctgagatgaaaatttgttagagctgcataaaaaggcagtagggaaaaggctttgtgtgtaggcccaagctgtgtttctgtgaagaaagtgcatttgaattactttatggtttttgagattttgagttgggctacattccataattaaacctag

SEQ ID NO: 3028 - DNA, 1190 bp, Homo sapiens
tggatagtttccatttatttgttttcatgttcactggtggtttcttccacatgtttaatgtgctgctaatccctttggccgtatttttcttgtcagatattgtctttttcatctctcaaagttttcttttcttttttttttttgttgttgttttgttttggtttttgagacagagtctcactctgtcatccaggctggagggcagtggtgagatctgggctcactgcaacctctgcctcctggattcaagtgattctcatgcctcagcctccggagtagctgggattacaggtgtgcatcaccacacttggctaatttttgtattgtttagtagagatgggattttgccaggttggccaagctggtctcaaactcctggcctcccaaagtgctagtattacaggtgtgaaccaccatgcccagccatctcctgaagttttattggtatttttagtatcttccatttatcttcttatcatgttcatgtttttttacattcttgaattattaatgtaaatttataatagctgttttaatgttctgtctgctaatatcatctgctctgtcatttttagtagtgtctatttctattgattgatttttctgctggctctggtttgtatttttgtgcttctctgcatgtttgctaagcctgtcaatttttactagatgcccaacgctgtgtattttgtgctgttaggttctgggttttgttataattctttaacatgaactcctttatttcctgacatgtagttgagtaacttagcataagcttgacgctctctaggattgcttttaaactttgttttgggagaacctaaagcaacttttattctagggctaatttaaccctattactaagtcaatactttttggatgactatatcaactattaaccaattttcatgagctcccagaattgtttagcctcctagtttctgatgtttcttcttcctcttcccctcatttcgtcgagtttttcccatgcatgaagagataactagtcagtcaaagagttagggctggcccctttgcagatctccagacctctctctgcagcttccctttttttttttttttccagtattttgcctgcaagttggctttctggaattctgatttctgtcctcaactcagtgagactgctgggtcttgtttgggttctctttcctgcactatgtactgaa

SEQ ID NO: 3029 - DNA, 1162 bp, Homo sapiens
tgaacctgggaggtggaggttgcagtgagccgagatcacaccactgcactccagcctgggcaacagagtgagactccacctcaaaaaaaaaaaaaaaatcagtggttttggccgggcacagtggctcacacttgtattcctagcactttgcgaggctgagatgggcggattatttgagctcaggagttcaagaccagcctgggcaacatggtgaaaccccatctctacaaaaaatacagaaaattagccgggcatggtggcacacacctgtagtcccagctgcttggggactgaggcaggaagatcacttgagccaggagattgaggctgcactgagacaagatcatgccactgcactccagcctgggtgacagagtgagactctgtcaaagaaaaagaaaattcagtggttttccactctaattaaagcttaagtaaaatgttattacattaacgtttttgatactagtctaatgttcttgcctttgtgttatactattttgacttttactatcagtgtttgatgattaatgtattactaatttatatatttcaggaacttattttttcgtatctcatatttaacacaaatggatgtaaaactggtatttgttatggaaggggaaccaccaaagctgaaagctgatgtcataagcaagaggaatcagtctcggtatgggtcttctggaaaatcgtggtctcagaaaacagggagatcacattttaaatcagtcttaagagaggtgagcattcagatttgattcagtaattccgatttgaattaaagggtgcattttactcttaatagtttgtcatctttaatacttattaattttattgtgactagcagggatgtgcctagagaaaagagtttattttttagagtgaaattgacctgagtttcattcttggcactggtatgtagaaactctgagacactgagcaaaatttgtaacctatctctaccttgtatgttaccttgtgaaatgacaacagtaatactcagcagggatgtgataaaaataagagaaagtatatctaaagcaactagtacatggtaggaacttgatcatattaccttttataacaccttcaggacttaaagaagtcccagaatacatgagatctcattaattcgtacttcactcattcagaattcatg

SEQ ID NO: 3030 - DNA, 1093 bp, Homo sapiens
tcactcctccactgcataggtgtgcctgttaccctcgaagacatgatataagttcatgatcttctgactacaaactgattctgatgaaagtcaggatccaggagctagcgtcttattgggtgtttcctattgcatggtttaacccaactcctcaacacctgaagtgtaattggcactggcacttcatcggtcacactggaatgagggcagagcaatggcacccactgcctgcctgtctaggaatccttgtccagaagcaggactctctctccccacctccctctctccaccctccccttcgctagcaatcttggtaaaattccaggttattgaggcatctacttgggaacattttagctaacagtttcttcagctcttctttatggttttgtataaccctatttagggcataaagtctgaaagctgaattatctcacaaaggattttaaaggagaattaaatctgatacaattttttttctctctttagtacgttttgccaacctatgaaatggccgtgaaaatgcctgaaaaagaaccaccacctccttacttacctgcctgaagaaattctgcctttgacaataaatcctataccagctttttgtttgtttatgttacagaatgctgcaattcagggctcttcaaacttgtttgatataaaatatgttgtcttttgtttaagcatttattttcaaacactaaggagctttttgacatctgttaaacgtctttttgtttttttgttaagtcttttacattttaatagtttttgaagacaatctaggttaagcaagagcaaagtgccattgtttgcctttaattggggggtgggaagggaaagagggtacttgccacatagtttcctttttaactgcactttctttatataatcgtttgcattttgttacttgctaccctgagtactttcaggaagactgacttaaatattcggggtgagtaagtagttgggtataagatctgaacttttcatctgcagaggcaagaaaaatatttgacattgtgacttgactgtggaagatgatggttgcatgtttctagtttgtatatgtttccatctttgtgataagatg

SEQ ID NO: 3031 - DNA, 1397 bp, Homo sapiens
agctttacctgtgatgttactgcttttgcccgccctcaggaagctttcatttaggtggagagacagtgtgagaaggtccctggcattcctgagacaggtgcaccgggtcagcttgcctgtggtcagtactgtggggatctcggggaggggtggcctgagcctcccctggcaagtgtcctgctttttggcagggcctgtaagggtgggggcaagcttatggggcaaggggggtgtgccgtgggaaatcttgggtcttggggccattgagtcaggagagcagaacaggcggcggctggacctgctcctgcactcagtcacttgcccagcgacctctcctgctgcgctcggggcttcccgaggctgccactggttcctctccccactgggagcccctcaagggtctctgacctcctggcttttatggcttcgtggctgcctaattttgtgtagaggatgggcctcctctggccgtcagccctgggaaaaactctctgcctagtgattcacctgagggttgcagcaccatgagatgctgtgtgtgtgtgtgtctgtgtgtgtgtgtgtctgcgtgtgtatgtctgtgtgtatatctgtgtgtctccatgtgtctgtgtgtgtgtccatgcatctgtgtgtctttgtccatgtacgtgtgtgtgtccctctatgtgtctgtctctttgtgtttgtgtgcgtccgtgtgtgtgtccgtgtgtacgtgtgtctctgtgtgtgtgtgtgtctgtgtgtttatgtgtctgtgtgtgtctgcgtccgtgtatatttgtatctgtgtgtgtctgtgtccgtgtatatgtgtgtctctgtgtgtgtgtgtctgtgtgtgtgtgtgtctgtgtgtgtggtgggggggtgcttactgcacaggttgccactgcatttgggccttgcctgggcactcctgacttgccttcccctgtcaggctgcagtctcagttttggggggcctggtcactacctggctgcagcttccttttcagacaccagcttcctttctgcctcccacctctgctggtggccttttctctttttcactgtggctctgacatccatcatggccttggccttggaaatctgtgggagttattcctacagagacgggcagtcaggtcacctggccttcctggttcagctgagccccgactgtttggctgtggcaggccattgcctctctgggcctcagtttcctcctctgccaaagggtcgttcttcctgtcctcagttctgagagccacatggttacagagagaccttatcctgggaagggcagaggtggcactgaaggacttgttgggggctcacatttctctgccagtattctttcttgggactcgaaggagagttggttgcccaaggggtcatcggtgggatgggca

SEQ ID NO: 3032 - DNA, 1172 bp, Homo sapiens
caagcttgttctgcacagactgcagtccatattggttttaaccgatttcagccagttttgttatcttagagagtttctgcatttctttctgcaaatttgaacagagtttctgcatttctttctgcaaattctttcttttcatatctgccatcctgcaaactcaagaattttcattagtcactgctttctttaactttttggagcacagtttcagttttttaaaacaattactatgacaattaaaatagtgtggtactggactcaaaatgtatgagtagatcattgaacaagattactttgaaatagatccatgtgtgcatgcatgcttgtttagggtagagtgatgagatgaatttcaaatcaatgccaaaagaatgattatttggaaaataacttgggggggcggttattgggtctcattcctaatggactgaaatttttaatgagaaaaacaaaagcataaaagatttgatacaatttccttgttgatagccaaacaaccatggattaaaacaaaatttttaaaaaattttttaatttacctattaggttggcgagtcttcagaatgtttgataatgtcctgttttggcaggagtgtaagtggcactcatacttttggaatgtaaactggtacagttttcctggaaaataatctagaaatgtggatcaagaatttatatgacagaaacaggaaagtcaggtgtgttggcacctgcctttattctccgctactggaggttgaggcgggaacatcagttgagcctaggaggtcaagaccagcctgaactctgcaacatagtgagacgttgtctcttaaaaagagaatttatgtttttgtctgttgaagtaaattttttttaaggatatagtaatgtacagacctgtgtatctaaagagaataatagcattatttatttatagcaaaagattatgaaccatctaaatatataaaagtagtagattgattatatcatgttccttctatacagaagactacatattatgtagccattaaaaagaatgagtggctgggcacagtggctcacgcctgtaatcccagcattgtggggaggtcaagttgggtggattgcttgagcccaggagtttgagaccagcctaagcaataggcaaaaccctgtctctacaaaaatcagccaggtatggtagtgcg

SEQ ID NO: 3033 - DNA, 1141 bp, Homo sapiens
gacgaactattcaatgggctttgggctctgacctgtttaaaagaatttctctgctgcagatgtccagttgaatactttttaagcccagaattagccttttcttaaaaaaaaaaaaatttcaggccaggcgcagtggctcacgcctgtaatcccagcactttgggaggctgaggggggcggatcatgaggtcaaaagatcgagaccatcctggccaacatgatgaaaccccgtctctactaataatacaaaaattagctgggcgtggtggtgcatgcctgtagtcccagctacttgggaagctgaggcaggataatcacttgaacctgggaagtggaggctggagtgagccgagattgcgccactgcactccagcctggcgacagagcaagactgaaaaaaaacaaaaaaaaacaaaaaaacaaaaaaaacaaaaaacagctggtctgaaggtagtgagttatcgcattgattgttcacagtcagttacagactgaaccccttgttctacacttttcccccttctcgctactgcacttgactagtcttacaaaacatttaaaaataaaaaatttcgggattagagggcctgatagttcaagtttattattaaggtaaataaaggatatcaacttctctagtttaacctctaaagcaaaataaatcattgacaagacttccactagagcaaatagcatggtaattaagatgctattacctgatttgaccaatttatcatctgtttagttctgctacaggccagtctctgtgctaggggttagggaggcagagatgaaggagagcatttctgcctgttgagaagttcaccctcttgtaggagaggttggcataaaccagtcataataaaagtcttaatgataatagtttcgagggtccagactcggattgaaaatgctgaatgaaaaaagaaaatagttgccaagtgttgtgactcatgccagaatcccagctacttgggaggccaaggtgggaggattgcttgaggccaagagtttgaggctgcagtgagctatgagccagcctagatgacagagcaagaccctgtctctaaaaaaattaaaaagtggctgggcgtggtggttcacacctgtaatcacgcccagcactttgggaggccgaggc

SEQ ID NO: 3034 - DNA, 1150 bp, Homo sapiens
aaagtaatgttctttatggaaaattttaacaaaagaaaaaccatgcaaatttcatcacccagagataaaaaaacaattaacattttagaatctattatttgtcactttgtagcagaattgggatcgtactatatatatcattttctttcctgctttttttcctcttaaccttgcattgcttctcccttgtcattattcatttggaaacaatcttaaaagaccatgtttcattatattctgttatattaatgtgtcttatttaactgtttcctttttgccatttagataattcagtaatttgctactataaataacgttgcaatgaaatactgatgaacaaatctgtggacattttgggttacttctttaggattaattcctggaactgtatttaccaagtcagaggtggagcagcatgtgaatactcactttaccctattctatcctattataatttttttttaatcttagtctgttaggtaggtgagtaatggtatctcgtggtctcggttgcgtttccttgattaccagtgggttggagcatttgtttctgtgtattgacgtacctgtcctctgtttgtccttctatttatattcatcttttttcttattgatttttaagagctctttatgcataagaggatattaaccttttggtataatgttggaaatattttttcagtttgtcatttgaattctaaattcatttatggtttctcggttgtatagatgcctttactttgcttatacgaatcatcaacgtttttgttgttcagtgtttcctcttgtttttaggcttagaaagcccttccccatcctggctttggatatctgcgcagttgcattttcttctaattgttttgcaattcattttgcaaattcaactttttatcaggttttctcattttgctataaaatatgatcggaatttaactttttcttaatagtcatttaattcttccatttgcgtttagtgaatgatctttctgtcctccctgatttgaaatgctacctctcatacattaaattctttgttgggttttttgttgttgttgttgttgttgttttgagacggagtttcttgtcatccaggctggagtgcattggtgcgatcttgactcactgcaactccacctcccggttcaagtga

SEQ ID NO: 3035 - DNA, 1430 bp, Homo sapiens
ctgtgtgtctgtgtcggcatgtctgctttgtgtgtctgagtgtgtgttcatgtgcctgtgtgtcttggtgtgtgaacctgtgtgtgtgtgttatatgttgtgtgtgtgactgtgtatgtgtgactgtgtctgttagtgtgtctctgtgttgtgtgtatgtgtgtgtgttcatgtgtgtgtgtgtgtctgtgtgcatatgtgttcatacatctgtgtgtgtgtccatttgtctgtgtgtatgtacatctctggctccaaagaccaggtctgtgtgtgaatgtgtatttctgtatgtatgtgtgtatctgtgtgtctgtgtttgtgtcagtttatctgcctctgtgtctgagtcagtgtgtctgcctttgtgtgtctgtgtgtgtcatatgttgtgtgtgtgttcatgtgtttgtctctgtcagtgtatctgtgtgtcatatgtcttatgtctgtgtgtgttcatgtgtttgtgtgtctctgtgtgtgtcagtgtgtctccctttgctgtctgtatgtttgtgtgagtgtgtcagtatgggtgggtctttgtgtgttgtgtgtgtctgtgtgagtgtgtgttctttgtgtatctgtgtatctatgtgtctctgtgtctgtatgccagtgtgtctatgtctgtgtgtgtagtgtgtttgtgtgtgtgttcatgtgtctgtgtctgtgtgtgcctatgtatctgtgtgtctctgtgcattttgtgtttccttatgtgtgtacatgtgccagtgggtctgtgtatgtctttgtgtgttgtgtttgtgtgtgtgtgtctgtgtgtgtctctgtattttcatatgcctatgtgtctgtgttgtgtgtgtgcctgtgtgtgttgtatgttcctgtgtgttgtgtgtctttttgtgtctgtgtgttgtgtgtccctgtgtgtctgcctctgtgtgttatgtgtgtctctgtgtgtgtccatgtgtctgtgtctctctgtgttgtgtgcctgtgtatgtgtccctgtctgtgtgtctgtgtctctgtgttgtgtgcctgtgtgtgtgtccctgtctgtgtctgtgttgtgtatgtgcctgtgtgtgtgtccgtgtgtctttgtctgtgttgtgtgtatgtctgggtgtcatgcggtccgcctgtgcaggtgagcgggcagtgcccgtgtgtgtctgtgtgtctgtgtctctgtgtgttgtgtgtgtgcctgtgtgtgtgttcgtgtgtctgtgcagtctgcatgtgcaggtgggtgggaagggctgtgctctgcactcctgatggatgccgctgtgctcctccaggaggccttgaattccccattcagtgctgagcctgcgagggatccagtcactcgcccacacctctgttggtgaaatgccagcaagccatttatgcccctattgcttagaaaatgcaaactcaagtcattcaacaaa

SEQ ID NO: 3036 - DNA, 1112 bp, Homo sapiens
cataatcacagccctcgttgagaggagccactgtccctgttggtcttctttctagaagtatctcttatatactgatatacagcagtgcatttacattgttaactgtaaaaatgacaccaacacatttagaaaggccaccagataaaataaagaaaaatgtatccctcaacgctgacatacttactggcttgcttttggaacgttcttctttctgtcttcaggtgctagaactttaggagagtaagtgggctctgttgagggactctgaagactggtcacccccccgcccacacacacacacacatcccccagcacttgagctgcgcttccacataaccacttcctttatgctgggactgtggtttctttgtgtgtttttatgtcttttccatgtctgggtctgggtttgcctcccctgagagaccgtaaacttctaaagaacaagaactgtgttgtctccttttataggagtgtatgtttcattaaaaaaaaaaaaagtaaaagtaaattttaaaaaacgtttcttgtctatgcctacgatgttcttattgacttgagggtttagacagtgtctctgaaaattctctggcaaacactccctggccccaccataaacagctggttgatgtaaccacaccgtagctcagtcaccacgtcacaggagctgtgtcttcttctgcccgggaactacctgtcctgtgtgacagaaaaatgcagcggttgccagccaagggcccacaggcaggattcccctgaagctgtgggactttgctaacaatgcatctcccacattgaggcttttcagaaatgcgattgaaaatagaagtgtgggtgcagcattttccttcctgccacatgggaattctggggaaagagctcaccttgaaggaacaaccttgctgggagtgcagtggggggacctttcccctggagccggagcccctgctgggttctggcagccccaggatgcccactgagctctgcttctctgggcaccctgagaaatggacggcagcggccctgactccgggctaaggcagggcttcaattaagccagagaaacacgatttattatcagcatgttttcagttccaagccgtgctttgaaaagg

SEQ ID NO: 3037 - DNA, 1178 bp, Homo sapiens
gtaatcccagcactttgggaggtcgaggcgggcagatcacgaggtcaggagatcgagaccatcctgactaacgtggtgaaaccctgtctctactaaaaaatacaacaaaattagccgggcgtggtggtgtgcgcctgtagtcccagctactcaggaggctgaggcaggagaatggtgtgaatctgggagacggagcttgtagtgagccgagatcgtgccactgcacttcagcctgggtgacagagcgagactccgtctcaaaaaaaaaaaaaaaaaaaatacactttggtttgtgtataagtatgtatggaagaataaacaaactgaaaacagtagttgcttactggaggagacatggttgttggaaactgggtggtaagatttcctcgttgctatatactccttcatacctgctgcatgttgtaccatttgcttttattacctattaagaaaatataataaattttaaaaatgaaaacaaatacaataaatattatttgttttcttcttactaggcatatttgatgagaccttctataatattttttgatgaaatagatggattagctccagttcgctctagcagacaagatcagatccacaggtaatttttctttatctgattatcttgatttcttttttacgcattgacttggtagttagccttagcccttagctaagtgctatgaggcttacaaagaaatttaaaacaatctgtgtctgtgaggactacttctttctcttagtacaggggtcagcacaccacagcctgtgagccaaatccaggcctctgtgtgtttttgtaaatgaagttatattggaatacaaccatgttcattccttaagcattgcatgtggtttcttatgtgctacaatagtagagttcagcagctgtgatagagagaccgaatgcgttgcaaagtttaaaacatttactatgtgggcttttaattttttttttttttaatttattttagagacgagttcttgctctcttgcctaggctggttttcaactcctggcctcaaaccatcctccccagtcagcctcccaaagtgccgagattacaggcgtgagccactgtgtccagcctatctgaccttttacagaaaaagttttctcatcctaatttagcataattttttggtttttttttttagagtcagagtctcaccctg

SEQ ID NO: 3038 - DNA, 1174 bp, Homo sapiens
gcgcggtggctcatgcctgtaatcccagcattttgggaggccgaggtgggcggatcacgaggtcaggagatcgagaccatcctggctaacacggtgaaaccccgtctgtactaaaaatacaaaaaattagccgggcgtggtggcgggcgcctgtagtcccagctactcgggaggctgaggcaggagaatggcgtgaaccccagggggtggagcctgcagtgagccaagatcacgccactgcactccagcctgggcaacagagagactccgtctcaagagaattagtgtagaactgtactgtgatgatatatgtctactatgactttcttttttggctaatgctattgatgaaattcatttggctgtagattggtaatttaattttggtgcttaccacatttccaggcatttcagaagatggacacaaagaagaaggaggaacagttgaagcttctcaaggagaaatatggcatcaacacagatccaccaaaataaatgttttctacattttcatttggactaaatcccacgaatgacaactaccacctttttttcctttttaattaatactaaatattgtgatttcttatttgaggttcaaaatgacctgcttgaaactttgatacatattggaatacattatgttaataaacttgtagctttttgtgaaacacctcagtcttttctcttgaactttcccttcctgtttgataccaggaaaaaacagttgaagcttatcaagaattgtaggtgctcctagggattctgagtttcttgagaacaggatctctttacattcttaatgcctccagggcccggtgcagtgcttagccatcaaaggaacttgctgtttattgcatgtccattaataatgaaatcttcataacaactcagtgaagataggtatttgcattttgcaggtgaggaaaccaaagttcatgatgttggttgaatgaataaaatgctaacatacaaagctggtgtgataacaaccagttattaaccaagcctttacatttgaataatgcttgctttatagttaacaaaacacctgtgtcaatatgggtacccttgtctttagaacagaggtctattatagaaatggtcatttagatgatagtacattgttagaaacttagatttgcctctttaaattgttttttaattattatgg

SEQ ID NO: 3039 - DNA, 1204 bp, Homo sapiens
aggcaggagaatcgcttgacccgggaagcagaggttgcagtgagcagacatcacgccattgcactccagcctgggcaacagagcaaggctccgtctcaaaataagaataataatgactcttgggtttttgtcctgggcaactggaaggatggagttgccactaacagagatggggaagagaagcaggcttagttcattttctgtcatgataagtttaagattcctattagacatccaagtgatgtaaaatcagcagttggacatatatgggcctgaaatgtagggagctgattgaagatataaattttgaagacatcagtatatggttaattttaaggtcatagtttttgttttttgttttgttttgttttttgagatggagtttcgctcttgttgcccaggctggagtgcaatggcgcaatcttggcttacctcaacctccgcctcccgggttcaagcaattctcctgcctcagcctcctgagtagctgggattacaagcatgtgccaccacgcccggctaattttatatttttagtagaaacggggtttctctgtgttggccaggctggtctcgaactcctgacctcaggtgatccgcctgcctcagcctcccaaagtgctgggattacaggcgtgaaccaccgggcctggccaaggtcatggtttttaaagactaaaagatgactggaaaccaagtctcttaactctgtctctcacattaaataatcatgcctagcagagtttatcacaggaacaaagatggttcaatatttgaagtctaggagtacaattcaccacagtaacaacagagaataaccacatgatgatgtcagtaaatgcagaaagggtatttaagacatccatttattaactgaaaaaaattttagccaaccagtggcagaagataaaccccttaatctaatagagcatttgtcaaaactctcaacaaataacatacctaacagtgaaggtctcagagcattctcactaaactcaatcgcgagtcagagacacctgctaaactgctattgttgcactagaagtcctggccagtgcaataagatgagaaaaagaaataagtatgaagatggcattaaaagagactaaattgtggtgattgttagatagtgcttttatagggtatggtttaaactggtcttcacaatcctgctaaaacttactcacaggtgaggaaactgaag

SEQ ID NO: 3040 - DNA, 1099 bp, Homo sapiens
gagtccaccagcgccactccaggagggctgggggaggaggggctgcctcaggcagtccaaggtgctccctcccccgctggccaatgctaaggtcttcccggctcccagggtcaggacagagtcttctaaggctcaggctctcccaagccactgcttagtgacagttagcctttcccagcggcccaagctccaccggaactgggcctggtgctccaaccaaagggttggtgttgggacttgggaagagacttggtagccaagggcatggcaagcctgggggattcctgtgggccggcttgctcgaggagggagtgctgggcacagaggagcccttatggctgacagcttgagagcacttgttcctccagatctagccacttgaccaggccctagaatggaccagatgccccaggggtcatggcccccccccccccccccttgcagggacgagagttaacaatcaccagcttttcttccggcccagcctgtgtgcttggtctcacagtagaatttaggagagtgtggggctttgggattgtgccaacttggccaagctgagatatgcttaatccacctcaacgctggggcctctggggacaggtattgggtcaccttccaaggggtgctgaacttcagcaggctgtagataaggcagaggttagaggcagtggagtgggggaaccaagaaggcctagggaaaattgccaggcatattccctgtggaattttctttccgaagagtaggcccatttcccccttagaaacaagggttctgggggctgatgacagcttcccctgcaggtgccaggtggcgcatgatgccaaagagatccgtggctcttgcctgggggaggtagccaggtgctcgtgctggggacacagtccttggcctcctgcctaagcaggaagctagtttccagcaggcggctggtactaaccccccgccccacgggagcgacaggctggtgcaccggcagactggggggccgcaggcgggcactagcaggggtctgcagtccatagatgatgacatgaatctgttgctgtccttttgtctctaggccccagagacttcttgctattgaacatcctattggaa

SEQ ID NO: 3041 - DNA, 1180 bp, Homo sapiens
acttagggatgaacagactataactaggaaaggaggaaaggtatcagggatttttaagtccgtttagagagcaaaccatattgtgcctcttcatcttgacccaggctcttatagataggtcctaaacattgctgttcactagattatcttaacaaataatactcagctaaatatttgcatttaggaatactcctaaaacagatattgccaactagatacactgcctcaatcttgaccagacaagagaacagttaagttctctcagttgggtagtaacttgaataccagtctatttatcagttggtttcaacacagaggtttcaagtggaaagccattcatcttaaaagctgaacagaaaaattaaaaaaaaaaaaaacacattacaatctggccttttagaaaatgaagcagtagaaacaaaacctttattagtatggtattccagcagcacctttaaagcaatctttaccttagttttttgagttgttttacctttcatcccaatctgaaaagttttaataaatgctgagcttattcttagggtatgacctggcattatttccagtgactagtcaggcattatgcctgatgcatacgcctcccgtgcacccctatctagccttcagatgtcctccactgcaggtcaccccaggagatagcatcaataatatagtctcagtcttgtttataaagattctaagttgtctagtaaataagtctccctgaatcttaaataattttggagaattagaattctccatcctattaaacagaaagtaaagccaaatagcctggagttgtttgtcctacttgttccataacccctatgctcaagatactgaagctatctgtggtatttcatgtaacatttctaagaataagagctggcaaatgggaaacttggggtggagagagcatacttattgggctgtgaaggcatacggatgtacatgttttagagcttatctcagatttaaatagccaaaggaagacctcattgccttccaggtgaaggtgcaaagtcatacatattaatgacctgacagttaacattctgttgtttattattgcctttctccaccttagagagccataaataactctctggtgaagtgatttgctataatgggggtgaggagtggggagacttctctggtcattacactgctatttatttct

SEQ ID NO: 3042 - DNA, 1287 bp, Homo sapiens
gatcacgaggtcaagagatcgagaccatccttgtcaacatggtgaaaccctgtctctactaaaaatataaaaattagctgggcctggtagcgtgcgcctgtagtcccagctactcaggaggctgaggcagcagaatcgcttgaacccgggaagcagaggttgtagtgagctgagatcacgccactgcactccagcctgggcgacagagtgagactccgtctcaaaaaataaaaaatagttgtgtggcgacatgaaactgctcacccacaatctgctgagctcgcatgtgcgggggatggggtcccgtggcttccccctgtgcctccaggccaccgaggtccgtatctgccctgtggagttcaacccccaatttatgtggcatcatacgtggcacgtatcatacgtggtacatatgatacctaaggtggagtggtcggcgttcctggaggcggccgatagcttgcgcctgatccagatgcctaaagggccagttgagggatatgaggagaatgaagagtttctgaggaccatgcaccacctgctgctggaggtggaagtgatagagggcaccctgcagtgcccggaatctggacgtatgttccccatcagccgcgggatccccaacatgctgctgagtgaagaggaaactgagagttgattgtgccaggcgccagtttttcttgttatgattgtgtgtatttttgttgacatataccgtttccgaattctgccgtgtgtatccccaacccttgacccaatgacaccaaacacacagtgttcttgagctcgatattatatatttttttctcattaaaggttcaaaaccaaaataaataaataaataaataaaaataaaaataaaaaataaataaataaatgggaggctgggcgcggtggctaacacctgtaatcgcagcactttgggaggccgaggcaagtggatcacgaggtcaggagatcaacaccatcctggctaacacagtgaaaccccgtctctactaaaaatacaaaaaattagccgggcatggtggtgggcgtctgtagtcccagctactcgggaggctgaggcaggagaatggcgtgaacccaggaggcggagcttgcagtgagccgagatcgtgccactgcaatccagcctgggcaacagagcgaaactctgtctcaaaaaaataaataaataaaataagtaaataaataaataaaggagggagggaggaaaagagaaagtagtagtccaaatatttgcaaagccaagaaaaaagaggtatatttatatgtttatactat

SEQ ID NO: 3043 - DNA, 1200 bp, Homo sapiens
cccagggcgcggctttttctcgcgtttacgagctccacctacacgggaacacatggccacccaagcccgtcgctgcgccaagacctccagctcaacacacccgacaagcgctgtgcagagaaaccgcagcgcagtccagcgggagaccccgggaggggaaggaggtgctgggctctgtaagggtgtcccggggagcggggagcgggaggcgggaggcgggggtcggagggggggcgctgcgcctgcgcagtcgctaggtagcgtctcccccggggcgtgctcgtaacgccgcgcaccctatcaggcggccacagggagcgcgcccgcggcctcgccctttctcgcccctcccttctcccctctgggtccagcctcagactgaggcttggagacaggagcattccactcgccacttcggcgcgcccccatgccctcttgtgcgcgtgcgcagaggcggaccgcaaggctagggcgtgagggaagggcgggcgtacgcccttgcgtgcgtctcaggcagcgcgcacgccggcgtgagagggcacggggaaaaggtggctctggccggggtggctcggtttcctggggctatgtaactgagctcgtcgacttaggggtccttcttcgctgccctcgccgcgtgctagcagggagtttccgctcgggagagagactgtcctcacgcccgctgcgcctcctcgacggcagagcaggcttgctcgcccgtgggagcgtcccggccgagaagccctgaggggggaggggaggccattttgtcccgaccgactccccggaaccgggcggacgggctgggagaggctgcggagccgcggtcgccgccctcggaggcactggacgccgccactgtcggggcttcctcaaagctgttcgtaggtcgcccgcgccgtctcgagcctttttcccacgcttccccggtcctccggcctgagaacgcccgagtgaggagttggccgtagtgagagggaccgatcccttggggccgccggcggcgagagcccgagccgctcctcccaatggcgaagaagacgtacgacctgcttttcaagctgctcctgatcggggattccggagtggggaagacctgcgtcctttttcgtttttcggatgatgccttcaatactacctttatttccaccataggtaagacctgtgggaggacggtgtacggtctcggtagctgca

SEQ ID NO: 3044 - DNA, 1204 bp, Homo sapiens
attttatctggttgtgtgtgatgtgtgtgtatgcctatttaatatgtacacatatattcactacatatgtatgtatgatatattcatatatacatgcagtctgcttgattatcagcaaaatggtcagcctttatcagatagtttcttcatgtggagttcatctgcatgtggcccttactctgaagcctcttcctgatctggagccacagtctgtctgtcttccagttcatctcagtcctcgagaaaggccctttaaatatgtcactttcccattttcctttaaccatgggttgtgtgagccagaaagagctttgagaaagatggctgcttccaccagggtggaggcttctaggtctgcatgatgatggggcccgtttctggccagagggtggctctgggagcagttgtgctgcgggcttgctgggggagaactctaactgttgcagaaacagagcttcatggcttgcttaaattacttagctggaatattttaaagtgtcagataatgtgatgtacaaagagagtatgccgatgcatttcattgtttttgcattatctgtatcagtgtttcccattgctagcccgaataatcaagaccagactgtttcttgtcactggattctggaagccttgccctttcaactggatttatgtttgtttctgctgctgtgaaaccccaaagtaatgcagtaggttttaattgaaaattgtttaattctattattgataattatttattgtaataaaagtaaaagagtaatttttaaatccttttaattgttttcagattgtcttctttgttttccttggtaagtgcaaaaggggagggagctatggggagaaaactaatgtccagccacttgtctcagagaatcattgattattttaaagcaaaacactgaaaaggttttgttctgtttttagagagatcagccgcttgctcctgggcgttctgtgatcctgtgacttgtttcaaaaggcagaatacgaggcaggtggcagtaacagcttttcatagtatactgctcctgactcgcccagaactgggtggtggcagtctctatagtctaataatgactgggtcacgcctaagttagtttgtaaggtggtttcttcctcagaagcattttcccatagaaagagtgttaacatatggtattaattttccagacgaatcccataaaaacctgttagaccatactta

SEQ ID NO: 3045 - DNA, 1273 bp, Homo sapiens
cggggggttcggcacagcccgataatgcgccgcgccgaagcctgcagcaccccgcggtcgccgtctctcttgcactggtcaggacgaatagagcctgacaaaacctgagttaattggccgagcgaatgtcgttcgcgtcaggagagcacgtccggagaagccaagggaaatgtggagcaggagcagccaaagtggcccatcggctctcgagcagggtttgcgcgtcgcggtcgcaaagcccctgtgagtgcaggtaccgcggcacaagcgctgccccggagctccaggaggcggcggcgggctcggcgttcgcggtccaggagaaaccaccgcggggtgttgggaacattttgttaaaaagccgggaagctcagggccggtgtggcctccgttctggcctgagaacccggactttgggcagcttcttttccttgcctttgggtctccggctttctcagctctgtgaggtcccatgggtctcctgccctggcaggttccttcagctggagaaagcgggggtcatggctggatgaggttgcggtaagcattagagggctatcagcagcatcttatcgcagcggagccttcgatagctcagttggtagagcggaggactgtagtggatagggcgtggcaatccttaggtcgctggttcgattccggctcgaaggacttcgtctgtaatttttaacctcaatttaattcaattatcccataaggggaaaggcttggaggcctcctgtgacttagcattcgtactgccgtcagtccatagggaacaccgtagtatgtagtatacggtaacgctctttctgcgttcaatgtacatgtggtaacgtgttttagaatgttttctgcttaagcacacgattatatgcttgatttttagaatcttgcacatggatgccactgtattgtactctgctaaataaatgtcctgaactgtggttgatccactggtcagtgaacagtgcagtgaacctgtaaggcaaagggaaagaactaagcagcaggcgggggattagctcaaatggtagagcgctcgcttagcatgcgagaggtagcgggatcgatgcccgcatcctccactcagcttttgcgtccgtcacactacagaacacaaaacgggagggattcccggcgcagtgggctacgtgtttcattttagagacacaagactgttaagcgataaggagtttcacacgatgtctttttatttcgcagttgagtcccagtttctgccgctttatctttcccgcctcccggcaggcag

SEQ ID NO: 3046 - DNA, 1191 bp, Homo sapiens
agcgggcggaggagaggcttttaaggtaaagtgaaaactgcacacagctgcagagtcgccaggaacgcttcagctccgcctcagagcagctccaggggtcttatactggccttttccgggaggtcttgcctgccctctagcagcggcgagagtggtgcatttgggtttaggctaagttccttccctctcctgagcttcaccctgttctgtaaaatagaggtaataatcccagtcctgctcactgtgtagatttgtgaggcccaaatgagagaaaaaagactcgagaaacccttgtgaactagaacgtgcagaaagcaaaggggtaagacatcagactcttccctaaacgtgctctctgggcacccctgaacttgctcatccgggttccccctcccacagcactttctgcagctagagctgattaatgggcgcttgagtgcctccttgctgcactcccatgacacagagacacgggccaccatgaacttggcactggctggtgacatccttgctgcagggcaggatgcccactgtcagctcctgcgcttccaggcacatcaacagcagggcaacaaggcagagaaggccggtgaggagctccctctctacccccttggggaaagggttgaacgagtaaggtcactcttggtgtctctaaagaagtgggtctggaagtagggttttggtagcaagctagaagttgtatgggcacctgccatggagagaggggccagtactccttactgtagaagcctggaacctggccaagtgtttgtgttacaggttccaaggagcaggggcctcgacaaaggaagggagcagccccagcagagaagaaatgtggagcggaaacccagcacgaggggctagaactcagggtagagaatttgcaggcggtgcagacagactttagctccgatccactgcagaaagttgtgtgcttcaaccacgataataccctgcttgccactggaggaacagatggctacgtccgtgtctggaaggtgtgggtttgcagggttagggagggtgaatgtcagtagcaacaggatcaaaattgtgagaagttgaacgtggcatctgggaaacttgtgaatgaagcttgcattgaggggccattagaaggggtggcgtgggcatcagtcacagtgtacttgctggacacctgagttaaccatggtggttgtttgg

SEQ ID NO: 3047 - DNA, 1098 bp, Homo sapiens
agggagctcagtgacctcgaggtgggctgggacctggtgggttacccggaggctggatgatgcttgggggaaagtgtgaacaactcagctaagctccctgcctcctgtagtctgctcgccaattctgccagaccgtggggtacccctgtgtggtgcgcccctcctatgtgctgagcggtgctgctatgaatgtggcctacacggatggagacctggagcgcttcctgagcagcgcagcagccgtctccaaagagcatcccgtggtcatctccaagttcatccaggaggctaaggtgggaggctgcagacagtgaagtctctgagggcatgctgccagccctggaggagacttccttctctggtccagcagaatcataggcaccagggctgggaacagtgggctatgtggggctcgttaaaggaagagacaatcctagagtaagtgagagaagaaagtggccctatgtcccactgtctgtgtccccccgctaggagattgacgtggatgccgtggcctctgatggtgtggtggcagccatcgccatctctgagcatgtggagaatgcaggtgtgcattcaggtgatgcgacgctggtgacccccccacaagatatcactgccaaaaccctggagcggatcaaagccattgtgcatgctgtgggccaggagctacaggtcacaggacccttcaatctgcagctcattgccaaggtaataaggctaaaggaaagaactaaagggccacagctcttgcatgttctgtgctggccacagtgccatgaagccctgcactgtctcctgccttcatccaagtaggcagggaagctggagggaaagggctgtagctagagctcatggtgttggggcttatgacagtcagtgaccctgaaccctgctcagtctgatcccccagagctgaggacggagaggaagagtctaggcctatagatagtgtcagcaaggccaacctgcagaaggcctgaccagtcttctctgccccaggatgaccagctgaaagttattgaatgcaacgtacgtgtctctcgctccttccccttcgtttccaagacactgggtgtggacctagtagccttggcc

SEQ ID NO: 3048 - DNA, 1136 bp, Homo sapiens
ccagtgcctgcgctgccaggaacccccccaagcctgagccatggccctgccctcaccccactgccaggccgaggctcagccccagactctcagcatctgctgccctgatcacagagacgggaccgagccaggtccataccccttcctctctccctcctaccacctgccagtttccccagcctcagccccagccccagccccagtgggcaagaccaaagtgtggcggggagtggggtgggagtcaggggaatagatgtgactagttcaggggcggggactcccaggcctcagtgtggcagggtgtgttgaaggcctgtggtgccatctccccatggttcatgtggagccacgaacatcctttccctgcagtccatttgtctgtgtggcaggctggctggctgggggcatctgcctgtctatgtgctgttggtgtgcctatgcctgggggaggtcagtaggggccccctccccacatggccctcgctctgtctatgcaggggccccaaagcccgcactttgtccgtgtgtcttagccctgtggttttgtctgtgtgtgtgtgtgtgtgtgtgtgtgtgtgtgtgtgtgtgttcttggtgctgtggcctgtgtgtctctgtgcctatgtggctgtgctatggtttctatgagtctgctccatccatgtgtctgtttgggggtctatctctccatccctctgttggtgctgtgcccttggctatccctgaaagagggaggactccgctgcagctccaccaataaacttgtgtctcactgcatctttcagcctgtgtgctgactcctcaggagggggaagtcaaataggtcacttgagaacaacagaatccctcctgtcccttcccagcctctggagtgacctcccacagacctcctgtcccttcccagcccctccaccctcagatggagggtaaaagccaccagtctctttactccccttcccctggctcacagcatgcctgggtccttggctcagggacagtcccatgtgccctgggcttggttgcaggagaatgctggaaggtaaggagccaaggaatccctgggagtcagtcgttctcagaggtccctgcatgccagtgggcctcaggctggctggagggaggctgggtccctttga

SEQ ID NO: 3049 - DNA, 1211 bp, Homo sapiens
ccagtgaagtagagaaaggggaaggtcagccctgccccagcgcgctctgcgtaaccgggacttcctccgcgcggcaaagccggggaacctccctggcgcctgcgccaccgtggcgagactcggcgccgtggacgtggagagagggcgacgcacctgcgcgaagacggcagcgggagaagccgctccagtgcggttgcgcggcggcccaggcgtcgaggggagcctcggcggggagcgcaccgcgcgcctgcgcggagagctgcgtgacgcggcggcgcgcaagggacgtgcggagtgagtggcgctgcgggtggggccgtcggcggcgctggtgagctttgcggagctgggcggtgccgaggaggaggaggtggcggcctgggtctgacgcggccctgttcgagggggcctctcttgtttatttatttattttccgtgggtgcctccgagtgtgcgcgcgctctcgctacccggcggggagggggtggggggagggcccgggaaaagggggagttggagccggggtcgaaacgccgcgtgacttgtaggtgagagaacgccgagccgtcgccgcagcctccgccgccgagaagcccttgttcccgctgctgggaaggagagtctgtgccgacaagatggcggacggggagctgaacgtggacagcctcatcacccggctgctggagggtgagtgcgcgcctggccgcgggacagagggaggtcgggcaccgccgccgacccctgcgtccccgtctgccgccggaacgcgaggggacccctttcccgccccgagacgagtctctgggagcgcggcgcggcggacgaaccgaggagggggcgaggaggctctgggcgcgggggagcggcctctgggagcgcggtcaggggagatcgggggagagggggccgttcccgcggaccctcgggggccaggcccgccggccgaaggctgtgcggagcgggtctgcgggagacagcctttcggaaaggccgccgggctccgcgcgccgtggtgctcgcctccggtgacccgaggatggggagaggatgcctgccactgggctttgtgcgtccgtggaatcactgttcttctctgttctctttgtgcattgcccttggctgcctccgattgtcgttccgggagtgaattttacgtatatatatataaacctgtccttaacaggactgcttcgtctgctctgcatttttac

SEQ ID NO: 3050 - DNA, 1209 bp, Homo sapiens
cgtggctaattttttgtattttttagtagagacagggtttcaccgtgttagctatgatggtctcgatctcctggcctcgtgatctgcctgcctcggcctcccaaagtgttgggattacaggcgtgagccaccgcgcccagccgaaacaaggtttttttaaaatttaaattttattatatacaccaactatgtatccacaaaaaagaaagttaccttttaaaaaacaaaacagattttgacacagggtctctctctgtcgcccaggctggactgcagtgacgccatcatagctcattgcagccttgacctcccaggctcaagcgatgtctcacctcagcctcctgagtagctgggagtataggcgcttgccaccaggcctagctcaaaaaagattttcttaataaaaaagtttttactatgtgatgattatggtaattttgatttctagcctacatccagcatttagtccacttactgtatttgactgtggagatttagtattatatttttggaggaggaaaaagctttcactcagggcttacggaatatttggtgctgtgatgatgccttaatattgtggtttcgactcactgagagtaaaatgaggacctacaattccttggctgtgtctgagcacccaaagtatgccttttaaaatggatagaattaagtgaatctttaattcaagaatgtaagaaacaaaggtgcggagtggtagggtcatgggagttagaaggaacatctaaattttcagtattttcagatggatttttttaaaaagtgggagaattatagcacaaataaccttatttgcttagaattgaattgaacagttacttcatcgtggagctctcctttccgatatgtatcacatatggcttgttttgataatatatactattaatttttgtccctgctttgaatctgctctcctaactgagatttaactttctctagcatttcacaggacatgcaacgccagtttcgtcactgatgttcactaccatcagacctcctaatgagagccagccctttgatggaattacaggtctttatttcttatctggagcagtacatgaccggttacttaatgtctggtatgtagttcttttggatttgggaggtagcattgaaagaatctgtcagagcttatgtagttaatgtaaattatgaatatgggactttatttgttgtatctaatgttggatt

SEQ ID NO: 3051 - DNA, 1209 bp, Homo sapiens; identical to SEQ ID NO: 3050

SEQ ID NO: 3052 - DNA, 1181 bp, Homo sapiens
catggctccttgccatatgtgaattccatccctctctgtttgcagccattgttgactatttttttgcatctttcccgatattgattaattacatgggcatatagaattatgtatcactttaaatctttattggtttgctgcatctgactcccccgatcctatttaatatcgtgtcaggacatacagatgcattttgttaatcaacagtgctacctttgacttgcttatggaaaggacaataggagagttaagagtagaaccatttactattttgagcagactgtttcttaaaaggatgatgaactgatacgttttctttaaaacctgttacgtttaaaaattctgttgaactttaaaaaataaatgtgaaaaattcaagcagttcatagctgaggaaagtaaaccttggtacccaatgtcttcagaattaccatttttcttaactgccgtcagtctgagtggtgatcgtggttaacaattgagtgtggaagtcttccatactttttaatattttataaaaatgcacaagtagtcatttatttttcattttgttcttattcccagttgctttgtttgacactcttttttttttctttcctctcatcttcccctttaaaaaaaatatattttcaggctttaaactccagagaacctcatatgtgtttagtaagagatatttcaaactgctgggcccccaaagtagaaacagctataacaaaggtgagcacattacaaatttgaagttttaagaaaaagaatatttctttgggtgaatggaactgttacttagtattatgattaaactgagttttttattctttaatatctttattctcttgtcttataaattttgtgggattatggttttagatgtcaagattgtactcctgatttgttgagtgaatgaatgaatagaagactagcagttgaagaccttggatgtggttcttccctgcccaccatgcatgatcatctgggccaggaagaatgtagggataaatatcaatatcagatttatcagtagatagtttttatcaatctcagtacttaaaagagcattactttgctgagaggaatgctgtatttcagggtgtaataaaaccgtcatggggctagaatataataccacaaaagcataggagcatcatcatggtgctccattttgcatataacttggtgtc

SEQ ID NO: 3053 - DNA, 1205 bp, Homo sapiens
tatatcttaaattgatatcaagttaattatattgcatttttccaatagaggagccctttaaaagctgttttctcattgaggatacttaaggactaaggtatgatttcctttttcacactttggctattcctgttgaacaggtgaggacaccagtgatgaattctgaagcaaaagttctggtgcctgggattcctggtcatcatgcagctatcaagcccgctcctccacaaaccgagcaagtagagagcaagaggaagtcagggggaaatgaggtaatgcaactgctttgaccatatatttgagtttgtgatttaaaattactgggaaattctaacaagtgtgttggatagagccaaagttaaatctttagaaatttactgagatttctcctgttatgctctcttttatcttcaccatcatagatttcataattctagattgtcatctttgtttaacagagaagatggaaccttcagtaactaaagagggtgctgttttggccattagttagtagttagctgggtaacataaaatggaataagtcaagccaggacttgctgtgatgactatcattgggtttcgcatgttgctgagttccagtgatgcctcttttctcttggctgtctgagcaatcctggctaacctagtgccagttggtctctaaaagtgatagtcattataactgcctaagtgtttatgatcttcattttttcctcagttcccaaaatcctttgtggttactgtacatgtctgtgcagagttgttttttatcttccattcacattcttccctcttacataaggaatctggaattttaactgtttcattcttacagaaatactaggtttctttagctgattttactttaatttgtattctttttttttctttgtccaatttttgaaggataatttagctgattttaaatgcgtttattgggtggtggggtggggataacatagcttcataaaacatgttcataacatgttcataaaagttattcctcagttacatgatagctgactttaaaaataaagcgccaactttctttggcttggcctagtttcaactttttaatttccccatgtcctttttaatcttttttgtgttaggataaaccaagcacatctgtttgctatgttagtcataaaacaaatttctttttgataaccaagaggctgacagaacatgttagacttgattta

SEQ ID NO: 3054 - DNA, 1208 bp, Homo sapiens
atgaggaaagtaagtcacaaggggtgacatgtgctgtgctcccagctggggatttgaacccaggtagtctagtatcagcatgtgtgcccttaaccgtaaccctataacggttagaagagcttcagggaccttcgtcaggacatacatcttgtaaataattggtttgggagtaaaatgcatgctgagtcaccagtgaatcttctgtgttctcatgttactttgggcatatcttcatcaaaacattgcagcagtctcttacaagttttgtttgtttcctagtcatgaggactgggattctgcttttcatgtttgattactcagagtacatagtttggcatattttaggcacggtaaatattgatccaatctgattcctagttcagtggttttatgctgtaacagctttttcctcctcctttacgttgtcaagccactttctcatggtttcatcttttccttcttgctttgtttctggagcacacgttttttacttttttttgattgccttctatttggttttctttaaggtggtgcatttaaaaagcagccccctcttcttcaaaaaaaaaaaaatagggctgtctctaaatgaactgctatctcaatccagctgtcttcctgtcatcttctgattgtctcattcatcatcatcaaatactattaagtgtcttttagcacttatgctgtgctaggcattctataagcgaataaaacagacatggtccctgattttgaggcgtttctaatctgaaccagctttggaactcttgaaagataccactgatcttcaagatggaagaattttaaactagggactgcttgaggacagtcttaataaggtagtgtccagtcacaatcacaccttgcatcttcttccttctcaggactatggctggcctttccccccacccctttctgtttgtaaaatgtgcttcctatcccagaatctttgcacatgttattttttctgcttggatggctttctacacccgcctactattgcctaactttcacttatttaatacctttcttctgctaatatatgaatcagtcaaaacttctttagagaaactctaggaaaactcactgactaggttaatcacatacacacacagacacacacacacacacacacacacacacacactgctcaagtaatcttcattagcataatattcactttcttagttcttactattattaggcac

SEQ ID NO: 3055 - DNA, 1196 bp, Homo sapiens
tctctagaatttgtttccagtagaagactatctttggctgctgctgaattatttttctaaagcaataatgccttaactctttctagttacaaagccatctgaaaaatgttagggatcctctctgcagaaaaatactttatacatagcagatagatttagggggctgaacccttgaatacatttcatgagtcattgtgggtaaactaccctttgctatgtgaagaaccgattgtaagagggaaaccgatttaaatattttcatcattttgcttgtatctattaaaagaaaaaataatatgaatgacagatatgaaactagcccacttgtcccatagaactgattttataatttcttttgaataaacgtagaaattgaccctctcgggcttaaaacctgagacagttactgttgtcttatctgagttcctttttcaggataccaaccatcaggcctcacagatagtatcaagagaactgaaacttaccaaatcaccgtatctggacaatgagacaccagccccttcacccatcatgattgcccgacccaaccacctgctgcctgttgaccaactcctcttccttaccactccctaattccgttttttgttttgttttgttctgtgtgtgtgtgtgtgtgtgtatgtgtgtgtgtgtgtgtgtgtgtagttacatttctttcctgcttataaaatcctgattctagttgggcaagaaggtgaatttgagactgatctcccgtctcctttgctggacacccagttaaagcctttttctctgtcaatactcatctcagtgattggctttctgtgctgcaagcagcagggacctagaccaaacccccagtgctttggtaacaaatgcctctgttttatttgacaaaatggtggtgtgttcattcagtttgcattaatctgtaactttaaaaaagtcttttataaaagataatgatgtaactatagattttgtaaagaatatgagcagtttgtgttttaaagatctgattgtaggctgagtgcggtggtcaacatggtgaaaccctgtctctatcaaaaaatacaaaaaaaaaaattagttgggcatggtgccccacgcctgtggtcccagctatttgggaggctcaggtgggaggatcagttgaacccaggaggtggaggttgcagtgagccgagatcataccactgccctccaacctgggt

SEQ ID NO: 3056 - DNA, 1099 bp, Homo sapiens
attatcgcagtctttttggattgttttccactctaattctgtattcaaagtattatttacttttctcaatcttttgtctgcttctgctcacaatgataaccatgaggaattatataaatctgaagaattttcaaaaaatcagtgtgatactacattataagcaatataattttagggtttttaatacatcctaattcttcagaaatgtgaaaccatatatattacttcttgaattgttgttgtaatcagaactttctcttcttcaaccggaaaagacaattgaatattgttattcactgagatgtttgcatattttgtcatgagaaaatataatttagacttaataaatactaatactttgggtgcagtggtgcttgtctgtaattccagcactttgggaggcggaggtgggcacatggcttgagcccagaagttcaagactagcctgggcaatgtggcaaaactctgtctctactaaaaatagaaaaattagcggtgtgtggtgtcgggtgcttgttgtcccagctacttgggaggctggggtgggatgattgcttgagcctgggtggttgagactgcagtgagccgagattatggcactgcactccagcctaggtgacagagtgagaacctgtctcaaacaaacaaacaaacccaaaaaacaataagaccaataaactgacaacaatatcctcaaggaggttataacaaaataacatttttattgttattttaaaagtaaaacatgtatattgtggaacatttaggaaaatagaaacttaaaagccagcaaaccaaattcctatttataattcccccttttaaatagtatcaaataaactactgccacattacattagggtccctaatattgacccttagatagtacttagtgtcttttctttgtagcattagttggactcattacctatgtcagttatttattactaagtaacaaaacctcttacttaaaattacctatattagttatcttttactaagtaaaagtaacttagtaaaacttagatttaaactgtgacttaaaatcacagctgtttattgcctaaaatttgggggccaggaattggggcagagaaca

SEQ ID NO: 3057 - DNA, 1220 bp, Homo sapiens
catacctgtgtagcttgcagtcagatcaagaaactgaatactgccagcatctcagaagccatccatgtgaccccttcaagtcattattctttctggggtaatgatcatcccattgtcaatacattttttaaacatgttttaaaattgagttcataaccagatttaagccatacaaaaatttcagtctcattaaactattttgttggctaattaatttgcttgcttatctcatttattttatttactacaaatgtcctttgactgtgaaatgaaaattaaacttaaaaagatgagttttcattatggaacaatatgtttaaattaacacacctaggaaatatatttctaaactttggatttcttttcccttacagaccaccaaatcccattgaatttctagcatcttatcttttaaaaaacaaggcacagtttgaagatcgaaactgacttaatgggaagaacagaaaaatttagttgctactgtagatttacatgattaagaggcagctttaattgccatgatcattccctctttttggatgtataagaaccttccggacaacagaacctatttctggaattgcagaagataacatatttcccttattttgatttaatcaccataaaccatacctatttaatgagtgtattctgtgcaatttttttctcagattgtctttaactttgtttttaaaatgaccttcaaaataaactgtcaaaacaccattattttaaagtagtttttgttctgtatgacaaatattttacatgattgaattgttttatgaatttctctttttcttctgtcttcaaatgctgcagagttttacaacagagagaaaatacagcagtcaagtataatttaaaaaattcagccaatttttctcagcattgtttctggacctttctgagggtgggatctgggcatcttcaatggcttaacaagtatcacaggtgattctaatgtacattaaagttggagtactaataaaagcattgcaaaggggatacaatatcttctaatgttatcaacatttatagtaatagctgtaatttattgcattcctactaagtttcaggcatagtacatttttacttaaatgatctctgatataagcagctctgcaaagtagatattattattcccattttgcagatgaggaaacagacttggagaggttaagtgacatgctcaagacaacactgctggtaagtttttg

SEQ ID NO: 3058 - DNA, 1122 bp, Homo sapiens
gtggtagctgaagccacttctgtggatgagttcagcatggagacatgagaaccgttggcagtttagaggccagcagtaggaaaggagtctgcagatgagacgatgaggtatgaccagaggcagaaaaaccagggaagagatgttgccaggaaaaccaaccaaaaggagaatttaagggagggtgtggtcaagaagtactacactgcggctaagccttagcataagaagacaatgaagagagcttagcgggtgtaatgacttttgccagagtagtttgaatagagtatgagggcaggaagtagaaggggagttagacagagcttgatttgggtggtctgaagagaggatcaaatagaaccagcaaattctacttggctgtgagggatgggagagatggccagtagagggttgctaaattttgtttgtttgttagtgtttggttttggccagaagacacctcacgtttatctatgtagaggaaatacaaggggagttacaagctagaggaaggagaagtggtaagacgcatgaactctagacagttacaccaaggaactggtgaagagagaagaaaggcatggtgctgtttctgtgtgtggaggtgggtgggggttggggggtgtagataccttcacatggtaggtcaagggaaattagttcactctgggcttcccttcatttgtcttaatttgctcacactttagtaaattacaattgattaattcctccttttacaacctaccaacaacatccttattcctattccttggtctcttttaactgtctctttctttttttctttcttttttttttttttgagatggaatttctctctgctgcccttttgcctaggctggagtgcagtggcagaatctcggctcactgctcactacaacctccgcctcccgggttcaagggattctcctgcctcagcctcccaagtagctgagactacaggcacgcaccaccacacccagctaatttttttgtatttttattagagacagcgtttcaccatattgttcaggctgatcccgaactcctgacctcaggtgatgcactcgccttggcctcccaaagtgctgggattacaggtgtgagccaccatgcccagccttcctc

SEQ ID NO: 3059 - DNA, 1173 bp, Homo sapiens
taagagaaacaatgataaatttctgtattgtaagtatgtcccaggcattatttaggtcatactaacactaaaaatgattgtcagaaattcaaatgtaactggtcatcctgtattttatctggcaaccctgcactggtttaactctggtttctatagtaatcaatttaataaataactactcccatgtgggttgactttctttgtgcaacggataacccaaaatgctgaggtggatatgaaaacaacaacacaaggagcatacagctgaaaagtgtataatctagtagcagatatgacgtgtatgaatgtagaatgtagtcaattgtgctactcacattcgtctgagtcaaaagactgagtcaaaagaccaagaaacaattacagaggcatatgccatgtgctataaggaattacaatgggatatgggatgggggaagaggcaagcagcattcctgaccaagaagactaggaatggtactatgaacatctgagagggccctgaagcagaatttcagtgaagggaatatgaccaatggatggtggtagaaaggtgcagagaatgttccagaaacattaagtagacagtttgactggggtatgagctgtgggcagtaaagggaaagaaatatggagggcagtgaaactggagagacagacccgggtccatccgaaaggccttaaataccaaggtacagagactgaactctgttctacaagcaacttgcctctgaatagaggaaagtgagagcatcgagagatccaaaagagatgaaaggagaaaaggctcgtaccaaacatctcaatgcaagtgcacagcagttcatctaatgttgctgctttcccaaggccacttgatcccatggttatttagccgttgtcaaaaaactagagacattttcagcatcagatagaccatctccataatcatgcaagtcagcgatgttagtgcctagtggtgacctgtccttagttgtacttcaagaaaactctaaaaaaaaagaaaaaagagagaaagttattagactagagttcagaccccactagagcatcactttcctacctgaaaagataatgacttccatagactgtatctttgtacaagaaaagtatcatagtgactgagattacatcaaccttttatgatgccaaaatacctgctaagctgttctcggg

SEQ ID NO: 3060 - DNA, 1178 bp, Homo sapiens
agcaaattaatattaggtaaccaaattagaaatagcctataatgtataatttaactgcttgaattttttagtaatcatgggtgcttgtaagcttattgtactattaagacttggtgtcatataaaactgatattctctaaagtctgccacttattttgtaaaaggggtaacagaatctctgaacctctataaaatgtagaagtaatgccaccatctccactggaactggcacacagaaatttatgtgtgcctagaaatacatcaagataatagaaccataagaatacttggatcaactcgctggctaaagacgatttaaagagctacaaaaaatatattaaaaaattcttaagtcatagaagaaggctgtgatgaataggttacagcagaccaaagttgctactaaatacaatgagaaaagccagggaaaatatatgttaaggtctattcgaagtcatccagagctaccaggtaaacaacatcaagacaccaagatcttagagaagaggaagccattggaagaagagtccaccattttgtcatagtttaccaaataacagaattaccaagtcttagtgttaggtgggagactgtgaaaccaggcagagtgaagccaccaagagccagagaagcgagcagctttggcagcctgacagtattggaatgcaagagtcccaaggcaggcaggatttgagaggccaaaatgtgggagaaaaggtaggtcctgagaaacgagccaaatgtgtgtttttttttttcttcttttttttgcttgtgtgtttgtttttgtttcttttcctagtagcgtttgttgaattcctaaggtgcttggggaaagagacaaataaactaaaagcatacttgaaaatcaatacagttataaagcgtgacatggtaaaggggagacaaaaatgggagttcttcaccagcaaaggagcagggccttctgtaaaccctcctcaggctctcatttgtgatctctgagagctaaactaaggagctgacaaatagaggtccacaaagctttcccaaaaccataccacatcctgaaatcaactcattccttggttgaataaactaatctgctcctgcttaggttgcctaaaaaaggatagaatcaattctacctgaaagaaacaaatattacttaaccactctaaatttttcatgcacaatat

SEQ ID NO: 3061 - DNA, 1220 bp, Homo sapiens
ctccagtttctgaagtagccatgatttgtttgtgttttaaggtacactgttttcaaagaacagcctttaaagctcttttgaattcaaagatctttcagttactcaaggaatgggtccagttttcagattctccacgccatgggtgcatcttcccttcagctttcttcattttggtcattgctccagatgttcattgtttaacacaagtgggtagggagacggagaagaagggaatttcaggctcatattttggtgtcatgggcagatcttgggtgaggttttcattgttagttaaactaagtttgaaggtttacactgaatttctttccctaccgtcctctttggctacttaaatagatcatcaggactgtttgttcttctgttgaaagtgccccacactgccctgggcataagctaaattctttctctcccttttagaagagaagccagattgctccaaggcccgctgtgaagtccagttctctccacgttgtcctgaagattctgttctgatcgagggttatgctcctcctggggagtgctgtcccttacccagccgctgcgtgtgcaaccccgcaggctgtctgcgcaaagtctgccagccgggaaacctgaacatactagtgtcaaaagcctcagggaagccgggagagtgctgtgacctctatgagtgcaaaccaggtatgcacgagctctgtctcagcagccttgttcctttgcatcagagggtagcagatccctcctcagccacccctggcctctcctttcacacgaagatgggccttctcaccggtgtcctgtgaatctgccactttgggctaatggcagcttgacttctggccttctagtcagagaaccagagtgatcatccactggtacataagcgccttcggagagcgagcgtgtcttttcctcttttcttctttttttccttcaaagtatgcttgactggggaggtagggttaaaatttatggtactatggcaatctgcttcatttccccagagaaggtcagagaccttatttgcagctatatctgccactttgaattattacatttaaaaacaatcatcatacgtaaaacagaaagttatttttagatgaatacatgcatcaaaacgccagaagtttcataatgcaacactcagccccaatctttctctttgccaattcccccgcatctgccctctttactttatagcatgtgccaagtcatctttg

SEQ ID NO: 3062 - DNA, 1198 bp, Homo sapiens
caacatttgatgtactgttgtatcccagctgtttcttgctttatattatttctaacatccttgctcttgtggcagcatttccgatgtggtctgtgaacacttctgagttatagcgatttcctctttgcaagtttctaatcatcggccagttgtttttttgtttgggtttttctttttctttctttcttttttttttttaactgctagataaacgctccaagcaaagtgatcctttgtccgtctcttgaactattctatcaatcagaaatgcctctggctaactgtcactatccatgtaaccactgctggtttaattctttctctgtcttcattgtagctcttaaatatctcatccccacctctttccttacacagaaaatttgaggaatattgcagttctatagcattaactggagtaacatgtcgacactaggactgggtttgtggaagcaaggagactttggacatttgtcaagagctagtatttcatttagggactccaaaagcaagtaaatataacaataaacggtgcctctctgtttgcccctttcagttttcggcgtggactgcaggactgtggaatgccctcctgttcagcagaccgcgtgtcccccggacagctatgaaactcaagtcagactaactgcagatggttgctgtactttgccaacaaggttagtttgccattagtttgtcaagttttctcctcatttgttagcatcatctaaggtacattttgagcatgcagtttgttttcccatgagaaacctagtcctttcctgtttctctggaagaaatcactgaactgtttgcattacttggtatttatatgtatctttcctcagatcaaaaccaggtgtcatcaggttaagtcgttaaaccttatagattctttctgtaagggtgcctgtacacttttgagggctgggacctatataagcaaatatgcccctctgtatatagatagggaggcaggcagtgaggtgtctatcaagagtagacacatcatttgatcctctgcagtgaatcttgtaggtgcttaaacaacatgttcaatgtgatgaaacattgggacccttgatgtttggaatcacacatctacccagacccatttcttgctgaggtcaagaggagtcttaattcttacaatgctttctggaataacaaacacatctctctttggcttgactgcggggaa

SEQ ID NO: 3063 - DNA, 1150 bp, Homo sapiens
acgagagagacaggaaaataaattaaactcaggtgatagaattggaaaaggagaatttttttcagcaagaaattacaggttttagactctcaataaatttaaaatcatgtttaaatatatgactcaaagctacagtagcaaaataaaaaactaatatgaaattagaaaggatgagaacatttttgtaattaccttcagagattatatggccaatttgtgaacatcctgagtggaaatagtgctttttaatgactgcaggttaataagatgtcaagtctggtagataagatggataaagagaactaggcgagtgaatccacattttcccccaagagatgtgactctaaattaataggactttttacttgacactggaaacattttgagaaaacttccaagaatgtttttaacaaaggcaacattactggaataaatgatcattattttgagttgtaatatgtcctgacattttctaaattatgttttttacttttaaagttgtataaagaaaacttaaattagtctcttattatgttttactgtgaactaccccttgttatttataattgattgtgttgttctgttttggaatttagcatatttttttaaaaaaatgaaaggaccaaacaagcttcaaggagaaagtgagttttatatagagtttaaagtgatgaaggatgtttgttagaataggaataaattacccttcttctcattgatgtcaatggcgatttgactgtggtaaagtcaaaggtagttgaagcagatacgtcacaagctaggtatgagtagtgttctttgcattctgccgacttctctgatttatcatcaagtggagaagcttccttaaaagtgttaccaaataagaactttcttttgcctgtttccatgatttgatttcaatcatatttattttctagctctcaaagcaattgaggctattctctgaaacgtctctctcagaatatatgggatatttcacttaaagtatttctttttttgttgttactgttattctcttgctggactttaccacgggtgttgctcaatggagtattatctgtggaggaaataatgcgtagtctgaattttataaataaacatctctttgtttaggatctaaaccaggtgtaactgactaagaacttac

SEQ ID NO: 3064 - DNA, 1331 bp, Homo sapiens
aaactatatttgaaaggtcagaagtggaaagactaagagggcctgaacaataagaggacagaaccaagaggagttggcaactaattggatgtggggattaaggaaaggtaagcatcaaagattacctccaagtttgttagaaggttagtagcaggattctgatgccattcaagtaaatacaagtctcagtcagatgaaccccaagagccacatgtatttgaggggtactttgtctcacacttttacctgttacatggttttcagtaatttagaatttaagccagtagtggggcgactgtacatctatcgacatggtgaggtagagcatgtttgggaggaaagacgttgaatcccatttggtgacagtgagcttgaggtgctgccagaacactgcactgaagataggaggagactgtaggaaatacaagataggaaaggtctccactgaaatgttaactctttctctctaaacggccatccaggcctcaatgtctgcagtttctgatctgtgattatgacttatccaaatcttacatttcttaaaaatagtcatagatgaagggaatcacagttgatagttatatggtgacattattggcttaaattctaaataactagaaactgtataataggcaaaactgtgaggcaaataaaatgcttctcaaatctgtgtggctcttatggggttaatttgatttggacctgtattaatttcttatggctgctataactaacaaattaccacaaacttggtggtttaaaacaacacacatttattctctttctgttctggaggccagaagtctaaaatgagattcactgggctgcagttcactgggcaaggccatgctcctctggaggcttccatgatgcatcccatattcagtgtttcccgagtaagccccacccatgcaggtctgcagttttacctcaacaggcttttgcactcagtggctctctcctgtggtttctatctgaaattctcttcattttttttttaataactgctttattgagatataattcacatgccatacaattcacctatacagtatacaattcagtagtgtttactatattcagagttgtgcaactatcatttttctcacccccaaaagaaaccctatgcccgttagtattcactctgttttctcacaactctaggtaaccactaatctactctccatctctatagatttgcccatgctagacatttcatataaatggaatcatacatgtggtctttttcactgagtatattttcaaggtgcatcccagctgtggcatgaatcagcatctcattcctttttattgccaaataatattctatc

SEQ ID NO: 3065 - DNA, 1369 bp, Homo sapiens
atgtaataacgtaacacaatacaactctcagaaacataatgttaagcgaacaaagcaggttttcagaaaatatatgcagaataattccatttatataaagttccagagcatgcaaaactaaatcattttgtataaaaaacccaacaaatgtgatgagacaataatgggaaggaagggaatgagaaatattaaattctggatggtggttatctttgagggaggggaatgatgtgattggggaaatggactttcaaaggtaatggtaacttccttaagctggatggtaggtccactagtgtttgctgcatagttataccttttatcttaaatacattttgtatctattgtaacaaccactttaaagacaaccgtgctgtaaggcagtagctaaaaacagaaaatagtccatcgggaagggtaagatggctttctgctgagcacagggctagaagtgacagcccagtgggccttccaactatatgccagggtgttagatgagtagagaggagaccacccaggaagtctggacaaggggtctggcatgagctctggagaagatatatttgaggaacatggggtatgctagtttgttgtcctgaattgctgtagagaagataatttaaattgcatcttagaagacgaccctgagggtgaatttcaacttagggcaattgttttagtttgtttcttattggtttaaatggatacttgaagctggataatttataaggaaaagagatttatatgacttacagttctgcaggctgtacaagaaacatggcaccagcatctgcttcttccccggctgcttccactcatggtggaaggtgaaggggagccggatgtgcagagatcatatggcaagagaggaagcaagagagcgagggagaaggtgccaggctctttttaaataaccggctcttgagggaactaatagattgagaactccttgcttctcctccccagcacaccccacccccagggacggcattaatgtattcatgaggggtcttcccccatgacccaaacacctcccatcaggccccacctccaacactgggatcaaatttcaacatgagattttgggggacaaacatgcaaactatagcagcaaccagctaccattctaaaactgccatatgattttaggatttttaaaaagggccaaatttaggttaagcaaaaagtgaaaatacagtaagagaaaatagttttataaaggctttaaaaagtgttcataaagagcagttcatagatttttcacgtaacgttcatcaatagatgctaaaactattggatgaaaagctattgtggaataggatcttctacaaggatttaaatataatcctacagaagaggtatcaattat

SEQ ID NO: 3066 - DNA, 1416 bp, Homo sapiens
atgcctgtaatcccagcacgttgggaggctgaagcgggaggatcacgaggtcaggagatcgagaccatcctggctaacacagtgaaaccctgtctctactaaaaatacaaaaaatcagctgggcatggtggcgggcgcctatagtcccagctactcgggagaatggtgtgaacccgggaggcggagcttgcagtgagccgagattgcgccactgcactccagcctgggtgacagagcgggactccatctcaaaaataaatagcttctctcgccaggcatcctcgtggaagtgacatcgtctttaaaccctgcgtggcaatccctgacgcaccgccgtgatgcccagggaagacagggcgacctggaagtccaactacttccttaagatcatccaactattggatgattatccaaaatgtttcatcgtgggagcagacaatgtgggctccaagcagatgcagcagatccgcatgtcccttcgcgggaaggtcgtggtgctgatgggcaagaacaccatgatgcgcaaggccatccgagggcacctggaaaacaacccagctctggagaaactgctgcctcatatctgggggaatgtgggctttgtgttcaccaaggaggacctcactgagatcagggacatgttgctggccaataaggtgccagctgctgcccgtgctggtgccattgccccatgtgaagtcactgtgccagcccagaacactggtctcgggcccgagaagacctcctttttccaggctttaggtatcaccactaaaatctccaggggcaccattgaaatcctgagtgatgtgcagctgatcaagactggagacaaagtgggagccagcgaagccacgctgctgaacatgctcaacatctcccccttctcctttgggctggtcatccagcaggtattcgacaatggcagcatctacaaccctgaagtgcttgataaaacagaggaaactctgcattctcgcttcctggagggtgtccgcaatgttgccagtgtctgtctgcagactggctacccaactgttgcatcagtaccccattctatcatcaacgggtacaaacgagtcctggccttgtctgtggagacggattacaccttcccacttgctgaaaatgtcaaggccttcttggctgatccatctgcctttgtggctgctgcccctgtggctgctgacaccacagctgctcctgctgctgctgcagccccagctaaggttgaagccaaggaagagtcggaggagtcggacgaggatatgggatttggtctctttgactaatcaccaaaaagcaaccaacttagccagctttatttgcaaaacaaggaaataaaggcttacttctttaaaaaataaataaataaataaataaataaataataaataaataaataaataaataaat

SEQ ID NO: 3067 - DNA, 1155 bp, Homo sapiens
cacttttggtcccaagcatttcagataaaggatacttaacatgtatttgaatactagtcagggtacaccatctactctccaccaaattctttagtagcttttaattttgcaatgtatcagatttaagcccttttcgtctacccagtggtcccctgatggtatataatggctgctaatacactatctgtgcttttcagtgcagcgaaacaaatctcacagactgcacactactgcttatccatctcttatttctagaccagcactgtcctatagaaatatgtgagccacatgtataacttcaattgtctagttagcctcattaggaaaagcaaaaataactttaatacattttatttaacccagtatatcagaaatattgtcatttcaacatgaaatcaatataaaaatttatgattgagatattttacattccttttgttctaaatctttaaaatccagcgtgcattttacacttacagcacatctcagttcagacaagccacagtcagatgctcaataatcacatgtggctagtggttgccggactgtacagctcaccttttgaaaggctaccttttcaatctagatcaccaataattttttaaattaatttcatgtgaaactttaaagctcttctaagaaccctttttcatttgttcgttattaaatcaaaacttcaatccagtcacctttaactctttcatgaccatttccacatgcccttaccgttggctatcttagctcgatgtgctaatcaagttccccctaatttgacatactagaatctaatactagaggcagcatgacattattatgggggaggaggttgagaagcactaacctcgaagttagaatttctggtttgtcatcccagtctgctaattagctttctgatttaagacaaaatactttttctgtgccttctgggggtcaaattcgatttttaagattctctcagttggaagaaatctaactaaaaatatacttaaaataattctttggtagtatattattttgaaatttggtccagaatcctatttgtttattcctgtagtatacatacgtctgtagttacccagtagtctttgttgtctttgggccatctaaagtatatttgggctgggcatggtgtctcacacctgtaatttcaacact

SEQ ID NO: 3068 - DNA, 1166 bp, Homo sapiens
ttattgtgttatagagatatgatgctgtagaagttctcaagaaggggaaagatgtgttgtagcaagagtagtaacagtagacttcttgcagaaaataatagcttattttgacctattcccaacaaatgtaggaaaatcggccgaatagacagctataaacatttaaatatgagatactgaggccatggaataaagtgatgatggcagggtataaaacagagaaaaccaagtcagggaaattaaagacaggatctggaaacaaattggaagtaataggttaacaagagagacagacagataaatactagtagtgatagagaacttggaggagtgtagtaagttatatcacatgttgaattctgttttagagaagctgtggagggatgctggcaatatatccaagaagagaaatttgtttgtctgcttttttatcatttaagaactttattcagagaacttagagcatttcacatcaaattctacgaaagcttcatattttattatacttttttatatctctgactgtataggtattgatggatatgtttcatcaagatgtagaagatattaatatattatctttaactgacgaagagccttccacctcaggagaacaaacttactatgatttggtaaaagcatttatggcagaaattcgacaatatataagggaactaaatctaattataaaagtttttagagagccctttgtctccaattcaaaattgttttcagctaatgtaagtatcattgtatatatgcctctcattgaatgtgttgtgaaatttgcatgaccacttcaaatttgaagttgtacagttcatcattactaatttgttaatttttttaagttgtgggacttaattcatgatcacaaagttttacaacagtttcaagagatttaacattagaaattaagagacaaaatacaaagtagactgattatgtaagtgaaaatgaattcacagaattctccatgtactccaaaggataaagcttcttgtttaggtggaagatatgtttgtttgagtcatttgaatcattcaacctacacttcatcaatgccaactgtattgtcaggtaccatgcttggcagcagggattcaaagatgaataagaaacagttctgctgggcacggtggctcacgcctgtaatcccagcactt

SEQ ID NO: 3069 - DNA, 1164 bp, Homo sapiens
caaggtctctgactttgggttttattctccttgttatctgtattactgtggaattcatttctcactgcaggtttcattctgtatttatactctgggtcagttttaccaactgcagtcttttttaaaaaagaaatcaataaatatttttcttatagcaactgaaattaaatacctgaaatattttatagaagtgatatgaattaattaaatatgtcaccaagtgttttgggcatctcagagagcacactaaataaatatataatggtgataattatatatcatctttctaggcttgggaaatgcaaacaagaactctggttagtagcattccatgtaagaatgtccagtcaattaggccagtgtgtatgtgatttcaaacacaattgttttgaggttttttgctaccgttatcttccaaaacactaatccctcctttacttctaatccctatattttaccaatgttcacatgttcccttcctatatctttcatttaatctaacacacattcattttagaaaaataagatattcatataatgactttttcaactgaccagagttggcaagtccttctagaagtttggagctgccctgaatcttatgttcctctgctgttcctcatctggtccattctgatatgcactcctgtccttctgatctatattcactttgtcgctatagggagctgccagaactaaagatgtggggtggaggcactgctttctttccacaaaagctattcccaaggagcatttctggacagtcattcttccctggagctttgtcaatagatcctgtcttgaacctcacagatactaccactctggagctttgtcaatagatcctatcttgaacctcacagatactaccactctcttggttccatagaaagtggagaaaaggtgtagcaagctggggaaaatttcaacaggaaaatgtctgggagacaagcagtttcacttggaataaccagtcagtttcctctcattctaagaatactgaatttcctttagagtccttataagagtttggaaaatggaagcagacctaccagagagtgaggatgcaagccagaagtgggtatgaaagagagatcttttgctaaagggggaaagcacctaattttatcgtaactgtctgcttaattaaattaatttcctagg

SEQ ID NO: 3070 - DNA, 1356 bp, Homo sapiens
aaatttcttagatggtgctctggttctggaggtggatgagagggaccaagatgatgaagaagctaggcgagaaatggctaggattctgaaggaacttaagcagaagcatccagataaagaaatagagcaattaatagaattagctaactaccaagtcctaagtcagcagcaaaaaagtagagcattttatcgcattcaagctactcgcctcatgactggagctggcaacattttaaagaggcatgcagctgaccaagcaaggaaggctgtcagcatgcacgaggtcaacactgaagtgactgaaaatgaccctgttagtaagatcttctttgaacaagggacatatcagtgtctggagaactgtggtactgtggcccttaccattatccgcagaggtggtgatttgactaacactgtgtttgttgacttcagaacagaggatggcacagcaaatgctgggtctgattatgaatttactgaaggaactgtggtgtttaagcctggtgatacccagaaggaaatcagagtgggtatcatagatgatgatatctttgaggaggatgaaaatttccttgtgcatctcagcaatgtcaaagtatcttctgaagcttcagaagatggcatactggaagccaatcatgtttctacacttgcttgcctcggatctccctccactgccactgtaactatttttgatgatgaccacgcaggcatttttacttttgaggaacctgtgactcatgtgagtgagagcattggcatcatggaggtgaaagtattgagaacatctggagctcgaggaaatgttatcgttccatataaaaccatcgaagggactgccagaggtggaggggaggattttgaggacacttgtggagagctcgaattccagaatgatgaaattgtgtaagttctatattatatatgtgtgtgtgtgtgtgtgtgtgtgtgtgtggttcagtgtgtttatgaatgtgagtctgtgcatcattttttaaattaaatagcatgcaaggaatggaatagcttttatacaagatccctttcaagatatcagtctttgcttgggtgccagttatcaatatgctctgcacacagagatcttaaatttatttacatcagaattttatttttacttttatacatttacacattttaactacattgtgactatgataaaatgagtgatgggacacagtttatcagatgacttaagacaggctgagaaattggtcttctattttgaatcacatggtatatactcagaaaaggaatatttaaaacatcacaataggtctctaacttcgtttctgagtacaaattgggaaaacccaaaaaggaaacaccctgaaaata

SEQ ID NO: 3071 - DNA, 1155 bp, Homo sapiens
ctcttttgttgccagactttctattctttgcaaccttaagtctcttccctcccattccctcctcctgctgagtccccccacaatgtcaggtcatagttaggaggttcttgcaggagtagtgatgaaagataatggtgactagagtttgagtagtgatggcaaaagaaacggtagggtttgggatatattttgaggggcctatggatgtgcttgatgaatggatgtaagggacgaagaaaaccaatgaatcacagataactcctagtttttcagcttgatcaacttggtagtactatttagtgatgtggggaagacttagatgaattagatgagctatacagtgaatgatgggaaatcagatagaagctatttttttaagttttgttttcataaaaagtaatatcacatctcagacattggaaaggtagagactagatgaaattacttatgatcctgacttcctgacacaataattttaagtgttttggtgtgtatctttatagtcttgcataggggttggcaactttctgtaaaggcagcttcttaactctgttgtagcatgaaagcagccataaacaatatgtaaacaaatgagcctgcttgtgttccagtgaagctttatttatggacactgaaatttgaacttaaggtaactttcacatattgcaaaaaattcttttactcatttttttccccaaacattgaaaaatgcaaaaaccattctttgtgtgcaggccacacaaaaacagttgacaggccagatttggctgtgtagccagtttgcaggcccctggtcttgtgcatttgttttatggttatagtcatatcttacattgaattttattacctaccttttctactttatatatgtgcatactttttaaattgaaagacaaagtgattgcattcgttgaatagtaagccctgataaacttagtttacaaagtgcctttatgttcattattttttttaattcttagaataaccatgggaagtgtgtgtcatgcttaatataaagtaaaatatgtattatgtacataattgagggtaagttatacattatcattagaactctgtctcttccatttctctctatatgttggctttattctctgaaatgatcttcccccagcagcagtggtcatggctaccggt

SEQ ID NO: 3072 - DNA, 1148 bp, Homo sapiens
tgccttcccagaataattaagcaggttatatgtttacaaaaatcatataagcattttatctgtggtcataatataaagatatagctcatctttcatgaattgagaacattttagaaaaatatatccatatagtttactgacttaatcgcggcctttggtttacaaataatggcttgcaaaaagtgaatttattacgttacataattagctgggaggaatattggagcagctctcagaattgaagggccaaggcttcagagagtataactggaacacaaggtagttagaaccacctttatttttgacagtcctagggtgacatcctggtagctggagaaccaaggtggatgggctataactctacctctgggaaattcaagagggcttcatttggcctatcctgtatctcatgactactactcctgtggtagtattagactgagccatattaactaactcacttccttcctccctccctctctcctttcctccctcccttccttcccttttttctcttttcttttctttccttttcttttctcttctcttctcgtctcgtctcgtctcttctttttttctcttttcttttttcttttctttctgatagggtcttcctctgtcacccaggtttaagtgcagtggtgtaattaaaactcactgaatccttgaattaaacccatctttgactgggtttaagtgagcctcccatttcacttttctgagtagctgggactacaaacacgtgccaccatgcccagctaattttttccatttttgtagacatgggttctcactacgttgcccaggctggtctcgaactcctgggatcaagcgatccgcccaccttggcctccctaagtgctaggattacagtcgtgacctgccttgtccagctgaaatttctagtagtaatatttatacaactgaaaaggtcattttatatggttcagtctcatagtatggggcgcagagggtaaagtgaagcatcatagattgacagctctactaggaccaagaaatatggtggagtttcacaaaagacaagagtggctattcttcctgtgagaagaaggagaataggaaagaattttgggtagaaagaatagtgaccatagtctaacatacttacaaagaatatagatcagcta

SEQ ID NO: 3073 - DNA, 1100 bp, Homo sapiens
tcaaatgctatgtaatatttctgataaaatttcagatgtaatcggagtggtcatcatgagtggccagaagctcctgaagtcctaagtgacctagagatgggccctgttgaccccgcagcatctgctaagcgtgtggcttttgtgcagctccctggagagctggagtgcagtagccacagcccccacaccagcagcaggaactgaagagtggctttctcgaaacacaaccatgttgcctttcacttaatttgtttgatccaaataattattttctcgggagaatttataaacgataacttgtctctttcaaaagtgtcagaggggccgggcacggtggctgacgcctgtaattccagcactttgggaggccgaggcaggcggatcacgaggtcaggagatcaagaccatcttggctaacacggtgaaaccccgtctctactaaaaatgcaaaaagttagccgggcgtggcggcgggcgcctgtaatcccagctactagggaggctgagacaggagaattgcttgaacccgggacacggatgttgcagtgagccgagatcgcgccactgcactccagcctgggcaacagagcgagactccgtctccaaaaaaaaaaaaaagtgtcagaggatgttctaaggaaattgtattcggaccagaaaagagatgggacagtatttacttcgtgaatgtcaggcataagcaattccttttttcatagactcgttttataaagatgagtagtgtgagttcatttaacaccttggttttaccagtttatttcttcttcacacattttaaaatgtttgtttatgtttattaaatagtgacggtaaatcagtaatgatatagagctttttgccttattgtacaaatcattttatcaccttattttaatttcattgaaagcagcaaaccaaatcccaaccaaatatccactagtaatgggaagcctggtgctgtgaatggagctgtggggaccacgttccagcctcagaatcctctcttagggagagcctgtgagagctgctatggtaagttttctctagcaggtcagttaagcatcgggaactgttctggctcatggggtgtgagcgtctgg

SEQ ID NO: 3074 - DNA, 1231 bp, Homo sapiens
gtgccaggaaggcagacaccagcgaggaagaggtggggtggcagggccctccagaggacccccccacagtggtaaaggcagagggagcagaggagggtgagggagagaaggagggagggagaacagaggaggagagagagggagatggagagctcaggttatgaagttccatgggctgcttgggccatgggcctgagagaaggttctggagtcttctacccctgcaggagtgctcagggcaaagtgggatgattggcactatcagctggccaccacggtgacacaacatcctggggttttcatcagcattctcgcagccactgagaaacaccctgtgttcctgtttgcaggccaaggggaaccctgcagccctccctccttccctccgcctcggggtactgagtgatcccaccacatgaggtctctgagcccagcctgggggttgtgctgctggtagaggaggaagcagggctcagcaggggcaagatggaagcccagagaaaccctgaagtgggaggatagtccagccgggtgaggtgggggctctcaggatcatgcagccctccctggacaccccctcctccactacatatagaggctggtggctgcctccctgcccccaccagctctggcttcagggactgtggagccaaaaggacattgtcctgagaggtaggcagggagtcagtgaagacctccaccgccctgctggtggcctggagggaaccagtcctatttgtgctccgccagcctgctgtgtgtctgaaagcccactgtagttcagctttcagttgctcccaggttcctgatggttccgaagtctgtgatggtcccaagtccgggtacacggtgaagtaggccccatggacggggacgcccctgccaaatttctactgccatggcacggggagctgggggcttctcccgcaaatagaacaatcctgatttttccctgtctgtgtctccccatggctccttgtccactccactccttgcccccattagcattcactgcggaatagggagtgggaggctggggctagctccagacaaggtacaagtccagctgtcccatggtgaggtattctcatgagcccatgggctggtcctgtgggtggagatgagggcttcaggctcctgataacccgggacagcagggccaagggaggtgctggttccaggctccagggcctgaccccatcactgccaactggctggggtcagcagtctg

SEQ ID NO: 3075 - DNA, 1216 bp, Homo sapiens
tcaataaaccctttccatgttcattttaatcacttatttattgactgcctaccatgtcctcaatactgtgtgacatgagacatgacactttttctttttttgagacagagtctcgctctgtcacccaggctggagtgcagtggtgtgatctcggctcactgcaagctctgcctctcaggttcacgccattctcctgcctcagcctcccgagtagctgggattacaggcgcctgccaccacgcccagctaattttttttatttgtagtagagacggcctttcaccgtgttagccaggatggtctcgatctcctgacctcgtgatccactcgcctcagcctcccaaagtgttgggattataggcgtgagccaccatgcccagctgagacatgatacatttttaataggaatacttgcatcacacaattgtacagcacttgacagttgataaaacacctgcacacctgtgatctctttactatgcaacattcctgtagacaaaagggcattataaacctaaattaacagaagaaaaataaaatgaagctcagaaggattcagtgaaaactctgagggctaagtgtaagcaatgctcacggcagactgtgatccagagctctctggctacccaacctgtagctcacacctggaaatcaagggagcataaaaatatctcctagctaacaaaaacacaaactgtaatttacacatatttggaaaatttctaaatgagtggttttttgttgtttttttttttaaaaaaaattttaaggatcatgaaaatatttcagaaactaatgtaaactatggactctctcacaagaggaatatatttatgaacatatgcacacaatttcccacacagtttcaggttcgtgacacacatccaaaacccttgtggggggagtttcccagacccaggtggagaacctcctgctgctcctttgcatacatcaatgaccacacgatgtggctgtcaggtttgtgttctgctgcatgtgacacagcagtgaagaacactgctcacagggaaccaccagcttagaggcgatatacagcctgctcatcacaaatcggtggtacccatgcagacattcacagccgaagagtggcacagaaaagtgaagtgggaggcagagctgagacaattttctgcaacagatgaaggatcttcaaatgagggtgaaatacacacttggacttaacacttgaggaacc

SEQ ID NO: 3076 - DNA, 1128 bp, Homo sapiens
gtaggtctggaaggatccttcaaggggcatctaatccagtccagcatcgtgcttatagagagattttgaagcaatttccagacagactggcttctctcctgttcttcatgttttctaggaaaagagattccacaagtttctgtggttacccacgctattgtttgggaaagaattgaattctcaaaactaaaattgaaagctgcagggcaattgggttttcatattttagagaatgtaattattagaattcagaatagcttatttgcttcgaactacatagtaacttgtagcaagccctatttggccaaattgaaaaacagaattttcttttgactgtggccggggtaatttttttttcttttttttttttttcccccccaagacagagtctcgcactgttgcctgggctggagttgaatggcaggatctcaactcactgcaacctctgcctcccgggttcacgcaattctcctgcctcagcctcccgagtagctgggattacaggtgcacactaccacacctggctaattttttgaaattttttttttttagtagaaatggggtttcactacattggccagattagtcttgaactcctgaccttgtgatcgcctgcctcagcctcccaaagtgctgggattataggcgtgagcggccagggtaatattaacatcctcaaacccaaacagttctaattttctccactgaacaagcatttattatgtttttactctgggccaggccctctgctagttactgggatccaaagataaatcagaaatactctctgccctaggggactccaagtctgatgaagaatatggcagttatctgtggtgctggagtctctgttcagttgtgtagaaggacaggagaagttgtgaaggaaggtaacatttctttagtgcgtgggccatgccagaccctttatacatgtctaacttagccgagatcacagctctgcgaggtaggcagtatcatcctcatttcacagaagagggacctaaggctcatgaggtttagctacttgcctgtggccatacagccagaaagtggcagaactagaacacaaagcgagctccatctgcagagcacatgctgttacacaccaaacaacggattccctca

SEQ ID NO: 3077 - DNA, 1221 bp, Homo sapiens
ggctgttaagacatctattccttgaatatttttgaaactttttttttcacatgcctggtaaaaacatttataaaacattttggcagttatgggctgcacagaatgtctttaaatgatactttttaaaaagtccctgacattaaactgctgatgttgaaaatattttatcttttcaactttttgtttccagtgtagatatgacttatgaacttttttttccctcaaaacacaacacactccactcctatcaaatcagttaacaagaatgtatgaataccagcagtgtgcttagtactgtgcttggtttggatgatattatggtttttttataagatgaagttcctgttattaaagagcttatgttttagtttgagaaataagtagagatgaaattcaaaatatttaacaaaaggtatgttgtgagcactgactggtcagaaccaacactggctgtatacagcacccagcatctctctgtgtgtggatgtgtgtggactgattaccagcctggaagtaagaccgacacacttgaacaagataaaactgccaaattttgggtgaaatttataaaacatataggaatagcagagagagaaagcaatggggataggctggtagggcttcatggaagaggtggaatttgtgctaatgcatgagttgaaagaaggaaacattgtgagtaaatgttcagaggctagaatcagcaaggtgaataaataaacctccttcctgtagtggtggagttggtaggaaataaccaggcaagttgatagattgaggccaaattatagtgtcttggaaatagatttactgtagcagggatggagagaggcatcaaacatttttgctctgaaatagatcataggaggcatcatagaatggaggaataccagtaatctgtgactctggttcttagttctgtgtatattcattccatttattggcaatgagattgtacaaaaattaacctccctaacctttgatctcttcatctttaaggaaaagggtatttgccctattgacagatctctggcttttgttgtatgaatcaaataaaatagatatttaagaagacctctttgcattatagaatttcctacaaatttaaaacatgagattgatgttggttgtggggttggcatgtaaaagcagttttctggttggaaatgttaggttagatagattgtaatacagattatagtaaggagagcctgcaatcag

SEQ ID NO: 3078 - DNA, 1139 bp, Homo sapiens
tcctgctcttgtattttagaggctgtgacaacactgaaaacagtattggatcagcagcagaccccttctaggttagcagtgacccgtgtcatccaggcattggccatgaagggtgatgttgaaaacatagaagtagttcagaagatgttaaatggactcgaagactccattggactttcaaaaatggttttcatcaataacattgctttggctcaaataaagaagtgagtatttgcaagccttcttttccttcattggtcactagaatgggcattgcctcagataccaccttttaaaaacttttttagacatgtggaaaccttatcaactgcagaggaaatgttgatgctagttgctgattagggaataattatatgttgaaaaatatgttttttctttaccttaaatcttagaataaacagcatttaccaaattcataaatcttgctccacagttgataacctttctcattcctgtgtatatatgccaggcctcttgttgtcgaaacactttgttcagaagtgaaaaatgatctcatttgtttgtcagtaatatttgatagggacactagtagaatattgtgaagcagaaggccccgcaagcttattaaaaatgtgcatttccgtattcatattccttacccaccccgtgaacactctcccacccccacaaaaagggaggtatttagagctgattttcttaccactgtctctagattccttttgagaattacccctgtagaaataaataaggacttgatttttaataagctccctagcaaagtactttatggaatttgatactttcagtatgcttttagaaaaaatgttctttagtaatcttgcatacatttaatgggacatgatattaaaatataatgtttgtttttgtaggggtttttttttgtttgtttgagaaacagttgtgttttgttttgaccttttcaaactatttcgccagatagaacttccctttaataagaaaatgtgattgttttacattagaagattgaagaaattactcatctaagaactgggtgaattttaaagttttaccacataaacacagttttatatgattcggagaacatattcactattaagtaattccttaaaacttgtaagagaaatatattgtaa

SEQ ID NO: 3079 - DNA, 1129 bp, Homo sapiens
tatattgtataaatgattccaatataaagatctctacccgcaactttttaaaattttttccttttgccactttggaatctgttttggttgtaattggtcagtttctacatatgtaggatatattattatagaatagatctggggtttcttcttcctgatatttatctccactttcatatttgtaatgagcaggcagcttgagagaggaagagattattgaaaaagaatgttacaggctttgaggtttttgaaaggtttgtagttcatacttagtgtcaaagacaagttttgttgccttgtggttttaatgaattgtaggtgaatatttttaaattaatatggtataatacatgtaataatattagaagtgagcttttaatagtgtctcatttttatttaatcatgtgaaagattgagaaagtaaatcctttgtgcaattcttagtctcatgcatgagttgttgacttaagttgttgacagatgggacaaagggagaaaagtcaaactgagcaatgggtactttggtgggataaagaggattggtcggaggaataagaaaatcctgtgtccagggactgcaggggtggaccttagaggctgaaagtgactgagagaatgggcatgtcgtagtgtctctgggggattttcttgggattgatgaaaataatttagcagtgaccccacttttgttgcaatctgcccagcttatatgtccgtgttggcagggcatgctgttgttggcaacagggtcatcactgagctcgataaggcaaatgggagcaattgcttttgctccttttgacctgtttagattttctaatccggagatgaactctgggagcattaaggatgcagaaatttcatcacaggagatgcgcaaacagtgtagcaaacagaaatctccagctaggttttggggttttctgtttgtttttgttgtttcattttgctttttttaaatcctgtaggttttattgaaaagtcaagtgattttttgctcttgagttttaaaagttggtgttttgtttcaaacttaagctagggcaagatggttgtgtgaaatttttaattttaaagtaccaatagtttgagttctgcagtatgttcagcttcagaaactgtatgaatc

SEQ ID NO: 3080 - DNA, 1158 bp, Homo sapiens
tgtcccatccctagggattctgatttaattggtctgattattcttacgcgctagggctgagaaaccactgttctgtaggatgtaggggaggaaatttcttgggcttttgttgttgctcccgtaaattaggataatactaaaaaaaatacttgaggtaggagttactagactatagagggaatattgtacatacattttctgtcaaatttaaacatttaacacctgcattttttatttcagatttattgctaaacatgggtgcatttttggataaacccaaaactgaaaaacataatgctcatggtgctgggaatggtttacgttatggcctgagcagcatgcaaggatggagagtggaaatggaagatgcacacacagctgttgtaggtattcctcacggcttggaagactggtcattttttgcagtttatgatggtcatgctggatcccgagtggcaaattactgctcaacacatttattagaacacatcactactaacgaagactttagggcagctggaaaatcaggatctgctcttgagctttcagtggaaaatgttaagaatggtatcagaactggatttttgaaaattgatgaatacatgcgtaacttttcagacctcagaaacgggatggacaggagtggttcaactgcagtgggagttatgatttcacctaagcatatctactttatcaactgtggtgattcacgtgctgttctgtataggaatggacaagtctgcttttctacccaggatcacaaaccttgcaatccaagggaaaaggagcgaatccaaaatgcaggaggcagcgtgatgatacaacgtgttaatggttcattagcagtatctcgtgctctgggggactatgattacaagtgtgttgatggcaagggcccaacagaacaacttgtttctccagagcctgaggtttatgaaattttaagagcagaagaggatgaatttatcatcttggcttgtgatgggatctgggatgttatgagtaatgaggagctctgtgaatatgttaaatctaggcttgaggtatctgatgacctggaaaatgtgtgcaattgggtagtggacacttgtttacacaaggtatgtaaacttttttgtcattaaaataacatgttaattttgaaaagttacggtaggt

SEQ ID NO: 3081 - DNA, 1199 bp, Homo sapiens
aaatgcggaattcggggagagcgcgcatgcctggtccggtggagggagggtgccgggcgtcacaggtcctgacagggaagaagttggcaggtcctggcaggggacgagctgcggcggtggcacctccgggtgtggaaggctccagtgagatggagtcgcgagtcgcggacgctgggaccggcgagaccgcgcgagcagcgggcgggagtccggcagttggctgcaccactcgggggcccgtagtctcggcgcccctgggagccgcccggtggaagctcctgcggcaggtaagggagaacctgctcgcctcacctttgcctctggtcactcctctctcacgtaccgggggagcgactgttcgcagttctttcctcttggcagctctgggagacccttctcagtttgccgggagccacctgcgaagctccccctcgcttcacctaagcgtcccatccaagaggaggaatcatgtggggttgggtggggagcgggacagccaaggctgagctcctgggaaactcagatcgaagtagaagaaccccttctagacatttttgtgcgtctgggggacttttccccttctcgccagtctctggtgcgcccgccgctccccactgctcttttcctgcttctgttttgcctccttccccagtttcttctagcttaactcccagcctggttcgagttaccgatattcgtctgcaccctctggccccgtcttttgcccagcgtggttgactatgccgggactgagacacggcatgcgttccctcggcatcttccgtacagcggagcgtgcaaggagtaggaaaagctgataccctctctcactgaggtctcaaagttaaatgattatcttgtagtttgtagtgatcagcgagattctccgtgtccaaggtgggctagtcaaagtgtgttcgtttttgaatgatggtatcttctggtacttcaaagtttctgctgttacttacaactccactcgtgcaagcttgacggaagttctgatttatgatcactcacattcttcgctcacttcttgaagtgaagtctggttattgtttttgcatagcagtgttatgcctctgcctgaagttttctgccgaaaactttactcaggaggacatttttccatttctgacagttgtgtttggaaaagagtttcccagctattgccactttacttgagattgtgcttttag

SEQ ID NO: 3082 - DNA, 1230 bp, Homo sapiens
tctgccttgggtagctggcaggatgatgatgcagttcactgaggagggtacagttttggaggcatttaggtgagatgatggatgtggtttggggaatattacatttgaggggcattgggcatgatttgagttggtataccatacagattaatttcttgtcaatatttttaaagtattgtaatgtgtttttttaaccacaccctataatttaagtaacaataggatctccagaatgagaataatagggggacccatagagagatggcctctcaaaggcagtagccttttagtgggctctgaaagatgagagatgccaactgtgcagttagggaagactccaggcagaggcacagcagacatgcaggcattcatcccatgtcaccaaaacatccagtatgttttcagcaaatgctgaaaactgaattacagcctattctctgtcccttgctctccctctagtttccctagatcagggtggaaactctccatccagccaaccgtgcacttcaaaaacccagaggtcagcctggacacctcttctcccccgacctccagtcataagtcctgtggattgtccttgaaatctgactgtcactctgctcccttctgtcctagctgccatcttctgtctcttgaactgtgcagcagccccctgccggtgccctgctttcattcttgtgctcttccaacccaatctccatattcagctgagtgatctttgaaaaacacaagtttgctcctgtcattccctgttgcaatgtatttttacaaacacatcctaagatagttagtcacgtaccaacttttagacctttaaaaattgcatttatctgccaagcaattgttccccatggaagaagagctctagtgactactttgttcctttgttgtctctaattttaatattccaaaacccacatttttttttacaattgtcatttgatttagatgacttaaaagctttttattacaagccatatatatactaatagaacaacctttaacaatatatttttttgattcaccagaaaaggtgatcatttcttgatcacaagcagtaaggtttcttgtcctcagctcaacctcattataactatatatttgaacaaactaagatatcctctgaactgagtcacctcatcccagggttcaactgacatggggaattaccttattttagtcagaaagccttaattagattaggttggcctttctgaactttatgtgttg

SEQ ID NO: 3083 - DNA, 1179 bp, Homo sapiens
ggccttggaatccccgtctcttctgggagaaaaatagattgtgtaacgccagctcagcgttctctaagcttgctttgcaaggagctattgtcactatatattagatgtagtaataaaggatgtgaaaaagacttgaatgatcatgtgttgaacttgatgttcacagtagataagtagatcttatgtctgattagagaagtggtacaaatcagcgactggagaatctgagagtcacttgcaagagatgacttttgtttccagaccttgaacagcttaacatggaaacaggcataggattttctttgatggtcttaatattttcacttaatgaatttatatttcatctaacctgtatgagaaggtgacactgattagcttccatgtgttttgaaaatggaagcagttcatatatatataaagactcagtgtaaatatgctactggagagggaggctgcctttagaactattcataagagttgtaatagttatcttttttttctagctaaatctatcttataaacgaaattagatgtgaatttttattgatatttggtaaaaaaaaaaaggacaataaatgacgaacaagtaaaatcatgacacagttaaaggaatgtttgaaattaactctaaagtttcttgagcatggattgtaatggtcaagaaagggatgtaattagaactatggtgtgttaagagacaagcagttgggacagaaggaggatcacttgccagggcaatcttgcagtcatattcaaggccacatgagtatattcattagccaagtaacttgatctctggttgcattaagatatgattctgctgggcgcagtagctcatgcctctaatcccaacactttggaggggtgaggcaagaggattgcttgagcccaggagttcaaagctgcagtgaactgagatggcaccactgcactctatccagggtaacagagtgagaccctatctctaaaaaaaaggaactttaaaaaaggaggtaattccgtcacttgttcattatttgggggatcgagttctaataagcatatttgacatataaatatatttgtaataatgcagaattatttaaaacaaggttttgcttcctctgtgaagcatgaggtatcctattatgctttacgtaaagaatgaagaatgaataggtaatcatgtaagtataggga

SEQ ID NO: 3084 - DNA, 1197 bp, Homo sapiens
tagtttcagaaaaattattatataaagtgaagataatacacacattactggtgactctaaggattacttgagataatatatttaaagtgcttagataggctctacaattagtaatgctcaatggatggtaacaatttgtagctactaaatattgcacctaggattttacatgtttgtatttatcttagcacaggttatcttttcaaattataaaaagtatacccttccaactccagataatcaaaaattttcaattagtagaatctgaaatgagatttttagatcatcaaagtctcttcttgtaaatgtgttagataggctttgtatctgcattttattttctaagagcatgttagggttttccttatgtgggaggtatgttacttgaaaaaagtgtaagtaaatgattattttaaaatgtattcttgtttaataaacgagtaaaaaattcatatagctgtcagctacatagtcgcctgatttgtttcatatattttgtggattattagtctttgccttatgtttgcactcagattctggcaattaaccgtggagaaaatttgaaggtactgacggttaaggtcaatatttctgatggagtgaaggatgaattctgtaggtggtgcatccaaaacaggtctgtttacagatatttacagaattttctttgtttcttttctaaaatatgataccgatatctatatgtactgatatgtaaagatgtctattacgtgaacatttttaaaaagccagtgacaggccgggcgcggtggctcacgcctgtaatcccagcactttcggaggctgaggggggtggatcgcgaggtcaggagttcaatatgagcctggccaagatggtgaaaccctgtctctactgaaaatacaaaaacaaaaaattagctgggcatggtggtgcacacctgtaatccccgctacttaggaggctgaggcagagaattgcttgaacccaagaggctgaggttgcagtgagccgagatcacaccactgcactccagcctgggcgacagagcaagactccatctcaagaaaacaaacaaacaaacaaaaaacccaccaataacagacaaggtatgtagtgtcctttttgaattaaaaaaaataataaaataagtatgtgtgtcatgcatatttaaacagagaatatccaggagggtgtgtgaggaatttttgatagtg

SEQ ID NO: 3085 - DNA, 1203 bp, Homo sapiens
gtgaatctttcccactgaactccctggtcagtgtggcctcctgctcctcctcttcctcctcaagaggcctacctgggctgtcttgccactgaccccacgtttgctggcaggtggaactcttacctgtccgggccatgggctctgggcttgcttcacatgctggaccatttctgttcttggccttagaatgcatggtgaagtgcttgcaggactgtcctcagcccagggagctctggctccaggtgactctcatttcctctctgtcaactgtcccaattcctaacccactcccactctgagctccgtagcctgtgtctggctgctgtctgctttcctgcctgttctgtctcttcctgagaacccctgcccatgaccgtctggctatcttagagcacactatgagattgtgtgaagaggatttgcttagaggggacttggcattttaatgctagcagtaaaacaaacctgccatgctgacttctattgcattaaaaagtgaagcaacaggcttgcttaaacataaacagcaacagtaaaaacccagaactacctaactacatgggcacaggaaatagtccagccatcttggagaatagcacaaaaatacagctgacgtgataacagtaaccctgcaatgagtcttgacaatgctgaagtcaaatgactttttcaaacctttctaatgcttggctataatctaaaggaagcattgcacttcgagtgctgattttttatgaagctcgtaaacctttttctttaaatgccaatgtgctgaaaagttatgagtattaaagacttagaaagtgcctttaaaagtgtgggaaaaggtccctcttttcttgattatgattcttgaatgctagtaatgatagtagtagtaataaatgtcattcttcactagaatagttttttccaaagacctttcgggtctactctcaagttctttcctatctttgtgtgaggtggacgatgtcactagcctcacgtggcagaacggggtcagaagctcagagtttaagtaatatggcctggaattagaacccaggagtattgctccttcttgtaaactctgatgcctgggtttttacatggtgtctatctgtaatggcttataacagagttgctcctccagaagttttagcctcgttcctgcttgataggcagggcctcccattgggcctgacccaggatacatgcttggtt

SEQ ID NO: 3086 - DNA, 1149 bp, Homo sapiens
aaaattcaagtctaaactaagagccaagaatgctcttttttatattggcctatctaaagcgttaatttggctcttactaataaacctgaatagttatggttaatgaagttccagcctgggcaataaactagcttccctctgtacttaatggtaattctgaggaaagagaggaatggaaagagtactcagtaattgagtaaatgtgattttttttttttttttttttttttggtcttttgctattgactcattttttgtgtacttcttctttttcagagtttgtacaaatgatgacagcaaagtgaagaccttgtacagaatgtgttaaatttcttgtacaaaattgtttatttgccttttctttgtttgtaacttatctgtaaaaggtttctccctactgtcaaaaaaatatgcatgtatagtaattaggacttcattcctccatgttttcttcccttatcttactgtcattgtcctaaaaccttattttagaaaattgatcaagtaacatgttgcatgtggcttactctggatatatctaagcccttctgcacatctaaacttagatggagttggtcaaatgagggaacatctgggttatgccttttttaaagtagttttctttaggaactgtcagcatgttgttgttgaagtgtggagttgtaactctgcgtggactatggacagtcaacaatatgtacttaaaagttgcactattgcaaaacgggtgtattatccaggtactcgtacactatttttttgtactgctggtcctgtaccagaaacattttcttttattgttacttgctttttaaactttgtttagccacttaaaatctgcttatggcacaatttgcctcaaaatccattccaagttgtatatttgttttccaataaaaaaattacaatttacccaatggttgctctgcatctgagtcatttaactgttgaagtctaataattttgaaaataaaatatggcattggtttctgcttggtatagtctagataattttttctcgtgtggggaagcatatggagatgggtggcagaaatagtgaaggtgggaaaggaaggagaaaaggattggaaaagtgagaaaagagggagagaagcacagaaaataagaggaacaaaataaggggtgtaa

SEQ ID NO: 3087 - DNA, 1136 bp, Homo sapiens
aaagggaaagtagcctgttttaatttagtaggtgattgatttagacatagtggctaactctaaacacagtatacagaaacagtttaattactctgtagaaatacgtatttgggtaccagtagtcttatttttgttttgtgagtgtaggttaggtctgtaattttgaattatgttccacagagcagcttcagtgacagaggagccagtcatttggggatttggttcttttcctctgtaaacctaggataattttacttaggtcagcatgaaagtacagtggtatgattggtcaaagatatatttgaaatattatcataaggtatcataaagattggttaatctttaggagtcaaagtcacatttcaattgctacctccattggtatttttccgttaaaagtttttgggtttttctgagacgtggggtcttacagtttggccaggctgaagtgcagtggctgttcactggcacgatcccaccactgagtaggctttaagagttaatacgtttcatttaggttacattttattattaatctgtgtatttggattgtggtctttctttcaaacagaattcaaagaagctttttcactatttgacaaagatggtgatggaactataacaacaaaggaattgggaactgtaatgagatctcttgggcagaatcccacagaagcagagttacaggacatgattaatgaagtagatgctgatggtaagtcttcaattttgtggggctgggaggggttgaagaagtgatacttagatgtttccactaaacctttgctgtttgcttatatgtttccactaaagctttgatgtttccactaaaccatttcaggtaatggcacaattgacttccctgaatttctgacaatgatggcaagaaaaatgaaagacacagacagtgaagaagaaattagagaagcattccgtgtgtttgataaggtacgtcaaggactggatatgttaaattttgaggatgaaatgaagataccaggactcattatgaagacttgtgtttttttggttgtttttttttttttttttttttttttttttgatgatttaccaacatattttaattaccaagcaaaagctttttaagaattcagtatagactttctaatatatgt

SEQ ID NO: 3088 - DNA, 2396 bp, Homo sapiens
cgtctacccctcaataaggggcgggaaagtgggtgagtgtggcagggaaggatacgtggaagaggaaggttctccagccaagcgcaaagcaggcgactctgccgcctggcgcagttgccaggacagcgcggcccgagcagcaacggcagaagccgcaccgcgtcccggcggcggctgcgagtcccagtgacgcattgcaggtacaaaccagccaatcagaggcaggctcaacgaccaacgggggacgcatcgccgccacgatgctcctccgcgccgcaaagtagcgcccctcaggggccgctccaccggccttttaacggctcgctggaaatgaaacccacttacgtcatccgttcgcccactttccttgatctcttgcctcatcgaccaaataactgtgaagaaaggggtcccgagaagagtttgaggggagggggttggccgggactcgtttgcgatgttccgttatctggatgcggcggagggatctggcggagggaggtgtttatgaggcgctgggggcggaggaggcgaattagtccgagtggagagagcgagctgagtggttgtgtggtcgcgtctcggaaaccggtagcgcttgcagcatggtgagtgcatcgctgagctgccggcgctgggcctgtggggggaagagactggagcgaactgactaaacaaaggaaactcgcctcccttacaccttcaaggagtggtttctgccagagggatggcgcgaaagaggccagggatgccggcgacggttgtgtcgcaggtgctcccccacccccattctcttcaggggggcttcctctagtgagttgagggccggacgcacagttcccgaggtggtgaagctcctcgggggcttggctggaggaggatgggtccgggatgagggacagcccagtgcacgggaaggagagaaagtgaaggaagggagagagggagcgtagagagccttctgtcgggcgtctggaaaggtcaagcagggggcgaattcaatccacccgaccgacggttagtgcgggcgccaggaagcgcctttgtccgcttgcggccgccatgcgcccagggggcgggaggagcgcgcggggccctggggcgagcgtcggcgtcgcagttagcccgcgtcctccgcgtgccgggatccagggggcgcgcgggcgggcgggcggcgcgctgtgtgggccgagcccgcgcggcgcagggagcggccggtgggggcggggcgggcgagcgcctcgcgggacccggagccgccgccccgctcggccccgctcgagctccagctgctctgctggcacctgcaggactgcggagatctccttggcgctgcggggccattggcggggatgggcgggggaggggggcctcgacggtttcccatccccctctggcaaccctaatcttccttctccatctgggccctggggcgtcttccaccacccaggccggatgctttaaaaaaaattgctttttaaagtgtctgtcgttgaaagaaattagtcttacccttgaagtcaggggcgcgtcctcgcaatacacatcttgttagggaaagtgttcggctccagctagggttctacaaggcgtttcttgttcaccgccggagggaagcaggctccggagtgactgccttctgaaagtcggtcttgtaacaattggatggatgcctttgaagagcccctgtccctattctatgcttgaaaacagcgtgcagtcctaatgttcaagaaccacgaccacataaaaacattgctccccttctgctgctttgaaaacgacccctaaattccgtgtagaagttgccaggtcgtcttgacgtacacttcgtttgtatgatgtttgtctgtcaaatactgtgatggaagagtgtatgcgggggaggagcagggaatttttaaaagcattttccggtcacctcagactgggagatcatgttctttcctgaaaaaaaaaaaaaaaaacacctaatgagggcggtgatctgtgatacttactttgtggttcctcctgccaagtggttacagcgatgggtgtgtccaggaggcaaggtgacatcttaaacaggagttagggatccttgccaactgaaacctccagcctgtatgggtgtggggagacgatttcaccttaaataaaactagcgttcattgacgtttgatggatttgcttcatcttgatgcttcaaatgttattctgaatttgaatgtgctggttacatttgctttcttaaagatgtagttacaggcatatgtaataaacattacaagttgtggagtaagcttttttttttaaataaacgaagggtaaagttttctttaatcagttttgataattgaatcagtaattcgaatagattttttcttggtagagttggtatctacgcatttgtg

SEQ ID NO: 3089 - DNA, 1160 bp, Homo sapiens
gagaaaaatgagatgatgaagcactaacattagtcaagaataggaggcaggaggaaaaaaggtgatttggggtagaggagaggcaactttcacgttttgtacagttacattttttcaacaaattttaaatttttcaatatatatatttttaatagagatggagtctcactatgttgccctcactggtctccaacttctgggctcaagcaatctgcctgctttggcctcccaaagtgctgagattacaggtgtgagccactgtacccagccttcagtaaattaaaaaaaataagaattccaggtcaggaaataacaatggcagtataattatcagcatcattattagtatattaattttatcaagtgcttatgatgtgccaggtacttttctcaatgttccacactattagcttattgagtcctcataacaaccctgaaatacttgatataacatctccattttgcagatgaggaaaccaagtcaaagagaggttatctaaagtggtggaacatggatttgaatctaagcagttgctcttccacactcttcaccaccatgctaacccgaacaacaaaaaaacctttttgggaggcatccccaggtcagaagtattaagtggttattacacaccaggcacctattctagaggctttacataaattatcaagctttatttcattctcacaataatcctatgaataggtattgcaatcccttccccactgaaactttctggaatccgaaattctgatacacctatatagctatatctacatctatgtagatacagatagacacacacacacacacacacacacacacacacacacacacattcttctatgtatctaactgtagttcacatataaagtaatcataaatcactcctattgagataattagaaaaaaaggaatcatgggctgggaagagaaaagggagaaaaagcagaggacagaaaagacgaaaaggtttgcagaaaaactttagtataacagaaatcaagaaaatggagggaaagtaaactcaggtcttagtagtaactcctgagactttaagaaaaaggaggctgtgaccataatttggaatgacatgatgacggcagaaaataaaagtggttttggaaggggaataaattaatactgctttgctactcataaa

SEQ ID NO: 3090 - DNA, 1127 bp, Homo sapiens
tattgtaagctgctatgtatggatttaaaccgtaatcatatctttttcctatctatctgaggcactggtggaataaaaaacctgtatattttactttgttgcagatagtcttgccgcatcttggcaagttgcagagatggtggagctagaaaaaaaaaaaaaaaagcccttttcagtttgtgcactgtgtatggtccgtgtagattgatgcagattttctgaaatgaaatgtttgtttagacgagatcataccggtaaagcaggaatgacaaagcttgcttttctggtatgttctaggtgtattgtgacttttactgttatattaattgccaatataagtaaatatagattatatatgtatagtgtttcacaaagcttagacctttaccttccagccaccccacagtgcttgatatttcagagtcagtcattggttatacatgtgtagttccaaagcacataagctagaagaagaaatatttctaggagcactaccatctgttttcaacatgaaatgccacacacatagaactccaacatcaatttcattgcacagactgactgtagttaattttgtcacagaatctatggactgaatctaatgcttccaaaaatgttgtttgtttgcaaatatcaaacattgttatgcaagaaattattaattacaaaatgaagatttataccattgtggtttaagctgtactgaactaaatctgtggaatgcattgtgaactgtaaaagcaaagtatcaataaagcttatagacttaaaatatgctttggtattttcatttcatgaaattgcagcagattaaaaatgcacacagtgggtaaactgcttcaaccagcgaatggtagcttgtgcttttagaagggtttttttcagctgatggtgcagctgtttgtttgtttactgtggaaacaaaagtcaacaaatgtgtttacataatcaaattttatttgacacataaaatgtttaagtgatgtgttttatactttgaaaataaattcatgcaccaatgttttaactcacatatatcatacagtgcaggatttatgaacatacataaaatcaaaatcataccatataaacgtttacaaataagtttttcatgacacacggacact

SEQ ID NO: 3091 - DNA, 1109 bp, Homo sapiens
aaacgtgatgagacaacatagtgtcaactttaagaaaaaaaaaaaaacaaccatagtcataactaccatttactgagtgcatccttgtgctcagttgcattaggcacttttctcactgaattctcatgataatctccactttataaatgaggaaactaagtttagagggaagaataaataactttgcaaaattacctagccaggtaagtggcagagcatcagattcaagcccagatcagtctggcttcaaagtgtatgctttttctgtgctagtcagcagacagtgcatatcaaggaaataccccttactgctgagtttttatattgcccctaatttggaaacagttggcttttatagtagaatattttcttaatttcttacagatatataatttctgattgacatttaggggaaaatcactccaattagtgacaattatgatgtgttttgttttctagggcatatctggaatctgaagttgctatatctgaggagttggttcagaagtacagtaattctgctcttggtcatgtgaactgcacgataaaggaactcaggcgcctcttcttagttgatgatttagttgattctctgaaggtaagtttattttgcctttcatttttgatatacccagaatttagtatcaagagagttgagtgtaaaattctgttcttctatattcaagtaaatgataaatattaattaaatcacatggctgtaaacttgtgttttaaaattcagaatccaatcaaataaggatgaagaagtgctattccctttttttttctggtcatacttaatacagagagtcctgtattcctttttaaaggagaataagttataaatcatacttgtgggccgggtgtggtggctcacacctgtaatcctagcactttgggaggccgaggcgggtggattacctgaggtcaggagtttgagactagcctggccaacatggagaaaccccgtctctactaaaaatacaaaattagccaggcgtggtggtgcatgcctgtaatcccagctactcaggaagctgaggcacaggagaatcgcttgaacccgggaggcagaggtttcggtgagctgaggtcacgccattgcattc

SEQ ID NO: 3092 - DNA, 1173 bp, Homo sapiens
tcccgggaggaaagtttccactctcagttcccccaggataacgcccttccggtggcgcgccagaaaccgcgccgacccctcccagccagcagcccgccccctttcccagtgctctaacgacatacggacgccagctgcgggcaaggccaagaccccaccccaactcacggttacccaaagtgggggtggagctcccagctctcagccccgcccattgaacgcaatcccagccggtaagagagaggaagtgccgtagtccccacccactttcatctccttccctttctgttggcccggctggtcgcctatcttctcgatcctgtagccgattggctctctccctcccgcgccagtccctgccctcccctggggagggtgagtcacgccaaactgggcggagagtccgctggcctcactcctagctcatctgggcggcggcggcaagtggggacagggcgggtggcgcatcaccggcgcggaggcaggaggagcagtctcattgttccgggagccgtcaccacagtaggtccctcggctcagtcggcccagcccctctcagtcctccccaacccccacaaccgcccgcggctctgagacgcggccccggcggcggcggcagcagctgcagcatcatctccaccctccagccatggaagacctggaccagtctcctctggtctcgtcctcggacagcccaccccggccgcagcccgcgttcaagtaccagttcgtgagggagcccgaggacgaggaggaagaagaggaggaggaagaggaggacgaggacgaagacctggaggagctggaggtgctggagaggaagcccgccgccgggctgtccgcggccccagtgcccaccgcccctgccgccggcgcgcccctgatggacttcggaaatgacttcgtgccgccggcgccccggggacccctgccggccgctccccccgtcgccccggagcggcagccgtcttgggacccgagcccggtgtcgtcgaccgtgcccgcgccatccccgctgtctgctgccgcagtctcgccctccaagctccctgaggacgacgagcctccggcccggcctccccctcctcccccggccagcgtgagcccccaggcagagcccgtgtggaccccgccagccccggctcccgccgcgcccccctccaccccggccgc

SEQ ID NO: 3093 - DNA, 1140 bp, Homo sapiens
ccactcatctcccaggaatctacatgacctgctattttcagatttctgaaatgtcaccttatcagtaagctcttttgtctttcctgacttactgcccttatagaaaatggtatcctcccaccttccttactctctatcccccataccttgttttatttttcttcatacaacttaacccctatctgtcatactatatttctatatatatataatttttttctttctttttttttttttttttttgagacagaatctccctctgtcgcccaggctggattgcagtggtatgatcttagcccactgcaacctccacctctctggtccaaatgattctcatacctcagccacctaagtagctgggattataggtgtgagcccctgcgcccagctaatttttatattctttaatagagactgggttttgccatgttggccagactgatctcaaactcctaacctcaagtgatccacctgcctcggctttccaaagtgctgggattacaggcatgagccgctgtgcctggactattttttttcttgtgtgttgtctgtttctacatgaatgtaacctttgtgagattagggactttgttttgttcaatactgtgtctccattgtctagaataatggcagacaaacaataggtgtcccccaaatattgaataaataaatgtagcacaacttaagcattgccctagattttgttttactagatgttttccctaatgtttccttgcccccttccgtaggctgatgagatgcccctctggccttctgtagcctattgtgcttacctctgtcacactgccttttctgctttgtagcagtggctcatttactagacctggaacacttgactgggaacccttgtgacttgtcaacacatccctaaatgtctaatatgaatgaatgaatgaatgaatggtaatcttggttggtttatgtaactcaatggcattttgtagatgttaaggaacaatccctttagctgtgttctggtttgagagcaccacaagtccaatgtcttatgaatagactagattattgttcagtgattattgattattcagcaaacatatgtttgagtactgctctgctagaaactgcattatgcacttgaatgcatatggtagaggaggg

SEQ ID NO: 3094 - DNA, 1044 bp, Homo sapiens
gtgagatggagtctcctctgtcgcccaggctggagtgcattcgcttgtcccggcttactgcagcctccgcctcccgggttcaagtgatttttgtgcttcagcctccctattagtggggattacaggcgtgcaccaccatgcctggctaatttattgtatttttagtagagactgggttttaccttgttggccaggctggttttgaacttttcacatcaagtgatctgcccacctcgacctcccaaagtattggtattacaggtgtcagccactgcagacaaccaagtattgtccctaatattaaatgcggtaaaatgtgacatgtaaagatttagaaccatgcctaacctctagtaagggcttattgtcagcctttagtatcatgtatttgattaaggggtgttaccttataagtctggagcacatcacaggcttggtgtgctgtgacttaatttttgttttttgtcattaggaattcctcctgatcagcagagactgatctttgctggcaagcagctggaagatggacgtactttgtctgactacaatattcaaaaggtctgtctaggggaagagcagcctcttttaaaaaaaaaatgttattttggaaattttttattttactttttttgagacaggctctgactctgtcacctagggtggagtgagtggcgcagtcactgcaacctccacctctcagactcaggtggtcctcccacctcagcctcctgtagttggaactataggcacccgccaccatgcccaggctggtctcaaactcctgggcataagtgatcttcccaccgtggcctcccagcgctgggattacagacgtgagccactccatgtggtgtattctggacattttgacacacaaaaagggaaaatggcattcgaatagcagtagatttttaggtaactcctatactgatacttgagaagcactgctatagttctcccattatgaattttgcaagttgtatcccatggtgtaatgtaatgcattctttaatgtccctataaactgtcagttaagaatctgat

SEQ ID NO: 3095 - DNA, 1044 bp, Homo sapiens; identical to SEQ ID NO: 3094

SEQ ID NO: 3096 - DNA, 1178 bp, Homo sapiens
cattgctagattccttcagcatttttctcttattcttgaatgtcccagagagttcaccgcagtgttcccaattctcaggctcatgatcaagagcccctaacccagtctgtacacacctctaaatatgtgggttttagcttttccctcttttagccagagggatggtagaaagttttacagagaaaataaaatcccaaggtccatgccctaaagatgaaggctaaaaataaagacacatatggaaaattggtttttaaaagttcctttcaaaattttttgctatcacactaaccaacagcaaaatattcactttgccacacaatgtttgatgtaagggaatgagattttcagagaaaatcactcttaaaccttcacaactagacttcggtggtaaccgagaatagtgacaaacctgagtaaaccccaaaataggagaattctgataaatgtatgttgatggcaattaggataactaactctatagtttaattaatattaatatattgtgttgtatttaagcttgagttgagtgaaaggggttgaagggaattgcacaaaccactctgagtgcctcatgccagccccatacgtgaaatgactcaggctcacctaccctgctttgcatttcggagacttccatcctgcaggcacctttcttctacatatggttgtaatacgcagacgtgctgctgagtttaggaatgcattaccctgattcctgctcttcaaaattctgagacatctggtatattcaacaacatcagcagttttggggagccagatgtattcagcactgcaattttaaaagtggctttaaggagcagagcctccctttgagcctccattctcctaagcctgacagatgctgagctgcagatgctcattcacaaaagcccacacgtgcatctccacctgaaggatgctctgaaggcagagccaactcacctccaaaactagacttaccatttatccaaccaaaactacttcccattctttatcttagttatcaccagccctagccaaccactggcccaatctataaacctgtgagtcatgttcaaagtcccccatctccctcaatcctcacatccacctacttgtcaattctaggccagaaagcccccacctgccagcgcatcaacaatgaactggcctagactctgagcgcttcagaggaa

SEQ ID NO: 3097 - DNA, 1195 bp, Homo sapiens
tcaggacattgataccatttactatactgaatcctacttgaatgtagtatcttactctcttttagcataatgagctgtgtatgtacttaatggggccacagatactttactttgtgtatctactccaaatacagtaaacatttcattagtcttattttatctacattgatgattcattgaagttagagagttgatattgttcattgtcagcatcactaagataaatagcaactcaaaatgaactaaattttccatttttgacccacagaggtttcaagtgcacattatttttaaagaattttgacattttagaaggaaaagagattttgtaacacttctagttgagttttgtcatttttacatgtgaaacagccagagaaattaaatgacttgttcaggatcatacaacttagttagcagagctggaaccaaagaaagctgaggtctctgtctacatttactttgagataatcacgatttttaaatatggcatacaaattgtttttccagtgattacagcaatgatactctgaagcacatcatctgatatttttaattgtctgaaatagaacttcctcttttaatttcagcatgatatttttttctttttttttttttccagaagtagaccactggaatatttttatatgatttcttatctatttgcctttgtgttaattagttctacatagccagattccattagtcagagtgtatattgatagtaaatctttttagccaacttattattgtagctaaatgttaatttttttgaaagtgttgatttcaaatgtttgttaaatactgtagtgatttttttcttcccttttacttacccagcagagtactgaaaaataagaggctgaaaaaagtgaaagcctaaaacttcttttaataatttgtcaaatgaaagatttcctaaaactaattttctttcagtacatttagctttttaatgaaaagaaatgggtatttttaattacatgtgactttgaagaatcagaattggattatagagaaatcattaagtatgattctctaataaggaaattgattttaagaaattttatcttttgcctttgttaacttaaaaacttggtttgtcctcatgactgccagtttttatatgactagttgaagaaataattttgtatttagcaatctttcaaaggtttttcttgctaaaaactgtttt

SEQ ID NO: 3098 - DNA, 1200 bp, Homo sapiens
tacagatataaaacctgtaacctcaacattttctatgctcttaacgtaaattattgctaattaacaagaattatattctaatgtatgaaatacgtttaacatcggtctccttgcaaaacatttggctagtggtgttcagagaaataccaaaacgtgtttttatcattgctggtatattattaaaaatcagacaaagtgggacacaaagaaaatatgaaaatacaattctcatggtgtagtctactgatttgcattgacatcttttctcagtggcaatcaacatttcctttctgggcatctgataatttctctgcattttaatgcaaattcccctttccctaaaaaccttcctaaccctcagccatttaccccctccctcaattcaactccatcctccttcgccccaacaataccaacatttctaagctccggcctaaactccggctacaaagcagggagtcctcgattgaagtggaagggagtgggcaaataatcataataattagccgcgaattctctctacgaggggaggaagaaatagaaaataaaatgcttctacgttcaaacagcaagacagcctggaacgtctcaatgtctcagtgacagactgagatctctttcctctctgtgtagttgcaaaagaataaatttaagggaaaaaaataatccttataggaaatgttggtaaggagcgagcaaaacgagagctgccggggagcggagggggagggggaaagggagatgtgtcttcaagtttgctttccaagtccttctccttgattgtcttaacagggtaaagaagcaaacggaggctgaaattcagagaggaaaagcaaagaaacaaaagcaaagccgggggctacaggcccggggcaggggccccggcaagggtggaccgtgcagaaagtgaagttgggcgcggggactctgaggcacaaagcgagcagcgtgctggctgcaggctcccgccgcgcttgctgcgaacacgtgcagcagcggccgcggggccttggggcccgggggcccggagacggagggcagccaggggccctgactgctgcctccatgcccgtccagctcggccagctcggccgcggggtgacggttccctgggcctgccagttggtgaaaaaggaagtgaggtttggaaaacccggctggttaacctggtgcagtctcagtatctccgcacacacctca

SEQ ID NO: 3099 - DNA, 1195 bp, Homo sapiens
aaaaaatatcttatggagcaatttcacttttgacccctcactcttactttttcatattctgcgatcacagactcagaacacatccatttgctaatcagatttgtttctttcctggaggattgtgactttttaactgctgcatcattaaaaaattttttttcatatgtttaaggtaagttctttagcatcaacagttctaaaggttctaaaggttctctgccctttcagatcagtgcccactgttttataacatatatttgtaacatcccctttagtaggttgaagtgaaattcataatctaccttacatgaatattttcaaataaataaaaattatgttctaacagcaatatcaagaattaaaaagaaagcaatttctaggaaaataatatcgactacagtatgtaaatgcttgggcataactacatcaaaagacataatggggccagatgcagtggctcatgcctataatcccggcactttgggaggctgaggcgggaagatcatttgagcccaggagttcgagaccagcctgggcaacatagcaagaccccgtctcttaaaaaaaaaagacataatgggttgggtgtggtagcacgggcatgtagtcccagctgtttgggaggatgaggtaggaggatagcttgagcccaggaggtggaggctgcagtgagctgtgttcatgccagtgcattccagccttggtgacagagcaagaccctgtctccaaaaaaaaaaaaaagacataatgaagttgccagatgtttgtacttgtacctagaatcagtgtgaatgcaagtgctgcaaatgcagcctgatactactgtggttttttgtttgtttgttttctgagacacagtcttgctctgtcatccaggctagaatgcaatggtgtgatctcggctcactgcaacctccacctccccagttctagcgattctcgtgcctcagcctctcaagtagctgggattacaggagcacaccactacgcccagctaatttttgtatttttagtagcgacagggtttcaccatgttgcccaggctggtgttgaactcctgacctcaggtaatccacccgcctcggcctcccaaagttctgggattacaggtgtgagccaccacagctggcatactgtgttgtattgatgagctgtcagagttacaattttccaacttttaaaacattttttaata

SEQ ID NO: 3100 - DNA, 1211 bp, Homo sapiens
tttttttgaggtagtcttgctctgtcgcccaggatggagtgcagtgatgtgatcacagatcactgcggcgttgacatcctgggctcaagcggtcatcccacctcagcctcccaagttgttggtgcaccaccatgcccatgcccagctagtttttgtattttttgtagagacagggtctcgccatgttgcccaggctggtctcaaaactcctgagctcagcaatccacttgcctcggccttctaaagtgctgggattacaggcatgagccactgcacccggtctatttagtcttctattaatgaacatgtatgttgttttcattttgttttaaaagctccactgaatatacactgtgagctcttgtgtgattatttccctaggataaatttttggaagtggaaaatttctgggtcaagagtatgctcatttaaaattgtgattcattgccaaattaataggccagacttttaaagaggcaggtaagtctagatgcaatataaaacaaggaaattataagtgatagctatcatttattaagcacttcttgtatgtcagggagtaaacgttagtgctttatgcacactactttatttaatcgttggaacaattctgctttatggaagagaatgccaagacttttgttatttaactgtcccaaatcatgctgcaaatataagtggcagacctggaattcatatgcaggttccttgactccagtggtaaaggcattaaaaaggaagatgctgtctgtggaatttctttttcttagttttggcagctcagaatcaggcttgttttttgagatgcccgggctggagtgcagtgatgtgatcacagctcactgcagccttgacctcccaggctcaggtgattctcccacctcagcctcctaagtagctgggattacaggtgtgcatcaccatgcccagctaatttttttttttgagacagagtctcactctgtcacccaggctggagtgcagtgtcacaatctcgacttgctgcaaccctcacctcctgggttcaagcgattctcgtgcctcagcctctcgagtagttggaattgtagatgtatactacgcctggctaatttttgtatttttattagacacagggtttcaccatgtcagccagcctggtgttgaactcccaacctcaagtgatcctcctgcctcagcctcccaaagtgttgggattacaggtgttagcc

SEQ ID NO: 3101 - DNA, 1219 bp, Homo sapiens
ggcagtaatcttaattatgatggaattatcattatgctaagtaattaactttacctagtttgttttacaactagaacctgccctaaatgttgaatatcttcctagcaagaaacagtctgtcattttacttacacgatgtctaaccaaaccataactttacataaactagtcgtttcggtcaaatagaaaaatgtgtgaatgccataaaaacaaaaattctcagttaaatgatactgggaaatagggaagacagcaaagtgagacttgggctcaggatggttcaggaagaaaaaaaaagaaagacccctgagtaccattaatattcctcagaaattattatttcaaaaggaaatatttctgtattataaatttttcatgagcagccattatgaaatctcacaagaatcatagaattcaataaaaaaggtagaaagtaatttttttacttaaaaatataaattaaaataaatttttaaaatcataagcacataaatagaacttaccagggagaaagaaaaacctgaaggcacaatttcttttctgttcaaaatgtgaacccaggatgtctctagatgatgatggatgataggtggggagattttttttttttttaatacagaatctcatagttttggattaattagcaccaatcagtttaaacactgactgttagaatagctgcatgggtttttttctttaaactaattaagcgttggctacttagtataagtaagtataagccgaattaaggttctgctacatctgtgtttagaatatttttttaaaactaaataagtgttggctagttttgcggtgtaagcagaattaaggttctgctacctctgtgtgtagaatattcccaatggatttttcatttttcaggtgctattttttgaccctgtatagactttaatttaaaatgaatttggtaacgtttctcctctgtctctacatatattcatgctttcacctgctcttttaacacctgcttttagtatctgaggcactttttctgaactctacttgtgcactggatccctcctcctttctctgccaggctgtgtttactttatccttacatcaccacttagtgattcctttctttgtataaacatggtaaatgtcttcattagcctaaaaggaaagaccaaataaaacctttcctaccacttggatgcatttgcatcctgacttctgaaatgcctccagcctccatttt

SEQ ID NO: 3102 - DNA, 1160 bp, Homo sapiens
ttatctgtgtgaccttggtctttgcttctccaagattcagattttccagagcactgttacctccatccagggtcattgtgaggattaaatgagaagtttatacagcacctaggtcaatgctttgttgatagtaactgcttttacaggttagcgcaactaataagtcactaactcctcagcattataacataggcttaataagtttaacaccaagttctttccttgggtgtaagtttagccttaaaagacttctaaagattttccaaagttaatgttctgtaattagcatatatgtaatcaaataggacttttatgtatatctcattctttctttataacttaaatatatattatctggttacaatttaacacccagttctttcctttggtgtaaggttagccttagaagacttttaaagattttccaaagttaatgttctataattagcatatatgtaatcttatatattgaacttttatgtatatctatttctttctttataacaagtatattttaccatatctgtatgttattacaaagtaaattatcattatttttcaattaagaagaaaactaagactgtagaacattgaatgatttgacctcctcaggtaccttttggtaggtcttctgactgcaaatgctgggttccctctgttaaatcatactacttcctgagaagaaataaaagataaagtgggaaaattctgcatcttaggcaagctaaagaaaagtggtttaaaaattattgccacttcaaaaataacaatggcagaatagaaggtatctatttttatcacctcttgggatctttttgtggggccaaggggaaagcagaaagatactaaaagagatgttcatgtccctttttattcattttaattattaaagggaacagtggctttgtgattaatgactgctgttcagtctattttatatcttacaaggatctgacagttttgttttacattttatagctgcagcttatcttctggtgtcccttataccaagcaattcattccgtcagatgttccggtcaacaaggtctttgcacatcccaacccgtgaccttccactcagtccagacacaacagtagtcctacatcaggtctacaacgtgctccttggtttgctctcaagagccaaactttatgttgat

SEQ ID NO: 3103 - DNA, 1377 bp, Homo sapiens
taaatttgtataagaatatgagggaaacattgggtaagttaataaatactgttaatctttacctttataaatctattctggggtggaaatacattttaggaaatgtacttgtagtttctaaatattttctaaatgtattgttactcatcaataaaattctgctcattatttgcatttgaaaccatgtttttctttgtagtttatcttactcatctggattatgtagatacagaaagaataatgacagagaagcttcacaatcaagtgaatggtacagagtggtcatggaaaaatttgaatacattgtgttgggcaataggctccattagtggagcaatgcatgaagaggacgaaaaacgatttcttgttactgttataaaggtatgcaagggataggtatgaattagaattgctaaataagtattatgttgttacaataaataatacaaatttgtcttatttacaggatctattaggattatgtgaacagaaaagaggcaaagataataaagctattattgcatcaaatatcatgtacatagtaggtcaatacccacgttttttgagagctcactggaaatttctgaagactgtagttaacaagctgttcgaattcatgcatggtaaatctctttctttactatattttgcttttatttttattgaagaaaataaatgaatgtttttgtcttgttagagacccatgatggagtccaggacaaaataaatgaatatttttgtcttgttagagacccatgatggagtccaggatatggcttgtgatactttcattaaaatagcccaaaaatgccgcaggcatttcgttcaggttcaggttggagaagtgatgccatttattgatgaaattttgaacaacattaacactattatttgtgatcttcagcctcaacaggtatgttaagcactgagcatatgttatttttagaaagtaacacttgtatcaatctgtatgtatcaatggaaataggagggcaactattggatccaatagaagtgtttctgattaaattttctttcttttttccttgagacagggtcttactctgttgcccaggcttgagtgcagtggcacaattacggctcactgcagccttgaactcccaggctcaggtgatcctcccaccttggcctcgtgggtagctgggactacaggcatgcactgccatcacactcagctaacctttttcccccccttggtagagatggggttttgccaagtggcccaggctggtcttgaactcctagcttcaagcgatacgcttgcctcagcctcccaaaatgattttatatgtgtgagccaccacgcccagcctggttaaattttcatagtgagacagattcttgaccagaagattg

SEQ ID NO: 3104 - DNA, 1179 bp, Homo sapiens
ctctgttgcccaggctggagtgcagtggcatgatctccgttcactgcagcctccgcctctaggcctcaagcgatccaccggcttcatccttccaaagtgctgggattacaggagtaagccactgtgcccaagccatcaataaatttttatgggttagaagtttgggccaggcctggtggctcatgcctataatcccagcagtctgggaggccaaggcaggtggattacttgaggtcaggagtttcagaccagcctagccaacatggtgaaaacatgtctctataaaaatacaaaaagtagctgggtgtgctgggcgcagtggctcacgcctgtaatcccagcactttgggaggccgaggcaggcagatcacgaggtcaggagatcgagaccatcctggctaacacggtgaaaccccatctctactaaaaatacaaaaaaatagccgagcatggtggcgggcgcctgtagtcccagctacttgggaggctgaggcatgagaatggcgtgaacccaggaggtggagcttgcagtgaggcgagatcgcgccactgcactccagcctgggcgacagagcgagattctgtctcaaaaaaaaaaaaatagtagctggatgtggtggtgcgtgcctgtaatcccagctgctcaggatgctgaggcaggacaattgcttgaacccaggaggtggaggcggaggttgcagtgaaccaagattgcacctctgcactccagcctgggcaacagagcaagactgtctccaaaaaaaagaaagaaaaggccgggtgcagtagctcacacctataatcccagcactttgggaggccgaggagggcggatcacttgaggtcaggagttcaagatcagcctggccaacatggtgaaaccttgtctcttattgaaaatacaaaaattagccaggcatggtggttgatgcctgtactcgggagcctgaggcaggagaatcacttgaacctgggaggcagaggttgcagggagccaagattgtgccactgcactccagtgtgtgtgacataacaggactccgtctcaaaaaaaaaaaaaaaaaagaaaagaaacacatggaaccaaatcaggatgaaagaaactggaatagcagtttgttataggctgggcttgttggcttgttcctgtaattccagcactttgggaggcccaggcag

SEQ ID NO: 3105 - DNA, 1276 bp, Homo sapiens
acttcccctcccccactctgcgggcaaatcgctgctgaaaagaggtaggggccgaagcggcgggctcgtgtggagccgtgaggcgggattgactggcgctcgggccaatgagagataggctcatggcgcggctgtagctggaactgaccaataggagggcgggctgggggcggaggcccaggttccaaacgctccgcggcgccatgggctgaaaactcaaccgagatggaatctcccagtctgaaccggtttcaaccggttccgagtttgaggcactaggaggagggggagaagcggctgcagcggccgcggcaggagcagcgggagctacagcatcagcaagagcaacagtagctacagccccggcggcggtgcctgttccagtctttgctgctgcagtccgtgcaaccacccagagggggaggggggaaccaccagtcgctgaggaacaagagaaggggggaaagtttaggcgagccttgggggggggggggccagcgccggagccgcgtgagagagggagccgtgttttggtaggggggagtcggactgcaactggcagcagagcgtctccccggccgtgtggactctacaccccctactcctgccgcttctgctgctgcctgtggctggagggtccccctggggctgaatctttgggacttgaccccgttccctcccccttccctcactccccagccgggcgggagcatttattccccagattaattccccttttgggggggggcgggtgtgtgtgtgtgtgtgtgtgtgtgtgtgtgttgggggaagcgtccctgaaatagtaaatattattgagctctttttgcccttttcctgtccgtttttttaatttccttttttgaggtgggaaaactgaaacccaccttgattcgtcccctctcccccctccccaccttccctcgccctaatcccccaacgaggaaggaaggagcagttggttcaatctctgggtaagtcgactgtgtcttcggggccgagggtcgggcggcggcgcggccgggcgggcgggaggaggccggcgtggggcgcggcggcggcggccgcgggaagcgagcccgggaggcggcgggcgggccgggggcgcggcgggcccacagcggagcctgcgattgaatggagccgcttttgccgctgggggatggaggcggggaggcggcctcgggaggggagcgcttgctgggtcattcgcgtgtgcgggtggcggtggaggaaggcgaggagtgtgatagtgaagcggggccccgcgcggggt

SEQ ID NO: 3106 - DNA, 1222 bp, Homo sapiens
gaggcactatcatagatcaatgtagctagcctcaaactccagggctcaagtgatcctcccaactagctgggactacacatccgggccaccattccctgctaattttttttttttttttgagacgagatttcactacattccccagtgtggtcttgaactcctgggctccagtgatccttttgcctcagcctccccagcatctgggattacatgtgcaagccactgtgcccagcatgtatggaccttatttggatgcctggatttttgaagacactaaggagttattggatttttaatttgttattatggtattatgcttaacattattttaaaagagcatccctatcttttagagatacatagggaaatatttacaaatgaaattatgtgatatctggaatttgagtctagttaatcctgggtggagaatgtgggtaggggagacaaagacaccaagatagcctatgaattgaaaattgttaaggctgcttgatgagttcttggagattgaccctatcaatctgcttcttttacataagtacaacaagtcaaaatttaaaaaattaatagaagcaggacggtggccacggacatcagaatccactaaggactgtgtaacaactcacctgctgacaaaattaatagaaaagagaaagacagcattgctcctggccttcaatatatcagactcagagctaatgccaaaattccaagaagcatttttaaaagcaacacaaatctggtgttgaatgtctacatcttgacagtttgaggcttgaaggagcagttgttcctcatggacggtggggagccacaggcagagctgactttagaagctcagggcgttttgtcctggttgcatccagacgatccagacagcagggacaggaagtaatgacaacaaagacttattccatttgagtattgtcctgtagtacttggatttccaagaagaaacttggattcagggcaatcctttttgcccaagcctttttaatttttggctctcgttccagcgctctcacaataatgagcagcacaattcatgagagtaaactggatttttattgaatgaaagtaaagaacacaactattcaatgtagaccagagctctccagtagaactttcaatgatgatggaaaagttttatctgcactgtaatatggtagccacatatggctactgaggacttaaaatatgactagtgtgattaagaaactga

SEQ ID NO: 3107 - DNA, 1165 bp, Homo sapiens
gactgtaagaattgtgttcaccgcatggcatggtactgctttaggggcatccatggtggaaatcgtgtttctgattaataagaaatcattaaagatagcaagtgcttctttataatatttttccttttgtgtgtgtgtgtgtgtgtgtgtgtgtgtgtgtgtgtgtgtgtctacatttcttcacttttagattaccctgcaacaaagccacttttttcttttgtaaagttggactgttattgcgtattcttaaactattatgctaatgtaagggaagagaatttaaaattaagtactttgcaaacagaaattaacttctctattttgaaatgtaaaagtttaataaaactattaaggtgtgacattgaaatataactttaaaattttttttctagattcaagatggaaaaggtgatgtaaccattacaaatgatggtgctaccattctgaaacaaatgcaagtattacatccagcagccagaatggtaagtgtaattttaggtgagtctttttttttttttttttttgagacagagtcttgctctgtcatccaggctagagtgccgtggcacaatctcagctcactgcaacctctgcctcccagattcatttctcctgcctcagcctcctgagtagctgggattacaggctcgtgccaccatgcctggttgatttttgtattttcagtagagacgggtttcaccatgttggtcaggctgttctcaaactcctgaccttgtgatccacctacgttggcctcccaaagtgctgggattacagacatgagctactgcgcccggccagatgagtcttcttttttaagtgtgtttgatacttggtaaacagttaaatttatttgatcacatgatatttaagcacgatgaacacttttcgtgctgaacaggcatatttttaggatacattgtgtgcctaacattgtgctttttggtgtgaggtgataataaaacacaaatcaagccaggcatagtggtgcatgcctttagtcccagccactccataggctgacatgggaggattatttgagcccaagagtttgtggctgcagagagctataatcacaccacaacactccattctgagtgacagagtgaaaccccagaaaaaaaaaaaaaagctgggcacagtggctcacacctgtaatccc

SEQ ID NO: 3108 - DNA, 1215 bp, Homo sapiens
gatttatagctttattgtgtctgattacacaggtatatacatttgttaaaacatcaaatttaaaatgggtgcatattactagatgtaaattacatctttatctttttaaattattacaagcaaaagttttaaaatatttacaagaacattaaaaatacgtagtatgctaagaataaagctaacaagaaatatgtagacctttaggcagaaaactaaaacattctgaaagatataaaagagtaaataaatggaagggcatattatgttcatagattagaagactcaattttttaaacattttattgtggtaagaacagttaacatgagagctactcttttttaaaaaatttgagtggatacaatgttttattgcaggtctgcattacttattcatgttgctcaaatgaaactttattcctgtagattagtaactgcccatttctccctccctccagtccctgtctaccactgtttcgctctttgattccatgaatccgactattttagatgcttcatataagtggaatcgcgcagtatttgtctttctataactggcttatttcacttagcataatgtcatcaaggctcatctatgttgtagaatgtgacaggactttctgcttttttaaagctgaatggtattccactgtatatgtaccacattcattttatccgttcatctgtcaatagacatttaggtggttttcacatcttggctattgtgaataatgctgcagtgaacataggagtgctaaaatctcttcaagatcttgatttcagctttttctgataagtaccccgaagtgggattgctggatcatatggtagttctgtttttaattttttgaggcaccttcatattgtttttccataacagttgcactattttatattaccaccaacagtgtgcaaagattccactttctccacattctcaccaacacttgctactttagttttttaaataatagccattgaacaagcatggagtgacatctcattgtgatcttgatttgcactttcctgatgactagtgacattgaacatcttttcatgtacctgtacctgttgtccatttgtatgtcttctttgaagaaatgtctattcaagttcttagcccactttttaatcgggttaacagtttgttttggtgaggggtggctaatgagttataggagttcttatttattacttaaaggaccactggtttacttt

SEQ ID NO: 3109 - DNA, 1261 bp, Homo sapiens
ttgccaattgggtaattttcattagttgttttgtttgttttgatttgaaacctggaaatacagtaaaatttgactgtttaaaatgttggccaaaaaaatcaagatttaatttttttatttgtactgaaaaactaatcataactgttaattctcagccatctttgaagcttgaaagaagagtctttggtattttgtaaacgttagcagactttcctgccagtgtcagaaaatcctatttatgaatcctgtcggtattccttggtatctgaaaaaaataccaaatagtaccatacatgagttatttctaagtttgaaaaataaaaagaaattgcatcacactaattacaaaatacaagttctggaaaaaatatttttcttcattttaaaacttttttttaactaataatagctttgaaagaagaggcttaatttgggggtggtaactaaaatcaaaagaaatgattgacttgagggtctctgtttggtaagaatacatcattagcttaaataagcagcagaaggttagttttaattatgtagcttctgttaatattaagtgttttttgtctgttttacctcaatttgaacagataagtttgcctgcatgctggacatgcctcagaaccctgaatagcccgtactagatcttgggaacatggatcttagagtcactttggaataagttcttatataaatacccccagccttttgagaacggggcttgttaaaggacgcgtatgtagggcccgtacctactggcagttgggttcagggaaatgggattgacttggccttcaggctcctttggtcataattttaaaatatgggagtagaaaacaacaaagaatggaatggactcttaaaacaatgaaagagcatttatcgtttgtcccttgaatgtagaatttgtttttgatttcataattctgctggtaaatgtgacagttaaaatggtgcattatgtatatatattataatttagaaataccattttataattttactattccagggtgacataatgcatttaaatttgggatttgggtggagtattatgtttaactggagttgtcaagtatgagtccctcaggaaaaaaaaaaaattctgttttaaaaagcaatctgattcttagctcttgaaactattgctacttaaatttccaataattaaaaatttaaaatttttaaattagaattgccaatacttctacatttgagaagggtttttttagaaatacatttagtaaagtccccaagacat

SEQ ID NO: 3110 - DNA, 1198 bp, Homo sapiens
ctgcccatgatgctactccttggactacatttccactaatgcgatttcaattagtctttagtattttgaggatttctttgtgtcgtaaaaatgtctatcccagatgggcgtagtggctcacgcatgtaatcccagcattttaggaggccaaggtggggggattgcttgagcccaggagttcaagaccagcctgggaaactccacttatacacaaagttttaaaaaaattatccaggtgcagtggcacacgcctgtagtcccagctactcaggaggccgaggcaggaggatcacttgagctcaagagttcgaggctgcagtgagctttgatgcatgcaccactgcactccagcctgggcaacagagtgagaccctgtcttttaaaggaaatggatgtctatctgatcttattctaaatgttgactctactatccgtaaccccttctggaaatatttaatagttgtctccttaggaggctgttgtttggtttgcacatggttaatgtagtactgccgagtttatagccggtcctgagcttggacgtttcagcattcactgtggacctttagtgaagtctgaagctttgtatttggctggcttttgggaatgtattttggcttttggatgtaaatcaaatgttattagttcagtgttggctgaaagattgtgccgataaattctttggcagaagtgtaaaatgccccaaacatagattcatttatatttctcaattcaaccaaatgtgctcatcattgtgtaacccttttttggttaataatgaagcaaatcttctgtagtcttgcaacattaaaaccctaattatgattttctgcatgtctgtaccatgcctattgattttaaaaatttctgaattatcagaggatttcttcagacacagctctttatggaattatattaatccaattcaggcaattacataggtgtgagtttaacttctagtttgttttgagatgctgtgattccatatgagctctgataggaattcctatgccttcactatgcctgctttaggctctagagcaccccaggggctcaatcctacccccttctcctttccctctgcaggcctgcctggatggaatctagtcctatgacttcacatcccatctgtgtgcagatgactctcagattgatttctccagcctggccattctcagaactccagagttatatcagt

SEQ ID NO: 3111 - DNA, 1204 bp, Homo sapiens
attcctgctgtgttcatttcattaatatgatttacagattttgcatctatatttacaaatgaagttggactctttggggaggggatgtgtttatcgtgtgtgctaatttcatttaaatggattagaacagtttttcttccctaatcagagaaataatttaatagcacaaaaatagctgtttctcgaagacgcaaaactcatttgtgaatctctttgggcccagcgtttgttgttgctgttgttgtttttcagggtttgggtgtgtggatttggggtgggggcagtgcgagattgggggagttcttttacaacatcttaaagaaccctaacagaaagttgaaacagcctttcaaataatttccaaagttacagaagtttcaagtaatgagtccagttattggagaggtcaaatgtaaaataacagaatgtgaagataaataatacaaggtaaagacaagtaaacacctgagtcacgcaacacctgcttttgttttcctagatcaggaagtgtgctgcaccactggaatgaaatctattactttgtggaacagttggctcacaaattcatcaggtgagaaacactatgcattttgttcacttgtagttctctgtcatgagtcaaactagtccatgtttgctattctattaattactacatactttggggatgttttttgactaagttgggctctcagatctcggaccagagactgtttgctttgttttcatctttgccacattttagaataacatttggctttatgtttttgggaggagccaaatctggttacgagaccaaaaatatttagcattctcccttctctgttgaatagcctattcttattacctttaacatttttcttgcacactgcatcatgcagcagcaattggcacattttagctggactcacgtgtagggtgtacagtgtgtaggatgaacaattcatcccagtttgcccagatctttcccagttttagcactgaaagtctcacatcctaaggggaaccctccttagtcctgagcaaaatgtgacaattggtcgctctctagctgtgtgtactattatcaggtagaatcctctgagcattttcaacaccactttcccaggcaaggcaatgcagttttgaacatagtcactgcaaatatcatgggagtcttggacttagtggtaaggaaatgaggtcacttcaccccactgtgtgc

SEQ ID NO: 3112 - DNA, 1190 bp, Homo sapiens
tggttccaaaagaatgtaaagtgcctctagttggatggtggagaaagttctgcttttggttttgttttgtttttgtttttctaagacagggtctcactctgtcaccctggctggagtgcagtggcacaacaatggcacactgcagcctcaaactcctgggcgcaggtgacccttccaccttagcctcccaggtggctggaactataggcacgcgctgccacacccagctaattttttgtattttttgtagagacagagttttaccacgtttcccaggctggtttcaaactcctggagtcaagccatctgcctgcttcagcctcccaaagtgctgggatgacaagcatgagccatggtgcctgacctagctctgtttttaaatggtctgattggttccagtgtgtctttagctgcagaagcagagagaggaggtagatgggataaatcagggcctgtagactaggtagacctgctagggcaggggcctttgtcagagaaatgtctcccagtgatatcaatggccatgggcactgaggggcctgaccttggctttggagcctggacccctatcttcagccagactatgtcttagtctgtgagggacctgcctctctctgctggagatgttgatagctaatgttcaccaagtgtcttctatgatcctgaccctgtgccagacatctggtatgatattttattaaattttcacccatattaggtgggtactagtattatcattgccaatgtaaatgaggaaactgaggcacaaaggggttgagtaatttgctcaaagttgcacactgacgagcttcacagccaggatttgaacttgtcagtatgactctatatcctatgctttaccactctgtgtaataggttaaaagtgggggaatcaggccagccgcagtggctcatgcttgtaatcccaggctaagcaggtggattgcctgagctcaggggttcgagaccagcctgggcgaaaccctttctctaccaaagatataaaacaattggccaggcatggtggcacactcctgtagtcccagctactggagaggctgaggtgggagaatcgcttgggccttggaggcagaggttgcagtgagccaagatcgtgccactgaactccaacctggatgacagagtgagaccctgtctcaaaaaaaaaaaaaaaaaaaaatacaaagtgg

SEQ ID NO: 3113 - DNA, 1196 bp, Homo sapiens
tgaattcattgtaaattatttccatgaatttatgtaatcttagttgaaataagttgaacttatttacaacttatttttcccttttgtaactgctattgagataggtctcatatgtttaattcccaactatctttcagttgctccaaaactatgtcttaaaaacttcagatccctatcctaagccctagtcgtagagttcagatactgttaagaagctgtagtcacccacccatgttcttcataaccctaggtttttaagacatcactaaaaagtgtatcaccttcagccttcatctttccatctggaacagtcctgatgcttttagagttatttgaatcacccccaaaatgggagcgtgtttgcattttacagatgtaaaaactgaggcatagttgctaattatttcgccccatctgtgagcagcaaaggagcttttaaacccccaacacagtctgagtcattgtggacttggtcacaatgtgcagcttatggattgtagaaagggcttcagagagaaagaacaaaggaatcaaggaaggtgagatagcaaagaatgtcgggcagaggctctgctaagagcatggcactgcgaggcaggtggaaaatgaggtgggaaggttataggtggaacttccagaagaaaggcttttcagcccttgggagctgtcattctgtgcagctaagagaggccttagcaattgctaagagaggctgtagcaattgtgttttggggggtgcatttctttcctctttctgctccccccatccttgtgccaagagttattgaggccttaccaggtgccaggctctatgctaataagcatttgtgtagactgactttacacatactatctgatataacaatgaatcgaggagtaccattttctgcatttatttgtatattctatttagaaatctgtttggtggccaggcgcagtggctcacacctgtaatcccagcactttgggaggccgaggcgggcagatcatgaggtcaggagatcaagaccatcctggcaaacatggtgaaaccctgtctctactaaaaatacaaaaattagctgggcatggtggcaggcgtctgtgatccaagctacttgggaggctgaggcaggagaatcacttgaacccgggaggcggaggttgcagtgagccgagatcatgccactgcactccagcctggcaacagagcgaga

SEQ ID NO: 3114 - DNA, 1099 bp, Homo sapiens
ataaaatttttcagtaaaagtatttgaaaatgaattgccttctctaacattttaatcatgttttaaaatgtgtttttgaaacaaatttattttggcttgaagtatgttgcccagatactatatcagaatattgcttttaacttcagggtatgattcatgttgtttctttttaatatctgaaagcagttttgtgaacttgagggtaagaatacctctgttaaaactttacccctcgtggaagatgtattataattcaagccacatgctaaaatataagccccctgaggacagaaacaatatcgattttgtttattgctatattcacagtgccttctacatactaagtactcagtaacatttttaaataaattagttaatatttgatccatttcaaagtaattctaattatgaggagtgctatctggcagatacctaaagacttcattctgtacctttccaagaattcaggtccattctggacatttctcattaaactaaattttggattttccctggtttctttggcgatcatcctgtttttgctgacttgggactggtttggtcctttatagccattcaggtgtacagtaaagattcaacagtttgagtaaaaagctaaccaggttcaaataatatacatgaattcaatttagatagtaatataagaattttagttttttgtcaaaaatagtactaaaccaaaagtatattttgatacacctaatagtgtccttatcttaatttcttttctcctgtggacatatttggcagttctttttctgttgaagtaatagaatggatgagtttagttaatggatagaatagttgcttagaattagaaatgggcaaataatttggaagacacagaaagtacttgataatcgttgacttttttttttgtttaagtctggctacttttctagtatgttcagtggttcttggaaagaatccagcatgaatattattgaactggagattcctgaccagaacattgatgtagaaggtaactaccacaataattactattatgcaacaatcgtaaaaacataatcttattcttctggtagaagataaataattccttccagccttgtagtct

SEQ ID NO: 3115 - DNA, 1229 bp, Homo sapiens
ttgaaaatgctataagctaaggtactagaatcatcttggacagtcttttgtaaaattaccttcaaataaggtcttagggggagaatcattacagtgtgcaattgaatttgctcaatgggtgcctgttttggaactcttttctatttctaaattatatgtttcgtgttacctaaaataaataaggattttcaattgattttttttttaagtctgtaaatcttctcaaataatttcaaaattaaacttcaatactgctatctggagttaaaagaaatctgaaagtctttggtttattttgaaagtaaaataatctctaaatatacattaaattaccttgaatagtttctaccctagactttgctattataaagatggtttatagttttcatctctgatgcatgtttttttttttataagaggagtataggattaaaaaaaaacaatgaattttctcttctcatcataggcagtacatgaatcgaaaaggtggattcaacagacctttggatttcattgcatgagaattgaagtgttgaaggatgattttttttcccctcatcttggtcagagagtggattttgtattttgtatttaacttgcattcaaaaaacaggatctcagttctcctttcttgtaaagtaagaaaatcttatttatgatatatgcagttaacttaccttgcctcaacagaagaaaggttaaatattacatttttttcttttaggaaatatcatttgtggcaggcgtcaaccccattttatttgtccttattcctgtggaagcagtatatgttttcttcctgaatgctcattaggacttcttaaaaaacatgaaagtaatttggaagtaagtttatccaataaagcagtatttctacccttttagatttgataaatatttttattactaaagaatctccccagacattttcttttttttttcacacatagatttaagtatcttgattgttagtagtctaaaaatgggaagaatgaaaaagcataactagatttttctatcttctgtggtcgcccgcccccccccaaaaaaataccatttatggttctctccgcaagtataaaagcattacatgcaaaaaaaagatctcagagaaaacaaaagtaaaagaaaagcagaaaatcacctgttatctactcccagaaataatcaatttcaacattttggtatatgtttttccaggcttctttgggttgatcccacctatgaga

SEQ ID NO: 3116 - DNA, 1178 bp, Homo sapiens
tacacaaattttgttcccttccctcccccagtgcaagcccacaagctttttccaaagtcttgagcttttgatgctgtcccgcattgtggacttgtgaggcgcttggatgtagcaatgaaacaaaatgcttgagaggtctagtgaatggcattcaaaagggacctcaaagtgcagacatatctttttcaaatatgttacaggctgaactggctctttgaacactatcactctgcttaaatccaggaagcaggctttaaaaatgcaaaaggcatacaagttgtatttcagtgcaaatctttagctggttattggaaaagattccaaaaattaaaaaaaaaaaaaaaaaatcctttgtgtcacctgcccctccccccacccaaagccaaaatgaagaaaagacagaacaaaacaaaaacagaagaattacaggtgactttggaatcatttaggaatccactacttccaatcagaatgtttagaaaaatacattaaagaatcattttttaaaaaacacaaaagtaatcttgctttctgagactgctcttcgggtatagaatgagcttccgtgtggagtgcgtttgaactttgaccttagctgtgtgcgaggtgcaggcgctgggggagcttcaggctgtggtgtgcgagtgaccgcaggggagcgtggggtggctgcccgctgccgagtcagccgttgagcccttaggtcgcagtgcgtccgtggattttagtaatgttctcatcactttgtgacacactctgcttcagcatcacagattttacaaatggttcaaattcaatgaaaaagattcgccagaggctgaaaacatcaagacctcaaaaatatgaatgcaaaaatattcaggggaatgaactaattttgtagatacctacatacaaagtttctagaacatctataaaaccacaaagtcataagaatttgttttccattacattagtttatataaaatgaataaatagtatttatagatttaatgtgtcttatgtacatatacatgtgctctgttttagcttaaataaaaatgctacaaagtcggagaccacttaagggagaaatcataaccaaaaagaaaaatcagccttttaaactatcaacccaaaagcctccataaagaagtttctgggtgtgtccaaaaataatcaataaggagaggagttct

SEQ ID NO: 3117 - DNA, 1128 bp, Homo sapiens
agtgggctgggcgtggtagttcctgcctgtaatcccagcattttgggaggctgaagtgggtggatcacttgaggccaggagtttgcgaccagcctggccaacatggcgaaaccccacctctgctaaaaatacaaaaattagccaggtgtagtggtgcacaccagtagttccagctatttgggaggccgaggcaggagaatcacttgaacctgggaggcggaggttgcagtgagctgagactacaccactgcactccagcctgggcagcagagcaagactctgtctcaaaaaaaaaaaaggattttgtggttgggcatggtggctcatgcctataatcctagcactttggaaggccaaggcaggcggatcacttgagtccaggagtttaagatcagcctgggcaacatggcgaaatctcatctctacaaaaggtacaaaaaaaattagccaggcatggtggttgcgtgcctataatcccagatgttcgggagactgaggtaggagaatcgcttgagcctggggagacgtaggttgcagtgagctgagatcataccactgtactccagcctgggtgacacaatgaaaacctgtcttaaaaaaaaaaaaaaaagaaaagaaaagaaaatcttgtaatgttatgaatttttatgagctttcatatgctaataattgttttgatttcttctttgagtagtataatgttcctttttcgttgtagggaacctacctgactctttcaggtagtggtttcctcagcaaatatgttcaaccaaggcatagagatgagatggatagctttcttttccaagaatggggttaggtttttctatattcaaaggagatgaatgttgataagttcagggtattttcttagctttaatttctaacaaaattaaactgtccaaattaaacatacagggatgcttgtttttaagagaaaaaaactttagtaaaagatttcattttccctagcataaattattctatttgggattaagaaaaagtatgtttcccatttcccatatttgttcttgttgtttgttcttgccaatactttattttaatcagtggatttcctctcccctctgcttctttcacattctccaccagtcagacacagtcttctgc

SEQ ID NO: 3118 - DNA, 2033 bp, Homo sapiens
taatgtataatgtttgagttttaggctatataaggaattagctttcctgcatttaaaggaatcatttggcagtcagtagcatattttcctgattttttgttgttgttaaaggagataagttgataactgtatgttgaagggttctcatgatattctctaaaaagtgcaaatatcagtgcttgatttatagatgtgtaataaacagtggtctgtaaaagcatgtagtataaaaaatatggtattttcccttatatacagcctataaactcttcctattccttgagtttagggtagactaacaaattacagcgtagaagagagtcagctaccagattaaatgcatgcgtaccatacagataatttattaagtatttttgcatattgaacattgacttacattaattttcccttttcaccaccacgtctttgtcattttgaccctgaacacttaataaatcactcagattgatctaaaatatgcttatgtatactttaatagaaaattacattgcatggctttctgacttgggtttttgttataaaagtgcctgttttgttcatgtgtcctgagagagcaagcattgtgacatacctgactaacttaaaagcagattgcctgtgaagcacaatttgagtccaattttttgaggtatggagttttagctatcatggctgggtttttactcaatctcaaataatagggctctggttattttgcagagtgtctctgaagaatggacagaattgccctggctaactacaagctacggttcacagtggataaatgttggcgtgcttttttactttctgactttttaaaattttgcttttatatcttgtagttccaatcaattttatatgaatgctattataaaattcagtgtaaaatcttttcttgtctagcttaaaacttgtgtgtgtctagtatttttcttcaatgatttaacatttctgaaaatgtcaagttctcaaaatttagacaaaaaggggggtataaattgatctgaaaaaattaaatagtttaattagtttagggaatatacaactttttcattcttttggtttccagttttctatttttttttaatgattaggtagaatatagtgtcaaataagttataaattgcatggttaaagaaagccattcatctaatgtcctgtgaactttataagtggttaagtagttcatgtgagtagctgctttcaccatgcttaatatttaaaagtttaaaaagttttttgaagagagaggcaatttctgtacaatataaatatacatatatacttaagttattgatttgcatgtctataaaattaagcctcatttcctaatacatgataaattttgtagaataaaaggtgaatttgcattaaaggttcactttaatgaaggtgaaacatgagaatgagttgtgtgtgaaattcttatttgatatccagaggatagtttgcaaacctaaacttctgattgtttctgatttcagagatgcccgagtggtaaaagacatggcaacaggaaagtctaagggatatggctttgtctcctttttcaacaaatgggtgagctcagtgagaagtgcatggataatgcttaaagagtaaagaatggaaacactccgttttaattactaatctttttttcgtctgctgtttattttactgatgattaaaataaaccctcactagaagatttcttctgttttgtctgtttaacatttattggcacctgaggcatgcagagtactgataagatgttttcagaatgtagaaagtaaagttgtttaaattatcagccaaaggtagatgttgaaaatctcatttatggatttaattcattatctccctagtttatattcccatggtagtttaaaagtagctaataaaatactgtgaggaggccggacgcagtggctcacacctgtaatcccaacactttgggaggctgaggcgggtggatcacctgaggtcaggactttgagaacagccaggtcaacctggtgaaaccctgtttctactaaaaatacaaaaattat

SEQ ID NO: 3119 - DNA, 1205 bp, Homo sapiens
gtaaaaaaattagccagatatgatggcacacgcctgtggtcccagctacttgggaggctgaagtgggagaatcccttgtgcccaggaggtggagattgtagtgagccaagattgcgccactacactctagtctgggcaacccagaagaccttgtctgaaaaaaaaataaattgaggtaaattgagctgggtgtggtggttcctctagtccgttactcaggggaccaaggcagtaggtttgcttgaggccaggagtttgagagcagcctgagcaatatagccagactatttctcttaaaaaaaaaaaccgggtgcagtggctcacacctgtaatttcagcactttgggaggctgaagcaggcgggtcacctgaggtcaggagttggagaccagcctgaccaacatggagaaaccccgtctctactaaaaatacaaaattagctgggtgtggtcacgcatgcctgtaatcccagctactcggggaggctgaggcaggggaatcacttgaaccctggaggcggaggttgtggtgagccgagatcgtgccattgcactctatcctgggcaacaagagtgaaactctgtctcaaaaaaaaaaaaaggtaaattgtttctctttgtgtttcagatacgtcggtaacctttccagagatgtgacagaagctctaattctgcaactctttagccagattggaccttgtaaaaactgcaaaatgattatggatgtaagggtattttacttagttaactttattctttttttttttacacattacttaaagccattgcttggaaggaattcttagtttaccatggtctaaatatagtataaattattagtttactgtagtctaaatatagtcttagtttaccatattctaagttaatagggattttagtgaatttgtaatgaacctgttttgacagctgaatttaatttgttttattacatgatggaagatgacaatagaactagttatttctagatcagatgggaacatatatatgggctctttcaggtgcattgaggcatcagaaatgtttatatgtggtgtcaactggttggctaataaattcagctcttacaattaaattggaaaacaggtttaaaaataataggcatttggtacagtgaaagtatttttaactttatttttaaaggtcatcattcaagtttttcttgtatttaggcaattcctatttatg

SEQ ID NO: 3120 - DNA, 1190 bp, Homo sapiens
tcaataaacttttacttttaaatgaataaataatacatgacaattcttttcacatgagagaacgtctgcttctatttcctcctaaaatactgtggcggctgggcatgtcaacagcgccgctggtgtagtggtatcatgcaagattcccattcttgcgacccgggttcgattcccgggcggcgcataggcgttttgcttctcgctcgctaaaaaccagatagcttgaagagtctttatatatctttccaaaagaggaaagatttaggctttttactgtccctgaaggtttccactccctcataattcgcggtcgaaacactcgaatccgcagccagaagacaaaaaagttcacgcaaatcgtgaagtagttaatacttgcgcctgcgcagtctgaggcgtccctcgcgtcgggtggaagagcggctgcgcaacaagtgaacctatggattaaggtgtagccgggcggcccggaggttgagagtgcaagattattctgcgcctgcgcggcccgggtaactttgctggctgctcctaggctcccggctcgccgccatcttgtattggggtttcattgttcccgctgggccgggcggtttagtgtaattgccgccggaggaggaggcggagtaacctctggtcagccgagaaaccccactatcctgtagccataaccgcttaaacgatttgggaggtagtgaagggcagggagctggacctggaggcgccgccgcgacagcagcagccatggaggacgagatgcccaagactctgtgagtctggggcagcgatgagggaggcgggatggtggtcgtcccggagggaaggcctcggccctgcgccgctcccagcctattgttctccgtggacaccgcgatatcgtggtttttgtttccttagcatgcacctggatgcttacaaccaagacccaatctgtgaggacgaggtgaagggagacggggctcaaccctctcaattaatcccttcactttagcaacaccattgcatgacctttgctctcgccacgggccctctgtggtcttagacctggagaaaagactttaattcagacctctttttagaactcgtcgaaccttccttttgtcctatgctttctttccttttcccgcttctccccctttttgattaacctcttcttatctttacagccgtctccctttaattttactttt

SEQ ID NO: 3121 - DNA, 1166 bp, Homo sapiens
tctcagaaaaaaaaaacaaaaaccagtttaggctgggtatggtggctcaccagcactttgggaggctgaggcaggtggatctcttgaggtcgggagtttgagaccagcctggccaacatggtgaaaccctgtctttactaaaaatacaaaaattagccaggcatggtggcgtgtgccagtaatcccagctacttgggaggctgaggcgcgagaatcgcttgaaccctggagatggaggttgcagtgagcagagatcgcaccactgcactccagcctgggcaagagtgagactgtgtctcaaaaggaaaaaaaaaaaattaaaaatgttgctggtattacatcaaacctactctggataaattttccagtagggcatctgaaattgctttggcaaaagcaaaacaggttatcaatacaccaaggacatcaagtagttttaatgcaactacagtgttgagtgcttttttactgggagaaaaatcctagcagaacctgctactctgggcgcattaggtagttttatgcaactatagtattaagagttttattggaagaaaaaacactgtcagagcttactgctccagacctttttttttaatagaagagactggtaaaaatgatgcaggggctgaatgaaagccagctctgctccagtggctctctgagttgagcatgcatcagttaccttaagggcttgttaaaacatcgctaggctccaccctgtttattcaataagtttgttatgggatataagaagatgcattttattaagttccccagtgatgctgctgttctactataggaaccacacttgaagaactagttctacaattcagctgtatgttgtaaaggagtcaagtcaatgaaggagttataaagagttgctgaaaaatggagtaacagtgtatgggacttcacatcagttctccttattgattgttagtttgatccctcttgttcttttgttgtaaacattttctataattaggaaatgccatttaagagtgagagaggtatatatctatgagccattgtgtttggtgttttacaagaactttaccatactggtgtgtagtccattctgtacagtttaaaagtgattcacgatttgcaggctttttatcagatcacaaaaaaatcagtctttaagcatttgcttggtaagg

SEQ ID NO: 3122 - DNA, 1196 bp, Homo sapiens
gggaaaaagattatgattcgttgtaattgagtacattcatttcaagtggaatcctaaggtgtgtgttaaggcagtatttattctcagacatgcatggacttagaagatatttcactaatacatctttttctaaaacattaaaatgaagatcttaagaaatggagaagttattgtataaaatgttggcggtgaacaatgaaaccagttaaacatagactaaaatctaaataatcacatttttataaaataaatttcaaaaaatatcacttaaaattaccagaaagataattttcgtgtgaaatgtataatcaaaaattggaatgtagccaaggagtaaaggctaaatgtttcaacttatacatcggaacatagtagtttcaaatttcttttaaaattgaaaattaccattagtagaatagcactagaactaatttcttctaaataattgagttgaaggaacatgtgggataaaatcccatatagtgcaaaaggaaatgacaagagtgcccaaaaagaacagaaagtatgaaattgcatgagaacagttatgatgaaattcagatcaattaacaaatacttgctgaatgtttaagcatgactttatgcactgggaatagaatattgaagaacacaaagtctctggtatcacagagttttaacttcaaggggtagagagagaaagaccacaaataagttaaaaatgcatatgtattatgtttgttttcaacaagtgctatggtaaaaaaaaattaggaaaggggaatagaagtactcttgttggggaatgaagagctgtgcaactttcagtaagttagttggggaagatctcattgaaaaggtgatatatgagcaaacatttgaagaagatgagggaacaaaccacgtcctggattgagagcattccagacagaaggaatagcacctgtcaaacctatacctttgtagcatcttagaggagtagaaaggatgcttggggatggagtgaagaagtataggaaggaagtgtattgtggtttgggagttagaaggtaggtagaacatacgttgtaaacttttagaggccattgttaagtactggctttttttccttgagtctaatgagaggttttgagttgtggaacagcaggttcagtctgggtttatgttgtgaatagagagtgagtgaatggcaaggactgaagcagagaccattacga

SEQ ID NO: 3123 - DNA, 1186 bp, Homo sapiens
tgtagacattagcatattaaagtttctgaattgtctagccagaatgaatcctggttaacttcatgcaaaccatttattaaactgatttaatcacaaaaccttttctaaattgtacacatctttaagaagtgttactctggagaatcatcattaaccataattgaagtggtgactctagttcctgctgaatatttgagagtttcgtacatcctctctgttgaatttgtggcacagacactcatctaacatttactgagctgttctatgctggaagcttatttaatctcctcatgaacttcatgaggtagatgctattattccaatcttaaagatgagaaaatagacttaaggaggttacgtatctaaacccaaggtcacatagctagttagtagcagacctaggatttgaactccgctctatttcattctaggcccaagctcttatacattgtgctttgctacctgtgtgcttaacttagttcatcatgtcacttttccatttaaaaccttctagtagcttcatattgcacttggtctaatatccaaacttcttattttgggtcttcaaagccctgcatgatctgatttcttttctacttctctgaatgctttctgtgtttcagcttttctggctctctctgttctgtttttcatacatgagagacccattgctgcctttgcacctttatactgctgttcttttgccccttcccagtcctactcgcatggccagttcttcatgtttttcgtctcaaatatcagttccccagaaaggtctgcttaagaaagacctagctaagtagaacccccaaaaaagttcagcctcaattacgttgttgcactgtctttaaagtgcttaccaccgcccccaaagtattttatttttttcttttattgtttctcttctcccattagaatgtaagctttattgtataaaagattctatctgtcttgttgcccaccgaatcctcaggcaccaagtgtaatacctggtgtgtcataaacatcaaatgactgatgaatgaaaggaagaaatggttatataaggcactgtgtttataatattttgtaggatcagtttcttttaaattataaatatacagtagataagtttgcacacatagcaaaataacgtctaataagtattttatattgcaaattgcttttaacagaaattcatggccaa

SEQ ID NO: 3124 - DNA, 1138 bp, Homo sapiens
ttcactacctttgtcagctactgagttgcttctggggagggaagtacttccttgcccctccccaacccccctacctcaccatatcctatcatatcttgatagtcatggggaagaggatgtgcacacagacatacaaatttcctcaaagctggagagaccaggctacatgtgagctcatagatgctgctgaggctcatcctgagggctggatggttggccagggtttcagaatgagggtaagggatgagcactgccacccagaacttgataagccaagagaaggcaggagccaaaatggcatcgccaagctctcatctttgttgaaacaagtgagaaacgattatattaatctgaagttctattgcttgagaagagttcaaaacacttctctttgctagtacccagtttgcagcaagatctcttcagctttaagtgctgagagactttgaagtggaaatggagagatgtgtaagcatggcacagtgtttgtctttttagaggatcatcattgctggtctggtctcaaacctctgccttggaagaactgtgctatacaggaaaaagtgaacaaggtggaggaataggggttattctgcacagaagtcccatgaaaggaaaagcttattcaagctcaagacataaagatggaccctttgatatatcttctctccattcttagtctgccttcaccttatctaacaaaaaacaacatgcagctactgagttgtatgtagagacatactcttggtgggccagggaaggtaaaaacagggaccagcaatgtcaagtttttgaactagaaaagtgggatgtttttagttttgtctataacctgtagctgggccaacccttgagaggacttgtgcaaagcatgtgtgcccagacccatcagactcctcagatatggcctcaaatacctagagatgtagaagtaccgtggagggcctcaataagagggcaagcacacagatggctagaagcctgtatggcttctggtcaggatgaacccttggccaagttcttgaggaaaccaggtctatattcctgaagggacagttcagtttgggactctattaggtttcagtagtaatataggctgcttgcatcattttaacattcatagggaaaatctctttga

SEQ ID NO: 3125 - DNA, 1192 bp, Homo sapiens
aaaaagacacttagttgtttaatttacatctctggaggagccaaaaataacaggacaaaaccagacttaaactctacacatcagttttgaaacctaggtctccctctcttctgcaacacgaagtgattgttgtttatttcctttgggtttgtcttgtctaaccctgctaattataaatttgagagaaattaggaaactaactttgggatttgatatatacaccttttgggaataagacatgttggaagacagttgttaaagacttctatgtagattgaaagctggagaaaaatctgatctctaaaagcattccttaaaattcatgacattggctcacgcctgtaatcccagcactttgggaggccaaggcaggtggatcacaaggtcaggagatcgagaccatcctggctaacacggtgaaaccccgtctctactaaaaacacaaaaaaattagccgggcgcgatggtgggcgcctatagtcccagctactcgggaggctgaggcaggagaatggcgcaaacccaggaggtggagcttgcagtgagcagagatcgcggcactgcactccagcctgggcgacagagtaagactccgtctcaaaaaaaaaaaaaaaaataaataaaattcatgacattgtaccataatacattatcaaaggttattccaaaccagtgtacttgtaccagacctacaaccattttgttgttattaatacttaatatccatttagattcatttgtagcattgctgtaatcatagctatggaagcttggtgtatcccaatgaagcatatatatgggaaaaatatatttgataaagcctttacttagaagttagtttcaaatgttaggtatcaaatcaagaactttggtcagtcaattaatattgtacctcttttagaggtataatttaggggcaaaattagtgatttttagatctctttcaactcgtcagtattttctttctttctttctttttgggggggggttgctggcaatattttttatttttttattttattttattattattatactttaagttttagggtacatgtgcacaatgtgcaggttagttacatatgtattcatgtgccatgctggtgtgctgcacccattaactcgtcatttagcattaggtatatctcctaatgctatccctcccccctccccccaccccacaacagtcccc

SEQ ID NO: 3126 - DNA, 1175 bp, Homo sapiens
agggggtgagcaagcacagggccgccgccctggggaggggggcactggctctccccttgggtggtgatgaaggcctggggccaggaaatggggcctctcttcctgcgagctaactctgtgtgtttcccctgcaggcagggactctgcacagtcccccaagctgttcacccataagaggacctacagcgatgaggccaaccagatgcgagtggctcctcctcgggcccttctggaccttcagggccacctggatgctgcctcccgctcttcgctctgtgtcaatgggagccacatttacaatgaggagccccagggccctgtgcggcaccgcagctccatctcgggctcgcttccatcctctggctccttgcaagctgtctcttcccggttctccgaggaggggcctcgttccacagatgacacctggcccagaggcagtcgtagcaacagcagctcagaggcagtgcttggacaggaggagctgagtgctcaggctaaagtcctggcccctggggccagccaccctggagaggaggagggggcccggctaccagagggcaagccagtccaggttgccacacccatagtggcctcctctgaggctgtggcagagaaggagggagcccggaaggaggaacgcaagccccggatgggtctcttccaccaccaccaccaaggcctaagtcggagcgagttgggtcgccgaagctctctgggggaaaaggggggtcccatcctgggggcctccccacatcactcatccagtggggaggaaaaggccaagagtagctggtttggcttgagagaagccaaggacccgactcagaaacccaggtaagtcgttggcaagaccaactttgctccttggggaggatgctggggtgtgtgctgcctggaccctggggcagggaggaaggagtagatatggacctcaggcaggctgctggggctctggctttgcatggtttagtggggtgtctccctaagccaaggttcgttctgtgctcacggacacaggtgagttacgagggcatagtgctctgagagtcctatggattgaggggtccgacttctcagccctaggccttgctgcatgagttggcatgcccaccccctgagctggagggaagcaggaaagtccatttgtgtgaattctttgcttcctgacctccacc

SEQ ID NO: 3127 - DNA, 1210 bp, Homo sapiens
agctgactgcctaggcatctctaggacaacacctcaagctcttggcatcttgcattttgcatcagtgtcccatctgcttctctaagattgagctgtaacacagacaagtggatgttttgctgcggaatgaacacttagcagggtctgcctcttcctcctgtgttgtgacccaattcctcagcacagggagtaaggtcagaagttgaaaaggccatggtcattcagctgggtactggagaactcatgattttttcttttagattaggtcagtgcttctcaaaccattttcctgtctagcatacctgcagggtaggctaaatttgatagtgtctctggaggtagaggctggttggggaatggatgtggtagacagttgggggaatgtggtttaagaagacctctagataattctgttaagggagagatgggagcattttcccctttcccctgccagtctcattataatagatgattattaaaagcagttaatttctttcttttctagcccacaccagttatcctattgaaagaggggactgatagctcccaaggcatcccccagcttgtgagtaacatcagtgcctgccaggtgattgctgaggctgtaagaactaccctgggtccccgtggcatggacaagcttattgtagatggcagaggtaagtctacagagttcctcaggcctgtgtgcaggaaaggaggctcctgagggggtgtttgggactagcataggttggtatcagaaatcccactgcttttaagatcgttgaaagatgactcactctgaagcagttccaattcttatattgtcctgactgctgagcccgtgtgggactatatgagagaacctaggctcaggagcctgttgcctcatagggagacgtggcctagaaacatgaaatagaaccatctggagtttcctgtgttcacttccattgttatcaagatgagaaaattcctgtttatatcttggtatattaattgatgtgtgagggtatcaactgtggtaagaatatctaagtggttacttttatttaaaaaatcttttctgtatccagttgacctgtattaattgctcttcaaggaaaattgggagtctgtggtctgcaaaagcttgtgattttagaccctttgtgtacagagctaattctgtatagaaagatcagataggtatcctttcccttcagccctgccgtgatcccctctgccc

SEQ ID NO: 3128 - DNA, 1102 bp, Homo sapiens
ttttttttttttttaaagagacggagccttgctgtattgcccaggctagtcttgaactactggctcaagtgatctcccacctgcgactcccaaagtgctgggattacaggtgtgagtcaccgtgtcaggcctttgtcagaaccttgactgacttcctgtggccaaattggatgcagaagcatgctgcaatccctctatgtgcctggggctgtttggctcctgccagacccttggctgtgtcccagcccacagagcacaaaagaagctgtcgactgtagtttaaaagctgccacatatgagatctttgactgcagtcaccatctgtcactgataatctgccctaaagatacaaaaggtgaagttggagagggctgagtttagagactggaagggaactacctccacactgtagtagaatcagataagagggatttggttttcaagacctgatgcagattctgcccttgtgtcccagggagcagaggaagctgctggaaaagtgtgccatgaccgctctgagctccaagctgatctcccagcagaaagctttctttgctaagatggtggtggatgcagtgatgatgctcgatgatttgctgcagcttaaaatgattggaatcaagaaggtacagggtggagccctcgaggtaagcctgctgtggccttcctagacagctcttgctttcatattgacccttcagacagcttcatatggcagaggggtactcattacaggaataaagagaatgcatgttaggcaggaagtcagacttacattgtactttccatactgccattagaggctgttactagatgaacttggtaacctctgtggatattatttgtcagcagagtagaaaattggactgtatgattttcagaatctcaggttctctgtgtcagtgggtggtggaggggtagtaggactagctcaaatcatcaatgacctcccaattaatacatctgagagggatttttcagttcactgcttactcctaagtgatactgttaagcttgcccttctttcattcatttatcttgaatagatgatacatatttcaaactgtgaaggggcctaaagttaaaagtgtttcatgcacta

SEQ ID NO: 3129 - DNA, 1215 bp, Homo sapiens
cagccaaatttgtctttcattcttcagattgtgaataaagtgatttttacagggcttccagcaaagtttttcctttcatctaaggcttgtagaaccctagcttatatagctgcttacatgagaaatgcaaaatctgtattcaccatgactttagtaacaaaggtaaagttttttagtagtgccaaggcaagaggaacaatcttggtggtagtactaagttttgtcaatattgtggtttcctgattgtattgttggctttctctctgagcattgaggtatactagaagtagagcttctcaaacataatatcattacctcataagcattaacaaatcaggcccaaagagcgtaagtcctagaaatttgttttaaagcagccctagtcatggtgctggtgctaccgccttgttttaggagcctgcctcctgtcagtatgaaaccctcacctgaaaaatgccagcctggacaccaaacactgagccccttcaacaggcacattatttccccctgagatccataagggaatttagtttctactattgtagagttctgaaaagaggtaaaatagtagtcctttggtcatcctatttttgctttcaattttgatatttcagactgtaaaaggccttgggggatgatagtacatgtggtagcagtaatttttttgaagcaactgcactgacattcatttgagttttctctcattatcagattctgttccaaacaagtattctgtagatccaaatggattaccagtgtgctacagacttcttattatagaacagcattctattctacatcaaaaatagtttgtgtaagttagttttggttaccatctaaaatatttttaaatgttctttacataaaaatttatgttgtgttttaaaatccttaggggctttatctatttttctaagtcagttaactgtacttctaaaaaaagtattttgtatctacttttgtaacttcgtcagaataaaatatattgaaagcaagaaatgactgattaaagtatgtatatcaacacacatttctatttaaatatagaaacttgagagttttgcagattctgtggatttttgagtacagcttaaatttggaaagttatctttgcatatcatttagtagctaaaatgttttcttagccgttaaaaaaggaagttcctaaatgaactaagtatcatactactgggaccgaacccctaagaaacaaac

SEQ ID NO: 3130 - DNA, 1217 bp, Homo sapiens
tccatgccatctgagaacagttggagaaccggggcttattcagcctcttatgaatatgagagttatgagagaaggactgtcatgtcacaaaggagctgtgttcaccctctgaaaccacaggatgtagagctgaatgaggaacagggagcagaagctccaggaagccagatgctggctgaatttaggaaagaacctacaatggtgggcgttaaccaccatgggagttctcggcccccttggttggtagcaagttacttggacactctctggatgtccatctgccaaggatattgtaaaaaggatccctgtacagatggggtcaacctggtaacacccagtgccactcctgtggagttactttctggccaaaacacctgtcatctgtaaattagggcttcccatagcatctgagcctcctccatagtcatgatcatgcccctaagagctttcagtgggatgtgcccagagtgcccagggtgctgcagagcaggagcaggaggtctatgcacacatctccaagcaccaaggctggactcacagagagcaaactgaggtccagagaccacccaaggtcatgccaagcctcagtttccctggctgtaaaagaggggtctcaatgcgggccctggtggtctcctgggactcctgtggggtttccaaatctataccccgattgagttgaaggaaataagtggatagtgggttcagccccttaatacattactacgggtaaaaaaaatcataagtcaatcgaaaatatttgctgcacaattattgtatgccctactttaggccttgtggaagataaagatgtcctgccttcagagagttcagttttgattataaccccttctctctgtgactgcactgattttgtaaagaagtccagacttttttctttctttttttctgtcattaattttgagttattccactaaaatctaatgacaggtgatgctaccctttgttctgagccaaggcatgttgcttgcccagaggggatcctacctgcaggcaggcccttttcattctgccctggagcaaatcctgcctctgtggggaagccccatcagggccctcctacgtgcttgtatcttatagactgtagattcagtgttgcattgacgtaaattttacacaaacatagcttctagaagcacacatccttgatctcttttagaaaaaatccaaattctgtttatttttattttatttat

SEQ ID NO: 3131 - DNA, 1175 bp, Homo sapiens
aggaggcacaattgtgtgcctctgaaagggtgaggcctaagaaaaccatttgaaacacagaggagacaagtgacagtggaaggggaaacaggattctgtaggatcacccactgaattgcctgtcttcccagctcagactcctgagtcagggcattgggttgtggggagcctggtctaaactgagttatttgcttgatcttatttcccctcctgagaagagaattaaggagacagtgctcctgagaaagcagccatgtggtgacattcacagactggtcaatgaattctgatttgttataaaaaatataaacttaaaaattctagcagattccagaggaatttggagaaatcttagaatatcattggcattttttcaaaggggaatttgggggtccacccaattctgtaaatggggtttaagaaaatgactctggttgtttttcagtccagcatcttggctgaggcatttcttatacataagaatgccacctttgatctgaggcctctaactgtctgtgtttacctgtgtctttcagacgcccagcggcagcaggatgagtgcggaggcaagcgcccggcctctgcgggtgggctcccgtgtagaggtgattggaaaaggccaccgaggcactgtggcctatgttggagccacactgtttgccactggcaaatgggtaggcgtgattctggatgaagcaaagggcaaaaatgatggaactgttcaaggcaggaagtacttcacttgtgatgaagggcatggcatctttgtgcgccagtcccaggtattcacgcccttcttttgtgtctgtgcatgtgtgcacatgtctgtcgcatgtgcagctgatgtgttggtacttcgttttcctgagcatgggcataagcctctggttgggagagtggaaggtagtgggggagggaagattgaagatgcatccttagggaagctgccctgtactcttggtttgcttggagcctggggaggggcccatattacagccgtccttgatctggctatattgaaactattgatctggctatattgaatctggcctcagatccaggtatttgaagatggagcagatactacttccccagagacacctgattcttctgcttcaaaagtcctcaaaagaggtaacaaccacccacttaaagttgcctccccatagccagga

SEQ ID NO: 3132 - DNA, 1188 bp, Homo sapiens
actgcctcccttcccctcctgccctgtatacaggaccatagcaggggagaaagggaagggttgatcttgcctttcccttcaggattgtgtggctgacatggtgacggcagatgactcaggcttgctgtgtgtctggcggtcagggccagaattcacattattgacccgcattccaggatttgggtaggtgaggcagaaagggtagagggcttcctgagatagcttcaggctggggagtaggatttgatctgggcaaaacaaagttgggtgtcacccttgcagagttccgtgcccctctgtgcagctgtggcaggggatcatagcagcaggctatgggaacggacaagtgcatctatatgaggccactacaggaaatctacatgtccagatcaatgcccatgcccgggccatctgcgccctggacctggcttctgaggtgggcaaggtaagtctcctcctctgtacctacataccctttttcctggcagtggaatgttgagagaacaccacaggcttgtctttgcaactcagtgtagccccctcccctggggcacctggactggggattccagcttatagctgtcccgtcagggcattctgactccccctcttcctcctccacagctactctctgcaggtgaggacacctttgtgcatatctggaagctgagcagaaacccagagagtggctacattgaggtatgtgtcatggggtgggtggaatgggggggcccaagcatggggcagcaggccctgacgagccctctgctcccccaggtggaacactgtcatggtgagtgtgtcgccgacacccagctgtgtggtgctcgattttgtgattcctcaggcaactcctttgctgtgactggctatgaccttgcggagatccggagattcagcagtgtgtgagaagagcagccttcctttgtccctgtggtattcataaagtacccgctccacccagcctttgtctgattactcagtatcacagtcatgtttcacagctggtgaactatgctccagggatgatgtgaggcaggtctagaccaggcagagagaggcaccctgtcctcaggagccaggtgaaggctgctgttaaataactttaatggttgatgtgggagtcacaagggaggtatgtttgctccaagggttcttcagtgccatcctcaaagctggttagtgcag

SEQ ID NO: 3133 - DNA, 1194 bp, Homo sapiens
tctgtctttatcaggttatttggaaatcgttccttctgccatgagcggttgggtcagccagcgtgggccctggctgatgcccaggtggcccttaccctacggcctggctggccccggggcctcttccgcctgggcaaggccttgatgggactacaggtaataggtctggggctggaaacaggagagatttgagtgggatggagtggggagagggtctatgttgactttctagataagcttctagtaccaaagtgtcacaatggttgtggtactaggagcaggggccagttttagaaagggtacttttaagcaccttgacacctaatcttttctttctgatccctctgggaccaaagcgcttcagagaggcagctgctgtgtttcaggaaactctgagaggtgggtcccagcctgacgcagcccgagagctccgctcttgccttctccacctcacactggtaagggggccaggcacactgtcatgctgaggcgggtatcagggagaattggctgggactgcaataccaagcctcaggtggctaaggagggggcggggaaggatgggtggaatgagaggcatgggctctcctgcttaaaagaaggatctggtgcccttctctctcccttctcagcagggtcagcgaggaggaatctgtgcaccacctctgtcacctggggccctccagccacttccccatgctgagctggcaccctcaggcctaccttccctcaggtgccctcgaagcactgctttgaggtcccctggcctgtctccactcttgcattatccttcatgtcaccgaagccaccccaaccagcccctctcccagactcagagtagaaggccccatcctctcaagccccaggacccttcaaagggctgggacatcctgggacttgggctccagcatctgtctcaggccagatgagggggcaccggtccctcatagggcagggccatgtatatatcccttggtgggggacatagtgtggtgacagttcactgcatattttgagaccttattctctagatccatagttaatgatgccctggcagtcattcctcttgccatggggaagcttctgatgagagaaaggagccccacatccactgaaacatcctttggttctcaagcttcttctggaggcagtaaggaaaaataaaacccaccaaggctcaagaagggaactata

SEQ ID NO: 3134 - DNA, 1196 bp, Homo sapiens
actcgcgtccggcggagaccacaattcccggcattcgtggggcagggaggagtcggcctcccggaatcctggtcccggcgtgcacttctgaaggacttcaggtaccggcgtgccccgcgtcctactgtccgcctgctcgcgtcctgggtgccgcctctgagtagggcgggcgaggaggcagccaaggcggagctgatggctgcgccgagggcggggcggggtgcaggctggagccttcgggcatggcgggctttggggggcattcgctgggggaggagaccccgtttgacccctgacctccgggccctgctgacgtcaggaacttctgacccccgggcccgagtgacttatgggacccccagtctctgggcccggttgtctgttggggtcactgaaccccgagcatgcctgacgtctgggaccccgggtccccgggcacaactgactgcggtgaccccagataccaggacccgggaggcctcagagaactctggaacccgttcgcgcgcgtggctggcggtggcgctgggcgctgggggggcagtgctgttgttgttgtggggcgggggtcggggtcctccggccgtcctcgccgccgtccctagcccgccgcccgcttctccccggagtcagtacaacttcatcgcagatgtggtggagaagacagcacctgccgtggtctatatcgagatcctggaccggtaatggtgggggtagaccgggaggcactgaagccacaggctggagggcgggcgggtaggaggggtcagagcctcctcttatctgtgctttccctccatttcaggcaccctttcttgggccgcgaggtccctatctcgaacggctcaggattcgtggtggctgccgatgggctcattgtcaccaacgcccatgtggtggctgatcggcgcagagtccgtgtgagactgctaagcggcgacacgtatgaggccgtggtcacagctgtggatcccgtggcagacatcgcaacgctgaggattcagactaaggtgggggctggggtaggccaggtctggttggagctgcttatttgctcgcatcttcagatgacaggtctcttttacccattctcccttaggagcctctccccacgctgcctctgggacgctcagctgatgtccggcaaggggagtttgttgttgccatgggaagtccctttgcactgcagaacacga

SEQ ID NO: 3135 - DNA, 1071 bp, Homo sapiens
tatagatttgagttactgtctagtgcccttccatttcggcccaaaggattcccttatgcatttcttgcagggcaagtctaattgtaataaactccctcagcttttgttttatctgagaatgtcttgatttctcccttatttttgatggataattttgccagatacatgaatttttggtaacagtatttttctttcagcactttaaatatgtcatcccactaccttctgacttcatggtttctcatgagatattagatgttataaaatttgaggattcctcattcttgatgagtcagttctgtcttattgcttttcggatttgctcagcttttgtcttttgacagtttgattataacgcggctcagtgtgggtctctgagtttatcccacttagagtttgttgagtttcttggagtcatagatttatgtcttttatcaaattttggacatatttggctattatttcttcaatttttttcactgcttctttcttttccttctgaaatattcttaatgtatatgttggtctgtttgatgctgtctcaccagtttcttaggctgtgttctcttttgttcctcagacttgattattgcagttgcccttctttttatttttttcaagtttgttgattcttctccctgttcagatcaactgttgaactcctctagtgaatttatttcagttactgtacttttcagctccaagatttatctttggttcctttttataacgtctgtgtctttattgatattctcattttgttcatatgtctctttcttcctttagttctttgtccatgttttcctttagctctttgggcttatttaagacaattgtttaaagtctttgcatagtaagtccaatgtctgtgtttcttcagggatggttttcattattttgttttcaatgagccatactttcctgtgtctttgtatgctgtctttttgttgttgaaaactgtatgtttgaacatcataacgtggtggccctgaaaatcagatattccccccttcctgagagttagttttatttttattattgaagattgtagcagtctattgctacatgtgc

SEQ ID NO: 3136 - DNA, 1275 bp, Homo sapiens
ttttttttggtcaaaaacaattattgcaaatgatgagtcttttgaacctaattttttcatgcatatttctgcttctattttttcccttgtcataactgttattaaaaatttaccttttaaaccctaaaataaattgtattaaactgataacaattttatatcatattaaaacatcaagttataaaattataacctctgttcgaaatccactcccttcacatgctttagtggtaccactttgcagccaaatgttctacccttgtgtaccctcaaggtaacactttggattattcttgttatggttgtcttgaggcttacttttccttttacaatatgatttttcacatatagcttgatttcttataagtaaacaatctctattgacaccatgctgtgaataacggaaaatctgtcctatacacgaccttctacctttctaaaattttagatagatgatgatgataatattgatgcaggacaggcaagccccataattgaggcttagcttcggagagttcttggattcatctaggaaacaattcggatgtgagggcgatctggctgcgacatctgttaccccattgatcgccagggttgattcggctgatctggctggctaggcgggtgtccccttcctccctcaccgctccatgtgcgtccctcccgaagctgcgcgctcggtcgaagaggacgaccatccccgatagaggaggaccggacttcggtcaagggtacacgagtagctgcgctcccctgctagaacctccgaacaagctctcaaggaaagaattcgagggcgagctggtggtgttaaacagcaacttttattgaagcggcaatgcacacagtaggagcagaggtgctgctccttgtgagcagggatccctcataggcgatgtgcccagaatggcagcttagaggcagttctgcactcatacttatactcacttttaattatatgcaaagtaaggagtggtttatgcagaaatgtctaggatgaggatgataacttccaggtcattgggtcattgccatggaaagaggaagtaacttccagacgttgccaaggaaatggtaaactgacatggcacactagtagacatgtcttatggaaagctatttccaccccagaactattttagctagtcctcaatttggtctggtgtcccagtcctgcctcttacttcaatattatagatatagatttagatatagatagataaatagttttaataaattaccaaaacatttatgtcttgatccaacaattttaga

SEQ ID NO: 3137 - DNA, 1367 bp, Homo sapiens
gattttcttttctttattttctttctttatttttttgtgagaccaagtctttttctgttgcccaggctgaagtgcagtggcacaatctcggctcactgcagcttccacatcacaggttcaagtgattctcctgcctcagcctcccaagtagctgaggcatgcaccaccacacctggatattttttgtttttagaaagattttcctattagccctttggctgacacctgacaccttgtgataattacatgatctctgaaattctttgccaatatacaaagtgaaatttttattaacaacttgcattcacttgaatatttagattttgaggcatatttttccacttttctccaatttcaacattagggtggaagataatttatatcattatcctgtgacctatgaatctattgctgatttatatcaaataagttcatgtcaacacactcttaaagtcattactatttctgttttctattaaagcataagagcagcagtgattgtttttatatttcgtacgtaagatattgaacattgctgccagaataaaaatacatatcctcggaatcagcggggaaagaagaccctgttgagcttgagcttgactctagtctggcacggtgaagagacgtgagaggtgtagaataagtgggaggcccccggcgccccactgtccccgggagggggcggggcggggtctgcccgccttgagggctgccggtgtaataccactactctgatcgtttttttttcactgacctggtgaggccgggggggcggggggcgagccccgaggggctctagcttctggtgccaagcgcctggccacgcgcagcattcttatacaccaacaacagacaaacagaaagccaaatcatgagtgaactcccattcacaattgcttcaaagagaataaaatacctaggaatccaacttacaagggatgtgaaggacctcttcaaggagaactacaaaccactgctcaaggaaataaaagaggatacaaacaaatggaagaacattccatgctcatgggtaggaagaatcaatatcgtgaaaatggccatactgcccaaggtaatttacagattcagtgccatccccatcaagctaccaatgactttcttcaccgaattggaaaaagatactttaaagttcatatggaaccaaaaaagagcccgcatcgccaagtcaatcctaagccaaaagaacaaagctggaggcatcacactacctgacttcaaactatactacaaggctacagtaaccaaaacagcatggtactggtaccaaaacagacatatagatcaatggaacagaacagagccctcagaaataacgccgcatatctacaactatctgatctttg

SEQ ID NO: 3138 - DNA, 1195 bp, Homo sapiens
ggttaacctatctatatagattaatctcttgcctttctatttcccctcagtttcagtcttttaataattttctttttgctactttactttagttgttttatgttttattcatatatcttcagctgtttcctctttaatttttttgtttctgcttcatgtcttttttatttttttgagatcattattttatttatgcgtatgctgtttattttactgtctttaattctcatactgttttttctaattacaattcctttgagatgataaattgtatgtccttaggttgaaagactaaactgtggcacccctgggatgtttgggttatgtacacaagctccccaaggcagagatcctctagcatttaaaccaccttcttaattactaggttcaagcatctccctacttttttttctaataggtagctttgtctcccagataatgcatctgaatttccaccacagacactgctcttttctgaaaactgccctcactgaccttgtacatctcaccccaggatatggaaagatgggcaagagggaatacccagagcccaggctaactgttgcaagcattgttgttgactgtcctttccagccaggtccaagtgttgcaccctcctagtttgctcccaccatttttagctgatattggtctagaaatacacaatttacatcccgcaacattgaaaggataaactgatctgcaatgcatgatatgagtaagaaacagaagggacagaggcagaagctgttaagtctgttaagctttttgcctaccatggataccattttccccatagtggggcctaattaatttacttttctcaaagttcctattagaaatttctcagggttttcttaggtttttgttctctctaactccttctcatttgaggggaaactccagattttttttttcagtgtcccatcttagaagaagagcttagaatgtcatcaggttaattttcatttatcctttatttcaggagaggtgaaacttcctgtggaaagccctccctcagctccccaaaacctgatgtaaattatgtgatccaccattttctttcttagctcctatagaaataattttcatagatgtgacttgtagaattgaatatcttttgatttactctttcgtatcaattagttttttaaacatttccctaaacattttaacttttagactccaggaaaac

SEQ ID NO: 3139 - DNA, 1256 bp, Homo sapiens
tttaatctgatataagatgccaagggtatttgataaaaattcttcttccatgccatgtcaggagttaatacaaatgaagaaattccgtgggttcccctgggataagtgagggtagtgtcttggacaacactattgtttgaaggtttatcttttctaatcatgctctaccgcattgtagagagcctaaagagagttgtttctgagctgatctcagggaaatacaaataacttgggagatgagggaaataagatgaattctgtgctgtcaaggcagtaagtctgaagaaaggaccatgcttcttatattatcttccaccttgcttaaaacagcccatagctttgagttgacattttcattcttggcggatagcctactttatgaaggtaaggaatgaactcctacccttcttgggtcattctctgtactgatgcgttagtcttataatactttgcaccaacctgaggaatcttctaggcttctctagcatcccctaagactgtggctatttcacgtctctctccctgcctgccttccttttcccttcctttcccctcctcatgttttctggttgtgcccatctgtaccagctcctttccatccaccttcgtatgcacccagatttttctgttcccatctgtcctatttgttattcatcccgctgctcaacttctccagtatgttgcttcccttaagttgccattcattctcttcatgacttttactaactcacttcggtctctgtctgtcaactaaacttttctaaaggttaccagttatccaatcaccaaatccatggctttttctcaaagcttagtcttgtccttggcagaactggacactattgaccatccaaatggaaattcccctttcttggtgtctctgacaaatggtcctttgccttatcttgtgctggtggtgaagaggccctcaaagccaggcctctctattcctttgactgtctcctcagccattaacccattcttcatcctcggagtgagtgattcccaagtctttgtcttggcttaatccctaaagaacccagttctgctggtatcgaatagttcagcttggttgtcattgaaaggaatttctctcttctgtccatcagcctgtccctcccaactgtctaggacagtcttcggtcacctaaattcctaactgcagacttttgccctttttctctctcatcaccaaagtcccatccatttttttttaataaaagatcctcagctacagtctttccattttccttgct

SEQ ID NO: 3140 - DNA, 1112 bp, Homo sapiens
ataccatctctactaaaaatacaaaaattagctgggcatggtaatcccagctactactgaggaagccgaggtgggagaatcgcttgaacttcggaggcagaggttgcagtgagccaagatcatgccactgcactccagcctgggcaacagagcaagactccgtctcaaaaaagaagaaaaccaccaccaacaaaaaacacatgtaaataattcacaacagtacagaacagtatgaagcagaagccaggattcctctctctccatcaagtgtatatctttctagtgttaggtttcatttcaaactttaaaaatcattttgtgtgctattttaattaattgctgtttctgtggtggtgggtcagtatgtcttaattctgaatgttttccctgcacctcctaaaagatcttttttcccctaagtcctaacagaatggtatattcctctggaaaaagatgaacgtcaccaatggattgtgctgctctcgtttcagctttgatttttttgtccttgagaaccttgtcctccctgctgatttgtttctaaatcaaaagaaatgaagaaaaaagtactgtgacctgagagacaccctcctctagaatttagtggcgggtctgggctggcagaggtagggggctgctttgggctttgcacctgcactttggtgacattgttcttctgtgttccctttatttatgctggtggcttccatccgttcctcctctgagggtgagtggaggggtatatggaaacacggctatgaccaaagggagatcccagcctgggcaggctgcgctgctgaccaccctccctggggcccgggctctgtaggaaagttggtccttgactgtggcattgcactctgcactgtttctctctgcagacctaggggaaaactgcaggtggaagtgcttttctactaaggcctcttactttgggggggatgtgccctacagaagacatagaagatggggaaatgccaatgggcaaagagctactttgaatacataattctcttcaaagacttcagcagcaaaccaaaacagcaggttaaaaaaaaagatgcttttttgggtgcaagtctaacctgtctagcatgagatcttcttgattt

SEQ ID NO: 3141 - DNA, 1199 bp, Homo sapiens
gctcggcctcccctctctcagactctcaggagctgaaggggtgaggcagagatggcccaggggcagagcagggaggtcgggcttggtgcacaggcagactctgcctttgctacttcctacctttctctctgtgaccctgacctcccttctcccctgtcccaggacctctgggaactgacactgtcctggccaggcagccctgctacagtcatctgtccctcccgcccccctctcactgtctggttacaattttcccttgtctatgaattttcctcctgaacacgatctgaaggcctcaaaaatatttagttaaatgaaggaagcagagtggccaggggcccggcatgcctcaggcaggtgccagagctggcaccccaaggctctcctgggagcaaggagtggccgtctccggccatggtccacacaggcaccaaccactccccctggcaggtgtgaagcagcaactggggacggtgcggcccggcttaggcatgacctctgttttcatctgcctgcgaggcaccaaggaagacctgcatctgccgtccaccaactactatgtttactatgacacggacatggaccaggcgtaaggtgcacgtgtgtgtgtatgtgtgtggcccgtgcctccctgcttgactcagagaatgagcagaggttatggaatgggaggaagtaggcaatttctaatttgctcctggaagtttgtcacgccaaggctgtggctcagcttcacccctgtggggagtccctagggataagcagtccttgcagtggttctggggttttgaggacaaaaacctggagatcccaccacactcttgtcacatgcaggatggagcgctacgtctccatgcccagggaagaggctgcggaacacatccctcttctcttcttcgctttcccatcagccaaagatccgacctgggaggaccgattcccaggtggggctgcacgtcccgggtgagggggtggagggagaggccgggcagtagtaatatcagctctgatccccaggccggtccaccatgatcatgctcatacccactgcctacgagtggtttgaggagtggcaggcggagctgaagggaaagcggggcagtgactatgagaccttcaaaaactcctttgtggaagcctctatgtcagtggtcctgaaactgttcccacagctggaggggaaggtagggggtaaagta

SEQ ID NO: 3142 - DNA, 1171 bp, Homo sapiens
gacctatatctagcctgagcctctcttcagctccttgggcccagtgaatagtatcagccattgcctatattgctaactaatcagttaattccctattggctataacagaggtgtatggttgggggttcctatacagggtgtaagaagggaaaagtggaaattaggaaaggcccttaaacaaactggttgcatgctcttatgtgggtacccaccccaggcagtgacttgccccctcgtagatgagagcatttagggatcacctcgtggggcagatccgccccatacccaccacagaggctgacctagcaagactgaatagcctcgtccaaaaagagagtcctcttcgccgacaatgccagcctcttgaaagaagattggttgtagctgtaagtgtctgatgttcaactggaagccagtgcttggcttggaagtgacaagtaggagggcctcagtaaatgtttgttgacagaatgactcctataaatcctggcatgtcttccgttttgccacagggagccaagctagctcagagcagcctgggcagctaatctccttcagtgaggccctgcagcacttccagactgtggacctttcccccttcaaggtatgagggtagcagggtttggagtctcaagcaaagtgccttttccctaggagccaagcctctatcccaccaggacagggcattgggcaagcaaatctcccctaagatcttggtgcccaggatcatgggtggcctaggacccatgcttcatttggggccttggtagcttttgtgggactatgcccttacagctcctgtagccctgtcattcaggggcctgtatagctgtttatctactcttcccttttagggatggggacatctagagtcaagtactaggtagatccttgcagaggcaaggcaaactgttcagggagctgagtgattcatggccagtggaggaaaaccttccattccctcaaggaaccagaagctatttaggaatttaagaaagatataagctggaaaaagaaggaatatttgggggaataaacgctaggggtggggtgggtgctgggcatagtggctcacacatgtaataccagctctttcggaggaggctgaggtgaggggtcacttgaacccaggagttcaaggctgcagtaagctatgatcacacctgggcaa

SEQ ID NO: 3143 - DNA, 1212 bp, Homo sapiens
aaagaaactgagccaggaatttctcttttccagataagatttgtgaccaaatcagtgatgctgtccttgatgcccaccttcagcaggatcctgatgccaaagtagcttgtggtaggttcagaatgtgcttatcaactggtggaaagatagcataaaaattatttttatagaagtgatgtttgagttgaatgtctctttttattagaaactgttgctaaaactggaatgatccttcttgctggggaaattacatccagagctgctgttgactaccagaaagtggttcgtgaagctgttaaacacattggatatgatgattcttccaaaggtgtgttttaatgattttgctcatttttttctaggtaacagctgtgaggtttgaagaaactcctagaatgttcctgctaatcctaaactccagttgtatcttactatacactaagccctattctgttcattctctaaaaggtccgatggtttaggtatatttgatttcttcagcagtgtttagaattccagataattgctgtaaacagcaggtatttctaggacgtaaacaagatgttgtgttttttgcttataggttttgactacaagacttgtaacgtgctggtagccttggagcaacagtcaccagatattgctcaaggtgttcatcttgacagaaatgaagaagacattggtgctggagaccaggtatcttggtgtagaggctgttttaatctcttctaacattaaattctggagcttgatcacattggtgacttttctttctttagggcttaatgtttggctatgccactgatgaaactgaggagtgtatgcctttaaccattgtcttggcacacaagctaaatgccaaactggcagaactacgccgtaatggcactttgccttggttacgccctgattctaaaactcaagtaagtgatgatcataaagcttggttgtctcatttattacatcagcacagaagatccataattttgataatagctaactggaaaaaatagcatttgttttcctatattgtaacttcaggtagagaaacaaatacaaagttattgtttggtgtgatgttctgatgacctgtgttgccttcaaggttactgtgcagtatatgcaggatcgaggtgctgtgcttcccatcagagtccacacaattgttatatctgttcagcatgatgaagaggtttgtcttgatgaaatgag

SEQ ID NO: 3144 - DNA, 1725 bp, Homo sapiens
gtgtgtgtgtatatacttaaggctgaggaggtgaaggtgtgaaggaagactcctcaaatgggaatatattttaattcctggaacagttttgaactgctgccttagtgaagacttagttatttgagaaatttaaaattacggtgctccatggcttaggctaaccactctagagaatgttccagatttgatatttgagctttgtgctcttctacttaagggtgttaagaaaatagagataaagtgggttgctcaaggtttgttgcaatgtaaaaaccatggtagggtgtgggcggcgggaccttggtaagtattgtgtgatctcaggtgagctttttgacaattgaaatttctcagaataatgacaagttttcgtatttgttgagccagggacggaaaaacaactatagttactaataaggactgtgcaaggagtttggacaccagggaagtaacacttttgccacaaatttttttcctagcatatcccagagaactcatttgccagagctcttgaaaatgagtcttgctgattgttttgctttattttaatttaatgctacatattaagttacggacttgtatattccagggatctggatctgaagaagccaatttatcagaggactgcagcctatggccactttggtagggacagcttcccatgggaagtgcccaaaaagcttaaatattgaaagtgttagccttttttccccagacttgttggcgtaggctacagagaagccttcaagctctgagggaaagggccctccttcctaaattttcctgtcctctttcagctcctgaccagttgcagtcactctagtcaatgacatgaattttagcttttgtgggggactgtaagttgggcttgctattctgtccctaggtgttttgttcaccattataatgaatttagtgagcataggtgatccatgtaactgcctagaaacaacactgtagtaaataatgctttgaaattgaacctttgtgccctatcacccaacgctccaaagtcataattgcattgactttccccaccagatgctgaaaatgtccttgtgatgtgcacgtaaagtacttgtagttccacttatagcctctgtctggcaatgccacagccctgtcagcatgaatttgtaatgtcttgagctctattatgaatgtgaagccttccccttatcctccctgtaacttgatccatttctaattatgtagctctttgtcagggagtgttccctatccaatcaatcttgcatgtaacgcaagttcccagttggagctccagcctgacatcaaaaaaggcagttaccattaaaccatctccctggtgcttatgctcttaattgccacctctaacagcaccaaatcaaaatctctccactttcagctgtcttttggaggacgtacgtaataaggttttaatttagtaaaccaatcctatgcatggtttcagcactagccaaacctcaccaactcctagttctagaaaaacaggcacttggcagccttgtgatgtcatacagagaagtcacagggcagtacctgagggtctgtaggttgcacactttggtaccagataacttttttttttctttataagaaagcctgagtactccacactgcacaataactcctcccagggttttaactttgttttattttcaaaaccaggtccaatgagctttctgaacagctggtgtagctacagagaaaccagcttccttc

SEQ ID NO: 3145 - DNA, 1256 bp, Homo sapiens
gaaaatggtttggtcatttgggttattgaagtatttttggatgcttctcccatcccactctccagcttaaaatgtgggctgtgtacttagacttctggaagctggcatttacgcacattaactaaacttggccttgaccacaacccgtccttgattggtgccactgtgttctggttatgtttttatcagcacttcattcacatactaatttttagtgtttgtgaatgggaaccttatgcatattcatgtttccaaaaatgagcaaaaggatcttttgtaggggtagtgacaggtggttttcctgtattttgttttgtatataaatgtgtgttctaaaagtcattagtggggggtgcttgtgcatggctccttgtacaagaaagtagctttatttgaacatctgattgctagtcagctatctccaggaaaagatgatgaaggcttgtctttgaggtgtggctcacacgtgtctctctagcaactatgctgctagtgacagagacgtatgacatttgcatttggttgttagcgcaggcagtttggcacacacttgatacaaccaggctgtgatgattggcgcaggggtacggacctcagctgagtcatgggagctgaatgtatgtgtttctcctttgtcctgcatgtggcaggctgatggggagcacttacatgagactgttgcctcaatctgagcctgcacttcataacagaattctaagacagactgaacccctgctgtactttaagagagggaaacagcaggttctgttctatgcctcttttccagctgtgcacaggatggattccctccttagaaggacagtggtgatcctctacaagaggacaaatacagttggagtatcccttttccaaaatgcttaagaccagaagtgtatggggttttagattttggagcatttttggattaggaatattcaacctgtaccagcaaatcttgacattggcagcatatcagatttacctgtgaaaactgcagtgtagattcgtttggggagtttaagcacctgcggtgattctcatgtacacacagggctgggagctagtagagcccacagatgtgtgtctttgggagcttacagtatagttaagaaaagggcatttagtctctgatttcagagagaagacagctatagtgtctgattgccttgtttttctaatagtattcataatctttttcctttcttgagcaggaaaatgttggggcttttcaggaagcataataagattcctaggta

SEQ ID NO: 3146 - DNA, 1256 bp, Homo sapiens; identical to SEQ ID NO: 3145

SEQ ID NO: 3147 - DNA, 2449 bp, Homo sapiens
aagctgcacatggccactctgaaagccaagaatatggagattaaagtaaaggactacatctcagctaagcctctggaaatgagtagtgaagccaaggccaccagccagtcctctgagcgaaagaacgagggcagctgtggccctgctcggattgagtatgcttgacaggctttgggataagaagggacaaggtgcttctagccctgtctcagtccgttatcactctgctgtagaagggggacatgccacatgtattagaaggcatctgctgtaacttccagtgcaagataattcaataactgatgtcccatttcattcagagcccttattgctcttatcaaaacagaagaaggctacatttgtgggagtgttgtcatattctcaggccaactgttttgaaattcggtatctcactgagctaatctggaacaaacctctcacctcaggccagaaggggatgacctccatttgcttctctgagtagtttcctctgctgacattccaaatcccaccatcgattgtgcagcgctttggatttccttcagttctccaggtccacctggaaagtatagttggccagttgagtctctcaaatgaggggctactgggagtgctcttggtaacaatcatgatgtgaatgggtgtgaacgatacttggctatgttaagtgccttgtccgcaccttgcttttatctctagagacatgaagttattattaattttttttttttttaagtagagatggagtttcactctgtttcccaggctggtcttgaactcctgggccatgcctggccagggacatgaatttgtacaaagaaatttccctccctgcctgcacaatatcacccattgactcaccttatccaaagcaagtttcctgtgaatcggccagttcttctatattcattggatcattgcctccttcctaaccttccccatttaccaagaacactgggagactaatccttttagatagtagctttttgatgctcaaaacatcacatttaaatttagtttaaaaattttttaacttttgtgtcaaataggagttgaggaattgagcaggattctaccctagtccgattgtatagaaaacaccattttgattcaggtattatttttcatatttcaggtttgacttgttcttttcagaaggctaaagtcagaggaatgggggctgggccactcccttggagctctcagatctacagacaagctgtgtgaatgcatagatgtaatcttgtctcaaatactaatacagtggagatttggtttatgttaccattaagttcctctaaaaagtttttcttcctctcttcagagccaaaataaaagtgaactacactgttcagataaggtcacaatctgatgctgtcagtttgaccgagctggttttgcttatggtcatgctgcaatttgttagaataatagggatcaagttttaaatcctcctccttcccttttttctggagtcttgagggccagagtttttgtttttgtttttgtttttgttttcctgcttgctactgttttgtggtgttgaaaagtggtttaaacctgagactaacttaaacacttccttgaccttcttgttgcctgttcatttttgtgccaaggaagtagctgccccagtgtatgtcttgccttctccgcgtcattgttggaagaggagagatgcatcgagcagtcccagctgcttttcatttattacttcttctttccaggacctgacagaagtcagggaagagtccctgggttatgtccaaacttagcacctgcaattgttgggatgtggatggatgtgtgcataagagagagagagaatatgtgtgtgtgtgtgtgcgtctgcgagcgcacacacatgcacaagtgcgaaggagttgcggttgctccatgttctgacttagggcaatttgattctgcacttggggtctgtctgtacagttactcatgtcattgtaatgatttcactcctaactgtgacatttttatcaaatgtgtgaataaatacataaagattggtacaaaaaaaagtgtttgtctttggacaaatggtggtggaaaaatcttgcatattggacttaccatttctttctgatcacaaagttgaaaagaattttactctgagagttgggaggtggaagtggcagggcttgttcattcttggtagatagtggctgacacagtttgcctagaccacgagccctttccaagtgacctgcttggcaactgaaaataaaccacctatgtccacttccctagcttgatatactgacccatatcctttccctttaaaaaaagatcactttggagggagcagtgctagagcttagcagacggtagaaatcaggagggacagaagcaggcctgaggtctagggttgaggttgaggagagggtcaagtcagcgctcttggcggaggggcagtcctgctggcatgctctga

SEQ ID NO: 3148 - DNA, 1256 bp, Homo sapiens
ccaggtcgcgcccaatcacggcccaggtggcggagaaaaagtagggtgcgcgcgcgccgcgcgtgtggcagtcgcggaaggcgcgggagcttgcgtgctgctgggcctgagctgtctgtctcgtttctgtccgcgcgccctgcatcccggccccgggcgcccgctggaggtcgccgaggagccacagggctgactggtctgctgcccgggcccaggagtgcctggtgtagcagtcgcggagccatcccggcgtctgctgccatgaccgactctcccctcagaggagactcttcctcagcggtggctgcagagacagatgagcggcggctcctggccgcgggaccgtgagacgggttcgtggccggccatttagggggacgctgcgaccaccgcctgcgcccctccggactggttccttgggccccggaagctcgcggcgggccctgcgggaggcggcatgctcccgcggaggctgctggccgcctggctggcggggacgcggggcgggggcctgctggcgcttctggccaatcagtgccgcttcgtcacgggcctgcgcgtgcggcgcgcgcagcagatcgcgcagctctacggccgcctctactccgagagctcacgccgcgttctcctcggccgcctctggcgccggctgcacggccgtcctggccatgcctctgccttgatggcggcgttagccggcgtcttcgtttgggacgaggagaggatccaggaggaggagttgcagaggtgggcgctgcggcgagctctttctgggccgtggggtgggggggcttgtgaaccctggggcctgccctgtggtcgttggcccttgtttacccggtggtcttttaattggcaatacagtcgattgaacctgcttcagcaaaccgcgttgttatttgtctctgtgtgtcaatttgcatttgtcgggttataaaatagaactgaaagtgtgtaggctggtgtgtaggagggagactttgagtggggcgagcaagacagtaaagaaacaacactgtagaaatcaattagatagcgaaggcatggaggcccttgttcatgtaatctgtaatctttaacacaaccagaaaggtgcaaattcaaaacaaattttaaatttggcctaagggtggtgggctgctatttgcaaaatgacttcaatccagatgggactcaggcctgtgagaaaagccaggagagccctctgtcatcgtgactcgtggcaaaattgagagcctggaagcgattttgtccag

SEQ ID NO: 3149 - DNA, 1211 bp, Homo sapiens
cctatcaattactgaatacccattgtggtttgtttctcaatcatctgggaggagccatctatagtcctgtcctgaagggagttcctcctagatctggtcggacctttgtatggtaattgagatttaaatcccctattaggaaatctgctgggttaagggaatttttagtggttaatgttaaatcacctttttctaacagaatagccccatactttaagatttttgagttagtgagctacctttttgcttttttgacttagaataattctgaactggtgaggtgtgctcacagtgaggtttcctctaaaagttacttttctactttcttctgttagcaaagcagtttctgctacagaatgaatgcatttgggccatccgtgggttcctgggttaaggatttttgataggaaggctactggttgtcagtggtctcagtgttttcagactatgcccttgtttacactgacaacaagttagtattggagtgttatagggtcacaaagaagaccttcaattatcaattataggctttaaatttaccctggcttttaaaggaatagggcacactgtttttttctttactacttctgtctctttttttccctgtctccctctcttctctcttttctctctctgtctctctctatctcttctctccttgacttactcaatttgctttcattctgatctattatgttgtcgtagacccagttccaattgttaaagtactgggtcatcagttctaaggccctggccaaggagccaaggcttagagattgcattgcagaggggtaagctgggtagaaatcgggggaggagagcatcttacacaatggaagagcaatcctcctaggcatttacaaacttggggccttggcaagggtggtagggaatgggtcccacataactgcccatgtcaagagctgtatgcctaaattgggagggacaccagggacaaaactccctgggttcatagcctagatgcctaaggacacagcatagagcttccttagatccctttggagatacaacttgctctaatacttgggaaaggaaatgaaagtctgaaccattagtacctaggaggcagggatcagaggaagtagattcagaggtaaggagaatttgggggctacactttcaagaaagtcatggtcgggacccaggacgtatgggtcagaaggaaaggtaggggtacacgcatgggcaac

SEQ ID NO: 3150 - DNA, 1285 bp, Homo sapiens
tcaaggaccagagtgaaggggactacatctcccagcccttcaccttttaaatatgagtggttttaaaaggaaaaaaatgaaaccaggcaacagcaacaatattctgtttttaaaatagggacaagactgttgtcactttttagacatgtatcccattccttttggctctgcaatatttggggctgtagctccttccaagcccatggtagtccctccccgagtctctcccagtagaatgcagcctcccttccctggccccttccctctcagtgacggtgactccctggggccttctcgtggaacccagaggggctgaggactgtggcctggctggcgggccagcgtggtgctcctcaggactgcagcactgagatggaacctggcctcagtttaggaacaggggccacaacagggcaggaacccaccaccctccacataggaatacaaccagtggggccacatcatgtgaggcatcagacccacactgtcagcccagcaggccgggctgtgtccttcagacccagtgctgccctagactctgactcgggactccagcttgccacgtgccctctcccctcttgaatgtactctggtcttgcagtgtgctgctgggactttcttgctcagccatcactctggtcaccttgtttgctctgggtctggctgaattttctgccctgagatctgggcataaagtggatgaaacttgaaagaccttcagtgtagatccagatggccaacctgtccttgttaagttacttgcttcttgggaatcagtgtcccctgctgagctgaaaaggaaatggattccaatctcttccaacctttaaggtgatagatagtttgagcaagactggagaatggacaacactatgaagctgtggctagaaagggactgtcatgtcccatcctttggccagattgactggggatgtccggacagatgcctgcatgggtggtgagggccacatctgcacacgagccagtggctgcttgcagttcactgctgtgatgccagagtgtgttcaaaggtgactctcctgctcttctggactcttctctcaggcaagaaaggctgcaggctgcctgctatgtgatgcctgagcacaaagccaaggaactgaactaagtctttctgttaagtcctgagtttgtcattggcaggtttacttgtggccagctctctctgcccttgggtgtctgagcaggcagaccagaagaccaggcactggacctgcatgccaaagggactggtcatctcctgaggacctgtaaatgaccctgt

SEQ ID NO: 3151 - DNA, 1155 bp, Homo sapiens
atggtagagtcaggcctgataaggaatgggggtggctgccctcaattcccaagcactcccccagggttgcagaggactgcatagggtatgccttctctaaaatccctgatttatggggatgggatggggtggggggatggagtcttaccaagcaatgtcataaatggtccttgagtggaagccggacaaagtacagatacatttccaactggggtcagagccgctgcatgccacccctgcaagacagacttctcttgcccttaaacgttcctatgtcctgggcacctcaaaggagaacctaacttaccttccctcaccctcatcttcaactgattatgagtctgtgtctccgttcgtgtccccatccctgcttatctgccttacacactatagccagactggcgtttctcaagcagaattccgaggaaacatccctgttctgttgcagactgtatgtaactactttgcgtgcctgtgaaggccacccaccagccgacccaacccactttattcctctccaaaccccagacgtcctatgccccatttaaatgcattaccacccctcagtctaagcattcccgccattgttatctttactcacactgttgagttttcacttgaattctcacgtgaaattctcatgttaaaatcctacatacccttttaaattcagatgaaacaacccattctacaaaactttcctgattcttccagcactctatccagagccctcttgtagcacatcttaccttttacccccatttgctctgactcatgtacgtgtcttagcagactgtgaaccccttgagagatgggtcttctttagctctactaatggacctcaccttgttcattgcctggtagatactgacgccagatacgcacagtacggtcatcactacaagacgccaggcgctggccactcgggtcaaaggccaagctccacacagtggattcatggccctcaagggtggcacagcatacccagtcatcctcttcctcccggtacagcttcactgtgtcatcatagctggcagaagctaagagctgggggaagagtgaaaggaaacccaacatgtgtctgtgtggcccaggaagcaaaggacaggtcagttccaggtatctgcttttattttattttattatttatttgag

SEQ ID NO: 3152 - DNA, 1155 bp, Homo sapiens
gtttcctcggaattctgcttgagaaacgccagtctggctatagtgtgtaaggcagataagcagggatggggacacgaacggagacacagactcataatcagttgaagatgagggtgagggaaggtaagttaggttctcctttgaggtgcccaggacataggaacgtttaagggcaagagaagtctgtcttgcaggggtggcatgcagcggctctgaccccagttggaaatgtatctgtactttgtccggcttccactcaaggaccatttatgacattgcttggtaagactccatccccccaccccatcccatccccataaatcagggattttagagaaggcataccctatgcagtcctctgcaaccctgggggagtgcttgggaattgagggcagccacccccattccttatcaggcctgactctaccatgctggtttacagctggctgggctggcattcacaggagcagagaacagtcccaggctgtgagggtagcaccagcgctagaggttcgcacagctcgtgctgtccagaagttattattgaatctgcattcgtggctgagggtttttttttgtttttttgttttttgagacagagtctcactctgcagcccaggctggagtgcggtggcgtgatctcatctcactgcaagctccgtctcccgggttcacaccattctcctgcctcagcctcccaagtagctgggattacaggcgcccgccaccatgcctggctaattttttatttttagtagagacggggtttcaccgcgttagccaggatggtctcgatctcctgacctcatgatccgcccaccttggcctcccaaagtgctgggattacaggcatgagccaccgcacctggcagtggctggggtttttataggtaacactgactctggccttgtggaagctggaaaagctgcaccattcatataggagagtaggttagagggtagttctggccctgagaattgatccctaggaaatccaaaacagtgaaaaaaactgagcacttaagcttgctttatattagcaaacatttgggaatcacctattcaacaaaagtgaacttaagtaaattatggtagaactcagcttgttgtatcactgtttaaagaaaggggttaagaatactttatgatggggcc

SEQ ID NO: 3153 - DNA, 1099 bp, Homo sapiens
tcccaacactttgggaggccaaggtgggtggatcacaaggtcaggagttcaagaccagcctggccaatatggtgaaagtccgtctctactaaaattacaaaaattagccgggcgtggtggcagatcccttgtagtcccagctactcgggaggctgaggcaggagaatagcttgaacccgggaggtggaggttgcagtgagtcgagatcgtgccactggactccagcctgggtgacagagcgagactccatttcaaaaaaaaaaaaaaaaaaaaaaaatcacttgtagtcttggtgtggtatcaaagaatagccacaattagctgaaaaggctattttaaaaacttttccaactgcgtatctgtgtgaagtcaacttacttcaacaaaaaagtttggatgtagaagcagctgtaagaattcaactgtttattataacaagatactaaagagactgtaaaatgccacccttctccttggattgttttggaagttattcttcataaaaaatgttaacgtgggctgggcatggtggctcatgcctgtaatcccagcactctgggaggctgaggtgggcggatcacttgagctcaggaattcaaggtcagcctgggcaacatggctaaactctgtctctattaagaaaaaaaatgttaacattatgatttaaaagtgcattaaccttaatctagataataaaagctttttggggcaacctccagaactgtgaaaaataaatttgttatttaaaaagaaaaaaaaaaaaacaaaaacctgagtttcttagtttttagtagtgtaaagaggtcctaagaccaaatcatttgaaaactgctaccctgaggaaactgcccttcagaatcatctttcaattttgtgtgcatttaatctaaagaacagaaggtaagaatttgaagacagtcggaagatctggattagaaaacctgtttattaagactgggtcacatccagctagtacatttcagtgccctttctggtgctgcctcccaggagcagacactgcaaatttcagaacccccatctagagaaacccctaacctgtgatctagcttccgaggctcagtgttggttcttgtggtag

SEQ ID NO: 3154 - DNA, 1181 bp, Homo sapiens
aatttagggtgacttgagggagaggttctgtggtgatgcaggatcagctccagatcatggttgagttggggtcatttccacaggaaggtgatgaagacgtatacggggaggttcgagaagaggcatctgatgatgacatggaaggggacgaggctgtcgtgcgctgcaccctctcggctaatgtaagttcagtttgctcttcctcattgctacaaggttacttctgggtgttagtgcttcttccccatgcctaggtcctgttacatttattgagccactttttgctggagtgaactataataaacacttagtgtctagagtttcttaaaatttctgtcggttttcttccttcccaaagatgtatgttgatgaaatcttagtctggtgtgcttctgaactcaatattccagagttttttcctctggaaagtcctcacaagaaggtgggctatggattgtcaagtagaacttggttgcagggtggtggcaaagtgatcgaggctggcagagacctggtgagctaaatgcctggttacttttatagctcgtagcctcaggtgaactgatgagttccaagaagaaggatttgcaccctcgggatattgatgcattttggctgcagcggcagctcagtcgtttctatgatgatgccatcgtgtcgcagaagaaggcagatgaagtattggagattttgaaggtatggccaagatgacaatagttgtatatttagtgtatcttagcacatggggacagcgtatgaagtggcagatggctttggccttaatggtggtgttacctgctctctgcagacggccagtgatgatcgggaatgtgaaaatcagctggttctgctgcttggtttcaacacctttgatttcattaaagtgttgcggcagcacaggatgatgagtgagtatatggtggggtcttcctgcagagtgagtacatatgtgtgcatgtgtgacatagagattctgttgttttcacagcctaagtgcttgtttcttttatttttcttctttctaccctgaggatggttttttgccttatttcctcctcctcacttcctttgttccttttgttgtgggtagttttatactgtaccttgctggccagtgcacaaagtgaagctgaaaaggaaaggattatgggaaagatggaagctgacccagagctatccaa

SEQ ID NO: 3155 - DNA, 1198 bp, Homo sapiens
gactccagcatagtataagcataacttttaaatttgtgtgactggaagtgcctgtattaaacactggacatttggctagggacacctgagagtgtgcccagaggagagtattctaaatgaagatgcagttagaagttgtgtcatatgaagaacagtggaagaaaatggggcgtttcttaattcaagtatttattgtttagtagtagttttggatttgttacaagcacattgtgggtttatttgagttgtttttgaggcacagaattatattaaaatattcagtgtgctcttgtaaactgtgcacatctccagtcacatttctcctacttcagagatttatatatcaagtagaaatcactggtctaaggaaggacctgcaaatatttgaaagactgtgatccataggcactcgtaaaagaggagcctcattccacgaggctctggaatacagaatgaggatgatggatgtaattagagggaagagctggatgtctctccttgttgccatgtagggaacagtggtttccattcaggaatgagacaggctgttaattaaggtaatgggttttcctttttttttttaaagacagggtctcaggctggagtgcagtggtatgagtatggctcagtgcagcctcaacccctgggctcaaatgatcctcctgcctcagcctcctgagtagctgagaccacaggcacacagcaccatgccatctttttttgtagagatggggtctcactgtgttgcccaacgctagtctcaaaattcctaggctcaagcagttctcccacctcagcctctcaaaatgctgggattacaggtgtgagtcaccgtgcctggctggtaatgggttttctgtcaaaattgttcaagtgcaacaaggtgactttcagaaagctggagggtagattttccaacttttgtttttagtgaaggaaccctttttcaggtaaaactgtgcagaaggcctaattgccagtcacacagaaatagagctgctctggtttatttgggattggtagagatgctgagccctgctactccaggtttgcactgtatagtggaaaagtctgttagacttagatgacttgtgagggcccttctgactctaaaattgtataattctaggaggagattgggcataggaattaagatttacttctctaacctagttcagtagcttttaacaaaatagct

SEQ ID NO: 3156 - DNA, 1275 bp, Homo sapiens
gcactcgcattgctgtagtttgttgagttttggcatggccccatgaggcagatagtactattcagttttagatgcttctacagactgactccgtggcagagtcaggttgccatgcagtaatttcagaaggagcccctattggccattttctacaaccttttttcttattccctctctttttctcccttctctggctggctgtgattctgtaattctttctgattcattccagcacagtttgctgcttttctgaaacaaaatatgctggtgaggaaagctcttcctcctggcacctcctcctgtctctttggtgagtattactctttcttgcctgctcgtccactacattctgctcctcaaccccttatttattttccatctctgcctctcatctgcctcagtttggtttcctcctgttcttttctctctctttctttgtattcttttgttttgctgaccccttttgcttactctgtagtctttgccctttttccattcttttgtttgcttctcatggtgttttcttttttgtctcttagtgtggttctttctttcactacggtcttggctctgctgcttttttgtatgtctgtggcattgcctgagtctcagtttccttgtgtgtttttctccctgcctcctgtcctgtgtttatctggtggctacaagcctaccagccacatatcagcatagaacctgaaactcctttcccctacaccctccttcctactctgattttagccagtgcatttgtcccctaagcaatccttctagctggttatgtcctgactgttgcctcatgccaggacccctcctccctcctcatgtgactgctaccttcctccccacaccagtctttgcttccctgtgctacaagaggactagggtggacttctgggtttaaagaggagggaatctttgaggaagcttgaaagataacctaagagtccaaaaagcttggctgtatacatgatgagcctgtttgattcagtggaagtggaagcccatgtgtgaacagatggcctttgtctgtactagtacacatgacctggggactaggttgtgacatgggccagtgttgccctgttacttttgggtgggagccgtgaggttgcctggttgaggtactctctctcctagtagctactcatagccagcttttagtcctggtgacactcctcttcattgcctccatttggcaagtggatcctcaactgtgggctcttagggcagggtgggactcttgagagcctttggaaaactctactttttaga

SEQ ID NO: 3157 - DNA, 1175 bp, Homo sapiens
ctctcagatcgggagcacccccctgcacgtggcagtgcgcacccggcaccccgactgcctggagcacctcatcgagtgtggcgcccacctgaacgcacaggataaggtaaggcaggcgcttggtcttttccggctcggacagctccagaggagcagggactgaggagccccagccaggaccagaggtgctgtctgctcggtgacagcagccctgaccttcctgcatgaggagggcagcacgcggaggcagaagcttgactgcctgcgttctcagcaggaaggggacacggctctgcacgaggccgtgcggcacggcagctacaaagccatgaagctactgctgctctatggggccgagctgggggtgcggaacgcggtgagtgtgggcgcagccctggctcctgacccgagggcgggtggagcgcctgcaagggactgacccacaccgttgctcccaggcctccgtgaccccggtgcagctggctcgagactggcagcgcggcatccgggaggccctgcaggcccacgtggcgcatccccgcacccggtgctgaccgcagcaccgccccccgccgcgcctttcgcactgccaccattccatcctgtgccccgcccccgcgtctgcacctctgtggttcctgccctcagccctggttcctccctctctggcctgtgccgcctcagcagccctggcagaactgaagagcggcaccgggcccagcaggcaaagagagaggcctccctggcttcgagtgtcaggggagccgcgttccctcccagggctggagcagaggaccacaaggcagcagaaagcgcgggtccagatgagggccaggaaggggaggagagtgagggccaagaacgagccttaagggagcagtcccaagctggagccacccagggctgggtctgggagtcctcagtgtccacttgtcccaggttagggggcttgccttgctctctccagggccagtctgtgtgtgtggggactcagcccgtggccggcagatgccatccaggatgtacaaggtgcagccaaggcaggccatgcaggggccgggcctgtctgcagctggtggatgcctgtgggcatggctttctctggggaccccattcctgtcagtagcaaccctggcagtgtccggagcggctctagacaactttggtcataggaa

SEQ ID NO: 3158 - DNA, 1154 bp, Homo sapiens
tggagctgccccacggccttgtgccctctcatttacaccttctcctctgcaccccccaggagacggctggctgctcaaggctgtgagcctggggccctgggttcacctgattgaggagctgcagctgtttgaccaggagcccatgagaagcctggtgctatctcagagcaaggtagtaagttgggccctatctgccactgtccccagcactatcccatctcactctctccatctggctgcttctcccagttgggcctatgtgcttggccagtgcagagttaggaacacacacacatgtggatgcacaccttgcctaacttggggtgggttcctggaaacgagaatgaaaacagaatggaatctgcactgcacagggccattatatatagccaggtcacggggctgcgctcccagcatcaagccttggcaactgctcccatgtttctttcagaccctccaagctgtgctgtggttctggctctggcctcttccctgaccatgcccctgtgaccagacctcccaggctgtgagatgtttatgatgccctcaccatggtggttttccttccagcccccatttccgtgactgtttccctgaagtgcttgcattatacccttgtgcaatactctttttggtttttttttgagatggagtctcactctgtcacccaggctagagtgcagtgacgcgatctcagctcactgcaacctccacctcccaggttgaagctattcttatgcctcagcctcctgagtagctgggattacaggtgcctgccactatgcccagctaaaggttttttgtttttgtttttgttttctttgagatggagtctcactctgtcgcccaggctggagtgcggtggcatgatctctgctcactgcaacctccacctcccgggttcaagcaattctgcctcggcctcccaagtaactgggactacaggcacgtgccaccatgcccagctaatttttttttttttttttttttttgagatggagtctcgctctgtcacccaggctggagtgcagtggcgcaatctcggctcactgcaagctctgcctcccaggttcacaccattctcctgcctcagccttccatgtagctgggactacaggctcccatcaccacgcctggctaattttttgtatttt

SEQ ID NO: 3159 - DNA, 1106 bp, Homo sapiens
aagtcagggacaggctgctgaggagttgcccccatagtgtgctggctttattctcacgtgtgtggcacagctttctaagaaactcgagttggaagaacgggcagtgtgggttgggacctgggattagcctcctctgggggagctctgtccaactccccaccccagactgcctgcccaggtgtgggagggggagagccttctgcctcgccctctccacgcctcgcttcttgaattgtcactggcgctgggagcctaaagagaaactggaaccgggataaatataaactggaggctctctcccctggctccccaggcccccctaagacctcctactgccctgtacacatcatacactctggtggccctggaagtgtgtgtgtatgtgcacatgctcgcatggttgccggggcacagcggggacccagcagtgctccctgtgcacacacccgtgtgaaaggtgatgtcaggtgtttgtatcagccgtgcgctctggggacctgggatgagctcacctcccacaggctccactcgggtgccagtgaagccctgccatgccggtctgtgtctggatccattgttgcctgcaaagactaaggctggtttggggggaccctgaggacaggtcggcagccatatttggcagctgatgtaggaatcacgtgactgtataaatgtcgtagtgccctgcatgccgggtggcagcaagacttcccaggccccagccccatctccgctctctgagcctctggtttctccggacctccctggcctggctcacagcccagctcccctcctgccatccccacctgtcctagtggcctgctgtgctcgcatctctggcagcctggattggggtcctgctggagtgaagggtttcctgaggcagggagtactcatagccgtctgtgcctcctgctctgctggactctgatagaggcagtgggcagcagggcaaagaaggaagcagccgccgaggaagcgaaggtggggtgggggtgcccagccctgcggccggaggtgccattgaccctgagagcaagagccatcagtctgatggcttcctctggccggaagctgtggctgagatatccttccttcctcccagc

SEQ ID NO: 3160 - DNA, 1177 bp, Homo sapiens
ccttaccagtaagtgtgggctgaagagagagacactggctttaacctcagataaaagctgttccattctcactgccttgtagcctctcatactcagaagggaaggtgaggctcggtcctgtgactattcattcttccagactgtgaaagtttttgatgatgactcagagaaatgtcctctgtttactaaaatataatatctattaacagtctgctgcaaaagagataggccctgtcttgtctcagtcctctcaaactgtgcccatatgttccactcctctggcccttactgaaccatgatgcctgccagaatcactctgaaattcttctgcccctctgtcagtcttctggcccagttctcagaacacaggtccctgtctgtccgctttccagtgatctgtccatgcccttcaaattcacaacataagaagagttgatcattaaaatatcccagaatgggaaataggggttgcctgttctgtctgagaccagcaatgcagatgcaggattctaagggaggaggagaaagcaaaagttggtgcccttgaaactgctcagtcacatccttgtgacatctaaaaggataaaaggtactcagggttaaataattggaacagaaggaggacagtcaagttcaggcatatatggagaaagagagcttctgtcagtgcctgacaccaagtaaaactctttctttaacggaatgcacccataaatgtgtcagaaaaataacccttggtgaggaaaagcaaagttgtagagaacaagggataaagaagacagcaagcaacatttcctgcagatttcaaaataattcttgagtgcttacatttcctggaattgccgtgaggctactgagtattatcacccactatgaaaaagtcagctgagagtaatatggtatcatggttaagagtaatgtcttgaagttaaattgcctgggtttgattcccaaactcactgctcataagcctccttcccagaacaaagtgcccttctcaaagccttgtgtgtgggtgtggggtgtatgggtgtgttaggcatatttttatataatatagtagttgtatattcacagtaattgtgtgtgtgtgtttgtgtgtgtgtgtgtgtgtgtatatatatatatatatatatatatatatatatatatatatatatgtgctgggattataggt

SEQ ID NO: 3161 - DNA, 1183 bp, Homo sapiens
ggtaaccaacagcctgaattaacgtttttacttttaagtcactgcaatgcacattaaaaatactttacaagatacttgcactttcataggtaatatgtggaatctgtttccaagtatcaagtcttctatacgatttcacacagtgtacataatagctgcaactcggcttttgtaatcagtggaatatatttcagatctgtccaggttgacacagtttggtcatctttgatttgttttatgactgcaccacatatttgatttgttttatgactgcaccacaattaattaaaatctcttcatgctgatacaaaatgaacataaatatgatgacataccaacatagatttgcttatgtggttgcctttattgatttgtactataaagaaattaaatagaagtatttcagataccccgagtatagctgtatacactgccatagctgaaaaactccagtgtatgcttttcagagaatgacattggaaagaagaaatggccaaagtatcatttggtaccttggcttccttacatagatgatgaactccaggaatgatcaaatcacagtttagaacccctttgttgggccctataaagggtttccaggtgtcaaatgatagtctccagataaagaaatgctctataatgcctcaccgctgtgttttcctgtattttgtgcttttctgaaaactttaaatacatgaatttttggtagaaatgaaaatctttctgttttatatatttgtttctgtccatggcactctgatctctttgaatctggtaaggatctagccttgtcttatttataccagcaagcagtgttgtcacttaatgctctcatttttcatgtaaatgactgacattttcccaagtcttcacaagtgatttctgaagatgttgctgcattgagcagagactatgtcattgtaattgcagaagttttaaaattaaatatgtttaataaaattttagagttctgtttatctggaacacataacacataatggtgtaatgtgtatttaaccataaattagcttcacaaaaagtttgtgtacataaaagtgtttatatccaaagaaattcttatttactgctcagtaatctcttgtgtagaagaaaatatgtaacatagtttgctgagtctttgataataaccctcatgtaaaataaagccgtaaagataaaatga

SEQ ID NO: 3162 - DNA, 1117 bp, Homo sapiens
gaaaactgaggagagtccagcctctgatgaagcaggagagaaagaagccaagtctgattaataaccatataccatgtcttatcagtggtccctgtctcccttcttgtacaatccagaggaatatttttatcaactattttgtaaatgcaagttttttagtagctctagaaacatttttaagaaggagggaatcccacctcatcccattttttaagtgtaaatgcttttttttaagaggtgaaatcatttgctggttgtttattttttggtacaaccagaaaatagtgtgggatattgaattatgggaggctctgattgtctcgggtgtcagcttaacattccatagatggggggttagtttttatatcctataatacaaagcatattaaatggcaatatggagtcagtcctgcatttaatgtcttgaacattttaaattacttctattaccatgttgttttttagtagaattgtttcctaaagaaaaccactctttgatcatggctctctctgccagaattgtgtgcactctgtaacatctttggttgtggtagtcctgttttcctaataactttgttactgtgctgtgaaagattacaaatttgaatatgtagtgtacgtgctattgagttgtgaactggtgggctgtatgtaacagctgaccaacatgtgaagatactggtacttgatagcctcttaaggaaaatttgcttccaaattttaagctggaaagtcactggaataactttaaaaaataattacaatacatggctttttagaatttcgttatgtatgttaagatttgtgtacaaattgaaatgtctgtacgatcctcaaccaatgaaatctcaattatgaaaaaaaaaaagtgtaacatatattatcctaacttctaatcttatggaaatcagacatagggtctgtgcccctcaaagctcaagtgtctcagcacagggccatacaactaacacccctacttatagggttagagatggccactgctacaggaaccagaatagcaggtttatctacatcattatcctactaccacaaactctcaaaggatttctcagacagtttgcaagaaataatgaaatctatccttactctacaatcc

SEQ ID NO: 3163 - DNA, 1176 bp, Homo sapiens
ggaatcacggagagcgaaggccactccgtgcggcgggcgccgcgaggtcccggctcgggacggtacccgaccgcccaactttgcgccggagccccggccgcggcccttcctcccggcccagccctcccggcctccgcgagagcggggtgacagccccgccgcagggacgccgccgggggacacccaccttccttctcggcccgcgccgcagccactacgagggtcatcaccaggtgcagcgcgcctaggaggccggcggccgcgctccgcgggcccccgctacgggcggccgcaggttccagcccggccccggcggacgtggagacggcggcggtggtggctccggttgctcctcctcccgcccgcttccccatccctgccggccgggggccgccgcgctcgaggtccggcgcggcccttctcggcgaggcggcggcggcgcggaagccgtggtccgggctctggccgcggcgccgggagcgacaacggttgcgagcccggggctcgatctccgagcgtgggcctgggtccgtgcgtgcgtgtgagcgagagtgtcagtcacggtctttgcctgggcatcgcctacaagcagtcggagcggagaggccgcgggtcaggcgcggcgggcggccatactggaaacgggcacggcccgcgagccctgagcgctggcctgcgaggggcggggcgcggctctgggcaccgcccacgctgtgccgacacctgggctgtccggcggtcagtctgtccgccccggagccccctgggccccacctcctcgtcccgctctcggaggcctgcggcttcacggccagacagaaccaggacagaacaaccccagcccgttaccgctacctggcgcaggagaaggagggaggcaggcccaggtccagctgccaggacttatgatggcggcttctgcttcgcggaggcggtgtcggcaatcacgtggagacggggcggcctcgccgcgcagccgccgcgttgcgtgggcggggcaggggcggagttgcggggcgctaacctcttctccggcgcctgggcaatcctccgtgctctgtcctacagtggtagagccttccaggggtgtgagtgcgcatacagaccgcgagacgagcgcggaaggtccgttccagtgactcttcctggtggcacccccacctctcgaccgctttg

SEQ ID NO: 3164 - DNA, 1163 bp, Homo sapiens
gccattctactgggtatgaagtggtatctacttgagattttgactttcatttctctaacgactaatgatgtctgagcatgttttcatgtgcttattggccatttgtatgtctttagagaaatgtctattcaagtccttagtccagttttcagttcggttctttttattgttgtaacagttttttgtatgttgtagatacaagtcacctaaagataagtgattcacagattctcccaatttgtggtttgtctcttcactttcttgatggtatcctttgaagtataatttctaattttggtgaattacaatttatttttttcttttggtgtatctaagaaaccattgcctaatctaagcttaatggaaatttattgttttatcttcatttaagagttttacatttttacctcttacatgtgagtctgattcattttaaaaataatttttcaggcttttatttgcaatatatttttaaaattttaaatgtaagatacatataaaatttactatcttaaccatttttaagtgtacagttcaacagtgttgagtgcactcacaattatgcaaccaatctccagaactccccttcacccccaccacccctccaactctccaccttgacagtcaccattctactttatgtctacagtaagtgcctcgtgtggaatcataccacatttgtctttgactggcatatttcacttagcatatgttctcaaggttcatccatgttgtagtatgtatcaaaatttccttccttttttaaggccaaataatattcagttgtatgtatatagcacattttgtttacctatctgtcagtggacacttgggttgcttgtgcctttgggtaactgtgaataatgctgctgtgaatatgggtatacagatacctctgtgaccctgctttcagttcttgtgggtatatacccataagtggaattgctggagcacacagttattctaattttttcaggatcagccgtactgttttccacagcagccatactagtctacagtaacagcacacaaggatttcaacttttccacattcttgcctatacttgttattttttatttttttttaaatagtggccatcctaataggtgtgaagtatctcagtgtggttttaatttgcatcttcctaatgattagtggtgaa

SEQ ID NO: 3165 - DNA, 1295 bp, Homo sapiens
atatgattttctaaccaagatgaggggttggcgtgtgaatccgtcttcagttcagcaggtttagatatttattgcattcagagcagtttctcttaagtaatgttttaagtataagaaagatgtaaaaagtgcacaaatcataagtgtacagctctatgagttgtcacaaaggggcacacctgtgtaacaaactccagaagtacaacatttcagcatttacctgtctttcctgtattttggtgcacatattggtacacaactatttcagttgtcgggtcagcagctttttaaaaaggagtctttctcatggtgcatctctgaaggacccagacaagtgatgagaatcagtagtgttactcatgcattcatggaggtgtgaacacagtgctatgatagcactggggtaaaaacagcacattcagatgagggattctggaaaggattctcacaagaagcggtgttggagttggtctgaaaagaagataggaatttaatgggggagaaaggtattcgctgtgttaatagggaaggtggatgttggattgaaccaaggagtgggcacgtgtagtgtttggtctgatgaatacaggtccagatgcacgaaggatggagaagagtggaggagactgagggaatgaggaggggacagggactgttagagctgggagcagggatggtagcagtaaaggtgacgagagatctgaagggctcggcaggaatttctggtgaagagtgtcattatgttactactttatcctaaattttacttgctataaaatatcctgctgtgtgtggtgactcatgcccataatcccaacactttgggaagttgaggcaggaggatcccttgaaatgagcctgggcaacaaagtaagactccatctctacaaaaaatgtaaaaattagccgagtgtgatggcttttgtctgtggtcccagctactgaggaagctgaggcaggaggattgcttgaggactgggaggttgaggctgcagtgagccatgattgaggctaacgtggtacttatgcacgtgtgaacacatgtctttttttctcttgtaagttacttaagtggttagctgattttttttttgaacttcaaacacctcaatcaatataaaaacaagcacaaatattgtaaaactaccatatttatatttaaacttattattaattagcaatactatgggctttttcattaatttcttcatctctaaaccttcctaaagttaatagtaattctcatttttatacctttctgggattttagaaatctcatcaagctggaaaataaa

SEQ ID NO: 3166 - DNA, 1169 bp, Homo sapiens
tcgagaccagcctggccaacatggagaaaccccatctctactaaaaataaaaaaaattagcctggtgtggtggcacacgcctataatcccagctactcaggaggctgaggcaggagaattgcttgaaccctggaggcagaggttgcggtgagctgagatcacgccagttcactccagcctgggcaacagagtgagactctgtctcaaaaaaacagcttaagtttcagggctccggggttgagtgtcctcttctaaggccctctacttaatttcaaacccataattttgcttttttctttaaagatagcattatagcttttaagggcccagataacctgcctctgcccctgggaaggcgttatgcgggtgcttgtgatgtttttactcctttcatataaatctgtcatagtgagaacacatgttggagatggcatgtgtcaacatgattcaaaaacaatggcacaggtacctctgctaataaatatatttcaaatggattattcataacaccttaaaaggacttggattgaaacctattgcctttctttacaagattcagatctgttagaaatctgtgtggagtcagtccccatggcacaggcctgtagttcagctgctcaggagactgactgaaggattgcttggtcccaggagtttgaggctgcagtgagctatgatctcgcctgtgaatagccactgtactccagcctggacagcacagtgagaccacatctataaaatttaaaaaaaaaatctgtctagaatataagaaaaagaaagaattgataaatcagtgcttttatttctaggcaacatgtctgtcctcctcctaggttttaagcctaaaaataaatttttaaaggtttaaagcatacagctacatcattatttttatggcagtcaaattaattcttccgtccaccacttgaagccaatggagattgacggtcctgttttcttactttaatgatgtaaacctcattgaaaatgaagattctggaggataaaaaatggtgctgtgactgctattgattaagtgtcttgttgccgtcattgttcatccctccttggcctcttgggcagaaggaggcccaagaataacattgctgacatttccttgaaaagatgcagtgcttgacaaagacagctgcatgcttaaaaaaaaaaag

SEQ ID NO: 3167 - DNA, 1465 bp, Homo sapiens
cagctattttcctgcctcagcctcccaagtagctgggattacaggcagccgccaccacgcctggctcttagttttgcatttttagtagagaggggttttaccatgttggccagggtgatctcgaactcctgacctcagatgatgcacccacctcagcctcccaaagtgctggggttacaggggcaagccaccatgccgtttcttcatattttaatgtaacagaaaaatcacgtaacaaagtttctggtgatagacaaaagactaacacatttggaccatttggacccagatatctgcttaggattaaccggttgggtatcaatggtggctaccttaacatgtcttcaaacaagcatccctcctgtggtaacagcatttaatgttcacctgggggttatgtttcattttccagggaactgtaagttctaggttggtcagagtagagcaaaggacagcattagaagcaggcatatgagatatgtgaatacagctagtggctgcttggttgaaaggaggcattgacttcagcaacacaattatgtttttattaggaatgtgccataccgaatccgtgtgcggctgtccagaaaacgtaatgaggatgaagattcaccaaataagctatatactttggttacctatgtacctgttaccactttcaaaagtaagttctccatcccataaagccatttaaattcattagaaaaatgtccttacctcttaaaatgtgaattcatctgttaagctaggggtgacacacgtcattgtaccctttttaaattgttggtgtgggaagatgctaaagaatgcaaaactgatccatatctgggatgtaaaaaggttgtggaaaatagaatgcccagacccgtctacaaaaggtttttagagttgaaatatgaaatgtgatgtgggtatggaaattgactgttacttcctttacagatctacagacagtcaatgtggatgagaactaatcgctgatcgtcagatcaaataaagttataaaattgccttcatgtttttgttctttttagttgcaacataatgtacttgtataccctatcctaattatgggatcatttgaagagcttttcccaaattgatggcctgtgctgccttctccccatcccctggggttttaaagtgatttcaaactgcaacctagttttagaaccactgttctgggtagttgggatactgaaggcatattgttaattattctacttgtatgttttgctaattctaagataagcatttttccagaaaccaggatgtagaatccagttgccattgacatcttaacattttaggaaacaactttaaaatgatatactatctatctatctatctgtagcatcttaaaggtaatgaaattaatgtggcagtaggtcttttaagcttctgcctacatccatattgagtatagttgttgtcttctaaaataattaattgatttttggtgaga

SEQ ID NO: 3168 - DNA, 1172 bp, Homo sapiens
cttaaccaactgcaaattggaattattcaaaaggtttctccttttaactcaacttcttgacagaactcatcctttagacagcagatgtacttggttatgtataagacctcagaaggaaacttctattccttcacagaaagctgaacacaaagactggagcagcttcaattttattaatcaacattttaaggacatcctttaatgtggattcaggctggcaggcaaacatttcagagagcctatctgtgaataaaatagcatattccctgaatctcagagttcgcagaaggaactcatgatgtgaggggtcctcataggtttgctcagtatacaaacttacagaaaaacctccaaattgtctcatttgtgtgtgtccattttcaatataactttctcagcagtttgttatgtttctttccaaggaaaataaagttctcccaggaagttctcctctgaaagtccaattagtataattaactaagcaaaatggccaatatccgtaggtttatcaatctgcagtgaaaactgttgatgtcctaatcttctggaatgctcttcgtctgtgtgttacctgacatggtaccaaatcatctgtaatatttctgtgctagtttctgtgctaaacagtgttacagtcgccaagagcccataaagggagccctcctggaagtggatgaggccttgggtctcggctcttcattgcttcctgagctgcagcagatgcctttacaaccaagctcaccgaggacgtctgtctcccatattaccctggcagagggccaggcctgttctacacggccggggtttcaacaaggtactgatgtcttctgcccttgcctcttcgacaggcaagtaataagacttaagtgaagagaattctttaggcacacaaattcacatttgatgtaatctcattatacttcctgatctgtgattgaaaactttcatttcgtaactagtatgtctgtcccacctttaaaaagtttttcattatgaaagtaagtatttgttagaattaagtctatttaaatgaaaaaaacttagatatgagtctgcatggcctcaggaaaatgatgttttaaaatagagattttaggttgtctgcactctagcttttttgtcgttttcttaaggcttttttaactgcatcaaaaattcagatacgaaacata

SEQ ID NO: 3169 - DNA, 1174 bp, Homo sapiens
taggacacccctgtactgtcttgtctggggtaaatgctggtaggaaactaactccactcagtatgtttctcagcttagatgtatttagtattttgttagaaataatactgtcaggattcaaaaaatatctatttccagaaggactatacagattaaaagtcatttcaaatcccagcactttgggaggccaaggtgggcggatcacatggtcaggagatcgagaccatcctagctaacacggtgaaaccccgtctctactaaaaatacaaaaaatttgccgggtgtggtggcgggcgcctgtagtcccagctactcgagaggctgaggcaggagaatggcgtgaacccgggaggcggagcttgcagtgagccgagatcatgccactgcactccagcttgggcgagagtgcgagactccgtctcaaaaacgtggtggctcacgcctgtaatcccagcactttgggaggctggggtgggcggatcattggaggtcaggagttcgactccagcctgaccaacatggtgaaactccgtctctactaaaaatacaaaaattagctgggcgtggtggcacacgcctgtaatcccagctacttgggaggctgaggcagtagaatcacttgaacctgggaggcggaggttgtgatgagccgagatcgcgccattgcactccagcctgggcgacaaaagccaaactgtctcaaaaaaaaaaaaaaaaaaaagaattagcctagtgatgaatggtttagaaagcttctgggctttcttgcttgaaaaacagtgtttgcttgacagaaacactttaaaaaggcgtaaagagcattgcgcagcctcagatggagatgtaggtattttacccaccatgggagcatagagagttaaatgggttctgagtatctgttatattgctgttttgttattataattaaaaataaatgtgaaacgtaagcaaggcattaagattgcttacagaatgtatagctcgtgatcattcatcatcaaggattcagccatggcaagggtttggctggagtgaagggtcagactagatcttcgtaaatccagtgtcccaaaattgtatgtatgcacaagtgtgcatactcgtgtgtttttattttaacctgtagcttcctttagatttttgaggtaaaggaaggctttgatgctcacttagg

SEQ ID NO: 3170 - DNA, 1174 bp, Homo sapiens
gttggccaggctggtctcaaattcctaacctcaagtgatctacataccttggcctcacaaagtgctgggattataggcgtaagccaccatgcctaaaagttattttttgaatagctaatatgtgcacatggtacagaattcttactgtgcaaataagaccccccagcctgtcctgcatcccgaagcgcctctccccagaaacagtcatggtctccagtctctggggtaaccttccagagggtagtatgtgttgatgggagcatataggtctttgggttttcgttgttttttgttttttggggtttttttgtttgtttgtttttaaggactgcatgctgtccacacagtttacatgttgtgtgttttctatcttgagtactgtcagtacttacagagctgctacttcagccttcatacacatactgtaatttatataccttttttcctttcgatggacgtttagattgtgatagcaaaaacttaggaaagaacattggcaataaatcttttttatttatttaattttattattattatttttgagacagtgtcttgctctgttgcccaggctggagtacagtagcgtgatctcagctcactgcaacctctgcctcctaggctcaggtgatcctcctgcctcagcctccctagtagctgggactacagacatgcaccaccacacccagctaatttttgtatttcttttaagtagagatagggttttgccatgatggccaagctggtctcaaactcctgatccatccgccttggccccccaaagtgttgggattacaggtgtgagccaccgtgcctggccaacagtaaatctttatagatacctcattggttacatctgtgcaattaagttcctgggcacagaattgctgggccaaagagatatggacttttagaattttttgaatgccattgcctttcgtagaagagtgtaataatttattcacccccttgtccagcagtgtgcgagagtgctcattcgtgcctatttttgccagtatagtgtatcagactttttgatctttgccaatcttacaggaaatgttttcatttgttaccaaggaagacttttcatgtgtttaaaatcccttttgcagggagagagtgactgccagtggacacagggtttctttctagggtaatgaaaacattatggaat

SEQ ID NO: 3171 - DNA, 1197 bp, Homo sapiens
caaatacttagcatagtgccaggcacatagtagtaagcatttgctcagtagcagtttctgaaatacttatattaataataatggtcctggttattcttgttgacgtcagttcctcttttcctgatgtgtgcttctttttttccttttttaaattctttgtctgtctttgctgtatttctatttccctttatttctttctcttaatgtatttttcttctgacttaagggtcctgcataaccctgttaatgatatccacgaataaagaattttctgtcccctaattgctgtggtgcagtgagcagtggggaataattgttatcaaaatgaaactaaaccctataaggattcacagagtcacaatacttttgaccagcattcatgaagaagcccttacttatgggtccgaggggcagtgtggaaataattggccagtagatatggggcccatgaacctcacctcattagtgtccacctggcactgactgatcagcacactataacatcatgagaaagatggcgggaagatccctggtaattatacatttttacttacgtagcaacaaaggagagagcgggaagctagaaggcagcaggaacgtgaacagcgaaggagagaacaagaagaaaagaggcgtctagaggagttggagagaaggcgcaaagaagaagaggagaggagacgggcagaagaagaaaagaggagagttgaaagagaacaggttagttcacagataacatagcaggcatacacttgtgaagtttgttactttgcagagctgggggatttttagaaagtatacacacatgtgatgcatacacacatgtacacacatacacatatacttagaacttcagatgtatgaacgtggtgaaacacagttggaatgacaccaataaattcagtctcttgtcttaaaaagggtttataaatcattacactttaggaacctgttgaaaccagttaagtggtctctaaatagtataatacctgaaagatgtctgcatgtatcttctcaggcttggcttaaatgctgtagaccccaaatatatgggtgataattaacttttaaaaaaaaaatgaaattaaaaaccaacagtaagaaatttcttaggagaaatatttgaatatccagtggctaagtgaatactgtaatatatatcagcatgtaattctgtatatacacagcacattaaaa

SEQ ID NO: 3172 - DNA, 1336 bp, Homo sapiens
ttccttctgattctcttcccccctctcgtccctccctcccttttatctcccctttcttccccccgcccagacctattgcgaacgcccagagccgccgagggaacgccaacgtctgggccggacactaagagttaagatgtggcggagggggcggcgggggaggggcggggaggggaaagtggtgagggggagggaggctggaggacgacagatttccagcttctacgacgctctgcctaaattaaaaagcaaccaatcggaacggccggaaggggggcctcgcgtcctgagccagtcattccgagcctgccaatcacccagcgggtagccaatcagcgggggccctggtgctcgacttccttgtatttgggaaagtgtggtggtgggtgcgcgctcgcggcggagggtaaacattcgacagtccccgctctgagagggagggacagagagcgaactgtcagatcggagcgagagcgggcgcccgagagagggagagagagagagggagggagaggaaaagtgagagagggaaagagagcgcgaacgagggcgcagagcgagctcctgctgcaactctgctccagcacggccagcgccagcgcccgccgtcggtgcactctacgagccgtgcagcgtgcccactggagttgttgtgtatcaaggatcgatcccctatatgcacacacacacctccacctccaccaatgcactcttcttcctcctccttctccagacaactgctgggaaaaaaataaaacaccaaccccaaccgtcagcaacaaggtaacagagcgattcgacatcattttttttcctgttcaattttttccttgttatatttgtttcctaatttctgcccaaaaggaaagatgtcgcatcagactgtgactgttgcgaggagaatgaaaaaggactcttgtttcagaggcaaccaagagctccggcaatagcaacttcagagaaatgcaccatcgcaagaagttttcctaggacagaacaaaacttgaaacgagaggaccagagggggagagcaggagccagcctcccctctccgcactcgcgagcagccagcagcaccacgccttcaaggacgaaaaagttttactactctaagggaaaacgagtgaaatgtgttcctgaggaggagaggagaggagaggagagagcggacaagagaaggagcgggccggttgctggtcatccgtaatttggctaaggaagaaaggagcagcttctttctttgttatctcccgtgaaaccttcacttagcaggtggacggagccccgcgaccgggcagagtccgggctcgcccgaggacaggaggaggagcgggag

SEQ ID NO: 3173 - DNA, 1179 bp, Homo sapiens
gtttaaggaaaactgactgaaaagcgtgagttgcaaatagcatcctgagaaagctgctaagcaatacatatttcataccactcctgaacgtggtcagatataaatagcagcacagacatttaagagctattctcgctgaaaaaaaaagtaattaattggtgttatacacaaaggacttctctatttatttatttattttttgggtaaccagcacagctttaattacaagtaattgttctcaaaatcaggcggctcgtaagttctgcattctagacagtgattatgcatcaataccctaatctatcactttcattattttagtcatttgggtatgtaaatttgtatttaattcagacaacaaactccgcagttcccactgttactttctatgaacatacgcctttttaaggcacaatagggttggatgatttagatttacattcatttacttttacctaggaaaataatggtacattcttgtgggttttgctgacttctaggtaaatacagtggcattagatgtacaaggaggcaggtttgtccctagttaattaggaattttagtaggtgtctctatagaactgcatttgttactgcatcataatgagctggagtttgcagaaattcccctgcagaaatctcctagtgaagtaataggagcctattctttacctcattcagaatttgtacatttcttctctcccaagttagacactagaaatgtcgcctggattactcaactccagtacactgtttactctctgcccgggctttgtatatctgagtaaatttcaaaacaaaactcaaaagccttcccaggacatctgatgggaacacattcgctccaccttgtctttgtggatgacaccactattttgtttctgatctcctatacaggcagatattctttatttcctatgaaatatgtgtccttgaatgcaaaacaaatggtgaatgccctttgttccctttctaacttgctttttggtgtgatggtctaattgctatgccacagagttttaaatgaaaaaaaatttgaattaaaaattctatccatacttacaaaaaacaaaacaataaaatgatacctttggtaatcacttatttggttgaataactctcataaaacacacacacccacaaatgttttaaactactcaaatataaaattttgtggag

SEQ ID NO: 3174 - DNA, 1169 bp, Homo sapiens
atttaatttgttttataattttataaaatatttacatagctcaaaagtcaaatcagtaaaacaaagtatattcaaagaagtctaaactcagtttctctccttcactctgttcactgcctccccccttttactgtctggtctgttttatttgcatatattctttctctctctctctccctccttctccctctccccctcccacctttctacccgcctcgttctttctttcccttcccactgtccctctgtgtctctctctctgcctcccttcttctctgccttttgatgtgaatgtttgtgttgtattttttgttttaatgattaccttgatattattcatcttataaaattcctttatgttctcttttttgggagggtttctattgtctgttgcttccccacttggagctgtgtttgaaattagccagtaacatcttcgtcactcttcccctgtgttcctcagcatctgctttggaggaatagccctcaattcccagctgatacccggaaggcagtcagcaagcatcttgtcttttttgtataatctctcattcttccctattttttgatggttatattgtctgtactttttcagagcatcgagccttccacatgctatttggtttcttagttctgtggacaaatatgtgtggaatgctcaccattgaattttctgttgatgtctttccagtcattttggttttctaaagcagtcctatggtagatatttcacaatgggaatatggggacactgtctcttgagtttgtgcttgttgatgacagtgacagttcattgcagcctttatacttgagggccagtttggctggagacaaaatcctccactcatctttcagtgaggaacttaaatatgttctaccatgatagaattgcagtgaaaaatctgatgacaatctggatttctttcccttgtagtgacttgatctttttgcttagaggctcaaagcatacaaatttcttttatgtcaaatttctccatgttggcacacatggcaaactggagcctgcaaaatcacctcccacttcccactgtatgcccacccattccctccgcacccggcccaggcaatccccacttccacttctgtctctatgaatttgactactctaggaatctcacataagtgaagtcatacaatatttgtccttc

SEQ ID NO: 3175 - DNA, 1240 bp, Homo sapiens
accctcatttatatagatgaggaaactgattctcagagggtaaattgcccagggccacacagtaggtggcagagctgttagagtttcaaatttgagtctgtaaaacccaaaccctactctttccagtgtatcatgctgctgttgtcgtaaaatgccaacataaaatttaccatcttaaacatttttttttttgagatggagtttcgctcttgtcacccaggctggagtgcagtggcatgatctcagcttactgcaacctctgcctcctgggttcaagcgattctcctgcctcggcctcccgagtagctgggattacagatgcccagcaccatgcccagctaatttttgtatttttagtagagatggggtttcgccatgttggccaggctggtctcaaactcctgacctcaggtgatgctcccgcctcagccttccaacgtgctgggattacaggtgtgagctactgcacctggcccatcgtaacactttttaagtgtgtagttcagtggtgttaagtatgtttatattgttgtgaaatagctctccagaactttttcatcttgcagaactgaaactctatatccattgaatagcaactcctgctttatccccagctcctggcaaccactgttctactttcaatgtctataaatttgaatacagcagattctcaaataatgttgttttattcaacatgattttgttataatgttgatgagaacaaaaaattgattcccagttgggaccagtgtctgtgtggggtttacgtgtttctcccatgtctgcttgggttttctcctggtactacagtttcctcccgcatcccaaagatgtacatgttaggttaattgatgttaaaatcgtcgcagtgtgagtgggtgtggctgtatgccctgtgacgggatggagtctcgtccagggttggttcccatcttgctccctgagctgctgggataggctccagccacctgcaaccctgaactagaataagcagggtggaaaatgaatgaataaatggacacacattattgtaaaataaaaatttgtaaagtatatgatcatcatacaataaatgatgatcaataaaacacgacagtaaacgatgtggtacaaaagcactcaatgaagatgccctgttttccttttctttgcttgttttttgttttttgagatggagtctcgctctgtcatccaggctggagtgcaatgtcgtgatcttggcttactacaacctctgctt

SEQ ID NO: 3176 - DNA, 1138 bp, Homo sapiens
ttagatactttgaagcattctttaaagattttctttaataacttgaaggcactgttacacctttcctgtatcagattttttttttttggaattgaaatccatgagatttataactgtcatgcaaagtaattccatttctcctaaaatttaaggcttgctaaggtaaacagtttctgacatttgtttaatgaatgagagtattactgttgagaaggctttttctctcaagtatgagatagaactttttaaaaagcactcatagtggtttttaaaaatatttttaacatagagtcaaagactagggcttttgcaatagggagaggccagggtttcatccatctcatccagaagaggagaaattgataaaggagagaggggaatgaaatacagagtagtaatgggcggcttggtcttgagagttggggaaagacgagtttaagtaggtaaggtaaaatggaatttatatgtgatagcatcaggtttctcagtgaaggatgaatctaggttataagttgaaagtgagggtcaaaggaaggtatggggaagttgaggaaataggaggtgtgaagtgtcagagtggagaaagtgagtattagtactaaaatggtattttgttttaggcagcaccagtttgatggttgagataatgcaaatgaaatcagttagcttggggttatgatttcccaaatctaagcacacagaaaccagtttgggggttcttctgaggaaaagagggaattagttgaagggatctgtaagcaaacagtaattatggatataagggattatagcattttttgcctgacagaagaaagtgtgtatatttatatgtgtttacaggtgtttaaaacttgatgatgttattgtcttgaagggaacttgtcatgtggtggagaagtatatttctgaaagtaagggtatgtaggccctcagtgaggtagaagaataacaagggtggtatggtggtttcggtggtatgaccaaaatacagattttgaagacctgtgtcagtggcaagtggatggttgaggttcgagtggaggataacatcactggagatgaggtgattaaggaactgagtagtcagcctgggcaacacagcaagaccccatctctacagaacgttaaaaaaaaatta

SEQ ID NO: 3177 - DNA, 1047 bp, Homo sapiens
ttagagacagcaaacaagaatcatgagacagatggaggaagtgcccatggggatgatgatgatgacggtcctcactttgagcctgtagtacctcttcctgataagattgaagtaaaaactggtgaggaagatgaagaagaattcttttgcaaccgcgcgaaattgtttcgtttcgatgtagaatccaaagaatggaaagaacgtgggattggcaatgtaaaaatactgaggcataaaacatctggtaaaattcgccttctaatgagacgagagcaagtattgaaaatctgtgcaaatcattacatcagtccagatatgaaattgacaccaaatgctggatcagacagatcttttgtatggcatgcccttgattatgcagatgagttgccaaaaccagaacaacttgctattaggttcaaaactcctgaggaagcagcactttttaaatgcaagtttgaagaagcccagagcattttaaaagccccaggaacaaatgtagccatggcgtcaaatcaggctgtcagaattgtaaaagaacccacaagtcatgataacaaggatatttgcaaatctgatgctggaaacctgaattttgaatttcaggttgcaaagaaagaagggtcttggtggcattgtaacagctgctcattaaagaatgcttcaactgctaagaaatgtgtatcatgccaaaatctaaacccaagcaataaagagctcgttggcccaccattagctgaaactgtttttactcctaaaaccagcccagagaatgttcaagatcgatttgcattggtgactccaaagaaagaaggtcactgggattgtagtatttgtttagtaagaaatgaacctactgtatctaggtgcattgcgtgtcagaatacaaaatctgctaacaaaagtggatcttcatttgttcatcaagcttcatttaaatttggccagggagatcttcctaaacctattaacagtgatttcagatctgttttttctacaaaggaaggacagtgggattgcagtgcatgtttggtacaaaatgaggggagc

SEQ ID NO: 3178 - DNA, 1178 bp, Homo sapiens
gatcagaagaccgagattgttaaatgcagtcaaaacaaaaatccatttgctctaagactttttctgtaaccttcaacctagccagcaaattattttctttcagaagtcccccgccccttttttaaaggtaaagcagatattcctggtcctgttttgacttactaaagattaatgtgctttaatgaactggatgttttactattacagtgcatttaggtcattttactagagaaatgtggttggtgttagaatatgaaatgtttaccttgggcgagcctactagacatattttggaagaaaggttctgaaatagggatttgtccctctgctataagacatgagagacattcaaacttcagaattattattttttttagttttaaaaataagcaatgcgtttatatgactaaaagaagatttagaacagtatttaccgagaactcctgtacctgactactgtcccactctgtcacatgtaaccgtttttctagtttctttttggaaatataaatatttacattattataatatattaaatgtctgcacgtttgtatacattttttgcctttaccacacataaaatataacagtatatatatacgctgctcttttgcctaacaatatccctggagatctctaccaatacataaagttctttcttattctttttttacagctgtgtaatacttcatgtaccctaattgatctaagcagtcaacacaggttgttgacaatctgtttcaaatagtggcacggtgaaaaatcttgtacataacattttgcggatacacatgtgtatgtgtcttctagatctgcagaagcggtttgttggatcaaaagcaaatcagtccagttttggtagataattcccttggcaggaattgagcacatgcccacctacaagcaagatgcgacagagagcctgtttcttattgctgcacctacacaatcttttcacatgttttttagttttgccaatctgatgagtgaagaattgtttctcagcgaagtgaatttctgttatgagagactgaacatttttcatgtttgtgagccatgtatctttttctgtgaaataatttattatgccctttgctcattaaaaaaaaataggttaatagtttttttctcagcttctaaaagctcattgtttttccagtttatcatttctcttttga

SEQ ID NO: 3179 - DNA, 1149 bp, Homo sapiens
ggctgcagtgagccatgactgcaccactgcattgcagcctgggcgacagagagaccctgtctcaaaagtaaaaaatgtaagcagctagcctgtgctcaggtgggtgggagatgccatgagagtgttaaagttcattactgccagagagacccgtatgacaagctgagtaagcaggatcctatgatgtggcgacccagaagttcagagcctcctgaggcaggaaggagtcagagaaggcatcttagacatggggggtctggagctggggtgcaagaaaagagggttccgctgcaccaaaggttggtggggagagtcttccaaaagaggtgcagcgtcctgtgggctctcaccctgtcccgggctctgcaggtctgggagatgcccagaggaacagaagctcctgagaacctgctctccggaacttctgcttctctcgggagaaggctggttgtagcatgagcgtcatggagtcattaaggaggaaggaaggtaagagaggaccttctgtggaaggccttacgtgtcagggaaagtcactcggactcaattctcttgtgctgagggttcttctgaagatcctctttcatgatgtcaagaccctttcgtggttcccatctacatcttgaagaaattgagtgatttttcaaaatgtttaagagaaagtcccgtacctgcaagggacgatgtcaacacaccaaagttgttctttacttagaagctaggcctttgccattgcctgatggttacgacaggcatgattgcatgattccatcttgttcatcagtctctgcagccgataagtgcttatcaggtgctgcctacctggccaggctctgtatgaggccatgggttcacagtggggagcaaagagagacacaggccctacctttcgtggggagagactgtgagcagacagataccaggcagatgtcaattacaagcgaggacaagtgcttcaatggagaacaaaggatgttgaaaggtaacgtaactgagccaagggcccacgatgggaagtgatgttggaactgagatctgaaggccaaacgcaagttagatgggctaagggcggaataaggcagggatccgcaccttccctcaccaaatcaacagtggtgtgcccagtctcacccactgtcctttcctatc

SEQ ID NO: 3180 - DNA, 1090 bp, Homo sapiens
cttaggaacttatttcctttttaaaaaatattttttaaatttttaaaatttgattttaaatttcaaataaatttaaataaattttaaataaattttaaataaaattttacagagacgtggtctcactgtgttgcccaggctggattgcagtggctattcgcagttgtaatcatagcacactgcagcctcgaatttctgggcttgagcagtcctcccgtctcagcctcctgagtagctgagactacaggtgcacaccaccaagcctggctttatgtatttatttctgttcatgcggaatgattggttcagaactgttcctttcccttccatgatgtccttgacacagaaggttatgcctggctcccagtcaggcttcatacttttggtccatgtaagtgctacccgttgctgggggaggagtcatggtttatttggaaatgtcagttgcaatcatggttctgtcatttgactgcacagtatcagaggagcctgttaacctctctgtgccttagtttcttagcccatgaaagagatcattgcctgacccagggactacctcaagggcttttgatgaggacaagtgacagtaggaagatgcaagagcctttagtaccaaggttctcaacactgactacatgctggaatgactgtgaagcttttaaaaaatgttagtgcccactcttcccctgtacccccggacagttaaatcagaacctcagacagcaatatgccttgagatgccttgaaccatgcttgagaaggaaggacaaacacattattatcttggaagaattgcataaggcttatgacttaaaaaaaaaaattctttttggaaacacaagcatttctttaaggatgaccggatgttgccgtatgtatttatggcacaagcaggtgttgtctaagcagtttctctgtttgcttgtcatagcagcatttggaaactcaaacatgctttcatttacataaatagtttatgaagctttgacaacaaatgtaaacagacacgaaattataaatctgctaaatatgtattaagggtattaattattgaaagtccctttccccaaaactcaactcctatggcaat

SEQ ID NO: 3181 - DNA, 1158 bp, Homo sapiens
gattggattttcaaattgccttcattttcccagcttaacctgttgtaaaccagctttcttggactttgtcttgtccaggggtctggggctccttgtccaaacagtctcaggtgtctgtttgccagaataccactggcacttcaataacctgtttccttggtctgcttctcttctaggtgggctctgttgtgtctgttggctggctccggtccaagaaggctgttgactggcgtctctttcgtaacatttttatggcctggtttgtcacagtccccatttctggagttatcagtgctgccatcatggcaatcttcagatatgtcatcctcagaatgtgaagctgtttgagattaaaatttgtgtcaatgtttgggaccatcttaggtattcctgctcccctgaagaatgattacagtgttaacagaagactgacaagagtctttttatttgggagccagaggagggaagtgttacttgtgctataactgcttttgtgctaaatatgaattgtctcaaaattagctgtgtaaaatagcccgggttccactggctcctgctgaggtcccctttccttctgggctgtgaattcctgtacatatttctctactttttgtatcaggcttcaattccattatgttttaatgttgtctctgaagatgacttgtgatttttttttcttttttttaaaccatgaagagccgtttgacagagcatgctctgcgttgttggtttcaccagcttctgccctcacatgcacagggatttaacaacaaaaatataactacaacttcccttgtagtctcttatataagtagagtccttggtactctgccctcctgtcagtagtggcaggatctattggcatattcgggagcttcttagagggatgaggttctttgaacacagtgaaaatttaaattagtaacttttttgcaagcagtttattgactgttattgctaagaagaagtaagaaagaaaaagcctgttggcaatcttggttatttctttaagatttctggcagtgtgggatggatgaatgaagtggaatgtgaactttgggcaagttaagtgggacagccttccatgttcatttgtctacctcttaactgaataaaaaagcctacagtttttagaaaatttgttctcatggttttctt

SEQ ID NO: 3182 - DNA, 1190 bp, Homo sapiens
caaaaaagagaaaaaccttacattatgttctactagttaagttttcaaggacagtgttcactagtctaccatagaccctagaagagttacccaacacatagtagcactcaaatatttgttgaatgaattataaaaatgactacttgtactgttaattttgtgtattctagtgaattaaatctcttcggcatcatttactcccttaggtatttgactttgtgtcaaatgttttggcaaggataaaattataacagactttcttgaacaaccaaaatataatctattaaggattttccttcacttttgataaaataagaaaaaaggaaattaaaaccttgcatcctaatgtaaaatagaattatatggtgtttaatatcagtgtccctttagctattatattaaactactatagttaataaattttatcattattttgtatgttggtttttaaaaatttcataaagctataaaaagatacttggtcagataaagtttcctctgcttttaattttaataaagtattattatgtatatgatttctttttacctattatatatatgcatctattgttttctcactggtaaatatgggacggacattttgttagaaggttagaagtgagttaaattttcacattcctaagggtacttttgtcttgggttgttgaatatattttaaagtgtttataataatcacttcaaaatatttaggtaattaactgtaaatgatgttttggtattctccagggacaatggccttagagctattgagaatttgatgcaaaagaaggggaaatttgattacatactgttagagaccactggattggcagacccaggtaagaagtgaggttgttaataaccagaatatagttctgtgatatactgtaaatagatgtattagaggaatatctaacatgaggattaaagcttttgttagtattaaaccaaaaactttttttggtttaaaagaggaaaagtactcggttgtcattttctttggcagttgaatgaatgaacggagtatttcttggtacttttaagctgttaatagaatttgaagttttattgattgacttaggattatttgtaagaacagaagttgttaaaaataaggacatgtaggaagagcagagacgttctacctctaagtacagttgtcccttggcatccatggggtattagttccg

SEQ ID NO: 3183 - DNA, 1189 bp, Homo sapiens
aggggctgcatgcatgttcaacaaccggatcttgtaagaattcactcactaccacaagaacagcaccaacaagatggtgctaaaccatttctgagaaaaatccgcccccatgacccaatcacctcccaccagtcctgacttccaacattggggattacagttcaacatgagatttgggtggggacacagatccaaactatatcaatatcaaactgtaatcttccccagagtcgcatcccctgtatctaaatactacttggcatctgtacttgggtgtctaattagcatctcataccaaactgtatattatgatcatctttcagtgtaaatgaatatacatttagaatcctgttgctctttcctctgcctcatactctctccccctatcctttgccttcatttcctgcccctattcctagaccagcccccagtacattaggtcccttgatgatttcataacacctaatagttttctctctgagtaattatcccacttatagtcaattagtcagattatgtcttttacgtcaaacttccttctttggcctctatgatccctgaagccagaaatttgctgcattgtttactgtatcctcaaggctcaacacagtactttacacatatttggagctcaatacatttttttgttttataagaaagaataaagaggcctgtgaggtagctcatgcctgtaatcccagcactttgggaggcccaggtgggtggatcatttgaggtcagggatttgtgaccagactggccaacatggtgaaaccctgtctgtactaaaaatacaaaaattagccagttgtggtggtgcatacctctaatcccagctacttgggaagctgaggcaggagaattgcttgaacccgggaggtggaggctgcaatgagctgagatcacgccactgcagtctagcctaggtgacagagtgaaactctgtctcagaaaaaaaaaaaaaaaaaaaaaaaaaagaataaagaaatggatactctctacataacttttaacagttacatagcattggtttagggatatactataatttagtaaataaatttgtctctttgtatatctaggttgttttctatttttcactattataatcacttctacaatgaacatccatgtagctaaatctttggctcatatttactcatgtgcttaagtaaatcactagaaatag

SEQ ID NO: 3184 - DNA, 1208 bp, Homo sapiens
gtatactctcacagcgttatatgaaagtttccatttacccagatttttgccagctcatagtatatgtatgactttacatgtttgctattctgatagttataaaatggtatatatcatcataattttgagttttctctgatttcagtgtcttcaatctgaatctgttagagaccagtattagtggtttctaaaaggccttttgtttttgaactgaaaactttgtttaaccttttattgtgatatttgtcagtagtgatatgatctctattatatatccaacttatttttcagtttgctaatccagactttacacaacctatctcagaagttgtagatgaagtaattcagaattgtcctattgatgtcagacgtcctctctacaaggtatttatagcaaaattgttattcaaggtcttactttaaaaaaacttaaacacctctcataaaaaggatataatagcatttcagtactatatattatatctttaaacttttctctttttaaatattatatttattttctctccactagaatattgtcctctctggaggttcaaccatgttcagggactttggacgtcgcttgcaaagagatttgaaaagaactgtagatgcccggctgaaattaagtgaggaattgagtggtggtagattgaaggttggttttcccaattattggtgagaaggttgagggtgccttccttgattaggatgagaaatatttgccagcattcactctgatttagaaaaataagaggaacctgtcaggtattctaatggaaatggttaatgttatagatttatgtctgtgatattctggatcatttgattcttctaggatattgtctgtatttctggaaaataattcttagtaatacctgtggaaagactttttttttaaatacctctctcatagataattaatatagtagatttctttgcatacaccaacaatcaaattaattatggatccacaaaatgttttatactatagaaggacagcaaagctgagttgagattgatgccattgttgagtagtcaagcctgctctcaaaaactgactttagctcccacatagcaacctcaaagtgtgcagtcaaatcggtggtttaataaagtaacctttgtattacatgtcctggacctttaggcttgaggttaaaaaaaatcaaaattaatttaaaattcttagatgtctactttctata

SEQ ID NO: 3185 - DNA, 1182 bp, Homo sapiens
gagatgtgtatatagtctgtggataaaatggttaggatgaaatagattacagtgctcatggggaatgctgacttaatgagtgactttatttactttcctatacttttcagttttccaatttgtctgaaatgtgtatatgttacttacaagaaatgaattggcagttggtgagtattcttttaatttaaggttctcccacatcttctatggaggaaatatacatgaagagactttgtactaaactccctgttttcactgactgttcagcaatcttgctcataagttacactatgcagtggttcttaacttagttgcccattcggaacaaagacggcttttagaaaatatggcagaggtctcccatccaagtactagccaggcccgaccttgcttagcttccgagatcagaagagattgggcacgttcagagtagtgtggccataaaaggtgaaccagcccagatcttcctggagtcaggttgcttgggaatgcagcccagtgcagttaattggtggtaaactccaattaaagctaaagaccggcacaagaccaatagtcaaccagtgccacaagagaaagttggaaagaactttgaagagagagttcaagagggcgtgaaaccttaagggtaaacaggtgggatctgtgcagccttccagaggattgaactgggcagcgagtctggccctgatgacagtcctgcagatctttcctgctccttcacatcccccactttctgaactcagaaataaagccgaatacttacaggcaacttttttttcaacaaagcaaacaaaacaaagtgtggaaaggacaccatattcaataaatagtgctgagatgattggcaagtcacatgtaggagaacgaaactggatcctcatctctcaccttatacaaaaatcaactcaagttggattagacctaaatctaagacctgaaaccataaagatcctagaagataacttcagaaaacccttctagacattggcttaggcaaagacttcatgaccaggaacccaaaagccaatgcaacaaaaccaaagataaatagatggaacttaaactaaaaagcttctgcacagcaaaagaaataatcagtagagttcacagacaacccacagagtgagaaaaaaatcttcacaatctatacatccgacaaaggactaatatccagaatct

SEQ ID NO: 3186 - DNA, 1212 bp, Homo sapiens
tgtctagaagggttttctgaagttatcttctaggatctttatggtttcaggtcttagatttaggtctaatccaacttgagttgatttttgtataaggtgagagatgaggatccagtttcgttctcctacatgtgacttgccaatcatctcagcactatttattgaatatggtgtcctttccacactttgttttgtttgctttgttgaaaaaaaagttgcctgtaagtattcggctttatttctgagttcagaaagtgggggatgtgaaggagcaggaaagatctgcaggactgtcatcagggccagactcgctgcccagttcaatcctctggaaggctgcacagatcccacctgtttacccttaaggtttcacgccctcttgaactctctcttcaaagttctttccaactttctcttgtggcactggttgactattggtcttgtgccggtctttagctttaattggagtttaccaccaattaactgcactgggctgcattcccaagcaacctgactccaggaagatctgggctggttcaccttttatggccacactactctgaacgtgcccaatctcttctgatctcggaagctaagcaaggtcgggcctggctagtacttggatgggagacctctgccatattttctaaaagccgtctttgttccgaatgggcaactaagttaagaaccactgcatagtgtaacttatgagcaagattgctgaacagtcagtgaaaacagggagtttagtacaaagtctcttcatgtatatttcctccatagaagatgtgggagaaccttaaattaaaagaatactcaccaactgccaattcatttcttgtaagtaacatatacacatttcagacaaattggaaaactgaaaagtataggaaagtaaataaagtcactcattaagtcagcattccccatgagcactgtaatctatttcatcctaaccattttatccacagactatatacacatctcccaactgtcggtttgtaacaaaattggttttatttttgtgtactattttaacatacctctttctactaatatagaatatgtattttacatgttacttttttctaaaatatgatattaaggaatatccattattaaatgggtataaaaattgtttagctaaaacctatttctgtaggtttttccattataattaatgccaccataaatattggtacatagggtttt

SEQ ID NO: 3187 - DNA, 1221 bp, Homo sapiens
acttccaggattaggttatataagatactggtgcttccatcattgttactatgtcagaggtctctaaaactggctccagatttgcttattcagtagaagaactcacaggactcagtatacagttgtatttatggctaagatttatcaaagcaaaataacacgcagcaaaattagtaaagaaaaaaaggccatgggatgaaggcttaaagaaaccaggtgcaaattttcaagagttgtctcctagtagagtcacacaggacatacttacttcttcctgcaatgaactgtgacaacacatgagtgttcactacgaggaaagattcagtatgtaaggttttcattgtaggctggggacacaggcagtctctaactaacacctaaattccagatatccagaaggaaagcaggtgttcagcataaaccatactgtttacacaaacagttttaggcacaataagctaccggtacttatcattttctctttctttattttccttttgggaaacactcttctaagtttctcacttcatttggttctagaggtgctgatcctatcccctggctctagggcatatgaccaaggtgggccagctacggccataccaccctgaacgtgcccgatctggtctagtacttatcatttatgtaaaaagtcatcgtagtatagagaactgattagcagtcacatttccaaatgccagccatggaccaaaacttccaggcaggcctttctaaggattgcagtcttagaactgctatgttaaatcttctgcaaagtcatcctttctcttcaatcaatcacttgaggggaagccagctgtcatgttgtacgcagagctatgtcctgcctatggtgagaaacagatgtctgccaacaactgtgtgtgagtttggaagtggattagtaaagttatagatgaaggcaaccttggctgacagctggactgcaccctcatgagatactgtgccagatcgacccagctaagcttcgtctagattcctgaccatcagaaaatatatgtgatagtgaatagttttgttttaagctgctaagtttttgcataaattattatatagtgttgagagattaataatttccccactcaaagatgtccacattctaatctctggaatctttgaatacgttacttcatgcggaatttgcagatgcaataaagatttttttttttttttttttttagatggagtttcgctcttgtt

SEQ ID NO: 3188 - DNA, 1156 bp, Homo sapiens
tcagaatgtctctgactgggtcagcagcttctctctgagaatttaaaaatgctgtgttttcattttcatgttcgtctaaaaacacatttaaacatgttctaggccatctgcagagccttgagccccaagaggaatttcaatatacttgggtctgcatttctttctaatccgtggtgccagggctaagcagtaaagttttcatggtcttgggaaattgaagaaagaagcagccagatgccatcaggatgcagggagtgagcttggctccttgagaacttcagaagagcagagcagggggaaacttgccctagcatgcagagctgaaccggaagaactttctgccagcagctaggagtatttccacttcattgtggcaatttcatacccaccagcttcctctccagacatcttgaaggggggctgttcatgtctggcagcagcgaggctgggaagaaacactgggtgggcagtgaggggacacgtttggacagcactcatttgtgaaggagactgagggtggtagcggggtctctggaatagatgagcacccccgccaccctcccgcaacagcttgaccacatgaggactttgaggactgggtgctaatccttcaacaacctggcaagggaagtagtgctatttccacttagcaaacaaagacaggttcagagaggttaagtaagctgctcaaaaccacacagcattgtaaccagctctgtcctagacagccaggcctcttcccagccccggctcagtgtcctccccagagacgcttgtatcctgggttgggagcccacctcctgggacttctcagggccaggcaagaggctgaggcatttgccctaccttacttctgccagcgtgtcgggcagcccagctcatacttaggtaattaagtcttcgagtaaacactgaagaagtccaacctgtttttatgtcatttcaggaaaacaaagtcctaggagctttccagaaagttcagagagtaaacagggacaagtagcttgagccccgtccctccccactctgccacccccttccctggctccttagctcatcagttaccaaatcagcgtgtcatttgttctccaaagagtgcttggcctgagactgggttggtgacagcagcctgttccctgggggctttgttgccggg

SEQ ID NO: 3189 - DNA, 1187 bp, Homo sapiens
tggggcggggggtgttgtttgtatttcccagacttacaaaccatttgagtgctgggccttccctgggacacagttaagtatctcccttcctccagacccagcccaaacctgtaattaagcaaagcccctgatgtgattacgctttgctgactcggctgggtttggagccattccctctaggaaacagggtgaactcttgctcttcccagaggtttcctgggcagcttgtggtgcacctctattgtacacatgtccgcctgtccccctcctttggctctcttcctctcccttcagctatccgtccgtcctttctgtctttttctttctccttcccctttctctctcttctgtcctgcccccaccccctcttctctctgggtctctcctttctctccctctccgttctctctccccttctcctttcttctctttccctccgtttccccctcctccgtttcctccgccttctctctccctctcttttctgtcttttctcatcttttcccatctttccctcccgttccctccgcctcctccccgcccccgccgtctggaccttcctctccctccgcgccggcttttccgccacgcggagcgctggctggcgaggccgcgtgtccgagcggcgccgaccgtgccgcggccgggggacattccgtgccccgagcgccccgggcccgcggctgcggccctcccacctgcgcgccggcctggtttgcagctcccaaacaatggccacattgtcgcagccgcacaccggccgccgccggcgagtggcgggaggccggactctgctcgtggcgagtcgggaagaaagccaacgggccaggtccccacagccgcgcccggagcgcgcgagcggctcccacccgggaagggcgcgggttccgaggggcgccccgggtcttcctcgaccccgtttcccattggcctgccctcttgcccgcttccccaggaggggcttccagttgcctttacagctggcgaagtgaatgagagcactccacgggagccgggaagagagaggccccgtgaccaaacttttggtggcgtctgaaactttttctgtaaggcatctgcagacagtaatcactaaggccgccttctgcccttgtccactcccggcgacaggaaaggaagggcggtcctctcttccattcgtcttgacctgtagggattcgaaacct

SEQ ID NO: 3190 - DNA, 1206 bp, Homo sapiens
tggaggatgaggtcagaaatgggcgtgatggtcctggagatcccctgagtgtatcctcaaagacaagggccagtgtcctgtcctgtcctgtcctgttgatgccagcgtccacgggcctgagacagggagaggtcgatggttctcccagctaagccttttagaatggaggagaccccagaccctgagccccagggatgagcctgatctataaccagtcattgaaaatacatacagtgaaatggaagtttctgccattgagcaggctcttgctgaccgctgtaaagataagtaacggcagttttcaggccacttaaacccttacctttggggtattaaggggtctctgcagacagtaagtctttatcgggaagtgtttactcataaaaaaacacagtgaagccggggagagaaagcacctcagcctttatggcgccacaacccatctgtaacaggagctgcaaatcacctgtgggctgcagacgattctgcccaaaagttgggggcggaagtgagagtaaaagctgacttgctaccatgcagacagcattgcctgccccgccagccccctccctccaccgatagagggactgtgctgccgtgtgtgtggctcagccgtcttgctgtggctcccaagtaccacgggattgagcctgagctctgtggtcacgtgccccctggcccacctctctagcctctgtgcctgcgcacctctgacggtgctccctgcttccagagtgccttcccctgcttttctacccctgggagggctacccaaatgccctccccataccagttagagtccgatcagtggagtagaatcaccgtgagagacttggaaccagggtggtgataggatcagctcctgcccagtcgtgggagcagtgatatctctacaaagccacggtctctgcctctggtgctgggctgaagtcattgtaggtcagtggcattggcgatctgagggggtgttaggtgtgacgtgggggagaacaaggacaagctggaacccaccaggatggttagagttcacgcctgccttcctgtacttccagcttcatgatggataggtggatgcacatggggttggaggtgggttgtatgaccctcccccttggaactatatccactcctggctctatgggagaaagagctggctccaaccctctttgccccacagatcagtgatgatgtttggggactgaggga

SEQ ID NO: 3191 - DNA, 1199 bp, Homo sapiens
caagttacttagtgtcctgttttgtcttctgtaaaatgagcataacagccccttctttatgggacagtcgtgaagattaaattacttaacactttaaagtttgaaggagtcctagcgcatgcgatgatagcattgagtaagtgctgtgtttaggtgactgtgaatctgttctttctcaacacatcctgtctgtgccatgggtcagcccttggcacctcccactgggctcatggctgtgccacctgtattcgagtgttggggatggtcaggtgggaaaaaggatttgggctcctaatgcatggtgagaaagacaggagcaagcagataaccacacagtggatgaaagctcacccccacccttgtttggagagagaggcctgagcatagggaagatctgcccaactccaggaggtcagggaaggcatcccaagggaggtgatgactcggctgaggtctgagcaggcagaggaagctgcacgtgcaagtccctgagcaggtgttatggaggaggggctggaaggagacctggtggctggagtgaggagattccacagggccaccgcctaggccttctttgtaacagcagtggggatttttggaaagttttggggagagggcagggacatgatcttatttccaagttgaaaatctgtctttgcagtgagcactgtggattggacagctgttagctgagggccccagaatgatccaagcaagtggtgggctgtgctaggggtggagtttgaaaggagagattttgagaggcgttcacgagcccacacgtaagtgggctccattgtggtggaggggaggagggaaggccgactcccgggtctcccgctttgccactgcgcaagtagcaggcacgtgctgtaggaagagctggtccaggcacagggcaggagtgtggggctggctgtgccaaactggagctgccttgcagacaggaggagaggacgaggaggcagctggctctgagaaggctcactcttcagagccactgaaagtgggaggtcgaaaagtgtttgtgggacgggacgtccgcctggccctgggcctctgctgacctctctgaagatggacagagaagacacagagtcattagaaagtccagacatcagggcttctttggacctgggttcaaatcctgcctctgtagctctgtgaccttgagcaagtcactgacctctcaagcatag

SEQ ID NO: 3192 - DNA, 1205 bp, Homo sapiens
cgtgaaaagcaatagctacacaatagtgagtaggtgtttttattggctcattttataatagtatttgttgactgctagatagtgaataagaatactatagaattagggcaagaggatttgttgttgtttaagaaagaaaagccttcaggattaaacacagaaaagttaatttctctctgtactgctttttaaagacttacattgatggaggagagaatatttcattggtttgtagccttttcaggttttcttaaaaaaacgcatgaaaatggtattaattcactgccaactaacatggaatttgttttgttgcatggcctcgtttgcggtggaattcacaacagagagtaagttccatttctttttcctttatctgttttctgcactacattttccttctgtactatgaacagttgttaacagtgttaacctaagttacaagagtctgggcaaagcacgtatgggcatttttaatgttttgtagactttggaggagatcgtgaattcaatatgtgaactacttggttttcatttgtgtctaggttttcagtatgtttttggagactcttgtggattttataataattcataaggatgatttacaagactggctttttgttcttctcacacaattacttaagaaaatgggagcagatttacttggatctgtgcaagcaaaagttcaaaaggctctagatgtcacaaggtaagtgtttaagggttaggtccattttgatgttacaggatacttgtaagtgactttttgccattctcttttgttacccatggcctttgtcacccccttgaatatctcttttactcagttctcactttctgttgttgacatacttgttgacatgtcccaccagtccatgaaatgaaataccatatcttccttgtgttgatattacttttgtgagtatttaagacatatataataaacaaatgtaaaactttggaaattgattctcttctcattaaaaaacatttaaagggaacatttagaatatttgtttacatttctctgaagaccttagtatttttattacttcaacttacaagtcttactagaaatttttctatcggtgtatgatgtagagtttccattggtccaggaaaattctctaaattaatagtacactggctagagattaatagcacatttgcagtagttgtgacccttctggctgttatgagaaaagaaa

SEQ ID NO: 3193 - DNA, 1265 bp, Homo sapiens
gcagcgggaaacaccgggagcctgttagcagccggcctgcggggcagcgctcccgcccacccgctccggggaggcctagacatttccggcccagacgcagtccgagagtccagacgcatgccgactggaggaccaaagagattagcacgaagaaggatgatcttccacaaaaagagctatgtacagctataatggaaaatactcggtgaggagaaacgaaataaaaggcaatacagcgtagccaaacccgggttagctgcgggtggagttcaagagcgcgccgcggtcccgcccccgccagccccgccccggcgagaaaagcgtatgcaaattttcgagcggccgacgcgcggtcttctgggtaaaaccgagccgccgcttttgcgacccttcgggagcctcagaaaacaaagaattggggtgtcgtcgaaagctgtggaggctggaggtaagctagctaccagaccgactagggcgaggctcacgaattaattaccacaaccctaccaggtattggcgcttcctgcttgcagcccagggactttctattataaccatccttttcttggggttgcgctactgtccaatgagcgcatagtgagggcagtactgctaacgcctgaacaacacacccgcatcaactagagcttttgctttattttggtgcaatttttggaaaaatgaaaacctgttttcatagacttatcagttcaaacagcagtaattcgtaaataaactagtactttgtggttaaaccagtagagggtgcacaagacgcgtggttttagtgtcgcaagtaaagttctttcagtttttgcggtgattaaacgggaaggatttcaacagaacttcacccctttaactttacgccgatcatcaactgttctgtaacttccttatgctgagtcagcccagtagtctaggtcaagtttcaataggagacgaagtttcagtaggtctttgcacctcacataaaatgtaatccaggtcgggcgcggtggctcacgcctgcaatcccagcactttgggaggccgaggggggcggatcacgaggtcaggagatcgagaccatcctggctaacacagtgaaactccgtctctcctaaaaatacaaaaaattagccgggcgaggtggccggcgcctgtagtcccagctgctcgggaggctgaggcaggagaatggcgtgaatccgggggggtggagcctgcagtgagcagagatcgcgccactgcactccagcctgggcgacagcgagactccatct

SEQ ID NO: 3194 - DNA, 1174 bp, Homo sapiens
tcaaagttacaccagtagtaagtggcagaatctagtccagagtctgcactcttaaccactatgtgctattgtcacatcagcacagtttacaaacaaggttggccatggtgagcctccagtgcacacagcattccaagtaatctttttttttttgagacagagtctccctctttgccaggctggagtgcagtgctgcaatcttggctcactgcagccttggcctcctgggttcaagcgattctcctgcctcagcctcccgagtagctgggactacaggcacgcaccaccacgccctgctaactttttatatcccatttcatcatgttggtcaggctggtctcaaactcctgatctcaggtgatttgccctccttggcctcccaaagtgctgggattacaggtgtgagccaccacgtccggccgtaagaaatcttttaacatcataaattgggttctatcacttgtcagcctaaccttctccagtgtcttcccattacacttaaaataaaattaaaacatttactttaaagggttaatgaccttgtgccgaaggcctagccctagctgtctcttggccttgttctcattcctgctgtcttttactgtcctccagccgccctgatctctgtctctagattgtgcttcagagggctttctaatggttagttggctttctcccgatctctgtgttatgagctatatcctatcatttgggtctcagcttaaactcactgtttagaaaccttctgtgacgtccctagctaaaatagtctctaccctcagtcaattactttgccactatttgaaattccttctacttgaatgtaagattcttgaggcagagacctcttatggcagtttaggaagacaggcaaagtcattagcgtctctattgcctaaaacagtgcttgggacatggtggccactcaataaatatttattgagtaaattaacataatgagggattgaacatttatatctccggaaggcacatggctttcctgagagcaacttttacatccctctggcttaacagatatatgacaccagctcaggacagccagaggctaccctatcaattctattcctccaaactattcctgccacctccctaactaaaacttgtggagaagtttgtctccccagtgtctcagcagtaagtgaaggtaggggaa

SEQ ID NO: 3195 - DNA, 1154 bp, Homo sapiens
tcttttctttgttgtagggaggaggagatggaggctaccacttactccattgtaaagtagtgtgatgtaggtgctgcccttgactttgtttaatgtgaccaagccagccactttggtcaacagtgttttctatagagccttcctcatttcccatacttggtttttttttagaagactgagagtaaggcagtaagctgcagtacctacagtgattcagacacagagtggtgttagatttctggtgggaaatagaattgaagttacaaataaatatgctagctaaagcagaagattgctttcctgtctggtgcatttacaagctgggaaattctggaaaacatcaacctgccaactgtgtggctcattggctcttctttgggcttcgatgttcttcctgataaaaataataattatgttatttcgatatggttgccaagccgttcatgcttctcgctctgcttgtgattataaatgattctgcagcatgaattgctttgtctttgatttaatgtttcataacatttgggtgttatgttatctgtgctaatttgtcgttctcttctcttacttttcagaatggactgctgaattatgaagtatttcagacccagtagtagaacatcactctgccactcactcctttatctcctactagttatttaaattggacttttaatatcctaccagctgctcttcagacacacatggtgcattgttgccattccccagattgcatctttgaaacacaggctcttagtaaccttcagcgaacaaagaggcaacctcccagatacgtctgctgggagggagtcatcgtgactgccctctagcttttgctggatctggatttgaattccactatggagcctcgcatggagtcctgcctggcgcaggtgttgcagaaggatgtggggaaacgattgcaggttggccaagaactgatagactatttctcagacaaacagaagtctgctgaccttgagcatgaccagaccatgttagataaacttgtggatggacttgctacctcttgggtgaactctagcaattacaaggtaagctgtgctttagaaggcacttttggaggtggctgggctgcactggtagatcaaaattggcccttataaaaatcccttgtgagcagtcagcatgct

SEQ ID NO: 3196 - DNA, 1115 bp, Homo sapiens
tgcgctgagaaggagccatgttgtaacaagcccctgttttctctttcctggtacagtcgaggctgtctgtcaacagcgtgactgctggagactactcccgacccctccacatctccaccttcatcaatgagctggattccggttttcgccttctcaacctgaaaaatgactccctgaggaagcgctacgacggattgaaatatgacgtgaagaaagtagaggaagtggtctatgatctctccatccggggctttaataaggagacggcagcagcttgtgttgaaaaataggaggctctccttgctcctggccttgctgacctcagcggttgccaggaaggggtgagcacagagtgcctcttacggtagttaggatgctcagttgctaaacactgcgctttattttcttaaccagttgtggtgtgagtatcagaattgaaacacttttttgggggtaaaaaatatagcctttacatggacagaattttttttgttgtttcagtgaatatgcctgtaattcagtgtatttcagttccgtcagaaagtgtaaatgttagtttcttggtaaagtccttttcttgcttaccttgactgttgatgtactgattgagaagttcattgtctcgtttgtgattcttccagatgtgatgcttgatattttctatatgcgagttagccatccacacccaggcatagcctggatacagtataaaaatagataattaaaaagatggttgccaagcaaggaaaacttattttatattttcccttccttattttaagcattgtgagtaaatcagatgttgaattcttttgccaagggaattatagctgcaggttctctctcactgccatcaaactgtaaaagattaaactgcgaagtcaagctcaacagattattttggaaagtttttgtattaagggatttagtaacatcattttgttttccaccaggcagggagtagggcttagtgttttaaaacacctctgctttctgatgttgccttaatattctgctattgcagcaattaaaaattgtcttcatgtacatttggaactaacacgtgatgtgatatattcctaaactatgaaacctttttcctagtagtcagctag

SEQ ID NO: 3197 - DNA, 1206 bp, Homo sapiens
ataggttagttaatctctctgtgtctcagtttcctcttctttcaggtgtggattatagtagttttgaggattagaggagataatgcatgtaaaatgcttagaacaatgcctgagacagtaagcgatctgtaaacattattaaaaatgatgtattaaatttatgtaagtcttataaaatttgctgtgattataagtattataaaaggagtatcttttcttctggagactaacatgggctggttcccccttcccggcaggcatctcggcgctttggcaccatgagttctatgtctggggccgacgacactgtgtacatggagtaccactcatcgcggagcaaggcgcccagcaaacatgtacacccgctcttcaagcgctttaggaaatgatgcttaggcagggtacttcgttcaagaccggcgcttggcacccttgttggaaagggattttcagcataacattttccttccacctctttgaccttccctccagcgttggccaaattgtgctgaggaagatgcatcaagggcttggctgtgccttcataggtcatctagggttttataaaggaggaggagacaatattttttcaaactttttggggagtggggtcatttctgtatataaaaaatgttaatatttaaggtgtatttatgttaccgttctgaataaacagaatggaccattgaaccagtcttcattgtacaagtgtttttatgcttcgtcctgggcatgggttatgtctggatgaccaacctccatcaaggccctactttgtagcaagcacagatgagtaagatggagcccatccccagggagctaccagagagatgtaccctgagatagaagaaacgttggcaggaaaggcctggggaacggggagggtgatccagccagagggaagagcctgggtagttgactgtggtccctgctcacagcttagcctggtggattcagactggggcttcaaccgcacagcttcctgctgttctggtggtcacagctgttcctacagcctcgtccgaggtagacacccacgtcatgaaggccttccaggttggctcctggtgcctcatcttctctgagagagtgacctcttgtttctccctcaaagtacgtttttagaaattgctgagaggctagattcctcttctaatagcagtttagtgcccttgggtgttttaattgctacttcctttattttta

SEQ ID NO: 3198 - DNA, 1184 bp, Homo sapiens
tggctgtgcgttttccttcccttgaaaactggtaggatcttctctctttttggaaatttgaaagtgatattcttaatgtttttctttcatcgtgatgggcactcagtatatcctttccatctggaaactcgtgtccttcagttctgagaatttctgtttttttgttgttaatcactttctctatgtagtcccttcttggaattttgattcatcagatgttagatcctctgaacagcttctccagtttgcttatcttttttctacttttttatctctttgtcttctaacccttgtattgagacttgttaatttctgagagttctttcctggtaactgttcttgttttgtttgtgaatagagtgtcttctcggaggctttgaaaacttttgaagcttccgtctgtttcctgccatgtctcttttcttcatttttttgtcttaattgtttttacctgtcttttgagtctttctgagttttggtaatccttgactgtattttattggtttaaagtcactgaaaacctggcaggcctttctgtgtggcttagtgggtttgccagcttgtggacctcaccagagtggctgggcagggcctggctatttcttcaggaggttgccaaatgccagtatctctaggacttttctcttgggctggacggtttcttcagtgaggaatttttcagtcccctgggcaccaccgtgtgttaggggaagaggagggcttgtggaatctttgcattcagtcttgccttttccctcatctctgccgggcatccctggagaataagcctccagtgccccaccagtggaggtggcctgcctgctgccggccggacccaactgctcctcacactcacacactgccagtcctcctgtgcacctccccaccttctcaggcaactggtgactagttcctgagccctcctgcgtgctgcagaggacacagaggcggcgggttttgtatcggtcttccctcctgccggctccagcttctgctttctctagtctgttagctcaggtactgtgcctgcatctgtctgcttttcagcttctgaaatgttacccacttctctcatctgctgttatttcttctcctgttttcttggtgggtttgtgttctgtcacattagtgccaatttgagcagggcaatgagacagttcctatatttactttgccttatttaa

SEQ ID NO: 3199 - DNA, 1202 bp, Homo sapiens
aaaaaaattctgaaacttgagccacaaattaagaggcagacggcttttctccttgcaaatgacctgccacacagtccgtcactgcctctgctagctctgctacccttgggccctgtccacagcccacgtgggagaccttttcacgggatctactcggatgtctgggatctggccactaccgcaggctcgagacaacccaggtgcgtatgcgccgcgcacacggaacagcacaggctgccccggggcaggggcgggggcggggccgaggccggggcggagccaggactgggaatccccgcgccgtccggccggtgggggcggtggcctgtgtgtgggcgtggcgggcctctgcgcaggcgccgacccactcccctgggccgggcgcgcgcccgcggcgggttccgctaccgccgggcggaggggtgcgcgcgcacgagcgagcggccgtgacgtgcgccgcgctacgcccgacgtcacgggtccgtgtgtagtggctgccgggctgcctgccctcagcggcggcgcctgacgagggtgccgcggccgctgggcgcagcgttcgggggttgcacggcccgcggcggcgacgaaaacaacgaccaggacgctcggcgcccctgtccgcagagtcgccactcccgcctcttctccggtctctagcgacgcgggcccgcggcttcctcctttcctgcccagttcccgcgggcctcggggttgcagcggctagaagtgccgaggagcgccaggaggacccggccggctgcgaggattcacgcgcccgccaccccgcccggcccgggcttcatgtgaaagagggacgggcctggccccaaggcccgcgcccgactcctcgcgcgcccctccggtccccgggggccctgcggcagcccccgacctggggccgcggtgacaggccgcgctggggcggaggggcgggctcggcgggggcggcccctccttgggcctgcggctctctacgtccctgcggagcagccggtacgtgcgtgtgtgcgtgcgcgcgcgcttgtgtgtgtgtgtgtgtgtgtgtgcgcgcgtgtgtgtcgggggccgcgggctgggcgccgggaggggggctggcggcggcctaagcgccgctccaggggcggagatttcgctgggtgattgcctagctgcgggagggcggaccttgggccccctgcatccagtcctaaagcccaggt

SEQ ID NO: 3200 - DNA, 1201 bp, Homo sapiens
tattttataatttttcatattctttttgaatttgtagacacagcatacttgggttagtaaaagtttgggttttatgagaacattttcaagccatttatcttgtcattgacaagaataatcttgtcacttaactgtttcatagcatgatgttgggcatatatattattaaaggctctttggtccttgaaaattggtctgtggtaggttcacatagcttaagtcatatatctaacaagaaatatttggctcagtaaatttttaagagggtatactcaaacacggaaatactttcactttttaagctagaatattattgccatgttatttaaagttgagctaccagatgggagaaaaaattcaccggatcctaaaatacttgttagtattttggcatgtttaattttgtatatttttctctgcattttaaagccatagctataatatgcacatatcaagtttgtaccccagggcatgttttcagagtaattatttcaagtaacattatgtgttggtatagttagatgaatcatgttctccctaaaacttaagctttcttgtttctagggttactagacacaggaccgtgactactgtaagcctcaattttgttatcatgagaagtaccattatgaggagtaaatgaactaacaggagagagcctgttgtggtattggctcttagtgggtacttaggaaatgttaacttctcctttctttgtttgcttaaattatcttgggagaaggtgcccatatgttatttgaccctttaaataaaattaaattttatagttcttttcccttaaataatcttaaccttataaaacccaagaatgttcctgtgtaaaagaacttggttacatgtttgcttgtatttctttgaaaaatagagttatttatttttatttatttatttttatttttgacagtctcactctgtcacccaggctggagtgcgatggtgcaatctcagctcactgcaacctccgcctcccaggttcaagtgattctcctgcctcagcctccctagtagctgggattacaggtgtccaccaccacgcccagctaatttttgtatttttaatagagacagggtttcaccatgttggccgggctggtctcgaactcctgacctcaggtgatccaccacctcggcctcccaaaaggtgtgagccaccttgtccagcctagagttatatttttac

SEQ ID NO: 3201 - DNA, 1137 bp, Homo sapiens
gggaggctgaggcaggagaatggtgggaatccggaaggcggagcttgcagtgagccgagattgcgccactgcactccagcctgggcgacagagcaagactccgtttggtaggctgagacaggagaatcacttgaaccctggaggtggaggttttggtgagccgagatcatgccacttcactctagcctaagaggcaagagcgaaactccatctcaaaaaaaagaaaaaaaaaaacctctaagtcaagtggggctaactgtaaaggtatattttttataccttttatcttttatatgtttgaaatattttgtaatgttttatcaggaaaagtggaaaagaaatccagatgaaaggtaaaggtgttagagatgtgggcagtagattagcacgcctcaaagaagagtgcggggaaattgccagtcgccaaatcactcatttcttttcattttcttgtagcttggagggacggtttgaagatgaggagctgcagcagattcttgatgatatccagacaaagcgcagctttcagtattaatctccaaacatcactgctgctcggagaaaccacatccccaggcataacaccaccttcccactgtctggggctgacttgcacagaaattctgttgaagacagttgagaattcctttggagaaaacagcccagcttggcgtggggttaggttgctgtttcaaataactcacaggcccaggtgacatggaatcttggagcagccttgtgcagtggcagccagtggcttcctgaacgtgcctctgcgaagtgtgagatgaggggtcacataaccacactgttgactacctcattcctggtttttggcctccacatcatcttttttcttaatatttcatgttttaatttcagggtgtttatactttttgaaactagaccagaagatagtagactttatagagaaagaccagttttacctagatactaaaggaagaattaaaccgctgttagtttgaaatgctttttttttttttttttaaatggagatagggtcttaactcttgtccaggctggaggagtgcagtcgtacagtcatggctcactgaagtcttgaccccgctgcctcagcctcccaaataactggggccacaggtgtgcaccacaact

SEQ ID NO: 3202 - DNA, 1104 bp, Homo sapiens
aggcacatatctgaggggacctctaacggtggaagacagaaaccacaataaatacatgcccaaagcaccttggaagatgtagaggcctggcagggagaataaaacacaaaacaaatgagcaaggataagcaaacagtatccgtgatgccttcagaaagacaaaagaaaaggttgcatccacaaaacagtaacacagtgctatgcaaaaagaacattcagaggagaaaagaaccggtcctgaaataagatagcagaaattgaaagatcagtagaagagttggaagataaaattgaagaaatctcaaacgtggaacaaaaagacaagaaaattggagaaaacgataggagaaaatttaaaacaacaataaaaagaaccaggtcaggaaatccagcctccaggtaatgggtttcaacaagagagatcagagaaaaggaacagggattacaaagtaaggagtttgttataatattgtaatctcagttcaaaagttaactgcaaatataaaacccaatgatttctatatagtaaattgaactgtaaaggtaacttgtgtgtgattctgaatacatagataaatgtttaaaaaaaaaaaaaaaaaaaaaaacaacaaagtaatagaaaattaccaaaactgaaagaaatgagtttcctggttacagaaatgccctgcacagtattcaatggatgcaataaactcaggccagtattttgaaatttggcagcactggagacaaagagatgtgcctgcttctcccgtacttcctcccaaagacccttgtactgtgccctctaattcacagcctgtcatcacatgacactccaacctccaccccagtgcccttgtctcttctttctccacgccttcttgctttaaacctgggactcaacttgccctgcagctgtctaaagtggtccctgcctctcttccacatccctactgtcactcagcctggaggtaggcagggtgtccttgtcatgcctcactgccattttcagaccatttctcctcaaaagcacttgatctgtatttagatttcataaaatgtacagttgaaaaagtagtttcacatagccaagttattccagacaataaaaagtttctc

SEQ ID NO: 3203 - DNA, 1141 bp, Homo sapiens
atggcatttttaattttattttgaatgaggaggagaactatctgagactttttttttttttttttttttaatgagacggagtcttactctgtcatccaggctggagtgcagtggtgtgatcttggctcagtgcaacctccacctcccgagttcaagcgattctcctgccacagccttgcgagtagctggaattacaggcgcccaccaccatgcctggctaatcttttgtatttttagtagagacagagtttcactctgttggccaggctggtctcgaactcctgatctcgtggtccgcccgctttggctttccaaagtgctgggattacaggcatgagccactgcgcccggcctgagacttttaagagagatattatttgctacttattgaacatgactgatgttaatgctgctttttaagttcaaaaatatctacaatatgactcccgtttcccattttgtgaacagaaatccagtaacaatgttagaataagcatgatcaataatcctgccaaagagataagctatgagaacactcagatctccagagcaatctgggcagctctccaaactcagacttccaacgctgctaagaacttcatcaccaaaatggccaaggagggggctgcagaggccctggctgcaggagctgacattgcggagttctctgttggggtaaggctctgagcctctcatgaggctgccccattttgtctgccacggaagctcacccactgcagcttacgtgtccggttcatgatcacgatttgtcattttagtcctgagtctcagggaatttttttttttaatttggaagtttccctttattacttttaaccttgcctagctttcatgtggtgcatgatttgagtttttgtgtgttttaagtatggagccatttgttatgcacagtttttaagagagacaatatggcttatttatagagcaaaaaacggagatttgaaccacttataggttcaaggcttatatgttcttgatgtgtttccagaataagcctgtgtttattcatttatattttatgttacttatttttttgacacagttttgtagtttttaaattttttacagaatgatgagtatatactatttgacgtttgagttaggaaaacaggctgtcact

SEQ ID NO: 3204 - DNA, 1201 bp, Homo sapiens
ccttcccaggccctcacccctccttctccacccaggagtcgttcacgcctactgaggagcatgtgttggtggtgcgcctgctgctgaagcacctgcacgcctttgccaacagcctgaagccagagcaggcctcaccctccgcccactcccacgccaccagccccctggaggagttcaaacggtgggtggcccttgcggcttcccaccactgccgtctcccccactttcccctcctaaggtgtcgcccacagcgacctctccccagggcatggagggcagggtgaggggagtccctttctgttcacagagcacgtgaggcctctccaggcctaggcaggtgtcctctcaccccgcccagttggctcccagagcctctctctccagactggccagagaggccccattgtgctgccatctcttgcatctcatattcttcaaccctgtcagaagagttggggtggccctgactgccaggcccaccagggccagcagagtgggctgtttgtatgggacggagggtgaggtgtgtgcaggagttgtgctgactcggccgcctgcgtgctgtgtgtccttgggatgttccctaacctctctgaaccttgatttcttcctctgaagaatggggctgaacctcccggaggtgcccagtgctctcccccggcggagccaaccctcactgatgggagccctggggtcatctgtgagcagggcctccttactgggcaagcagcaggtgaccctccccatcccctgcagggctgctgtcccgaggttcgtccagcagaaactctacctcttcttgcagcattgctttggccactggcccctggacgcatcgttcagagctgtgagtgttggccccgtcacacgtgtgcctgtgtcctctgtgtgccttgaggtgggaggtcctttggggcagataaaggaggagagcaagtgttatcacagaggccttggcaaggagggggtcttggagggccacattgttctttctgtttgagtttccaaagccagccctcaggaaagccctgccctgtcccacctgtctggtgcagggcaggttcctacccttacctgaccagggagtactctgccccctgggctgggaaaagcccaccctggcttctggagggccagcaagagccaaacctcacagggctgtgcatgtctctcctgcgccctctggaggaagtgagaagag

SEQ ID NO: 3205 - DNA, 1216 bp, Homo sapiens
ccggcgccccaaggtactttctccccagcaaggaatccgcgtgcgcgtaagcagtattgttgattagtgccccccccttccccccgcccgccccgaaaagcgacccctagtggtgcaccggtgcggaccagaaaattgcacgctttcttgaaagaggcatttaccgagcgcccaatgtatgcctggcactgggctgggtgctgccacctaagcgagcacgaccaatgcagtctatcagggaggcccagatcgccaagcagcggacccctgcggtccgccatgccactcccggctcctagagcgccgctcagcacaccgtgagcgcccaataactgttgggcttcaatgacgccgcggaggcggccccgtccccgcgctcccgcccctcccgccagggcagcccgggaggccagacgttgacgctgcagggagagggtggtgggcgcagccgctagggggcgcggcggggcggagcgcacctttccgcgggccgcggggatggcggcgcagggcgtagggcctgggccggggtcggcggcgcccccggggctggaggcggcccggcagaagctggcgctgcggcggaagaaggtgctgagcaccgaggagatggagctgtacgagctggcgcaggcggcgggcggcgctatcgaccccgacgtgttcaagtgagcggggcgggtgggggccgcatgctagccagacaccccccgacctctgctttccgggtacgcccggcccgctggtcgggaggagcccccgcccccgtccttgtcgggtcttcagggaggtggccgcgccgggcggagagggctcaccggccccgcgtctgtccccgccaggatcctggtggacctgctgaagctgaacgtggcccccctcgccgtcttccagatgctcaagtccatgtgtgccgggcagaggctagcgagcgagccccaggaccctgcggccgtgtctctgcccacgtcgagcgtgcccgagacccgaggtcagagctgggcccgctgtccctgccccagtggcgggggtggcgggcggggagggggcaggcgcggcacagcggcggcgtggccctgagtggccaggcctgtctgtcggtctaggcccagcacctgcagggcccatccgtgggctctgctcctgggcttcgctgccagccttaggaggcacgtccaggtcaggtggacgcagagtgcgtaccccagggtggtcc

SEQ ID NO: 3206 - DNA, 1158 bp, Homo sapiens
cacaaggttccagttagtgagattctgaagccaaagtaaggaaaaaaataagtcaattttgctggggccacaaattcttccaggaggaggtgcgaccccgtggagcacgcccttcgctgctgattgtgggcggacactggggtgggcacgtgcctcccactgctggcttggggctggactcacaggtggccatcctcctatcagggcgaggccatgggctctgcaaatagggttggatgaagacagcaaatctttagcaaagcatccttaacttgctgccctgaccttctgccctaactccagctcttggggagaccgccaggaaaggggattctggcttctgtggggaagtggcttgtcccaccagggctaagtcgagagactgggttcatgcagcgagtctggcacggctgcagtcatacgagtttctacagggacagcaggagctcagtgctgcgcagtggtagttgggaggcgctggcggtgaagctgacgcatgtcacgtatacagacacggtggcgtcacctttcagcagttcccatatggtctagcggttaggattcctggttttcacccaggtggcccgggttcgactcccggtatgggaacaaaagtggcttttttttttttttttgcgggtgtatatttttttctttcaacttgaaaatgttcgccagaagaactttgacttttcgccactagaacgctccaggccagattgggtatttcctcttcacttgaacttggagaaacaggcccagggagatccgggccccatcgctgtgtgttttgatggcagtgaccattttcatcatgacattagctagttgttttgaccatcaatagcttactgagtatattagatgctatatacatcgcagatgtgaatattagaagtagtgaaatgcccgataacattgaaaatattcaaaatgtgttgctgtggaacccccagcagaaggcagatccccactggcctccatcacgctccagcgcacttgctcaggttggcaggagccacctcgggtccgtgagctgcctctgcaaggcagggataggaagtcctaggaagtctactgggagcatagcactctggaaaaatttacctttctctcttgctgctgctttgttttgtccagtagtcagggttcccgttt

SEQ ID NO: 3207 - DNA, 1198 bp, Homo sapiens
agtggcatcatgtggtatttgttttgtgtctggcttatttctattaacataatgttctccaggttcctccatgttattgcaaatgataggatttctttccttgtaaaaaataacatgccacattttcttaccaatccgtccaccaatagacacttaggtcgttttcatagtttggcagttgtggaaatgctgcagtaaacatgggagtatagctatcttttgaagataatgatttcatctcttttttatatgtatacccagaagtgggattgctgcatcaaatggtggttctatttttaattttttgaggaaccgccatactgttttccataaaggctgtactaatttccattctcaccaacagttcactagggttcccttttctccacattgttgccaacattctttatcttgtgttttttaataacagctatcctaacaggtatgaggtgatctctctcattgcggttttgatttgcatttccctaacggttggtgatactgagcatttttgcatacaccgggtcatttgttctttgttgttgacttgagtcccttatatagtttggatactgctgtggcctgaatgtttgtgtcccccaaaaattcgtatattgaactctcatccctaaggtcaacagtttagggaagcgattaggtcctgaggactctgccctcttgcatagaattagtgctcttataaaagatgcccgagggagctcttttgcccctcctgccatgtgaggacacagctagaagctaccatctgtgaaccaggaagcccccctcaccagacactgaatctgctggagccaccatcttggacttcccagcctccagagctgtgagaaataaatgcctgttgtttaagctacccagtctgtggtattttgttagaacagcccaagttgagacagatagtaaccctttaccagatacatggtttgcaaatagtttttcccactctgtagatatagccattgagaagctcctcaagatagacattaaatacaaagaagcatggtgtgaaacgccatgtgtgatatgctgtcagtgtgcaaaagaggcagggagggccctgcacttgcatgtatgtgctgcatcatccccagaaggctgaactccttgctggtgcactgggtacccagggaggagggaggttctttactgtaatgttagcaggtgaacattgtatcca

SEQ ID NO: 3208 - DNA, 1199 bp, Homo sapiens
cctgctaggataaaacattaagcggctgttaaaagaaataaaaggaggacacgtctctgtgcactggtgtggacaaatctccaagtcactgcaaaatggaaaaagtataagatgctctttccctgaacctcaagggtcccgcccctctcactttcaggtctctggacctctgactgacactgtgcctgcccaggtccctgtatgcactgccacagtgccctgggccccatgtccacccctgtcctgcccttctctgggatagggctggccttcctctgcctctgcctggctgcatccatggtcgatctcaagtgccttggcatgaactccactctcctgcagccttcaatcaaggaatgatggggatgtgtacataccccaccccaccccttggcagggtgatgctgaggtgtggatttttaacagttcccagactttcccaggaggcttgggtttgggtgcccacagtgggagctggtgtgatatcataccttcgccggccgcctttccttcctgttctctgtgcccctactcccactctagagctgccccgtttctctgttttcgtgaaagagctgaccctgtgctgcctcccactctcccaatgcccctgccactcctgtgagcctgctgctggtgaggtcggtgctgacctctgtgttgctggataatgagtcatctatctctggaggagaagaaaggcaggtcctccacagccctgataaaatctccaagtctcccagtttcgggtccctctcctgggatgcagacccactgcctgcccagctggtacgatccacatgccctcttcttgggaataggggcatgggaaagtgactaaagatactgttctggctgctgtgttcactgtgagtaataaactgtccatttctccgattcagaggtctgtttttcctttttttcttccccaaagatggagtcttgctctgtcgcccaggctggagtacaatgtcgcaatcttggctcactacaacctctgtctccgcctcccaggttcaagcaattcttctgcctcagcctctcaagtagctgggattaaacgcgtgtaccactatgcccagctaatatttgtatttttagtagagatggggtttcaccacgttggcaaggctggtctcgaactcctgacctcgtgatctacctgcccctgcctcacgaagtgctgggattactggcgt

SEQ ID NO: 3209 - DNA, 1102 bp, Homo sapiens
ttatgtctctcgtgagccatctgttaagaacgttcttcttggtgtggtttgtaggcctacctgtcgctattctgggaaaccttcttgagtgctatgcaaatgtgttcacaggcaatgggggtggtcctgagccttggggtgggcacctggtcagtgagtgtcttgcccttccccagctgggcatacagtaccttgctctttctggtggcatcatctggctgtgatgaatgaggtctaggaaataatttgcatgtgtcttgggggacacaacagtaacgagaggaaatacattattacagcaacttgcgacgtactaatacctgtcagtgttggcccccgtaaggtatgtaaggcacctgtgagtgccagtgagtgctggtgaaaggccaacatgtactagttatgtaagtattggtgtctgctttaaaaaaggagacccagacttcacctgtcctttttaaacatttgagaacagtgttactctgagcagttgggccaccttcaccttatccgacagctgactgttggatgtgtccattgtcgccagtttggctgttgcccggacaggacaggacctccattgggcgcagcagcaggtggcaggggtgtggcttgaggtgggtggcagcgtctggtcctcctctctggtgctttctgagagggtctctaaagcagagtgtggttggcctgggggaaggcagagcacgtatttctcccctctagtacctctgcatttgtgagtgttccctctggctttctgaagggcagcagactcttgagtatactgcagaggacatgctttatcagtaggtcctgagggctccaggggctcaactgaccaagtaacacagaagttggggtatgtggcctatttgggtcggaaactgcatgtttcagaaagtttgtctctttttcctactcattatttgaagaagagagagcctgtggggatagccttatcttggtccacaggactgaagtgaagtcacttgggaaggggagacagaggatgagcggcgtctgtgtagggacccccccccgggcctgcagaagggtggtgtgctcccaggactggcatgacaggtgtctcctcctcaccaca

SEQ ID NO: 3210 - DNA, 1206 bp, Homo sapiens
acttctaatattaaccattgaaattaatgtgagccatacatacatgtaagattaataaagacaagtaaaataattacctagttatttcagttcatggcccatgggtggctggaccctctcccagcagctcagggcttaaggtgggaatccaccatggataggatgctatctcattgcagggcacactcacccacaccccctctcactctgggacagtttagatacgccgattcacctaaggggcacatctttgggatgggaaggaactgaactatcccaagaaaaccatgcaaacatggaaaaaaccttcacactccacacaggcggtgccccagaggggaatccattcttttcttcttatcaatgttataatgaaactacattaaatgaaacagtgttatttgaggacctcctgtacttcctccatataaaatattttctccttataatcatgcattgtatttctagtcttgtttttaaattatatgtattgaatcccaagtgctatgtaatactcctaagtatttttagtaattgcctattatcatattgggtgatgtattattaaaccttccagtattggctgtttttttcctctctttttttttgctattgtagatacttctttgaacatctttaatcattttcctttttgttcttattgaatatgcattagaatatgtttctttttttttcttttttttttttgagatggagtttcactcttgttgcccaggctgttgtgcaatgtcatgatcttggctcactgcaacctctgcctcctgggttcaagagattctcctgcttcagcctcccaagtagcatgtgccaccacacctggctaactttgtatttttagtagagatggtttcaccctgttggccaggctggtctcaaactcatgacctcaggtgatccatctgccttgacctcccaaagtgctgggattacaggtgtgagccaccgtgcctggcctagaatctagttctttttttctcccccccaactagactctatctctatatgcaggcaggccccaactcaggatggtttgacttaatgattttttgactttccgatggtgcgaaaacaatgtacatttagtagaaaccgtacttcaggtactcctacccccattctgtttttcactttcagtatagtactcattcagttacatgagatcttcaacacttgattataataggc

SEQ ID NO: 3211 - DNA, 1139 bp, Homo sapiens
gagggcaccgaggccccatggggatagagtggaacctgaggaggaggtggaggggaatggggcagacgtgtgctgctgagtgagaggcagaggccacagatggaatgctgagagctctctgaggcccacatattacagcttctgaccacacagagctccagctgccctggtaatggcagaatctggggtggaggattctgtcaccccatatggcaggggggttgtcggagtaatccggggggaggggcatggaggccataggtttcccacaggactcgggtgttgagttctccaggctatgggccaggccctctcgagcttgcctctgtgagctgcagcaggcaccctgggtcctctggatgcctgtcccccagccatgcagacggcctgtgggaacaaccaccaccagattcactcatacccacagggaaggggaaatagaaaaccccagaagcacagagggtcgatgcttgtcttggtgagagtctggagtcattgagggaaaaataaattcagtcaagcgttatatttaagtttagggaaactatacgttttaaaagttgtccagagcatgcgtgtaagatgacgtttggagtgtggaagccgtgagtctcacctgagctgtgctgcctgatacaggaacttcgagccacacatggctggcgtggtcattgcactgcgtgtggtatgcgcagcagatgccaaaggaccggtacaaaagggaatgcaaaaaacccaccacaccttgggaggccgaggctgctggatctcttgagctcagcagttcaggactagccagggcaacacagggagacccaatctctacaaaacatacaaaaattagcagggcatggtggcacacatctgtagttccaactacttgggaggctgaggttggaggattgcttgagcctgggaggttgaggttgcagtgagctgtgactgcaccactgcactccagcctgggtgagagagtgagaccctgtctcaaaaataaacaaaaaaccccaaagtgaatgaggctgggcattggttcacacctgtaatcccaacatttttggaggctgaggcaggagcatcacttgaagctcggagtttgagaccagcctgggcaacatagcaagaccccacccatttct

SEQ ID NO: 3212 - DNA, 1185 bp, Homo sapiens
tgcctcctgtggggaagcagagcaactggctcggtgcgggatgtggtcagacctggaggccgagtgctatgggtgccgcgctccttcccaggccctcacccctccttctccacccaggagtcgttcacgcctactgaggagcatgtgttggtggtgcgcctgctgctgaagcacctgcacgcctttgccaacagcctgaagccagagcaggcctcaccctccgcccactcccacgccaccagccccctggaggagttcaaacggtgggtggcccttgcggcttcccaccactgccgtctcccccactttcccctcctaaggtgtcacccacagcgacctctccccagggcatggagggcagggtgaggggagtccctttctgttcacagagcacgtgaggcctctccaggcctaggcaggtgtcctctcaccccgcccagttggctcccagagcctctctctccagactggccagagaggccccattgtgctgccatctcttgcatctcatattcttcaaccctgtcagaagagctggggtggccctgactgccagggccagcggagtgggctgtttgtatgggactgagggtgaggtgtgtgcaggagctgcactgactcggccgcctgcgtgctgtgtgtccttgggatgttccctagcctctctgaaccttggtttcttcctctgaagaatggggctgaacctcccggaggtgcccagtgctctcccacggtggagccaaccctcactaatgggagccctgggatcatctgtgagcagggcctccttactgggcaagcagcaggtgaccctccccatcccctgcagggccgctgtcccgaggttcatccagcagaaactctacctcttcttggagcattgctttggccactggcccctggacgcatcgttcagagctgtgagtgttggccccgtcacacgtgtgcctgtgtcctctgtgtgccttgaggtgggaggtcctttggggcagataaaggaggagagcaagtgttatcacagaggccttggcaaggagggggtcttggagggccacattgttctttctgtttgagtttccaaagccaaccctcaggaaagccttgccctgtcccacctgtctggtgcagggcaggttcctacccttacctgactagggagtactctgacccctgggctgggaaaag

SEQ ID NO: 3213 - DNA, 2089 bp, Homo sapiens
atcgcccgccctgccgcgcccaatctcgcaactgggacgccgggctcatcctcgcgagtcccagaggccgctttctacctacctggttgatcctatcagaaccatatgcttgtctcaaagattaagccatacatgtctaagtacgcagggctggtacagtaaaactgcgaatggctcattaaatcagttatggttcttttggtcgctggctcctctcctacttggaaaactgtggtaattctagagctattacatgctgaagggcactgacccccttcacagggaagatgcgtgcatttatcagatcaaaaccaacccagtcagcccctctccgtccccggccggggggtcgggtgccgccagctttggtgcttctggataacctcgggccaatcgcacgccccccgtggcagcgatgacccattcgaatgtctgccctatcaactttctatggtagtcgctgtgcctatcatggtgaccacgggtgacagggaatcagggttcaattctggagaaggagcctgagaaatggctaccacattcaaggaaggcagcagacactcaaattacccactcctgacacggggaggtagtgacgaaaaataacaatacaggactctttctaggccctgtaattggaatgagtgcactttaaatcttttaatgaggatcaattggagggcaagtctggtgccagcagccgtggtaattccagctccaatagcgtatattaaagttgttgcagttaaaaagctcgtagttgaatcttgggagcgggtgggctagcgagccacagcccgtccctgcttcttgcctctcggtgccccctggatgctcttagctgagtgtcctgtggcccgaagcacttactttgaaaaaattagagtgttcaaagcaggcccaagccgcctggatactgcagcttggaataatggaataggaccacagttctattttgttggttttcggaactgaggccatgattaagagggacggccgggggcattcatattgcaccgctagaggtgaaattcttggactggcagtttagaccagagcgaaagcatttgccaagaatgttttcattaatcaagaacgaaagtcggaggttcgaagacgatcagataccgttgtaattccgaccataaacgatgccaactggcgatgtggcggtgttattcccatgacccgctgggcagcttccaagaaaccagtctttgggtttttgggttccgaggggagtatggttgcaaagctgaaacttaaaggaattgacagaagggcaccaccaggagtggagcctgcagcttaatttgactcaacatgggaaaactcacccagcctggacacggacaggattgacagattgatagctctttctcgattccacgggtggtggtgcatggccttagttgctggagtgatttgtctggctaattccaataacgaacgagactctggcatgccaactagttatgtgaccctggagcggtcggcatcccccaacttcttagagggacaagtggcgttcagccacctgagattgagcaataacaggtctgtgatgcccttaaatgtccagggctgcacgcgcgctacactgactggctcagcgtgtgcctaccctatgtggcagatgtgggtaacctgttgaacctcattggcgatggtgatcagggattgcaatttttccccatgaatgaggaattcccagtaagtgctggtcataagcttgcatgaagtccctgccctttgtacacactgcagtcgctactcctgattggatggtttagtgaggccctcggatcagcccgctgggtcagcccactgccctggcggaacgctgagaagacagtcgaacttgactatctagaggaagtaaaagtcgtaacaaagtttcggtaggtgaacctgcggagggatcattaacagagaagagcgaagccacggagacgccgccatgtccttcctccttggctgaccgtgttcccctgtggcgcatgcatgggcggagtcgtgccctttgttcgttgcatggccccacctgccccgagagccagagaactcgggagggagagagggggtagaa

SEQ ID NO: 3214 - DNA, 1063 bp, Homo sapiens
gcctatcttctgtcttactctctttctctgcctgtctgtctgtctcccattctctgtctgtctccctctctctgtctgtctccctccctccctgtctgtctgcttctctctgtctctgtctctctctctttctgtttctgtctgtctctctctctccatctctgctttctctctctgtctctttctctgtctgtctctccctctgtctctctctgcctgtctctctcactgtatctgtcttctgtcttactctctttctctgcctatctgtctgtcagtctctctgtctctgtctctctccctccctttctgtttctctctctctctctttctgtttctgtctctctctgtccgtctctttctctctctttctttgtctttgtctctgtctctctctctctctgcctgtctctctcactgtgtcttctgtcttactctttttctctgcctttctgtctctctccctccatgtctctctctctctcactcactctccatctctctctctttctgtctgtttctctctatctctctctgtccgtctctgtctttctatgtctgtctctttctgtgtcagtctgtcagacacctcatgacggggagggctctgccccttccacgaaagtgagaagtgcatgcttaggtgcttagagaggctgagaagaatctagacagacgggccttgctgggcttccccactcggtgtatgatttcgggaggtcgaggccgggtccccacttggatgcaaggggcattttcagacttttctgtctgtcacgtgtggcgtctgtacttctcatatttccctgataagttcctcaacttaaaagtaaacggttaaggccgggcgtggtggctcacatctgtcatcccagcactttgggacgccgaggcgggtggatcacctgaggttgggagttcgagaccaaccttgccaacacagcgaaaccccgtctctactaaaaatacaaaactgagtcaggagcggtggggcaggtgcctgtaatgccagctacttgggaggctgaggctggagaatcgcttgaacctgggaggcggaggc

SEQ ID NO: 3215 - DNA, 2008 bp, Homo sapiens
tcagaatgacgtgtcctccctgccataggttgactccttgagtcccctatgccattgcactctagcctgggcagcaagagcgaaactccgtccccccaccttcccgcgcaaaaaataaataaataaataaataaaatctctaggtgtgttcccaagagtgatgtctaagaaatggcactgtacactgaacgcagtggctcacgtctgtcatcccgaggtcaggagttggagaccagcctcgccaacattgtgaaaccctgtctctactgaaaatacgaaactgagtcaggcacggtggggcaggcacctgaaatcccagctacatgggaggctgtggcagaagaatcgcttgaacttggcaggcggaggttgcagtgacccaaggttgcgccactgcactacagcctgggcgacagagcgagactcagtctccaaataaataaataaataaataaatgaaagaaagaaaaaaagaaaagaaaagaaagagaaaataaaagaaaaggcactgtatcgctactgggctaggaccttctctctttctatctgtttctctctgtctctctctgttcgtctctgtctttctctctgtgtctctttctctgtctgtctgtctctttctttctctctgtctctgtctctctgtctctctgtctctctctctctctgcctctctcactgtgtctgtcttctgccttactcactttctctgcccgtctgtctctctctctccctcgctgtctgtttctctgtgtctctctctgtctctgtttttctctgtctgtctctttctctgtctgtctgcttctctctttatttctctgtgtctctgtctgtctctctctctctgtctcttgctctctgtgcctatcttctgtcttactttctctgcctgtctctgtctctccctccctttctgtttctctctctctctctctcactttctctctgtctgtttctctctgtctctctctctttctgtttctcagtgtctctctctgtccatccctgtctttctctgtctctttctgtctctgtctctctgtctctctgcctgtctctctcactatgtctgtcttctgtcttactctcctctgcctgtccatctgtctgtctctctctctccctccctttctgtttctctctgtttctctgtttcctgtttctctctgtttctctgtttcctgtttctctctctctctgtctgtctctctctgtctctttgtctgtctgtctctctctctctctctgcctgtctcactgtgtctgacttctgtctttctctctctctctgcctgtctcactgtgtctgtcttctgtcttactctctttctctgcccatctgtctgtctctctctgtctgtttctctctgtctctctctgtccatctctgtttttctctgtctgtgtctttctctgtctgcctctctctttctttttctgtgtctctctgtctgtctctctctctctctctgtgcctatcttctgtcttactctctttctctgcctgtctgtctgtctctctttctctgtctgtctccctccctccctctctgtttctctctgtctgtctctctctctttctgtttctgtctgtctctctttgtccatctctgtctttctctctctgtctctttctctgtccctccctttctttctctgtctgtctctctgtctctgtctctctcactgtgtctgtcttctgtcttactctctttctctgcctatctgtcagtctctctctctctgtctgtctgtccccctccctttctgtttctctctctgtctctctttctctttgtctctctctgtccgtctctttctctctctttgtctttctctctgtctctgtctctctctctctgcctgtctctctcactgtgtctctcttctgtgttactctctttctttgtttatctgtctctctctccctccctgcctttctgtttctctctctctgtctctctcaatttctgtctgtttctctctgtctctctctatctctgtt

SEQ ID NO: 3216 - DNA, 1154 bp, Homo sapiens
tttgtctcgtacatccaaagtcatgttaaatactttgaaaggaatagaagagttttaaataacatcactaagagttgaaatagatatgtacattcttctccggaatttaaaatccctggtttaatgggttctgactctactttcttgttctcaatttctacctaaattctgtgctcagacacgaatgcttttcctattagacgttttgaccctgaaccgagttcttaaccaagtaaaagcagaatatggtctctctgttaaaacaaatataacctgtgaataaaatggtgccctggaaaagcaccttctcttactacaggtgagctggttattgccaatgtatgtacccgctgtttccccagctcatctcagcagagagccagcctttattttgaatacccaatattgtttcaggtcaggaggttctgtggctaccatccaaaagatgttgccctttagtaagtgtgcagcttgagcaaatacttggggcattctagatcattaaccaggtatatcagttatttcctggtctaagaaacaaatgaatttgaacagagcaaaatcacgatgatatcagtccttgaactttgaccttacttttattcacttgtggctaaaaaactgtcttttgtttttttagaacttggcttattaatgctttgtgaaatggagagaaaataggctgtgacaggaaatatagttttggaatgaggaaatagttaagaaagaagtggaacaggcctgctggaaaaaaacatacactttcattactgagatctctgctatatggtaaccttttagctatattgtccttattgattttgtctgcacggcgagcacagcatggcgatgaagagaaattgccaggtgtggggtgaaaggaaaatggtctggccaggggtctgctgttggcatttaagccattgcaagattcaggtgttaattggcctgacaggcatatctgaggaggcagaaccacaacctttgtggcttagaagcttgttcctgggccctctggagcagtttctgggtctagaaaggtggccatcttcccctttacagctttcggttgtaagacaagggattgggctgtgatggattggggttcacaacccacctgggcctcaacccagaacagttccatagagtctccg

SEQ ID NO: 3217 - DNA, 1204 bp, Homo sapiens
cccaaatggatccccccaaagagcttttagagttttattcttaccccttctcttcccctttatctgcccttcactgtctgaatctgggctgtctcacatgataaccactaggcacatgtggctattgagctcttgaaatgctgcgaatctgaattgaggtagactataaatgtaaaatacacaccaaattctaaatatgaagaaaagaatgtaaactatttcatacatgtttcaatgttgattacatgttttacatggtgatattttgtgtatattacgttacataaaatacattttaaaaattaagtttacctgtttctatttatcttttatgtggctaccagaacatttaaaattacatctgtggcttgcattacatttcttctggagaacactggtctaaattcgtgtgtgtgtgtgtgtgtgtgtgtgtgtgtgtgtgtggtccctgtattcccaacatagtgtcctgtaaaaggccccaggattcatccatcccttcccttctcgcttcccttcctctttttttttcttcccttctctttgcttgcaatgtgtctgctaagtgaatctctggaggagagaatgttaaagcatttgaacggtgacaagattgctcagacagaaggtttctagtgctttataccagtccaaagagttaagacggttgtgttttctctgattacaagtgaacagcaaacatctgtcgaggagtttttacagggtatttgtactttcacatgatctaattttactatcttcataagtagtatgaggctgggcatggtggctaacgcctgcaatcccagtaccttgggaggcttttgggaggctgaggcaggtggattacttgaggccaggagtttgagaccagcctggccaacatggggaaaccctgtatctactaaaaattagttgagcatggtggcacagcctatagtcccagctgctgcccctctccactcccgccccagaggtggaggttgcagtgagtggagactgtgctggaaaggcattgcctcaatagtgggggtatgataaggactcctagaagttaagcactactttagctcctcttctctccttactccctagaagattcagttgctggcgtggcatatctctttaaaagttccttatgggattctaacatccttttcccaagtctgccctgaaaatgagctctctggagaagggtggtggt

SEQ ID NO: 3218 - DNA, 1127 bp, Homo sapiens
ggttagttctgcatgtttccatcaaattaaaggttattccctggccgcctcctggagaaaaccaaccccaccctgccagctgggggcaatggggcagggattttggcctctcagaacagctcctagaggctgctcatgactgaatgttttcccaaatcacctaaatatcggtttgctttttgttttgggggagaggatttagcctcttacttccctgatggattcaaagttttatctatctccttatctcctgccctgtcttggcacaactctggatagattgcaggtgtggaatttgctggagtttggtgacttcgtcaaattcctttggattctgttccgccaaatcagcagtctcgtcctgtggatgcagtgactggaatttcccatctgcaaagcatctctgtagcccagattttgtggagccttaagacactccctcaatgccaccctgaccccacggctggagaaccctgtgcttatgtggtgggcagggccactgttgatggaggatggcggggacggggtggtgctcaaaggatctgtggtgctggaggtctacacgcctctcaggacagcgtgtcaggaacctcagagcagcttcacatctgccaaagctgagagggagcgaacttgggaagcattttgctcattgtcctacccaagtattaatagcataatagttgatgccaaaggagatggtgacgtcccttccactgtagttgctgtcacaaccttgacgtctttaagctaatggccgtttgcatctgtgtcttcaaacagatcctggttacagccattttgtgtgattcacttcgggggttaagtaatgcaggattctgcaaacaaggtgtcgccgtccaaatgtactgtcctggcatagagagcactgctttgttttccactgttgtagagaaaactagggagaactttatttttcaataaacttttcttgtgtgacaggtggaagtgatttttgggggggcgggtgcatgcagggtcacctccagaacaaagctgagctgctgtctaggcgcgtccccagcacacagcttcccccagctgtatttcacggtttgcagcacactgttgaaacggctggtaggaagacaggaaggtatacttaa

SEQ ID NO: 3219 - DNA, 1271 bp, Homo sapiens
gagtgcagtggcgtgatctcggctcactgcaagctccgcctcccgggttcacgccattctcctgcctcagcctcccgagtagctgggactgcaggtgcccgccaccatgcccggctaattttttttttttttttgtatttttagtagagacggggtttcaccatggtctcgatctcctgacctcgtgatccgcccgcctcagcctcccaaagtgctgggattacaggtatgagccactgtgcccggccgtgtctggcatttttaaaaataaattacttttttttattttttattttttttgagacggagtctcgctctgtagcccaggctggagtgcagtaacgtgatcttggctcactgcaagctccgcctcccgggctcacggcattctcctgcctcagcctcccaagtagctgggactataggcgcccaccaccatgcctggctaatttttaaaatagttttagtagagatggggtttcacagtgttagccaggatggtctcgatctcctgacctcgtgatccacctgccccggcctcccaaagtgctgggattacaggtgtgagccatcgtgcctggccttaaaaacaaatttctattagcagatgcagggatacctgcatatagtgatggttcatgtttgtttcactgtagactgcatgctgatagaatctagtgtgcctttaaattatggaaaataaattttcttcatttcataataactaagtcacccaatgttttgggatcattttagtgtgtatgtatttttggagatagcgtgcattgaaaatagattagtaggaaatgcgtaaaaagtttacaattatttctgaaatggtaggattttgggtaattttttttcttgattttttactatgtttttaaatgtttttatgataataatgctttatatttgagggaaaaaagcaaattctagttcttagaagcatttgtttgattattggaagcatctacattgatgagtatctcttactaatcttataaattctctctcccatccctgaccactcagctcccttctctggagggaaccaaatcaagaaaatatatttatgtttgttttccttccatgttttacaaaaatagtattaatagcattttgacatacttttctatacctttttcttttcttttttttgagacagagtctcacattgtaccctgagctggagtgcaatggcatgatctcggctcactgcaacctccgcctcctgggttcatgcagttctcctgtgtcagcctcccgag

SEQ ID NO: 3220 - DNA, 1159 bp, Homo sapiens
tccctgcaactcccagcaacagtagatacttagaggtatctaatggataaaaaggaattttaggaggaggaaaataaggcatctattgagtttgtgccccttttaggaatattttgtacataagcataatactgacaatttcattcctgctggtttaacttcataattttattttggcaatcttttaccagcacatattagatcaactttggttttttattaatttcccatattcaattgtgtataccacagcttgattctttagactcctgttgagtgacatttggttcattttcagtgttttgtattacaaacaaaattgtagtaagcatccttgaacgcaacatccttttatatttggctataagagaaatttctaacaaattgatgtcttcaatggtgtgcacatcataccaccaaaatcacataggagttcctgtttatgtgaaaaagggtatgtcattattttggtttgtgtttagttaattatgggtgagattgaacatgttgttatatatttattggctgatgtctatttaaatctgttaagattctttcttttgtggtcaggctactctgaacgcccggacgtccattttggcagcagcaaacccaatcagtggacactatgacagatcaaaatcattgaaacagaatataaatttgtcagctcccatcatgtcccgattcgatctcttctttatccttgtggatgaatgtaatgaggtaaccccatgagcttccttttttatttccagttggagtaatcgagtgagacaaggctggaagatacactgctcaacagctggtgcatgtatgtgcaccagcctttgatttccctcagggtggcacaggatcggacaaagggtttagtaagcaactcaaaataaagtcatttgaattgcctcttccacttaattgtgttcaagaattaagttttcaggttttgttactatttatttctcaaaaggaaacaagttacagttaacttccaaccacactttttatttttttaaacagcctctcactggagactgggctggagtgcagtggcacagtcttggcctactgcaacctccacttccaaggttcaagcgattcttgagtctgagcctcccaagtagctgggattacaggcatgtaacaccatgcgtggcta

SEQ ID NO: 3221 - DNA, 1219 bp, Homo sapiens
accgattttgataaaatgacacagacacacatggagtggttttaaggagcagagagtttaataagaaagaaggaggaagctcccccatacagagacagagggaggggaactccaaagctgaaagaggaaactctgtgtgctgtggaaaagtggctgcttatctaaggaggctggaggaggaagtgactgatttgtatagggctcaggatattggtttgactaggcatggtagccggcaaaaaaatctggccctcccactctagctttttaatatgtaaatgcaggccaccatgatgttctacccacgtggggatatatgggggcagccatgttgccaggcacatgttgggccaagggcaagaagaatgcaggaatcaccatgtttgggtggacccagtttctaatggccagcatggcccatctaagagctggggctttcctgctagacaacaaacatttctggagctgctttaaaagaaacaaaaacttcccaaggaacccttttcctctctatctgccaaaagtaacttcttaataactcctataacagtaccatagatgcaatgtccatgcttctagctgatgtgagtgtctctacttgtgcaccaagtcccaactcctctgtgctgtctgaagacatcacggcagcaattatcccctctttttcccaaaccatgattttctcttctctattaagtctttttcaccaacataataacttgctttttattcttctaccttctttttacctctacttcattctcgagccactatttatttctgcctttccctttacagaaaatttcctggaaagtgttttctatatttgctgggattcattttctttcataattcttccttgattccaccccatgttttctccacaccactccattaatgttgctcttggcagccccatcagtctgctcttggcagacctcagatccagtggtaagtccttggtgctcaacttattccatctactagcagtattttacatgttctatcttgaaacacattcttcaattgactttcaggacacccccacccctgatgttttgcctcacacctcatttgccactactttttaaacttctttttgagtttttcctcatctccctgacctcttaatggtggagtaccaaggacttcattttggaatttttattttcctgtttatgctcactttcattctcttggggctttacatactgcttaa

SEQ ID NO: 3222 - DNA, 1225 bp, Homo sapiens
gcctttcactaaactaactcagttacttaaactaatctctttgagtggaaatccttacacctgagataggcttgagactatctgatcaccttagcacagctcaacacagagaaaatacagcagaatctactcttaacttgtaagagctttactaatcaaaagtgttctgagctcacaaacctaggtcttcctgggtaattccacttctttgtttcttagctgtagacttattgatgtttcaagtcacttgagcacaggtttccctccctgtgctttaagctcagtgttgatgacagatacacttactataacattgcaagtgttatgcaactatatacctcttctccatacctttgttttggaattctgcatgctgaaattccactctatagtatgattttatattttaatgaaatttttaaaatgaggctatgacaagattaattaagtaaaattaaaaacaacaataaagagctgcaaattcatttttcttcttcagtagctttactaaattccttccttccttccttccttccttccttccttccttccttcctttccttccttcctccctccctcccttcctttcctccctcccttcctttcctccgtcccttcctttcctctctcccttcctttcctcctttcttcttttcctttttccatagtagtagctggaataggatttttaacaaaataacagcacagataaatttttcctttctggaaaataaaaaaaaaatggagttctgtaaaacctctaggttaatttctttttagaaaatttggaatacatataagattaagtaagaagtttaaagaattactaattttcccatggtgaatcattacagaaaataaaggctaccatttagcttggtccattttgagaatgcctctaagttctaaatcacccccaggattttttttagcacttttcataagagtttcgttttatggatagaaatataaaagtaaaaaaccagctacataaatttttaattaacagaagttatcatctaaattaaatacattagaattattgacaatagattatgagtggattaagaaaaaatgcaattgcatatattaggaaagttattttccaactggaaagtaaagtaaaataatcaaatgtaatttaaaagtctgaatatgcattattttaaggagttggttgttatataaggggatctttttcttttttagtttactgatcaaatat

SEQ ID NO: 3223 - DNA, 1209 bp, Homo sapiens
ggctaattcttttattttttttgtacagacagggtctcaccatgttgcccaggctggtctcaaactcctaggcttcagcagtcctcctgtcagcctgtcagtgctgggaattacaagcatgagcccccatacctagcatcttttaaatatttattcctgtgaaatctttctccttattaaattgaagatcctatgatttctaagaatttgtaacaagtgccttaaaaattaactttcctggaattatttaaaaacaaatgtttagtgtcattataactaagttatacatgaagatttctaacgtaccattaacctgattttaagtgtgttcttttacatgggtttgtttttttttgtttgtttgtttgtttttttgagacggggtcttgttctattgcccaggctggagtgcagtggcatgattgtggctcctgcagccttcaccttctgggctgaagcaaacctcccacctcagcctcccatgatgcttggcttttttttttttttttttttttttttttgtgagtggggactgggtggggggcagattcaaagacagaattttgccacattgctcagactggtctcaaactctggagctcaagcaatctgcttggcttcacctcccaaaacactggaattacaggcatgagccactacaccttggcctcttttattaagaatgcttttcacacacagttagatccattttcttggatgtattacagacaaactatcatctttagtattttaaggtggaaaggtaatttttatgtagttattataagagtatgaaaaaattgcattataatatctgtaattaccatagctgagaattcaaaacagttacagcaatctagaccacttacaagactatcaagaatgtgaacaacatcatttactcaatgttatttgggaaaattagtatataatataaagatagttaatatcatacttattattaaacataatatcgaatcacataatatctttacagaagcaatacaactttcccagaacagtgtttatttcataagatcttgttcttattttcaaatacaaattacttttacgtctgagctacttcacctgacaaacttatatgtaagtgcattaaataaaacaaatttatagtatttcaaataaaattaaaattggatttatgagtttcaacttccaagtaaaacaatattaattgaatcatttgtt

SEQ ID NO: 3224 - DNA, 1226 bp, Homo sapiens
ctgaggcaggcaggtcatgaggtcaggagttagagaccagcctggccaacatggtgacaccccatctctactaaaaaaaaaaaaaaaaaaaaaaattagctgggcatggtggcaggcacctgtaattctagctactagggaggctgaggcaggagattcagttgaatccaggaggcggaggttgcagtgagccaagatcacaccactgtactctagccggggcaacaagagtgaaactccgtctcaaaacaaaagaaaaaaaaggacagataataataatagttaatgtttactgagcactcagtatgtgaaaacaactctgttttgtgactttacattgtctgatttaatctatattatatcacaatgagatagatatcattgttttgcccattttataagtcagagcactgagatataaagggagatcaatggtggcttgctcaggatcccacggccactcctttgggctaaagataacatgacctatacttggaataatcatacattatataattaataactaggtctgtggctttttttgtttttttttagacagggtctcagttctgtcacccaggctggagtacagttgacgtgatactggttctgtggcatttttaaagtaacattttattaaactaaaaaggcactattttaaggtagtaacccacctagatgagtcccaatgatcataaatttttctgttacaaattttctgagttccaattggcattacattaaacattaatgttcccaaattgggaaagttaattgtcatattaattagaacacattgaaaataaacactatttatatacatttgattttcaagtgaatttggctgtcctccctttttgtgtgggtggggtaagcaacttcgtatatcatattgcatgaactcaagggagctaattagggctcattttccccacagttctcaaagtgtatgaagttgtgtgtgtgtgtgtgtgtgtgtctgtgtgtgttcatatttatgacagagagagaaaaagaagagggagagacagaaaaactccagttaaaaagcaaatgcccttgagacggatctagttagctgaaagtcacatgaagctgtatgtgtctgtggatggagtgtgttgtaactggaggaaagttgaactgaaccatatgtccctatcagggtaggaagatccaaagggaaatcagaaaactgtgagtaggactttagtgcctgagagtaa

SEQ ID NO: 3225 - DNA, 1176 bp, Homo sapiens
aatgctaaaaatcgctgatttttttcctggacaattggttgataagcatttatcaggacatcactgattgaattaaataatagaatacatttttatattgttgggggagtattgtagtactggtgaagaatcagagtgtcataaaatcccaaagggaaatagctctcccacccatccaaaaacattttatttctacacaaaatttcattttaaaaaagaatcatactgccaaaaaaaatgtttaaaactactactttttaacatctctgaaaagtgattccctatccccattgtttgacattttcctataattgacacatttggataaatgacttttaaaacattcttcttttttttatattgtctcatagtgttagtatttatatgatttattaatatttatttattaatatgttttcattacattgcatttggaaatccacttgttcttttgtttatatgcaaattatctagtatggggaagagagattaattctaggtttataatctttaatttctagaaatattgtgaagcatgaccaaagacagtgacttgggaaaagaaataccaggagggacataatagaagttttaaatgatagaagtaggaatagtataaaataatcaatttaggtaaataatagactgtaacaagtggtagcaatgtagcatagtgaaaatatcagtgacctttggaatcagagacatctgggttgaaaaacaaatatctttatatactagctgtgtgattgtaatcaagttttttaacctccctgaggttcaatttcctatctatacaatggaaacaatacctagaacagtaggttgtttctaggacaaaataaaaggatatatgaaaagtatgtagtattggcatgtaataatggaataaccattttaaaagttttaaaagaggcgaaaccccatctttactaaaaatacaaaaattagctgggcgtggtggtgggcgcctataattccagctacttgggaggctgaggcagcagaatcgcttgaacctgggcagaggttgcagtgagctgagattgctccacttcatgccagcctggacagaaaagcgaaaccctgtctcaaaaaaaaaaaaaaaaaagtttttattttgaacatatttgtctataatcacattacattttgataatgcagtatatctttttt

SEQ ID NO: 3226 - DNA, 1206 bp, Homo sapiens
ttcagatatgagttataggtatttcttagtcatttgtatgtatgtataaaatgtaaataaaccaatatctacttttttaaagtttttattgtggtaaaatataacataaaatttaccatcttaactacttttagccgtacaattcagtgacgtaagtatattcatattgtacgaacacatcactatgcatttccagaaattttttataacatctacttttaaagatgaaaaaacataataagaatttagggcctcagatgtttagctcttaattttagatatgaacatttacttttccctgagaaagaagcccatattacttatgtctacataatctccatcattctctaatattcttaatatgtgatcatttattctttacacacaagaaatgaaatatctacttagtttttctgttttcataattgtaaaatattcctggaacttcatatcaaagctatattcctttcaattcagaaaaagcaattctaatttattagagttgcaaatcattttggggattcattgaggtgaaacatatttgctatacagaataatatgttctgtattttagacaatttcaaactgaagcttaattgcttcaatctgtagagctaaaaaatattggcagcatctaatgaattgaatgataatgacaaaatgttacacaggtaaatacatcaacatagaagaactcaaaattctcatcacatttttacctctctcatctaatttatcctaaagaaaaaaaaaatgaaagaattgtgctaaagggaaaatttgtgctttttatttcattatttataacatcacgtctaactgatgtgaatatggaaaagataccccccccaaaaaaataaaaattctcgtctgtttgaaaggaatttgacattttcattgtttccttgaaattgttctttataatttgaagacaaaagtgttgaaatcatattaccattgctaaaccgaaatataaaatagtgaccctctttgatggtaatgtgctggcacaaaattgcaaagttttcaagctcctttgcatccttgaagtgaaaataggttattttccaactttccactgcctaaattcaaactactgacctgatttgctactcctctaaatattaaccttagaatgctatttcaaattcatttaactatatgctatattggcatttttaaacaaagagcattttgtttctccat

SEQ ID NO: 3227 - DNA, 1151 bp, Homo sapiens
ttttgcaaaaattattgtacaaatttgatattaaataaagctaacaaacacttttatagaaataaaaaattttgctttgtgaatagaaacaccacatagcatgaagcaggagcagatacaaatatttccataatgcaatagcactttaactttcaattttgttttgtttctgttatctgatactgtggagagaattctagccatcttgcccttaatacccagcagccagctatggagtaaaagtccagagtattagtaggaaaagagatttgaatccaagggtcccgagagttgccactattgtcccttgtcccctactatcgtataaatcaatatattccaatctgactacgttttcacctgaagatttcagagaatcaatactgccctactatttcttttgtatttttctatttaggaccattcagaagctaggccaagtacccagagggagagaagagaggaaatttctgtgcatattcaaatatgccttttaaaaactacaacataacaaagtattccagcttcatttttaaaattttgtcctatttatatcattttagacacttaagtgagctgctgaaaagaactgctctccatggagagagtaactctgtccttattatcggaccccgaggatcaggaaaaactatggtaaaagctgttgatttctggtgtttgttggcatgtgatgattcttattttatataagaataaataaattcatatataaatcttattttatgtaatactgaaaatacttttcattattttgtaatgttttacttttttgtttttttcttttttaatcacagaagacatgtaaaactttataaacttagggtggtatatttgagtgtagcagacctttttcccccttatttgtcctcctagtgaaaaattgtcaattgatgtttgttccaacatggtcttttgtccttaaagaagtagagatttccagtggaaaaagaaaatagcatgtattgagcatgtactatgtgtctttttattgtgttctctcatttattctttacatcaacactgcacggtagggtttttccctttgttataggttagggaactatcatatcatgcattctttttatttttcctacatcattactatttgtttaaccctaacttacacagtt

SEQ ID NO: 3228 - DNA, 1202 bp, Homo sapiens
gtgaccgggcggcggcgggagaggcgcacgctcccgggcgcgggcgaacttgcgcacctggcacctgccacacagcgaaagcaccggccagcgagcggaggggcgccgcccccgccccctctccccggagcggaccgagaccgagcacgctcccgcgggccggcagcgccgcggagagagtgggtgggcaggcgagggaggggaagggagaggaaggagggagggagggagagggcgaggcgcgttcccgcgacgggggcgcgctctcgcgcgggctgccgggatcgctcgccgccgctgtggtaatgtccgccatgttggccatggcgcagggagcggatcgggcgggcgagcggcggatctagtgtgtggaggcggccgcgggcgcggggggctgttttcgggcggggtgggcgcccatgctgtggccgggggcagtgaggaggaggaggagcgggccggccgcgctgcactgaggaaggaggtggaggaggcggcgggagtcctccccccctccccgcccgccccgccgccgccgcccgggctgttcctgtaaggcggggagacaatgagtaaactctccttccgagcgcgggcgctggacgccgccaagccgctgcctatctaccgcggcaaggacatgcctgatctcaacgactgcgtctccatcaaccgggccgtgccccagatgcccaccgggatggagaaggaggaggaatcggtagggactcgagtgtttattacccccccttccctcctcccccctcccctttgtcagtcgggcctcgccattcacagagcgctttacgctcgctggagggcgccgctgccgctctaacgcacgggactctacgccggcggagtagcgtaaaccctctcggccggcgtagcgcccgcccgcggccgccatgttgttgcgtcccagtgttgtgattagctcgcagcgctgcttacgctgccgtaagggggccttgccgtaagcggcggccgggaatggcgcaggggatgcgctggccgctcttggcgtacggtctctgtttacctttccacctccctctctcaggcgcggggctaattaatggcgtggtattatttggctaggcaagattattattttttccacttttaactttggctttgtattgagttctctttgaaatgactgtggaagggtgctttcaaaacaaacatcttcctcccag

SEQ ID NO: 3229 - DNA, 1132 bp, Homo sapiens
ccactggaggacaggaacctctacttgcacccatgtgtgatctttgagtgggatacaccactggctgaagttcaacagaaagtagcatctccatgtagtgatcaggagtcccccaagtgcacaggtcccaggaatcttcctgagcttgggaccacagactctatgatgtgctctgctggcagatcaggggactttgagtacctctcctgacttttcctcaacagtctgctaagtggattctcttggctagaaacatgagaattttcaaccatttcacttgtcttggtgtcttagtccaagagtgtgtaaatacaagagtgtgctcaatacaccatggataaagtaagttgataaatcacttcctgtttctaattccaactcctcttccatgcccatacaggatgttatgagttgaattgtgcccttcctctccatgtgttaaagatacaaagttataacttctgataccatagaatgtaaatttattttggaaaagtgtcgcattccccttggtctagtggttaggattcaacactctcaccgccgcagcccgggtttgattcccaggcagggaagccttccttctttggctctgcctgccaactgccaggccccttcacacctccccttttggccgggcacggtagctcacgcctgtaatcccagcactttgggaggctgaggcaggcaaaccacaaggtcaggagttcgagaccagcctggccaacatggtgaaacgccatctataaaaaaaatacaaaaaattagctgggcatgctggcaggcacttgtaatcccagctacttgggaggctgaggcaggagaatcgcttgaacctgggaggcggaggttgcagtgagccgagattgtgccacggcactccagcgtgggtgatagggagagactctgtctaaaaaaaagaaaaaagaaaaaatgtcctacgtgtccttgtagatgtcattaattaaggtgaggtccttagggtgggccctaattcaataggacttataaaaaggggaaatttggacatgaagacaagcccacatacagggagaaagccatgtgaatgtgatgatggcaatccacaagccaaggagagaggcctggcacagatcctttcctcatagccttc

SEQ ID NO: 3230 - DNA, 1178 bp, Homo sapiens
gattacggtatgtttgacatttcatattttgggctttttagaatcacccttccattatacagtctgttaaactgctgaaatgtctgtaggtcttccctttattaattttaaaatttattgtagatttattgtatgatttccttttaactcccattcagatactagcagaatatcagcagacactagtcagtgtgtgtgtgtgtgtgtgtataaaataaatgtacttggcttttcttgaatatttacaattaggaacacaaactgttaggtatctaccactaactttggaatagttgccatatattgaatgtcagtgattatctttgggttaccgaagttttacactaaagttttcccagaaagtcaaactcgtttgctggttattaatctgtgtgtgtatatatatgtatatatttctgtgcaggaggagcaaatggacagtgacattgtcattcctcaagatgtcacggaagactgtggtatggctgaacatcttgaaaagtcctccctttcgaataatgagtgtggttctcttgacaaaaccagtccagaaatgtcaaacagtaataatgatgaaagaaaaaaagctttaatttcatcaaggaaaacatcaactgaatgtgcatctagtacagaaaattctttcgttgtcagcagtagttcagtttctaataccactgttgctggaactcccccataccctacaagtcggaggcaaacctttattactttggagaagtttgatggttcagaaaatagaccttttagtccatcccccttgaataatatttcatcaactgttacagtgaaaaataaccaggaaaccatgattaaaacagattttctaccaaaagcaaagcaaagagaagggactttttcaaaatctgattctgaaaaaatagtgaatggaactaagagatcaagccggagagctggtaaagctgaacaaacagggaataaaaggtctaagcccttaatgagatctgagccggagaaaaatactgaggaatctgttgaaggcattgtagtcttagaaaataacccacctggtttgcttaatcaaacagaatgtgtgtcagataatcaggttcatctttctgaatctacaatggagcatgacaatacaaagcttaaagcagcaacagtggaaaatgctgtattattggaaactaatactg

SEQ ID NO: 3231 - DNA, 1216 bp, Homo sapiens
agaatgtttttcatctggtgtctctccttggggaattggactgaaatcaaatttcaggctgtgagcacatgtcacaccaggatttatggcacaggacaccagaatttactcagattttgttttctaaaggactcagaatcaccgtccttcagagtcataatattccttccataaggatctattgaagagattgatgaaattgtattgatgaaatttcatcactgaaatttgtatgaaatttgatgaaattataagagagaaacagcttatatccctgggacggtgttttcttttttctttctctcctccccatgggacatgctggccctgctttccaccccattgtaccaggtgccttgtgccctgctggagccctggggtgctcaggacacaccctgaagctctgatctttctctgctggttgtccatcagaatgtatctgtcatgtggctcacgttctcagaattttgctaaattgatgatctcattatatattgttaaggaatgctaatggtttaaagtgcatccaacagccttctgataacatttgcatctcagtaacaacctttagtggagtgagtaatgtaggattttgaggccccttagggtgactagccatcagggtttgcctgggactgtcctgtgtcctgggaaacactgaagtcccaggcaaaccaggaaggttggtcactgaagcctcattgggagcctttttttttttttgcgacagagttttactcttgttgcccgggctggagtgcaatggcgcaatcttggctcactgcaacctccacctcccgggttcaagtgattctcctgcctcagccttctgagtggctgggattacagccacccaccaccatgcctggctaatttttgtatttttagtagagacagggtttcgccatgttggccaggctggtcttgaactcctgacctcatgtgatctaccagccttcgcctcccaaagtgctaggattacagccgtgagccaccgcacctggccttgggaggcattttattataataataataataacaacaacaatagtagcagcagcagtagtaataataatagctaacatttatgtagtgctttgtgccagtgctgttctaacttctttgtatatacacacacgcgcacacacacatgtaattcttttttttttttttttttaaagacagggtcatcttgctccatcacacaggctgaagt

SEQ ID NO: 3232 - DNA, 1283 bp, Homo sapiens
acctttcaaacagatattagcaaggttttgaatgggcttatctgtcatcttattaaactaatttttgaatattctctcattccttgggagagtctctgcctacagacatctctttctttctaaggtaatcaactgactgcttccttgtcctgtttgctcactcagttgaaattgtgacttctggtcagagttgtgcccatggtgtattagatagaatcagaaggtaaaagggatcagaatgtgttcactgatcatgagattaatcccagaatttgcagaactctttgttaaaagattggggggcactttctatgtcacaggcactatggtaattgttaaggaagcaacagtgcacaagacccggtccctgttcctcctggagctcacattgttgcctgagtgaggagggcgaaccgtgggaaatgctgtgatgtggtggcacctgagagaccccacagcagggatgtgtaatctctaactggagagggttgtgcttttggtagggaagtgaggagatgtctgggctgacttttgaataaccagtaggaggaagttatgcacagggaattaggtggtgagatagtttttgaggagcaaggttcaatgtgctcagaagcctaggacaagaagtgcaagaatttgatacaatgagatatggctggagcatgtgtgaggaaattatggcaagagatgaggctgggcacaccagaagtggcttgtaattttttcctgaaagaattcaaattttatcttaaagaaagggaggtgtcatggatgttgtgtcaacagagtcatctgattggacttgtagaatattttggtattcaaatggaaagatatatgggacttgaggggtgggcacagttggatgcagaagactggtaaggaggctgtcacagggaacaaattgggagagcctcaactgtagagactgaaaaaagaggagaggttcaaaagttgttagggggaataccaacagaacataaagtcagtggagagggggaagggaagcatcaaggatgattcctagatttccaaattggacaactgggtgggtagtcactctgttttagaatataaggacttgattttcgaaggagatggaggtgagttcactattgcacatgttgagtctaatatatgtggaccatgggacatctgaggagaggtatctggtaggcagttgaatatgtggttgttgaacttcagacctgtatttgaactggatgtgtttatttatgaatcatcagaagatggaacgtagttgaagctaagggagagga

SEQ ID NO: 3233 - DNA, 1150 bp, Homo sapiens
ccacaagactaggcagcaagggaaactcgtgatccgggcagccaacgattgtgcctgcctgcgggttttcttttcttcttttgttttcatgaaaacttagaactttggcagaggactcgagttctagatcaaaaatcggttttctgaggtgtgctcagctacaggacgttcaaattgcctgccttcaggccttgaaaaaggaatggtttggtatgggaagtgatgttctggatggcaggttagctgtgtgctctttgggagaactgagctctctctcccgccacctggaaactctggtgtggccgtcggggagacagatgaggttgcttgtgttgctttgcatctcctgtgatctcccacagctgctcccaccgttgtgcaagatgggacactgaaatgaaacggcctaggcataactctcaaggcggcctgggtgcatacttgacctgcttttccagagacaaacgtttttcttcaaaaccctcttcctactagacatatggttcttacctcctggctctggctttttttcctcctggctctggcttttttgtttttccatccatgctgtggtgctctgtgtgtgtgtgtgtgtgtgtgtgtgtgtgtgtctgaatacttgtggtggaggagccagtgacacagggaaaccagtgcagcagccataataataacaataatgcaattaagttctgcttgactaggatagcatttttttttgcttgagctttcatttaccctgctgattaataacacatggtgtgaattaatctttagaaaaataatgtcccatcattaacatggtggatttgtgttcttgttaaggctagcagttgcaaatatagtatttagacaattatgattgtacatcccaagcttcttggggcagggttgttgtggctacttttacactactgtgtgtcgcagttactgggtgcaattccttttaaaattgtttacaatattctaagcctctcaatcaagaaacaaaaacaataccaggctgaccttttattgagtagagacaaagcttttgggggaccaggtcagcttgggaaccctcttcctagggacgcatttggaccattgatgcgttccttgtcccaggtcagctccacttgctctttgacaatctgtgagaggagttgaa

SEQ ID NO: 3234 - DNA, 1182 bp, Homo sapiens
tgggggcagagtttgaatccaggcctgcctgagacagcctgcttctttctactgcactacactattatgttttctgagttagctctaagatgtcattaaatgtatgcttcttgttcgttcttcacataccctctgtactaaactcattatttcatacaatagctgctttgaatgagtccaacttgtgttatatgctgcaaaatctgaccttaatctcaagggactcaggatgtagctggggaaacaagcaacaataagcaacccagagagcttcataatcagtgtagatgtagatatgctaagggtttggagggaaggtgccttttctgaattctgagtgttcagaaaatgtttccttggaataggaagtaggtgagattctagctcagtcccaaccactgctgggctgcacttttcattctacattgtgcatttttgctcctttggtgcttatatgctttattcagacagtccaaaaaatatttcttgagcgtttactgtgtgccaggcagtgttgtaggcactggaggatgctgtactgaggtgggatcgattgaacgtctgctcccaaggaatttacattttaatgggagggcgtagagggggaagccagacctgaaggggatgcacaggtacagaaatggagcgtttagatggtggaaagtgccatgaggagaataaaatgggatatgtgaagtggtgtcatcccgataaggtctgagtgaggaggagcaggcagctagtgtgatcaggtaagagccctcgggagggaggagtagccagagtacgatttgtttctccgtttgctggttcaggagcagtttccagggaccctggagcaagtgaagggtcattccacagcatatgggatatactcagcccagacagcttcagaccttgcccatgggacagcctcaaggtggaggctcaggagtctgtcccctcactctgttgtcggtaacagagccatttcttataggtggttttgtgtagtcagagttctgcctcttgttaaattcaggtgattttcaaagaaatgagtatttcagaattgccattgttctagacccatgggacagactgtttgagaatggactgtttgatcagtgtgagctgtgccctaaatgcaggcactctgaaggccagtacttagaatggctttctttgtctgcttgaagctat

SEQ ID NO: 3235 - DNA, 1409 bp, Homo sapiens
cttccctaagtactctttctgagttaaccaattgctttttaaattatagctttatcagctacccctctaaaaatcatgcttcagtagatttttttatagggtgtacagttctatactttgaaaagctcctggaataattatgatattgcaaacagattttatcataacacttttcattagttttgccatatgcacgtcctttgttttatcctatgacatgtttcagaatgtcttttattgagttctttgtgaaattttccttaaaactttcctatgcagatgatcacaaatcatatttgagtttaaatacaagtttgtttgtttgtttgtttgtttagagacggggtcttgctgtgttgcccaggctagtcttgaactcctgggctcaagcaatcctcccacctcagccttccaaagtgttgagattacaggcatgagccaccacaccctagcctaactacaagtatttttgacaggtgattttgaaattttgggggagctaatgcaagtaaactactttacttgttgacatttgacactctaaattttaactggcaaatactttagatatggacaaagaagatgcattaatttgctttgaagaacacattcgggctttagaaaaggaggaagaagaagaaaaacagaagagtttgctgagagaaaggagacgacagcgaaaaaatagggaatctttccaggtaaaagaaaaagctctctttttaacttagttttatattatatttactgaactttgacagtgatacaaagagttttgagacaactgttcccagatcatagacttaggctttgtgaggactcatacacatttaactctttaagttcttcagatgaacattggtaaatgaggtttcggttgggaaaaacaacaggagagatgactggaaacaagatatgtgtggtgagtcagtagtagatgatatttagtctctggaggacaaagggactgctaaggtatagtttggggatgggccataatttcttaaacactaagaaaaggacctgggattgcatgttttttaggtagtagttcgttttcatcttcaagtatcatttttattttcagtgatagaaaatatcatggagcaatgaattttttgcatttcatatctcacctatttcaataattataatagctaatattctttgattgcttactgtcaatacaatttacatttgtaatctcaatttttatgacagtcttaccttataagggtacttactgtttttgttatataagtttatataactaaggaaatggagaggtgaagtgacttgcccaagttcaacagctgctgaatagtgaagccagaatttgaatccatgcagttttgattacagggtctcttccattaaccattgtattaggataaatgctaggttacaat

SEQ ID NO: 3236 - DNA, 1196 bp, Homo sapiens
tggacctgaaggaggggcgcaaggggttagagtggagggcaccgcagcaggctccccttgccgggtccgagggcgctgcgctgctgcgaacctgagcgcactgaggctgctactctggacagcgaaagctgcgcaagcccctcccgcatacccgattctttgactatggttagttgaatttccaggaggagagtctgcctccccaacctttatagccagctgcagaagaacggacagtgagcaggcaaacatagatgctttggggttcagggaaactaacctcgaaagggtgggagctttcttcaggcaaaggtgttgctagcagaggagaggagctttggggactgaggtatgcctgccttaaactaccatgcattcattgcttaggaaagcggtttccttggagagatcgtggtcagccttccctgaaacaacataacaacatagaggttttattcgcaaggctaaaggcacttggctgccaaagcccccttgaaatttctggtatccttgaatattttcagctttatgtgaaagctgcctttcctcagagtctcagtccgtctctctctctttctctctctctctttttctgtgtctctctctctcgctgtctccctgtctctctctctctgtctcgtttgcgttcatgccctctagtgttaaagaaacctgctggttcgagaatattgaaaagtaaggtcaacctattggttatttacttttggacctctcaccttccgggataattctccttgtattacacgcatcctttccttttcctcaaagaatgacttttgcattacattactaatctttctttccccccgcacccccctcccgcaatctctgttttttttttttttttctttccccacgtctcctgcagaataagaaccttcatattgaaaccctgttcgtttgatttgggaattggataggtctggagaatttgcgtagcctaaggcagactttgaacattaaaaagatgcatttctctgcactgtttgccataaaccaggatttcacatctctcctttagcccctatccaccttcaattccatggagaattttcctggctgcttctgcttgtttaaataaatgcttttatttcaccatttctgtgatgcttatcccattccagggcttaaggtacttgcttaagtaggggcactgtgtctcggatccgctttgg

SEQ ID NO: 3237 - DNA, 1180 bp, Homo sapiens
gttgagtatttagcaaaatgctttcaaaaattaataatctttaaaaaatggaaataaaagctatagaaaacaaaatttacaagcttgaagatcaaattttcaattccacaaatacttgattgattagagagtgggtaacaaaactgtttaccaaattgtccaccaataaaatgggaatggacagattttatctctactcagtagaaattattgtaattaaagggccatgttgtacagagacaactggctataatagaattttgtccacttctatcttcatcacctaaaacagtgcctggcttatagtgggtgctcacttaacaattgctgattgaataacgaatgcatgataagtttggtaccgttttcatgatcatagagtagccagtttatatatatgattaagaaacttgatgtaacttcattatcatggcccaaataggcttaaaaaattgtttaccttacacacaacccaagtgtaaaatattttcttgtgtctcttcttggcccatataatttgatttatagcccaaattgggcacatttatagcctggagatgatattttttccttcagaacctgccttatgttacattgtatatactttcactttctccacgatatacagaggttttcataagatcattgcatatttacattgtagtagtcaataagtcaagagagtaaagcgagttctagatggaatagacgtatcatgtggagtatgtggaatgaatcagtacatggaggactcagcaggagcactcatgaaaataagattgaggaactttgaaaaagatggagataggtggtatgtttgacttatgtgtaaaaagcagctaataaatggagacaatagcaaatgaaaataataaagtaataatggaaagttttaagagtgagaaattcaatcagaaaggaaaacaactgagagtaaggtgattacattgtagaacagaactcatggtttagccaataagtaaaactccatgtaagtatagctttgggaataattaaggaacttatttccaaaatcatctttattaaggtatattataaaaagctccattttaattttacagtttcatgagtttggacaaatggatctcagatttaatctcacaatcatgactccctctgcacaatgtccctcatacctctaggcagcccattcctccac

SEQ ID NO: 3238 - DNA, 1163 bp, Homo sapiens
ttctccaaagaggaggagcattgttgtctttatgtgccactataaatcctattagtagtggcattaattctattaattaggacagaggtctcactatctaaacacctaaaagtcttcacctccctatacctccatactgggaaacatttagaccatagcatatggatggagtacaattatctttattcttgcactggctggtggacatttaggtcgtttccatcttttcattattatgaataaagctgctacattcatacacaagtctttgtgtggacatatgttttcacaactcttgggaaaataccaaaggatggaagtgctgagtcatatgccaagtgtatgtttaattttgtgagatactgccagtctgttttcccaagttgttagactattttctattcccatcagcaatgtaggaaatatctagttacttcacatccttgccaacacatcatagccagaattttaaattttagccattttactgagttaattgtggtatctcattgtgattttgacttggatttcgtgataactattgatactgagcatcaatttctctctctctctgtctctccgtctctctctctctctctctctgtgtgtgtgtgtgtgtgtgtgtgtgtgtgtgtgtgtgtgtgtgtgtgtgtttggccagacttgttttatgaactatctgttcaatcttttgttcatttttaaaattggattgcctgtggcttgcctttttacttttctaaatgaggtctatgaaagagcagaaatttttaactctgatgaaatctaacgtatttttttatgcttcttttattgttctagctaagaaatattttccaatgccaaggccatgaaaattctttctggaagatttatggttttagattttaagatttgatttaattttggtgtagagggtgaggagggttaaagttccttttttttcccccccaaaagaaaccctccattcattcaaaaatatatgccccttgaagataagaaaggcatgagttttagaaataagaacagcatttttggccgggtcctagtgactcatgcctgtaatcccagcactttgggaggccaaggcaagggaattgattgagctcaggagtttgagaccaacctgggcaacatggcgaaaagccatctctacaaaaaat

SEQ ID NO: 3239 - DNA, 1195 bp, Homo sapiens
ctgggtgacagagtgagactgtgtctcaaatatatatatatatcctccaaaataaacctgaaaacataattgcacagtatctctttagaaatactgcataaataaatgtgccaaatatttatctgagttcaatctcatactctccttgtgttatgaggggctagaattttaaattatatttcttggactcccttgtgaactgtttgctggttagattctgccaaaagaaggcacttgttttggactgaaattttataaaaagtataggccatattgtttctgcatagcagaatactggaggtagccatttgctccaacaatggggaaagccagcagcatctgtgggagagtggacttcaggctcctgcagtatcatggtgtgcactcatagctgcctgctaggaagccactctgatggcaaggaagccacaaaaagagctgtgagtaacactactttctatttcactctctaaacctcctaacacttttatagccaattcatctattaactattttttcactggaaatacctagagtggtttcttttccccagtgtggactgatataacacaagataaaaaggaatttgaagacttagggagttatataaaacagatgtgaaatctgaataaactatgacatacagtgttgttaaggccttgagaattactctcaaacagaacttactgcagatagctgttagttttaggagatgtcttagtctattttctgttgctatagcagaatacctgagatagggtaatttataagagaagagtattttttttttcttatagttctaggggctggaaaatccaagatcaggcagccacatctggtaggcttccggtaagggtcttgtgctgtgtcataacatgatgagaggcatcacagggtgagaaggcaggaggctgccacttcagttttctcttcctttacttataaagccatcagtcccatcatgggagccccaccttgatgactttatctaaccctaattatctcctaaaggcctcaccttttaacatcattataatggggattaagtttcccacacatgaaatttggggtgcatattcaagccatagcaggaattacaataattggaatttctaactccctgtatataggcttttcttatactttttctattatataacaaattggtttgggacagccctagtaagttatcaca

SEQ ID NO: 3240 - DNA, 1190 bp, Homo sapiens
ccatttgtctctacagatatttcctgtaattgaggaaaattatattaacaagttcaaatattttgggttttcccctttcattacaattctgctagatactagaaaaatacattaattgcttgactgtgtaatatatgtaccaaaagagtgggttaatgagagttatcacacatgaggtgaaatagttcggttatttcaataagagcaatgacttttttttttaagcatcaaagttcaaaaataaactgttcagtaaattcatgtttgaggcagaaagtttcaatttacataacttgcctgtcttttctgcaactctaaggtaatattttgcataaaacctgagttcatttttggtgcttttgtagtgatgagagtccttaggactgtgtaatctgggacttgatcctcctcagtatgtgcctccctatcagactgcactaaacccaaggccctggactgtctgcctgcttctgtcctcaccacccttgcagattctctttgagttctttcacaggatcaaactcacactcttttcacactaaatactaaatttttgtacgtctgaactcctccttttcttttctttttttttttttttttctattctatttaaagacagggtcttgctctgtcatccaggctggaatgcagtggtgtgatcatagtgaccttgaactcctgggctcaactaatcttcccacctgaccctccccagtagctgggactataggtgcatgccaccgtacctcgctaatttttttattttttggagagatgatgtcttgctattttgtccaggctggtctcacactcctgggctcaagtaatccttctacctcagcctcccaaaatgctggaattacaggcataatccatcacatctggtcacctcctcctacttctgcagaccatgctgctaaataaatatctgcgtgttgaccctatctccgtagaacgaatgtttaggtcctagggactctctctctcaaaaaatcatttgtgtaaaccttaattctacttaaatacatctataaagtttttttttttcctaaggaatgtataaagccagaaatacactggctaccaggctacttctggtcccttattccttaagcctatagtgttatttcagaacttttgtaccttcttggctgggcgcagcagctcgtgcctataatcccagcactttg

SEQ ID NO: 3241 - DNA, 1170 bp, Homo sapiens
ctgttaaagttacatattgccttccctagaaacctcccctgatgcttcctgccttctctttccttcaggggtaagtaatcccttagcgccttgtccttatttttatcatttttgtttgtgttagaatgcttctctctaagccattagttttttaaaggcagaaaccagtaagtgattcatctttgtttacccatggtctaatacagtaggtgcccacaaatgtttgttgagtaaatgaaaactcactgcatatttgagtttccatattgcctttgtttggtgaaatctaaattatatattttttgcttctttcttttaacagtgcaggaaatttttctgatgaagtagtagatgagtgcagaaaaaaactgatgtccatgtagttatttaggatgggaaacagacttcatcctgtgttcttttccttctactgagtgacttttactgcttgatttatccagtgattttgctcactattgccattgttttttggtgaattgtaatcattaacgttttcagtggtacaccaaagaaatgcaaacaaatgtgattttctggttgtttaattgggcattttctggtgcccacttagaattgtgggattggggtatggagcattctagaatgttggtgaaaagtctagtcctttaggtttcttcaaatgttggtcttcttgggccaggcgcggtggctcacatctataaccgtagcactttgggaggctgaggtgggcagatcacctgaggtcaggagtttgagaccagtctggccaatatgacgaaaccttgtctctacaaaaatacaaaaactagtcgcatgtggtggcgcacaactgtaatcccagcttctctggaggctgaggtgggagaattgcttgaacttggaaggtggaggttgcagagatcacaccactgcgctccagcctgggcaacggagtgcgactctgtctcaaaaaaaaaaaaagttggtcttcttgatcctacatgaactaattaattctgtattccaaagaattaagataatgcaaatcagatggcagcagaatgaatcaagtaagagtgggaagggcaaatgtgaaatgagggggcaggagtgagtcactcttttgtgtagatggatagggaatgctggaaaggggagggtgaaggtgggttgggggctgtgggagag

SEQ ID NO: 3242 - DNA, 1177 bp, Homo sapiens
ctggtaataccttgaatgagagctccatattttccccaccccaaacatcaaggccagggtcgtatgttccaagttcaaaaaagtaacttttgtcaatagaaaacaatccaccagccatgacagggcacctacaaaaagaaaagtttgttttttaaacttgcatctcatgaaagctcgacttttagagttgttcctctgtacatctgtacgggaggtaggaggcttttcagaatagctacctgatgcagggaagccctgggatggagtcacaaatagggcttaagtgatgcgatccctggatcatggtggcagagctagattaggttcagcaaagatgcatcctggaactagtattatttgtcctttatactgtgacacaaactgtccaggaatgttatttttaacacttattcagggctaagggagtatcaggcactattgtaagtattatatatatattccagcccagacttcacaaaaaatcttgtgtgtgcaattattaagaatctgcaacactggatgtgagggcgatctggctgcaacatctgtcagcccattgattgccagggttgattcggctgatctagctggctaggcggctgtctccttcccccctcaccgctccatgtgcgtccctcccgaaagctgcgcgctctgtggaagaggacgaccatccctgatagaggagggccggtcttccggtcttctggtcttccggtcttccggtcttccggtcttccgtcaagggtatatgagtagctgcgctctctactagaacctccaagcaagcgctcaggaattggcaacacggagaaggtaagaaactttcccaaggacagtagacaccttgggtttgctctgggcagtctgaggggacgctgtgccactcactccactgtactgcctctcagccgttactggaaggaaggccgtgagagtgagttgtccaggttctgggtattttgaacaaagagttgaacaaaacacactaacaaaggaacgaaacacatgaacgaagcggcacaagcagggattcgttaaagcgggaaagcgctccacagggtgggagtgggccggagcaaacggttcaagggccgggttaccaagttttctgggtttcaagtactcctttcgaggtccctaccagctgccccttatctggatggaggatttggtt

SEQ ID NO: 3243 - DNA, 1255 bp, Homo sapiens
tgtcgatgcaagaggatttagagcttttgttgtccatctttcctgctaagctctggtacctccctgataacagacctggtcaccaaattgatttaaaaaaaaaaaaaaaagacggcaaacaaatgtgatatttacaagaaaaaaaatactagaatattttagggggttaaaagatgcataagtaaagtcgatgaatttttcttagattttcaaaaagcttgtaacaaatttccacttgttatttttaaaagaatgctgttgagttgtaaatggtaagaatagctaatttgtcatagaggattgaagtttagaaaggggaaatagcaagttgggataagcaggcatttttctggaggaagaagtacaaataggattcctcaggagtcaatgtggacaataattttaaacattgatttaatctgtcttaaggagggcatgagtctctgtaggtttacagtagcaaatcccctggaagactgatctgaccacctcctgtttattctccttggctctggattctctcttttgtgttcacattgctggtctttattttggagaaattctttagttggatgttagggagggttgagctgttcatgtatctccattgatggcatttgtcaggaccaggtcagtgttttatttctttatccccatcttctacatctacctcccacggccgtaggcatttctaatgtgtttagtgtttttgtttgtgtgtactcttgtataatatgtatgttgcattatgtaaatcattacataaatgttgttattctcattcagttaatatttttcacttagtttattttaaagatatgtgtccctgggtggtgtctgtgttagcttgttgattctgactgcagttgagtatttcatgatatatatccatccagttttatctctcccctccttctgtgatggttatttagattgcattcacctcctcaccatcgtaaaaaggggtgcgtgatcccttgggacctgtgtgacagtttctgtgggaaatatgcctagcaccagaattgctgcatcatagactatcagtactcttactttgcctgagctgtgcggtgctgatactctctagaatggctgcatccatctatatgtctccacaacccaacacttagcgtggttcagtctgccaggtgtaaatcaactcattttcagtttgtatttctctgactacttatgaacttgataatgtcttcatctgcttgttatctttttttgggtatcctcttctgtaaat

SEQ ID NO: 3244 - DNA, 1199 bp, Homo sapiens
ggtacagctgagcacagaccccgcaacacgccgttcatgggcatcatggataagactgcgaggttccaacagcagagcaatcctccaagccgcagctggcactgtccggcaccagaggggctgctgacaaacacgtcttctgcagctggcctgcagtctgctaacactgagaagccctctctcatgcaagtgggaggatataataaccaagccaaaacctgttctgtttctaccctgagtgcaagtgtccacaatggggcacaagtgaaggagctagaagaaagcaagtgccaaattccagtccactctcaagagaacaggataactaagactgtttctcatctgtaccaggaaagtatctccaaacagcagcctcatattagtaatgaagcccacaggagccacctcactgcagccaaaccaaagcgatcatttatagagtcaaatgtgtgaaccttaagaaatccccatttgtggaatttggaaacgtgtgttgactcctggtggtaaattaaatagtttttttcatcagaaaaattattttttagccattttttttctttggggtggatctgatgccattgatatatctaaaatgtgggataaaacttctttaatagctagaaatcaccataaataagaatgctaaacagaattgaaaattatatcaacttaaaattttaagacagcccagaagacattaatgactctcacttatgaaattgtttggcttttgccactttcttccttgcctttgctatatggtagaatcacagaacttacttagagaataaatatgtctattgttcaagagtaacaggtttaactcatgaccaagtgatgtacatccaagtgatgtattctggaaacgatggaattttacagttacagttccattgagtcaaatcccattttatatatacataaaaattaagttctgagtgagttctagctaaatataagtgcgactgtaaacgcagccaatttttttaagcagaatatgagaacacctaagtattctcttcatagcagttcctataaagggattaaacacttatttctgtgttatggttcttattcatatatttttatagcacttttggaacctatatttgtgcttgaaggtgtttttgatatttggaaacagtataagccatttggagtcatgattggtggtcaagtggattcaagctaaaata

SEQ ID NO: 3245 - DNA, 1167 bp, Homo sapiens
gtgacaggcattgaaagtaaccatcagttccagagtctgcatttatcagtctaccatcagtgatgagcataacctttttcaaacacatatctctttaaaacaagaaacagattacaaagctctgtagtgtttcacaccaaatctacaaaagcatttgtcttttatttttctcttccagatgtacagaaaggtgttcttacatgaagaagggtgtgaaggctgaacaatcatggatttttctgatcaattgtgctttaggaaattattgacagttttgcacaggttcttgaaaacgttatttataatgaaatcaactaaaactatttttgctataagttctataaggtgcataaaacccttaaattcatctagtagctgttcccccgaacaggtttattttagtaaaaaaaaaaaaacaaaaaacaaaaacaaaagatttttatcaaatgttatgatgcaaaaaaagaaaaagaaaaaaaaaaagaaaagaaaacttcaattttctgggtatgcacaaagaccatgaagacttatccaagtgcatgaccggatttttgtggttttgttcattttgtgtttaatttgtgttttttttttccagctgtatgaaatgggctttctgaagtttaaatagtccgacttcacccatggtgttctgtgcttgcagtgcgagtgttgctgtaattcagtgttgccgtcagtgtctcttttcttagctttctgtctttctttcaacgtagtgtgaagtgtcttatccttttctatgaattccaatttgccttaactcttttgatgctgtagctgtttcagtaaaagttagttcaaactaatgatgtagaatgctttgaccaaatgagctggtctattatgccttgtaaaacagcagcatagggcttttaaaaggtagtcaataaaagttgctgaaattttggcttttttaaatatgtagtaggtgtttttaatgatttttcacataatgtgtaaggtagtgaaatgcaagaagggaaaaatgttttgtgtgaaacacattttctgactggggaacttttattagggtaaattgtttgtaaggctgtacgccaacagtttcctctgatagtttgactgatttaggatatctgctgtatgatgcaatgtaaagtcttttttgccttttttcaggaaaaa

SEQ ID NO: 3246 - DNA, 1153 bp, Homo sapiens
cactttttagacaagttaggatttttcattatcatggcagatgagcctttccaggaaggtattaagagaccagaaaccaaggaagaactctgtagtatttactgcagcgatagtattctgtaaaagtcaccgtggaacaggccaatgtgaaggatggcaagcccgtcccagtggcttatccagagaccgcaggctctgtcagtccgggctgctgtggaggccttctgcactgcacaggttcggggcttcatacgtccacggaaaggtggtcgagaaaagggacggcttgagcagccgtaggtcatttacatcgggaaacaaagggaagtccctcctccctttgtctcttttttgccgagtttctgtgtcctaagaaaacacatttgtgtcgcatctaataattaacataaggaaggattacactgttccaggttttagggagaaaggtttaccaaaccggtggccttaaatgattttcgctccttgatattatcatcttgaaggaaagctggtaaactctggcttagggataaaacaaaactttaccgatcgtatttgggtgaggggctggggagtggagagctgtttcctctgctaaaattttagcgtgtgaatcgggggatggagatttgcagaggtttgacgggagggtcgtgtgttcgttgaagtaggggtgattgtccacaccttttcttgaagagtggcgcggggggcctagttcgaaaggtgaagaagagagggaagaccgaggtgccagagtggtccccgaagcgacgaccttaaaaggggcttcgagccggggtgcaaagctgccgctggtgcttaggaaagaaccgagggggaaaaagaacagaggaggggggttggctactccgaggaatgtgcggcatgcggggagccagacccaaccattgcaccagagcgggggcgccggctgctccccgggccgcccggccccggctccggccccgatcccgggagggagagcgcgggggccgggcgggcgatggggcggcaggcgccgcgcccagcgggcgggcggggaggcgcgggtgggcctgggcgcggcgcgaggcggtgcgctgccgcctccccgcccccggccggcgcgctctcagggcggtggttgaggccgcggtaggtggggacgcgg

SEQ ID NO: 3247 - DNA, 1220 bp, Homo sapiens
tcagtttaagataaaaattatgttcttcaggccaaagtgtagtgactcaaggggatgggaaagagaagtccacctatacctttttggcatgatcaggatcatctgggagctttctaaaatgattggtatggtagtgtgtcattgttgctggtgaaggtggtcttatcacttagcttatactagggcagaaagaaggttgcagagtagtatcacagaatggcccctttggcccttttatgagttgttctagaatttctatccttcatgatttgtctctgtctacattcatcttttgctctgaccttctcatatctcaaagtagccatattatactctgtaagtcctcaagtttcccataccattctgctcatccattatattactttttgtagggtgttctctgtaaaggaaagccctttgcccccattgtgtattaatgaatttactactttctttctagactgcttaaatgatcccttaccctcctctttcccctggaagtcttctatggtgtgctagtcaggaaaggttgattatgtttcaggaataacctccaaatctcaatggtttaaaaccagaaagctttctttttcactcatactgtatgtctacatgggtcgtctgggtgctctgttccgtggtatcattactgtgggactcaagctgatacagcgctatcattgaacactgactccttaaaaagctttgattgaaagtgacatggccactctgcttacattttattggctgaagagggtcacatgttcatacctaacctcaagaggttagggaagtgcagtcgtactatgtgcctgagagagcggaaccagaaatatttcagggagagcagcaattagtgtctctagcctgattagtctctctacttcatatatctatgataatttgtaaacctctgtatctcactaaattgaaattataataaacgctgtagtaattcagaatttgatgcatttggtgattggctcaagacctctgaaattcctagacaactggctggacaaactaaccatagccatttcattaacctcacaataatgaaatccttgttttataagtttatatcagtgattttcaaccttggctgtactttagaataacttggggagctaaataaaaaaagattcctgagcctcaatccagagcaattaaatcagagtctctgagggtgggcccaggcatcagaattttttaagctctcc

SEQ ID NO: 3248 - DNA, 1220 bp, Homo sapiens
actacccgttttcttctgtctctattttttaaacaaatatgttaccatgctgtatatatcatttgaaatcattatgtttaatggagcaaaatatcccatttgaattatataataataaatttagccaatctacctatagttagttagatgtgaaaatatcccctccatttttttcatcttttataatgtatgtttgaatatgcttctctctatatctctatatattactttattctgcacatgcacacacacacacacacacacacacacacacgccaaaaactatgtatatgcagttgtctacatcactgtttcaaagcattcattttgctgaaggaaataaatactgcaaagttggaacttccttccaaattgacttatatctattgttattgctatttttaaatttattagcaattccaatacaagtgccattgtagaatttttttaaaaaaactgattaaataaacctaaatttcatttggataaattaatggataaaaaatattttgaaaacaaaaacataattgaagatgaatactggtgacagcaggttttagaaggtattgtaaaacaaaaataattaaaacagcgtggttttatagtaaggattgacagataaaggaaagaaattcctaggaaatattgtctagcacacttaaaaatttagtatatggttaaaggcagtatcacaaataagtagtgacactaatgaatgttcaataaccagtgcgaaaatatcattaactctgtggaaagcaataaacaaaaacaaaaacgcaaatcccatttaagttattgagataattagaataaaagatgtatggtgccatctagtggttaaacgtgtaattgcatacatactgttctatgtagagtctaatggcagaaatttaaacctgatggagaattgaagggaggtaaattattcattaataaaaaggtttacatctcacacttcagcactaatttaagaaaatatttttaaatactgactgtttccgagaatattataaacggtagcctatatagtgatcctgcatgaacatacaagaaattgcagttccagacattcacataaacaagcatgccaacctgtcagacttttttttagtaacacaatgaaacaaaagaacaatttgagtaaaagcatgctgattggaaattcatacatgagagcagagcctgccagcagttatagttttgaataaagaacacca

SEQ ID NO: 3249 - DNA, 1177 bp, Homo sapiens
cgctaatatactaacattactaaagctatgaagttttagtagatatatggaaatcacatagaactgttaccctcaggccctctgaattttttcagtcagctcaagatttacacaaggcaattcttcatttttgataaacttctgaaggctcccgcagtagccgcttaaggttcattaaaatgtaattaattaatgatttgctgctgaatagctgctgactgcggttttcttttcacttgtcggacagcatgagtcacacagttgccaagccgacaaggaaactatttgcagactatagcacctattgatgagtgtttcaatctgcagtcatttgcataggaaagatgctggtaggggtgtagaccatgttttcagtatgaatgtgagtgacacctacaatttaaaagtgcctcagacggtcataatagtaacattgggctcacgatgattgtttttaaaatagccttaaattttaactcgacataacagactgataaattcctgcattcagaaaggcaattttatttagatttttacaaaaatgtaaaaacatatatctaggaattaaagatttagttcgtgtgtgtgtgtgtgtgtgtgtgtgtgtgtgtgtgtgtgtgtgtgtgtgatttcttttgtggagttaccttgttaaggaaatctccatttttcctatttactttgaggggacttcaagacttccttctctgaaaccccaagctaaaggtaaaaatgactagcatcctcagtgtttggaattcctggccccccaggccatgagcacagcctgtatatttaactctaaggaattcacataaaatactgacatgtttttattgtggatatagggcaactattccgaacttataaaattaactgctttcaaatatttacagggagaggaaatacggtttaacctcttctccatttgcgatcttcactggtgtttttgctctactaggattttatggaatttacttattcacaatgttatgctttaaaataaaaattaaaaccccaacatattgtttatataagcagattttatgattccgtctctgtctaccacatttcagagacatggaatctgacaactaggaatttagtttacattgcatctgaaaagtggtgcacaggcattttgtactttaaatcagaaataggacaaatgcattag

SEQ ID NO: 3250 - DNA, 1208 bp, Homo sapiens
ggaaagtactgtttattgtttgaatatgtaactgtaggttatctcattattctagacattattgtagagtgtttgtttcagtgaattatggtacaactatggctttaatatgtgtttcagaaaactgtgagagtagtgattaattttaagaaaacacagaagaccatagtgagagtgagtccacatgcatcgcttcaagagcttgcccctattatatgtagcaaatgtgagtttgatccgttgcatacactattgttgaaagattatcaatcgcaggagcctcttgacttgacaaaatctcttaatgacctgggactaagagaattatatgcgatggatgtcaacagaggtaagtaagacttttattttatttatttagtgggatgtgtatatttgtatatgtttgtgcattgtgtttgtgtgaaggtgttctcaagttcataatggcagttaatgggtcctatagataaaagtaattacttggcattaggaataagaaaacaaaatgttaataaatataaatcaagttaaatataacaacttaatttcagttattgaaattggaattaaaacttgtctttttagccatcatccacaatttatattttttctttgatttttttttttttggtaggatttaacttaattcttcatggctttgaggcttaaacagaaaataaaaatttacatataaagtcattgttattctaatcaagtgtgaattactgtggactcactatgattttgtctgagtcttaattatcattcaagtttggaagtttcttgccaaatttttcctaaggtcaacaccaaaataagttggcttatgaaatgtatcagtctaattcaaaaaatttttgaaatagctcccagttttaatctatagaaatgatgtattaaaatttggagatcttagataatgctggtttgtatgatgtctagtagacaaatgcaaacatttattcaacatgaatctgtttcactaagagaaataaaagtttagtgaagctgacaattatttacatactctttgcatagagacttcaaaatttatcctgaggtggtggctttatgtaatccatagactactttttcaactcagtgatgttttatacttgaacaaacatcatcttcacagtcaatttaccctcttttatacccctccttctgtagccacttctgttactgtcttcagtaagtcatcttta

SEQ ID NO: 3251 - DNA, 1178 bp, Homo sapiens
actgtaatttgaggtcaaggtgacctgcacttacaaatatcatgggtttttttttttttcaccatgttagttttatcgagaatttgctcccttttaaatgtaccaatctgtaatttcttattcattagagtcattaatgactatgtgtatacaatgcaaatcttctaagttttttgctaacaaaagagaagggaataagacaataaagaatagtgtgagtctgcatggaggatttattatcttaaggcacaattatactgcagaccattttcggttgtacagcaaaatctttcctacttataaataggaattttaaaatatttattcaggtattttgttataaaactgacctctgaccctaatgaaaatatgagacaagtttcagtagcaaaaaggaaaaagacaaggccctttccttaatataggctccatgaagaacatgaaccttccattactctatctcgacataatgggatatgaatcttcatttcattgtttaaatcattacatttctggagtttatcttcataagttcttccccttcaatgaagtgttgcttctccactagcgttgcaaacattcttggatttatgaatgaaatctatgttttcaagaaaattgtgtgaagcttttattatttcacacgtgttaagtcttcatagtaatagacttctttctttcaggcctgaaaaccattgtgggagccctgatccagtctgtgaagaagctctcagatgtaatgatcctgactgtgttctgtctgagcgtatttgctctaattgggctgcagctgttcatgggcaacctgaggaataaatgtatacaatggcctcccaccaatgcttccttggaggaacatagtatagaaaagaatataactgtgaattataatggtacacttataaatgaaactgtctttgagtttgactggaagtcatatattcaagattcaagtaagaattattgttatgtacatttccttaaaaagtagaattggattgtttgtaacacaaaggataaatacttgaggggctggatatcccattttacatgatgtgattagcacacattgcaggcctgtatcaaaacatctcatgtaccccatatatagaaacacctaccatgtacccacaaaaattaaaatttaaaatttaaaactaatgaaataaataaaacac

SEQ ID NO: 3252 - DNA, 1187 bp, Homo sapiens
ggttgtgcaaccggtgtggcccccatggcccagggttctttgcccagcagacagttgtggggtctgcgcagctcacgctcccccaaccaggtctctttccggggtctgccccagtagctggaccaaaccagctagttttgtcccaagcattctgcacccggatcactgggttaattgttcccatctgtggggctccctcaggcagagctcgcaagcaggctacacccttcccgggctggtcttgtggagggaggcacacccagctccggcgccggcccttgagcatatatgcctctctcagtgctctgagagtgggggctcctcctccgcttgagcttcagcgacagatttcagctccatattccttagctgtgtgctcaaatgtttgggtattgggaccaggcccattgatcgccagggttgatttggctgatctcgctggctaggcaggtgtccccttcctccttcaccgccccaggtgcgaacctcccaaagctgcccgctctgccgaagaggatgaccatctccaacagaaggatagaggagaaccagtcttcggtcaaggatatacaagtagctgcgctcccctgctaggacctccaaacaagctttccaatgcctgtaggggtcgtgggatctcttgtagctaggatttcagaggtcagtggcgggagtgttctttcacttccttaggacctggaagcctagaacacttaggacctggaagtgttctttcacttccttaggacctggtcctttcacttcattaggaccagttaagggctgggagccggttctgacatttggcaactccgtgcagggtcccagcttcctccctcttccacctcgttgtctgcatcgcctctctatttactttcagtgttttctctcaaaagatctgttcaaagtgcgatggcttatttcatattttgatttctcttgctgggagcgtagcttcccggctcaatctagttggccatcttctcccctctagttggccatattctcccctcaatccgctctggattttaattcataggttctatattctttacacataactttcaatgtgtcctcctaaaacttacccatccagaaagcactcatttccttaagttgctagttcgtttcaagcatgtgctgaactgtagaagttagagtgccagctgagaaatccagtagacagt

SEQ ID NO: 3253 - DNA, 1219 bp, Homo sapiens
caggaaggcagggatggaaggagggagggagaggaaagaaggaagggagggagggagggaaagaggtaaagaaaggcatagagtaattagagtatcgaaaactgcaaagttatatagctgaaataattctaagtattttggtagtcttcataaatgtaaatgtcccaactcttcagtggaaagacaagattgtcaggttggaattttagaaaaagttaggcatatacaacacaaaatagacacttgtaaaatattgaaatattaaccaaaagaaagtcaatatggctattttattctcagaaaggaaatagacttaaatggaaaaaaataccacgtaacaatagaaataaagaataatcttttaagaaagtaaaggaaatccactgagactgagaacaaagtgaaagtacaattttagggaggtaagcaagcccagaaactgttagttcccatactaatctaggatggtagaactttgaaaaatcagatagatgaaagcatgcaattgattcaggatactaggccctgggctcatctaggatgggaagctagatcactgatgccttaggaagctgaataccacaatggactgtacacataggagtgaaaggctaaactaaaaatatgcttacttcaatctggtctgagtggatggaaaataattttatctcccaggaattcctaactcaagaattagggactctcaccccaacctaattcaagtttgagacccaaattcacatatttgtgagatcctgaaagcttcaaacctgtaacttaatttatacttaattcactatgcagatagcggaagcaaaatataaatgctttctggaagcacatgctttcaactggggtctcaaaaaagtcccatagataaagttccagtgagaatgagctcacaatcaaaaatcacaataaacataagaaacaagactatataaaaatcaacaagtgtaggaaggcagaattatgcccatgtaaacatcaatgaagaatttgaaagtgaactctgcatactctgggcatttagtttatgacatatgtggcaattcaggtcagttggaaatggatagactagtcggtgaattagtacttaggcaatagtctgtcattagaagaaaaattcgatcttgtctttcattatatacacaatttattccaaatggtttaaaagctacatataaaaatccccaactcaaaactacaagaaatattg

SEQ ID NO: 3254 - DNA, 1190 bp, Homo sapiens
tctacttttaaaatatagatacttattagtaattgtttcccattttgttgtttcttagctatttatcagtctacacaaagtctataaaccggaagatgcagtagatgtagtattttatttatttataaatttatttatttatggtatatattgattttttcttaaatcagtagttggcctataataacttttacagttctaaacatttccctcaagggcccatatcctgaaatgtgtcatgaatttaacccaataggcccagccaattgtaatttcagtttgtagccacagttgagatcgagttttacctggaaatctctacctcaaacagttgggttatggtgcaaacaacagaacttctgcagttcccattcagctgtccgaggattacatgccctccttacctaccctgcccctcttccatggagggggtcagggtgtggacaagccagggctggttagagcaagatcagaatgttggacaataccagtattacttgagggctggttcaaaactgcagtgggatgtaaagttgttcttcaattttaactgaaaaataagcttcactccagcagagccaaaggatatatttttttttgtggcttcctataatgcaggtacttactaggggatataaggtaatatgctgtgaggatttcagtatataaaattatttctggagagagaatatccgtctgtcttcctttgccactctctccaaatgcgtgctcacacacacacactctcacaccatacacacacatgcacacgcacacacacccacacacaccacaataaaacttttccccaaatactttggctttctgaggaaatatctgtccagctgggtttcctgtataatttattttctagcaacaactttagcatttgggatgtataattaaatctttcagactgctgaaatagatttgtgtattcatttgctaactgtcatgctaacagttaaaaaaaaaacacacaacaaagaatgcacctttagtttcaagtgtcttttccttgagcagtttcttttttctagagacagtgttgttagttgtgtagttgctgcacaggatatctgcatttaaattctgagctttaggtacttacagccatgtaaaactaatatccctttgtatccagtggctttttagcacttactgtgtaaaaggcactgaaaagtagattg

SEQ ID NO: 3255 - DNA, 1201 bp, Homo sapiens
tttattggcaacaaaaggaattttctatccagaagcctatttctcctttcattgttgttatttctgttataatactttaattgtacatctgacaatactgcctcttttatgttgtatttagaaattaatatacttataaaattaagatttattagccaaacttgaattctagttttaaaactgactgtgaattttatttttcatatatttatgcattacacaccttagctataagaaaaaaagggttttgattatatgcttcttgcagttaatctcgttatttaaacaaaaagttttgggtctgtctttggagtatttgtaacttctaaattttgaaatgactgaattaggaatttggatgcttattcttttagtctgtttgcctaaaaaccaatttacaatctgactgtctcttgggagagggaggtgccttgcaaactttcacattaagaatgtgcctgaggctgctttactctggaatagtctcagatctaaaatttcctctatataaggtggcatatgttaagttttgcttcattggaccgtttagaatgctatgtaaaatgttgccattctgttagattgctaactatatacccatctctgatttggctctccttaagtgataggatttgttattctaaaggtgataaacttgaaaatatcagaatctgagttttacttgaaattttgcagaatacccaggtggagtgaaaattggaagggttttgtgcaatgactaaaaggtaaaacgctgttaaggttcaagaatcaatactttcaacccaagtagccctctgcttgactgtatattatggaactagtaaaccttaggattttgaaaattggagtctaatctttcaaggaggtgggctcccaggatggtaccattgctctttcctagctaaccctagatatggcagctctttaatgtacttcaaaaagcaaatatatattactaaggaaaaaaagttatttataattgccttgtcataattgttaaggtgttctagagccatttgcatacaatttaatgtaatttcattccattctattgtttacacaacgattactcgaagatgactgcaaaggtaaaaggaaaataaaagtgtattgcacaatgagattgttttgcattgtttctttcctcctttagatatcatctgcattactgcaatggcatttagcactttcataaaat

SEQ ID NO: 3256 - DNA, 2311 bp, Homo sapiens
acatttcatgtggtatttcaggtcttcaggttctgattagcttacttttttcctttgtctttggctgatttctgctttgtagataaataataatagccctgagatgtttctaacatttaaataagaaaaaaatcaaatcgaagtcagcctgctggaaaagtgatcacatggcagttgcagtaacttgtatggaaagagaaaatgcaatgagcccagttactgcacttgccactaccatgctgtccatggaaggaataatcagcagttcagttgtcacaagccgcccttgaagaaaacgcagcaaaatattttaaaatgaagatattgcagtccccagagccagtgaaggtttcttttggtaaaatgaaattgtgccattgtcaaagtaccccgtagtgatgagcactgactggttcactggccacattttagttcttcataataataggccacaaaagggctctgtggtttgcctccatgtgcactggcccctccccacccctagggggcactcagtagctgctgagaaggcctgtccacgaggctgttggaacccctccaataaatacttagaggtagtgtatctgatgcttgttttcgtggagaaaattgtattggagaacttaaaacatcacgaatatttttaataggatccgcagacacccaaaggagaagcttggtcttttccaggtatttccaacttgagttcaacccaaagcctttgaaaggaatgcattaccacatgaccacatgctgagaccccatggggtctaacacgggacctaagaaagtctctgcagccagatagtacatggtgtctccacaaaactaggcattctggagattgcccagaaagggatgtgaggggaccgttaagatctgtcttgcttatctcatgcactcacattccttcagcctcctggagttcctgataaaaggaagccagggtgtggacattttttagctattgatttcccaatagcttgtggatcagttgtacacccacacttccttctctgcctaattccgtttttctggaaaaagtagtatgcccatgtatgtgtgtttttcttaacacaggtccatgaaagtttggcttcctggtttgatgtctgttgcgtggcctggaaaccagggagcagcaactattgagatggtttctgtgttcagtgaaaaattctatttcattgagacaattttttctttatccacagtaattttttgacactgtcatcatgaaactacccttaggaaaataagattacctgcaaaaaaaaaaaagaaatgagttatggaataggaacagttatgtgatgattctgaaactttaacttagagcttcattactttaagaatggaaaacaacctctgagtttgatttcccaaagtttcataaagcccctaagctcatgattttcatcaactctttgcccacatagtcatttacctccacagccgtttgttgtcatagaaggggtggtggtgtttggatttgatttttttcaacttgcagtgagaaataggataggtgacaaaaccttacttgttttcttaagacaattcagtgcttgagcatctctgtcagaaatggaatgaaatactgttagccaattagaattattttatgtattgttattgtgttttgctgatttttatatgaaaatataattattcattcttgatctctggaagcaatcattattatgaggatcattttactttggaaacactttcataataaagataagtattaagagtgcagtgtaagtgccctttactgtaaatgctaaccagctcgtgtgggtaaaacatcacatctcacctgatgaggttaataaaggctcacatcatcccagtagattgttacaagcctcgtcaactcccagtatcattgtgatcattgagaaagtaatgttacgttaacttggatagactgtagtatctctttgaaaattaagattaaaacctcaatgctaaattttatgtagcactttattctggaaaacatggtttatagagatcatctgaaatatatcaggttatgcttatttttaaaaaaattttaaaagaggcacctaggataaacacccaaagcacaacacaaaacttcccttctctgtgtatgcacccctcatcggagtttggcccacatcatcttctcttggtttgtacctcactttgctagaacttctctccatctttctctgtctttcctgtgaaatacctctctcaatctgctcttctgctctaagcttaggtcttctagtactcaaaagccgtaaaaatagcactgaaattcaaccagacaccc

SEQ ID NO: 3257 - DNA, 1149 bp, Homo sapiens
agggtttactgcagtgcctgatctaaccacctctgccttctaccgtcttgttgcctgatcagaggtccagggaggtcagctttggctgtacttctaatcctatggaggacatgaccagtgggcttgttctccatatcggagaagagtgacacccctaatctggagcttgaaatcctgaataaaatatggcagaggacccagggaaacgctatcagaattctttctgcaggttttggtaattaataatcagttcctagaacactacaattaagaatatcaagaggggagcagaggccaaaatctttgaggcttgacccagaaggacaaataatttgccccaatatagcaaaggggcaacgtgcttgggctctcaccagggacactgaccagttttcagcaaaaacacccacagtagaatcactcaagtaccctcaaaataagcctccgataatctggtccaaggttttcaagagaagggaccatgaaaaatactgatagtgactcccacttcctagaacccatgcctttgggtgatcttccctcacacccacctttgagtatgggctgcacttactgacttgcttctagcaaatagaatatgatgagatgtcacttctgagattagcttacaagagattataatttcttgggcactctggctctgtctgtcttgatcactcattttgcggggagtaggctgagacatggagagacccacatggcaagaaaatgatatctccaaccaacagcagcgaggactggaggcctgccaacagccctgtgagtcagcttggaagtgagtcttctggaggaagagcctggagatgtctgcagcccaacctgataccttgattgcagccttgggaggggttcagagacacctggctaagacacaactgaattcctgacccacataaactatgagataatacatgtttgttttaagccattattttggtgggggtggggagcggtaatttgttgcacagcaatttgtgcagacaaccaatttaagcaccacgtgatatacagtgattaattataggtcattgaaacatgtctgcctggcactacttttatagaagaccgaatatgaagattctgtttaaaaccctgcttgactttctttacttctagaaaataccaaag

SEQ ID NO: 3258 - DNA, 1099 bp, Homo sapiens
attaactccttttctatcttttctacattttcttagtcataaatcactattcttaaaggacattattctcggtctctaagttctccctcgtcagtaaattgacataatctattaacaagaattcaaacaaataatgatttcaaattgtattgccagcttccctaaggctccaacgtcgtgtttcatttaaagaaactgcttagaatataaagtataagtaggctttgcaaccaacagagaactgaaaacaagataatcaatttattgtgaatgatgtaacttaaatgctgcatccatgggttctaggtggcatctgggaagtatgtctgtcttttattcacataggaagaaaagtaattgcctggagagatatgactggcaaatgctgcaaaggaaacacccaataaatagcaaatgtgtggtgtccctgtcgtttggctacaaaatgtatcttgattttccattggctctgggagccatgtccttgtcgtggataatattctttctcccataacgttactctttctcactaacccttccgtttccagatctctgcattagcgctaacattcaaacatggtttctaactggacacataaagaaggttgaggctggagactttcttctttaataatgttgtggtttacattataaagccactacgtaatacctttccatgttaagtaaaactctgtgacacaaagaaggggatctcactctttagactggctgtaaaaagcttttctgagaagtaagtgagaccagcactaagctgggagtcagctgacctaggttctagaatttgcacttacttacactaagttgagagaggaggtcacttcacattcctgaatgtctagcttctaaaaaataaaaaggtggggtacatctctaatcactttccatcactgacattctaccctagtgtgcactgtgattaggagcatgactgtgtttccaagttcaaatcttgtgttgccacagcctgtgacattagccaaagcacctaaccttcctgtgtatcagtctcctctgctatgaaatgggaataccaataaaaccctccaagggtttcatgaatattaaattggacaatagg

SEQ ID NO: 3259 - DNA, 1208 bp, Homo sapiens
ctgaaccctctgggccctgtagtatgcttttacattcctgtgtctgttttctatcttttaaggcttcatatttctttctggtgaatttctccagtggcaagctaagagcggcagagagggattgtagtttgactgttagttctgttgcctggtggatggccagagaggcctggcaaaggtggagattaacagggaagacatattgaagtgcccagtaaatgctgaatgactgagctaagtagtagctctggaaaaccccagaaaatggccctgaggattgatgcttgacggaaacccaagttaaggctattatttaggccaaggaagctgcaccagtaaatagagctccagcatgaagctgaggctacttttctgctttagaaatttgatgggtgctaattgagaaaagtatcttggaatttatactacagttctaacctgctaccaacaccattgttagcacaactgactatatgccacattaccgcacctctttataatattggttggttcatatatgtttggaaaatagggaaaatatgtcattataatgtggaagttgttgattcatatgtaacatccctggtttaggagagctgggatagtggggtagaatcataacctttagctggagaggaaaaaactctgagttctgctgcaaagacagcaggaaccttttcagcaccatactaagaaaattagaaatgagcacctacactcagggcttcctccccaagaggtgcaccactacttttaccttggttttacaagaggcgggctgccttctttgctcctcttccctctgcattgtcatagttggctggctttctttactctgttgtacagtgttaacatgctctgatctagccttaaaccaccacatgatgtttgcctgggcctgcaaatgatcttcccaggtaccaattactgcttttgttacttctctggttacaaacttgaataggttgtgagtgtccatcccttacccttttttttccccataagccttgttatttttagtgcgaggtttttctaggagagagagagagagatatatatatatatatatatatatgtgtatatatatatatgtatatatatatgtatatatatgtatatatatcattgagcagaatgtatttcctttttggattttttttctaagcatattttaatttgtttttattattatttttaactgtcaactc

SEQ ID NO: 3260 - DNA, 1197 bp, Homo sapiens
tccattgtaccttggacgtgatgtggcaagacttgatattcatttttttttttattttaggcatcagtgggtggaccagaacgttgtcatgacagttggtttcctggcagtaacttagtgtcaaacatgcgacactttataaactatgttagagtaagagttccagagactgctcctgaagtaaagagagactcacctgcaagtactagctctgataacttgggttctttacaagtaagtgtaaatgtaagaaagaaaataagaaaaagctttatgttatgtatgttatgttgggatatactgttcctataatatccaaaagaaaaaaaaatgtggttgtagataactttaaattgtcttttatttcctctgatatatctatgtaacttctaccttaccagtctttttcccttaatctgccagagttcacgacggcctaaagttcttcaaagagaggtagatgtgtatgatattttcattaactagcaacatggctttaactggaaatggggaaaaaccgctttgaagtatttgtgtgtgtatgggtgtttaattaatatggttaaatttaaaagaaggtttcttggatttatgtgtgttttttttttttgacaaagtgatttaagcttaatattaaagaaaatttatattattgagcttaaaaataatactgagtataatagtgtatttttcttattagtgttcgaagtattttggaccaattataggtagcatatttgagtctctttacattcatcattgccactgtattactaacatcttaaaaatgacttggatattttctaaattaaaataaatttaattgctagcagcatgctcatttgcaaataactttttttttgcttctatggcaattaactttgataaaataagcctataaagtcttaaattctgtatattatggctttggactcattttgaaaatcagcgctctcattgcatgtaagttaacttttaaaaagcagtaatgaaaaatcttgaaatgacattgtaagtaagtaaacttaagcagttttagtctccacaacctagattttcgtgagtagagaacattgaatcagacatttcttctagtagagtctatttgtaggagctttcttggtctttgacaacgtgttttcactgtaagcaaaaactggaaactctgtaagaggcttttgcctctaatgctggtag

SEQ ID NO: 3261 - DNA, 1099 bp, Homo sapiens
acttcagtttccttaatgaaatgtaaataaaaatagccctttgacaatgcctgctgtcctttcagtgctgggaggatgtatgatctatgccgtttttgtcctaggtctgccacctcttccttccatgcctccccgaaacttacctggcattgcacctctccccctgccatccgagttcctcccgtcattccccttggttccagagagctcttctgcagcaagctcaggagagctgctgtcttccctcccgcccaccagcaacgcaccctccgaccctgccacaactactgcaaaggcagacgctgcctcctcactcactgtggatgtgacgccccccactgccaaggcccccaccaccgttgaggacagagtcggcgactccaccccagtcagcgagaagcctgtttctgcggctgtggatgccaatgcttctgagtcaccttaactttgaaccattctttggaattggcgtggtatatttaaccacgggagcgtgtctggaaacgcaaactatcattaatttcatactagtttgtaccgtatctgtaggcatcctgtaaataattccaaggggaaaactaaacgaggacgtgggttgtatcctgccaggttgagtggggctcacacgctagggtgagatgtcagaaagcgcttgtattttaaacaaccaaaaagaattgtaagggtggcttgctgccaggcttgcactgccgttcctgggggtgtgcatcttcgggaaaggtggtggcggggcgtccactaggtttcctgtcccctgctgctccttccgtaagaaaatgaaatattctatgcctaatactcacacgcaacatttcttgtactttgtaagtcgtttgcgagaatgcagaccacctcactaaactgtaaacggtaaagagatttttacttttggtctccgtgagtcgcatctctactaaggtttacacaggaattccacctgaagacttgtgttaaagttctacagcgcgcactgttaactgaacgtctttttcttcagcctatacgcggatccttgttttgagctctcagaatcactcagacaacattttgtaactgctgctgttgctttctacataca

SEQ ID NO: 3262 - DNA, 1196 bp, Homo sapiens
aatagctaagatttggaatcaacctaagtgtccatcaacagatgaatggataaagaaaatgtggtacatatacacaagggagtagtagtcagtcataaaaaacaatgagatcctgtcatttgcaacaatatggatggaattggagatcattatgttgagtggaataagccaggcacagaaagacaaacttcacatgttcttacttacttgtgggatctaaaaatcacaacaattgaactcatggacatagatagtagaagaatggctacaaaaataattagaaagaattaataagtctgggcacagtggctcatgcctgtaatcccagcactttgggaggctgaggcagacagatcacttgaggtcaggagtttgagaccagcctggccagcgtggtggaatcgcatctctactaaaaatataaaaattagccaggcatggtggtggatgcctgtagtcccagctactcaggtggctgaggcaggagaattgcttgaacccgggaagtagagattgcagcgagctgagattgtgtccctgcactccaacctgggtgacagagcaagacaggaaagagagaaagagagagagagaaggggagagagagagagagagagagaaagaaggagggagggaaggaaggaaggaaaggaaggaaggaaaggaggaaggaaggaaggaagggagggagggagggaggaaggaaaaataaataaataaaaaagaataagacctgctatttgataacacattaacttaatagcagattttaaaataactgtaaagggtataattggattgtttgtccttaatgcttgaggagatggacaccacattctccataatgtgcttatttcacattgcatgcctgtatcaaaacatctcatgtaccctataaatatatacacctactatgtgcccacaataattaaaaattaaagaaagaaagactccatttcaaaaacaaatcatctctatcttagtagctgtagttcgtttatactgttccatgggaatctacagcttaaacaccatttcgtatccatccttttgttgggggacatttgagttggaaactcaatacattcattatatatgttatgaatatatatgtttttgtgaacatataaatggatttctattggttatacatacagggagtagaatcacagagtatgcctgtatttacctttatt

SEQ ID NO: 3263 - DNA, 1300 bp, Homo sapiens
cagggcgctcgctgcccaccgctagccagcggtttttctctgccttcttttttctcctcttcgaacccctactgccccaagactaggttcctccactaatgctcaggtctttttcctcaaaggtcaaaatctggttccagaaccgccggtccaagttcaagaagatgtggaaaagtggtgagatcccctcggagcagcaccctggggccagcgcttctccaccttgtgcttcgccgccagtctcagcgccggcctcctgggactttggtgtgccgcagcggatggcgggcggcggtggtccgggcagtggcggcagcggcgccggcagctcgggctccagcccgagcagcgcggcctcggcttttctgggcaactacccctggtaccaccagacctcgggatccgcctcacacctgcaggccacggcgccgctgctgcaccccactcagaccccgcagccgcatcaccaccaccaccatcacggcggcgggggcgccccggtgagcgcggggacgattttctaaccccagggagaactcgccagagactgagagcagagaccacttatcctcattgcttaccccgagccggggttccctcctcccggcccgctgccgccacccacctctcctgcaggctgcgacctgcagtggcccgtctcaggccctgctcactcccggggccaccaaacgggcccctctctcgggggaaccggacagcagcttggcaaaggcctccctaaaaggccgcatttctgacctgagccccgggtctcggctgtttcgagccccgcctcggacttgccttccctcccctccgggtgagcctgtctggcgccttcctcgccccgggctgagagctgggtcccgggagatggaagcctcccaggcgcgcgaggcttcccgggcgctctgaggcttctttctcctcgcccgctcccctgggctcagctcggacgctgcagttattgacctcccggtcccgcctgcccgccctcccccacgtggccccttgacccgggcggccccgccgcttctttccttcctgcagttcccagccctcggagcccccatcccttatcttacccccaccgcgctcccccaggagcgctccctcagctctctcctcatccatcaccagtggagtttttttatttgttatttttttaaaagtttaggtgcctttgcggatgacctcattttgacgttgaaaaaatgattttttaatatgtgaacactgcaaaaatgtgtttaaattatcttttttaaaacctattcaggattattagcctggacttgga

SEQ ID NO: 3264 - DNA, 1203 bp, Homo sapiens
gagggcgccctgtatggggcgaggggtcgcccaggctctgaggcacactgatccggtggcctaactgtggatcccagcgcacaggccccataggcaggccacaggtgggtgagcttccaagggcgagagaaacccattccccttagatggtgaaaagctgccacattttagtgtccaggtcctgagagctgcaaatgctgatggagtaaattactccctcttcctttccccaccgcccctgccccctccaggaacaaaagctcagaccgctgagatgttcactctgcactttcagcagcactcacattgagatatgagaagactgcaacaaggtttgttcttacgaaagaaaacaatctcagagaacacatggacacaaggaggggaacggcacacactggggcctgtcagggggcgggggtggggagcagggtagggaaaaacagctaatgtatgctgggcttaacacctaggtgataggttgataggtgcagcaaaccaccttggcacacctttacctatgtaacaaacttgcgcatcctgcacatgtaccccggaacttaaaatttttaaaaaaagtaaaaaaaaaaaaatttccgaggtttcccgcccctgaactgaggaccatttgtgcccggcgttccggggggaccgggagggggctgtgcttggggggcggcggggcgggggactggaagcgagggggtaagtgtagcagggaggggaacgtcgccggggggtcttggacctcgggtcttccgcgtgtccggtgttgattggctccagttgtcaggttgaaaccacaactcctcccctaagagctgcagaggtgagcccacgacgtgccggccctaggtgttctcatcgttgggttgtcagtgcagcatgcttctggaactttcagagcctcacaggccttagacccttttcactttagtgtctattcagcggttaaagcaaaacacacacacacacacacacacacacagacacacacacacacacaccaccgccaccaccatcaccacaaccaacaaacgggagaactaggaaggaaaactctggaacttagaaactacccttggacacaaaattcccttctctttcacagagtctttctttccactctctcattttagaacaaaagggttgtgccacctcctttggatgtgaagaggatgtgctgacacgtgtgctcgggag

SEQ ID NO: 3265 - DNA, 1185 bp, Homo sapiens
tgaggatggtttatttaggtatcataccacttagcttggttatgtctgagttcctgttcatttgtgaatcatgtatgtattgcatgctatggtctttaaattttagaaattaagatttttattttaatgcttggggaaaacctattcatattctgattttccaacgatttttttggtttattaattttgagacttataattatttattttctgtacttaaagttgatttgcttacaaaagtaatacatggcttgatatggaaaacaaaaacattatggaaatatttaatgtagaaagtgaaattttctcttatctcttaggaataagacttagtgtcatatattttaaaatattgtcataattatactgcatatacactttttacaatattgcttaatttttagttttaggaggatgaaaatagaatagtcgccccccttatcagtgagggatagttcaaagacccccagtggatcctgaaacctcagggagtaccaaaccctatatacactatggtttttactatatggtaatgagtgggtagcatgtatagtggataggctggacaaaggaatgattcatgtcccaggtgggatggaatgagacagcatgagatttcttagtgcaaagaatggcatgtaatttaaaacttgcgaagtctttatttctggaatttttaatttcatgttttcagactgtgattgactatgggtaacaaaccattgtggaaagcaaaaccttggataagggtataaggacttcctatacttgctaagtatttaggtcaagaattacatcctatttaattagctattaatatagataaaagtaccctacatgcagaaaaacccagagttagattcattgctgaaaacaagagcctggagtagggctcttttttgttaaaggggagctacaaaaagttgttgctgtttgttatcctgaggtatgacttaaatgaagatttacggagatgagacgatgatgcaggaaaataggaggacatcagcacagtcttacgaccaccacatctgaaccaatctgaaccattgaactgttagctgagtgtttggatttgtgatatagccagtattactgcttacaagagttatatatgagttttggggcttgcagaaatgccagacccaaaattgtaatactgagaaagaaagaaaaaaattgtat

SEQ ID NO: 3266 - DNA, 1193 bp, Homo sapiens
ttattttactcatgtctaatactgagtatagaacttagcaacataaatattttgagctgacctgcctttgagagtgaagcgattattgttagcaaccccccacttttttttccattgtattttccctgatggtatgtatatttatttggccattgaataagtaaataaatctaggggtatgtatatttatttggccatttaataagtaaacaaatctaggtttgccagtgtattatttcaactagaattcttgttgatggccatactgaatctttcttcctttctttccagagatctggttggagttggagggtgagagaaaatgaattctaatttacctgcagagaacttaaccattgcagtcaatatgaccaagactttgcctacagcagtaacgcatggatttaattccactaatgacccaccttcaatgtcaattacaaggctttttccagccttactggaatgctttggcattgtcctttgtggctacatagcaggaagggccaatgtcataacatcaacccaggccaaaggactaggaaattttgtctccagatttgcacttccagctttattattcaaaaacatggttgtacttaatttttccaatgtggactggtccttcctatatagtatcttaattgccaaagcttctgtatttttcattgtatgtgtattaaccttattggttgccagtcctgatagtcgatttagcaaagctggactattccctatttttgctacacaaagtaatgactttgcattgggataccctataggtaagttaatttttatttttcaagtgtttaaaaaattcaattttaatttatttaggcatttgttagtaacagattcttactctcatatctaagaagtttttcatttttttctcaaatatgtcttaggatgaatcatagtttttcctaaacttcagagtttgaggatcctttaaacatctacctaaaataaacggtcatattctaataaccactgtgaacagtcctaattgtatttttttcttcccggtaagcacatatgaaagaagcttaatttttagaaaggatccaattgtgatttaaattatgttaaaaaagtagatttatgtctatataaaaatagttattattaagtgtttgtgaaaggaatttatttttcctaccatctagaatatgtattattttatatcagaa

SEQ ID NO: 3267 - DNA, 1240 bp, Homo sapiens
gggttgcttctgatttttttttttactagtagaaaatgttggtataggttcgcagccgccgccgcgccgccgtcgctctccaacgccagcgccgcctctcgctcgccgagctccagccgaaggagaaggggggtaagtaaggaggtctctgtaccatggctcgtacaaagcagactgcccgcaaatcgaccggtggtaaagcacccaggaagcaactggctacaaaagccgctcgcaagagtgcgccctctactggaggggtgaagaaacctcatcgttacaggcctggtactgtggcgctccgtgaaattagacgttatcagaagtccactgaacttctgattcgcaaacttcccttccagcgtctggtgcgagaaattgctcaggactttaaaacagatctgcgcttccagagcgcagctatcggtgctttgcaggaggcaagtgaggcctatctggttggcctttttgaagacaccaacctgtgtgctatccatgccaaacgtgtaacaattatgccaaaagacatccagctagcacgccgcatacgtggagaacgtgcttaagaatccactatgatgggaaacatttcattctcaaaaaaaaaaaaaaaatttctcttcttcctgttattggtagttctgaacgttagatattttttttccatggggtcaaaaggtacctaagtatatgattgcgagtggaaaaataggggacagaaatcaggtattggcagtttttccattttcatttgtgtgtgaatttttaatataaatgcggagacgtaaagcattaatgcaagttaaaatgtttcagtgaacaagtttcagcggttcaactttataataattataaataaacctgttaaatttttctggacaatgccagcatttggatttttttaaaacaagtaaatttcttattgatggcaactaaatggtgtttgtagcatttttatcatacagtagattccatccattcactatacttttctaactgagttgtcctacatgcaagtacatgtttttaatgttgtctgtcttctgtgctgttcctgtaagtttgctattaaaatacattaaactataaaaaaaaaaaaaagaaaatgttggtataaatatatgcatacacatttgtgtgtgggcatgtgtgtttgttgctttggggcagatacttaggtttggaattgccgggtcatacagccaacatcagtggctgtacaatttcacattcttatcca

SEQ ID NO: 3268 - DNA, 1109 bp, Homo sapiens
ttatatatactgggtattaaaattaaaagcaagttatatcagtgaagtaagatccttttgaatgtacaaagacccacactattgagacagcttttagatacttttttgtccattctaaaagtaagcaaacatgattgccttcttgttttctgtatgtataacccgtaaatatccattttgacataggaagaactttggttaagagtaagttctctaattgtgtttgttttaaggaatgaaacttggttaagattttgactacttcattattaaaaattgatagaattttagctcctgagatatttacaactgggagaaatgtctatttaggtgtttacattaagcggtatgaaagttgttaccacataggcactggtacgaattctcaataagaatgcagtggaacagttaagtagaactgtaactacgttggcactggtacgaattctcagtgagaatgcaatgaaacagtcaactgcagtgtttctttttgatgtcttttattttacaactgggccaaaggcacattatgtatataattagtttatatttacacactagcatataggaaatatttctgcacttgaccctatttgaattctgagcattatttataagtataaaatgatgatatataagtgaattttgtgctcttgtttgtattttattaaggaaaatgaaaataatctggcatcagtttcattttgctaaatatctagtcttcttcaaacagtatcttggtgggtgacttggctacctgaaaaatcttaggaggaatagctcacaatacaataaatctgtagattctgcttagagcaaattatggtacttttattcagacttgtttcctttctagttaacagaaatagtgacatttagaggttttaatcagaagttaggtttttctgattcaggaacatcgtaggccagccatttgtaatttttaactttgagaaacaaattttgtgagaataggtagtgggttgctggtagttaattggatttaatatttgtattaaggattaactggaaaaaatgtgtctcagtgctaattcttggacctttaatacagtgtgcttatctgttacggcctccttttatctctcttc

SEQ ID NO: 3269 - DNA, 1195 bp, Homo sapiens
aaagctaattgtcttgccaccaccaaaatgcattctgaattcaaatcccaataagatatctggtgtgatcctactcactttggctgatttttccctaatctactcctaaattcacacaggtggctgttagcaggcatcagttctttgctgagtgtttaccacagacctttcttcctcactgcatggaccttttcatagacttctttgactgttctcatatcatgacagctgtcttctcacagagcttgtaatccaggagagagaaagacaagtgaaagaggaggcccaaaatggaagctgcagtcctttataacttaatcttgaagtgatacactatcacttctgccatgctgttggtggcacagaccaacactggtgagagaggactacacaatggtgtgaataccaagagacagggatcactggtgactacttgcaggttaactccccaaaatagcaaatgctgtatttcagagtgaagaactaattttcatacttatattctgaatttatttccagtacaatcaaatttttttttacaagagatacaatgtatgttttaagatgatgaataatgtttatatacttctttctttctttttttttttttttttgggacagtctttctctgccgcctaggctggagtgcagtggcatgatcttggctcactgcaacctctgcctcctgggttcaagtgattctcctgcctcagcctcccaagtagctgggactacaggcgtgtgccatcacgcctggctagtttttgtatgttcagtagagatggggtttcaccatgttggccaggctggtctcaaactcctgacctcaggagatccacctgccttggcctcccaaagtgctgggattacaggcgtgagccaccgtgcccagccttatgtacttatttctgccaggttctatggagaagaggtattttgctatgtttacattgaatttaggagatgaccctgacaagtttgtgatgaggattattcatttagtttcttttaattctttcaattcatttgatgtcttactaatgcaaggcctaaagaattatccttataaaatctttgggaggagatatttagctaattttactcatcaagtatttatttgaaggtaaggtttttgtttatttttccttcaggtagcttaatctcttagagtagagactgtccctctattgttaaa

SEQ ID NO: 3270 - DNA, 1222 bp, Homo sapiens
accacagtgccaagaacagctagcctggggttcagttcttagtcacaagcaatacagtgaattgcggttcatttttttaaaagaaatttgactaacatagaaaacaataattcagtaggtgaactgaaaataatcacattgtaagattttatattaaatacagtgaaatatttttgtccgtactataggtctatattgtattgaatttttattctgctgtgaaaatataacaaaagcttttgttccttttcaacccaatgaaaatttataatgtaggataattacattgcatctcttatctatcagctgttataaaataaaacaataatgttttgcaagcacatatttttttccttagttcaaactttgcatgaaatttttaagtagccctctagcaaagcactgtttgtgttgaatacatttgtaatgcattcatggtgatatacacttttcttagatattagtgaaaattttttgttacaaaaagacacttttcgattgagttctgtccctatttacacatggatccttttaatggatgttgagagtcttgatttagaacttttaataggctcgtttacattttgcaaatctctacctttgaaataaaaaaaaaaaaaaaaaatgcagtgatccacccatctgcagacaattaagaccagcagccaagtataaaagggtggagaacttttaatgggtgtttatagattggaagcaccgacccccttttgaatggaagaggcctaagaagaaatagtaagtgttaaggataaccatgaaattcatttaaccccccaagcagaagatctgttatcaaagaatttgcaggattctacaccttccaacttaaggttctcagcttaaagtactttaaaaagaaatatcttattagaagtgttttgattataatttcttagctgcttgaaggtcaaaacgcaagccagcaggaagaccaatagtaaggtatgtgatataaaaacaaatatttccataaaatctttgccctagcaaaaagagaaattcttagtaggttcaaggtgggaatttagggaatagtatttttttacaggaaatactggttaggcgttttatatagggggttctgcgtttgtgaagggataatttgctctaaaatatgtgggcaaccagcctaaattctctaattgagtagtttgctcataacccgaggccattaggtgaatgtaaactgttacaggcttag

SEQ ID NO: 3271 - DNA, 1276 bp, Homo sapiens
agcagaggaacacttttattagaatgaagggttacttctttgttattcaaacacacacccacacacatcctctgtagtctccctaatgaaaaacctcaacagatggagagcctgagctcccaagtccgcaggctgagaagatgcacttcactcaagggccagtgggctggtacagactagggaagagaaaagggacaaaggctgctagtataggtaatcactatcttttaatactcctaacacatagaaattcgaaaaatcttgttcagcaatgttagcagcctgtgagcctcggaaactaatttggctgatgtgtctctgatagggagcttggggctgcaccaaggggaaacattctcctcctgtattctctcctctctctcgtttgaaagcctgtacaaagaaatggtacaaatggatggttaacttaatgattccatcagaggcagatttttctctgtcaggtccctggataaggtggaggtctgaaagccaggagacagaatatgtacttaatcgccctttctgacctgcttaccagtgaccaggactactctccaggcctttcttctgccacttccccattcttcctggctagttcagttgggtctcagcacttcaactcctggctggatcctgagtttttcttggttgcagggaaagctctcactgtctgcatctccttccccacccccacctcccgttttgcagctggccattctggctgcctcacagctatcctgccttaattcatatttgattgcctggacagaaccacctagaatgtccagacgactgccacccctcagccatgggcctgagatcctgccctgacccctttcttcagaccccaggaggacccacaatctccctgatccccaccttccccaaagtagtctctaggaaaaaagcagagctggctaaggcctgagacagagccatttcttccccttgggcaaacgaggtagaccctcccagagaccaatgccggagaggcccggatccgagctccctttatatggcctcccccatcacggatcccgtgggaaaacctgacacacaatggcgcggctgctccgggcaccctcaacccagcgccctgcggcaaggcctggagcagcctggtggtcttggtgcgctccctttgccctccccgcaaccctctgcgagcactcgtcccaggagagagaccctggctagggtggaggttgcctcccgcaaagggcgctgttgctggggcctcccctcccccattctcttgtttttctgcttctga

SEQ ID NO: 3272 - DNA, 1193 bp, Homo sapiens
aacatatgtgacactcaaatgctcaattccctgttgaagaaatgaatgatagaccttatctatcatttatttgactcatgtgtacacccatgtatatcacagacatttttatttaattattcaagaattggcacatgagaagcattatctaattcctctgggaccttccactggcaaaaataaatgcaatgactgtggctaccagatgaattttgccctttttcttatatttgaaagtaatgactttattatttctgaatttaattatttaaattttaagcaaaacagaaaatcactacaaagaaaaaaatgtcaacaaaatcttactatgtagaagaaaccgaccccttccctcagctgccgccaagctgctcggtccttccgaggaagctaaggccgcgttggggtaaggccctcacttcatcctgcgactagcaccgcgtccggcagcgcctgccctacactcgcccgtgccatggcctccgtctccaagctcgcctgcatctactcggccctcattctgcacgacgatgaggtgacagtcacggaggataagatcaatgccctcattaaagcagccggtgtaaatgttgaacctttttggcctggcttgtttgcaaaggccctggccaacgtcaacattgggagcctcatctgcaatgtaggggctggtggacctgctccagcagctggtgctgcaccagcaggacgtcctgccccctccactgctgctgctccagctgaggagaagaaagtggaagcaaagaaagaagaatccaaggagtctgatgatgacatgggccttggtctttttgactaaacctcttttataacgtgttcaataaaaagctgaacttaaaaaaaaaaagaagtaaccatcattaatattaggtgaacatctttcttgacagctctatgtagacactcagatattaggagtgatcggtgcataaataacttggtacatagaaataattttataaaactggatacatattatgcatgctatttttaaataaaaatattaaatttacatttacttagacgtaataagagagagaaaccagatgaaactaacagataactgtttcttcttcactaagagagccctctagaagtatgggagaaaaatatttacaagtttggatttttttagcaatccaaatgtgttgttgaactttattaaagtgttc

SEQ ID NO: 3273 - DNA, 1228 bp, Homo sapiens
ttattcaacaggctacagttcttagcaggagagagagcgaggagttgtcaggaaagctgcaggttactttgagacagtcgtcccaaatgcattagaggaactgtaaaaatctgccacagaaggaacgatgatccatagtcagaaaagttactgcagcttaaacaggaaacccttcttgttcaggactgtcatagccacagtttgcaaaaagtgcagctattgattaatgcaatgtagtgtcaattagatgtacattcctgaggtcttttatctgttgtagctttgtctttttctttttcttttcattacatcaggtatattgccctgtaaattgtggtagtggtaccaggaataaaaaattaaggaatttttaacttttcaatatttgtgtagttcagtttttctacattttagtacagaaactttaacaaaatgcagtttcgaaggtgtttccttgtgagttaacaagtaaagaagatcattgttaattactattttgtatgaattttgctaaagttaactgtaaagaaacacctgctgacttgcagtttaaggggaatctattctccccatttccaaaccatgatatgaatgggcgctgacatgtggagagaatagataatttgtgtgtttgcaatgtgtgttttagataaataggattgggtatttaaattagcatttgtgaatttaatagcattaagattaccttcaaatgaaaaaaaatctcaaaatttctatttggtttttgtgcattttcttttaaaatgtaatcatatgattttagtgtgttagacttgctgagtcctagctgtgtttagaacatctctattctacatttaccttggtcaaatttgaactgctgccataggttttgggtgtaaagaatgtttactgccctccatttaaattctgaaaagggatggtggatgttttccctctcctacgttagaaaccattcttaaaaacttttgaaaatatagaaccattaagcctgctatatctgagcaaattagtgggtaccttttttttcttatttaaagcacaagaggcccataaatcttgagttactttaaattcttttttttgatacaagttttcagagcaagagaataaaaatcatgtgttattaaacccctaactggctggcatgctttcctgtttgtattctatacattttgctggatgaaaccaaggatagttcaggtataattgtccaaaataacctaac

SEQ ID NO: 3274 - DNA, 1222 bp, Homo sapiens
tagtttagtggccagtaaacacctgttcctgagtgatacatctttaaggagccggtagatgggtcaacctggctggacttgctttttcaagtctgccttgtctattagaaaggctgagcttactgattttgcctgtcacgtttgagtgttcctgagactttgcccagcctcggtcttatctgcgggtaccccagcctctgcattccttgcccctacaaaatgtgctgccagttccaaaggcacaaatgaaaattagcttggctggagcatggctaggcacacaccagtggttaaagaaatgctgtttgctggctgacacttctggagtggaagtttattcttttttcttttttttttttttttttgcggggtggggcagagttttgctcttgttgcccaggttggagtgcaatggcacgatctcggcttggagcgatcttgggtcaccataacctccgcctcctgggttcaagcgattctcttgcctcagcctctggagtagctgagattataggctcccgctaccacgcccggctaattttttgtatttttagtagagacagggtttcaccatgttggccaggctggtcttgaactcctgaccttacgatccacctgcctcggcctcccaaagtgctgggattacaggcttgagccacggcgcccggcctttattcctttctttggcctcaattttattgttaagagatagtgggaagggcccaattttgaaatgatcctggaattaatgtaggaggccttgtataagcagttaatgtgtatttattgagtgggtaccctgtgccaatatgatacaaggtgtgaaggacacatgagttgggaaaggcatggggaaatgcacgctcacactgctggtgcgagtgtaaaaggtacagtctctatgtagggctatttggcagtatatactctttgacccagcaactccacttttaagtatttatcttagggataccctcacacatttatgaaatgatttatatacaaggatattcattatagcaatatttgtaatggcaaaaagaaacaaaagtcagatgggggactgattaaataattatgttattaagtaatactgtttcagtacatctgtgtaatgaaataatgtccagtcattaaaaatagtgaggcaaagtctgggtgcagtggctcacgcctgtaatcccagcaccttgggaggctgaagccggaggattgcttgaga

SEQ ID NO: 3275 - DNA, 1190 bp, Homo sapiens
ctagcattaaacacagtgccaggcacgaaataggtggtgagaaataagaaaatgatagagctatttgctctaatggttagaggcaatgatggtcagctttgagttactttggtgaccccgcagggaggaagagcacaggtggaacattagaatctctttcaggaaaaggatgccgctggatccatcaggtccagtagcactgcccatttctcctgctccaaggcatctgccctcgaaagcccccaggccacacccgaggacaccacccagggttctaggacacctcgagggcggacgtggtttggctctcggtccagctggaccgggctgggccaaccgggagtcagctcgaactcacctgcttggcaggtgcgcgcttcccgaggcgtgacaagggagcgccggcgcggtgggtggggggcagagaatgtgaagctccagacgcatggcacccgccgccaagtcgccgcggtggctgccgggatgcgccgcagcgaatggtcgcgccgggcgccgctctgagtgacctttcacccgcgcccagcggttccgggcggcagcacaaggcggtagccatggcggaggcggcggctgcagcgggtgggactggcttgggcgcgggcgcgagctacgggtctgcagcggaccgggaccgggacccggacccggaccgcgccgggcggaggctgcgggttctctctggccatctgctgggccggccccgggaggctctgagtaccaatgagtgcaaagcgcggagagccgcgtcggcggccacggcagcgcccacggccactcccgccgcgcaggagtcgggcaccatcccaaagaagcggtgagtagcggtatgtggaaggagttagcgtcgagggaccaggccgggcctgtgctgcaggagggcacaggcgaggtgggaagggaagtgacacgggtgggcggaaggcatcccggtccctgaaagtagggacccacctctctttcgagagagtggactagaccctggattctgtcaggaagggggcgggatgggatggtggattttggtcactatgtgagggtaacaggcttgaagaactctcgttggagaagggtttaaaggattcctttttcctgagcttttagtgccaggaattcattttttatcttgaattaatacttttggtgctgaggtcttggaatgggtagcagag

SEQ ID NO: 3276 - DNA, 1132 bp, Homo sapiens
gcgaggtctgctcagcccagtctcattctcagcaaaaaccctgaattcatactcagtagcttccagcaaacctcctattgtgaattgcttgtccttaatacgttccttattgctcttcttccaggcactgtctccagactgtctatattcaacccagtatccaagaatttctttaccaccatcacattcaggtttctcccactgtagagtgacactatctttggatattgaaagaatctcaagttctcctggttggcttggtttatctgaaatattttaaaataatgaaaagggagtcagctttactggtgaaataaaaggaccaaacatggcttgcttctttaatttaaccccttcttctgaattccttaccaaatggatctttgcaaacaactggttcagaagcagggctggtctcactcaggccaacatcattctgtgcgatgatgcggaactgatactcagcatcgggaacaagccctgtgacagtgtacattgtggtggtgatctgagtcttgttgtgtctgacccacttgtcagtggatgtctctttgcgttcgatgtagtagcctgtgactctagaaccaccatcatctttgggccgggaccaggacaagctaacagaactcttggttacatcgagtacttctggaggattgcttggaggttctggaggatctgtaaatataagtggaaagcacacatgtattagaatacagtcccaagtattataagccaatgactttcatttaaaaacagaaaagtgctgaaataatgtttataattttgtggttgaaagggcacttactcaatggtgtttttggtgtgactggttcctcagatttcaagggtttgcttatgccaaactggttttctgctgaaacacggaaatggtattctacattctctttgaggccttttaccaccagagatgtacctcggactctggaatcaatggtataccaggcggctttaggcacttctcgtctctcgaggatgtagcctaagatgtcagcaccaccatcatcagcaggaggtctccagctgaccctcacagagcggacttggatgtcatcatattccagtggcccttctggactgttgggacttcctatcaccctgaccttgatgt

SEQ ID NO: 3277 - DNA, 1149 bp, Homo sapiens
atacacacataaatatatacttccgatagtctatgtgaacatgaaccttttttattttaataaataaaataatttggcatagaaaaatataagaaatttaaggcagaattatccatttagtgactttgtgctttagaaattagtccccagaaacggaagcatacttacatatgggatctcctgcaacctctggatctgatggttcactgggaggaccaattcctgcagcatttattgccatggctctgaactggtatttaacgccttcaagcaaacgaggaacattaaattccacgcctttcaatcccactttggttattggtgctcggctaacacgtgaccaataaggacttccctcttctcttttctccagccagtagccagtaattggagagccaccattgtccaaaggaggagtccagctcactagcattgatcctttggtgcgtgccaaaacttttggttttcctggaggtccaggaaggcgataaggatcttgaatgactactttatctgatttgcactcatcactgattccatatttattcactgccctgactcggaactcatactgaccattggggataagtttccagatctagaaattagaaaaacagaaatttattgaagagaatatacttatgttggttttcactcatttaaaaattcaacttattttgggagggatgactgtaagaagaaataaatatatagactcaaaacatgggaagacagagaaaaggagaaagctttttttaaaataaaaatatgtagatgtattgtacctgatagtggatctcaattaaaagagtatctgtgtatcaaacgctatgtactaaggagccttatgtgtgtggggctaaacactacaataacaaaataacagcttatcgtgtgtggttttgagtttaattatcaaattccaaggttatattaaaatggcatcaaaccagagtcatgtacttttaatgtgtataagaaaatattcagaagagtttaccccatatcttttctctacagcagtgttggtgacttcctcccattctgctttcttcctacttgcatcacgtttgtcaataacataatgggtgatttcactgccaccattatcaagaggggcatcccatgtcaagtagcaagattcagctt

SEQ ID NO: 3278 - DNA, 1213 bp, Homo sapiens
taaggctcagacttgaagaaacttgccaatggtagttaatagcaacaggaggtacttagttgaaagaaatataattgctgatatttgactttctgatctaagaaaacagcactttcatatggttcaaactaatatctaaatctcctgattgtgagtccagtgtttttcaagtaatagtaaattaataatactaaaaagagagcaattaaagtcaagaatacattttatactacaattatctttaaaagtaaagtggtgaccagagaagttgtgactaacttttttttttccattttggctagaccaaaagtaaatataaagttatttgacagtacaagatgacaggtatacagtcacagaccttagcattttctcgggaaagttcacactcaaatcgagccatttctttttctctaacttgaaggtcggtgagtggtcttaagaattccacatgaggagctgtaagagaatgtcatcagaattcaaaatgaggtttctggaaatttactctgacattaccatagtatacattaagaaaaagtgactcttttttagggattttccatcttaatagactacaactgactttgaaatcacttgaagctgcccatcaggtatgatgctttgctttttagatatctctttagtttacataaaattatgtggcattctatatgttcaactagtgtgcatgtgtgtgtgtacagtatatatactagggagccatctcagttcttttgaataatagctggaggaaaaatcttcatttgcactgcaccagacttgaaagataatgtcaaaggaaacttcagacaccagtggcaaagaaacattgtcttatttaaggcacttagcacaatctttgagaaattagcagaattcaaagatagaacacgtgaagcactatggccagccttgtgtatggctaagaggcatgaggctgtaattgaaacatacatttagctttttaaaaaaatcagctttgaagacgtcacatataagtcaggcataacatctattagtgcaataaagcaatgtgttttgtatgggagggtgattaggattttacatctgttatttcattcatctgtagaattaattcagctggtgtataggattagggagctgcccccttgcccttccttctttcagagctccctgtgagtccttcccaagatgaccattcttgagcaataagattctgagacaaatg

SEQ ID NO: 3279 - DNA, 1199 bp, Homo sapiens
taaaatatatagtccctgccatcagtgacttcattagtgaggaaaacattagtaaacaattaaaatgcaatataggtactattattatagagcttaagggagcataagatgtgtaaaacaacccagttggggaaaagagaaagagttagaaaatacttcttgaaagaagtcatatccaatctgtcatgaaaatgaataggaagccttaggagatcactgtgtatttggggaactggcaatacttcatgaatctgacaaaaagatcaataattgggtcaagtggtgtggggaaatataatatagctggctaaataggtaggcaaagctcaagtcacaggggcctaacttgccaatttgagtttttttcttaatgaaataatgaatttaggttttatatgatgaaaaaattggagagccattgaaggaatttgtcatactcaagagtatctttggaaagataactggtaaaactcagagtggattagaagagggtgagattagaaaggaaaaattacttagaagactgtttccattagtaaaggagtaataggtgatcagaatttgctttttttcttttatttttaaggaaattttgtcaactccatacaaactgcttttgctgctggtattggctggctgatcactttttgttcaaaaggaggaggtaatactattttttaattttgttggaatgagaacatgacatttaaatttttggtgacagttttaagtatgctactgtaattgattattaagtactagaaactacaatttatgcccaggattacaatttttttacttaatgaatattcgcctttttcattattttacacatgaggttattattcattttttaatgtatcctctatgtttttatgttcagtggaccagtttttcagcttagactcatgataaattgtaccttcagatagccacagatgttatttgacaatttgcaaaaataactagttgtttacagctctaacccctcccaaaataataattttttggaaatatggactttgcttcatgcttatatatatctctcaaacatacatagatttgcctcatacaattatatacttgaagatgacagcttcttctaggaacctttccttgaataaattaagttgaaaattcagtactctgcatagcaagccgtaaactgtaaactgtgttcaagcaatgtggttggttaa

SEQ ID NO: 3280 - DNA, 1181 bp, Homo sapiens
acagaatttacagctttccatttcattatagtcggtcttatgtttggttttgcttcctagcttagtctttgattgccaggtagagttgatagtacaaaaaaaaaatatttttgtattgtcttttatttctagtatatcagtgaggaaaatgaaagtgctcaatatattcctgttgattaaataaatttaattgaaaagtagctctttttaaacagtttgatatacattcactgtggcacatttacattttagattaagtaaaaggaaaataatatgtgtctattgctaataagaacaatatagaagttatgccttactggttgtcaataaatgttcccattataaataacttatgatttttgtttataaacaagttataaataacttgttttgatggattttttgaattttacagattgtacaagaatctccattccttacaatggatcttttggaatcttgttttccttatgtcttgctgagaaatgcataccatgctgtctacaaacaaagtgttacatcttctgcataaaattacctacttaatcaagataagcacgcatttttgttgccttggttttacctgtagactgtggaactattttaccttaagacctgaaaaagttttgtggattataaatttctttcatacggttgtattttctgatcattggtttcttaatatggttgtactacagtatacttggttgatttaggttgcacattcactgaattcactgagattattcctataattttaaagtatcatttatttgaaaaacatacattatcaacatgtttttgatatttgataatgaaaaaaatctttgcttgtttatttctgaaaaagaactgtatttagtgattattttagatagtgatattatagtattcatctgtgtgtaaattatttcatatagggaagagttctgatctgtacctatggttcttattgaaaacaacattggatgtgcatttctgtgatgttatgaatacatttctactttattttgaaacatttgccaaactaaatactgtaacactgtataacatttaaaaatgttaaagaactgcttagtattagaagcagatcatttcccaaaattctaagagcagcagcatatgttgttgcttgtataaagcctagcgataatttttagactaacttccatggtgccctg

SEQ ID NO: 3281 - DNA, 1193 bp, Homo sapiens
acaccttagcactataaagacaattttagcagcttccagttcttttgaactagggctcttgtattaaaatgtttaaagtgaatgaggaaaacattttggaaaagacatttaaacataagcttttattttataacacttagaaagaaacatgtctagtactctactgaatatttaattttgtaatattttattagcttcagatgaatacaatcctacctcaaaccaagaattttttttctttttcttttttttaggtttgagctttttccttcactgctgttctgcgctaactgcttcgaaactttccatgcatttttttcagtagaagaacatctctgtactgtctcccattgcatatttcagctgtgacaatccctgcactttgcctattcattttatcacctgctcaccaaaaacaataaatatctctttaatttctaattgcagatttgctatttttgattttagaagaagggtgcatttcacttttttttattactgttgttttataggcatgtggagaccccaaggcaaaaccatcctatcttatcgacaaaaacctggaatctgctgtgaaattcatagtcagaaaattccctgctgtagaaacccgcaacaacaatgtaagttatctaaatttttctattgcttaattttaagcatcttttagagaaacagtggtcaacacagtgcttatagtagctcttatttacctaatttttaacattttgatatacagattatataccttaagggtttttttgagacaatattcttatgtccgagaccggaaaaaaataactcttaacgacattgccactttattacagcaaagatcttagattactatatatttattccctttcaaattgcaacaagagtaaggtaatagatatgtatatattccaaattcttgtgtggatacttgggatatttttgtttcttatagtcataaacttcctgttgaagttagtaaatgtctgcatagagcttctgttgttttaagtagttagctgtatttagttttaaaatgtgtttgtttttctagtattttcataattgacaatgatttctaaagattaaatagtacaagtaaatgattgtgttagggtctttattatctccatattacttttcatatgggaaagttttttcttagtatactgaagaatggtcatgttcagaatcttcct

SEQ ID NO: 3282 - DNA, 1219 bp, Homo sapiens
atgtcaatgtccaccagccagaaataccaggacacaactctagttgaaccaagttgggaacattggtatttgttgaaacaaggttaactgcacaccatggagaaccttgatgcatctctttttttttttttttttttttttttttgagacggagtctcgctctgtcgcccaggctggagtgcagtggcgggatctcggctcactgcaagctccgcctcccgggttcacgccattctcctgcctcagcctcccaagtagctgggactacaggcgcccgccactacgcccggctaattttttgtatttttagtagagacggggtttcaccgttttagccgggatggtctcgatctcctgacctcgtgatccgcccgcctcggcttcccaaagtgctgggattacaggcgtgagccaccgcgcccggccgatgcatctcttgaagagagtataaggggttgttctttcggatttgggattgtgtgaggtgtattttctggatagtttactaaaacattgtttaattctggattggatactgtgataaagaaaagacaattccatattgggtatcttaggactttctatctaggagcaaagagaaacaaagtgggggtagggctgtaattggtggaaaagcagctttcctcataatggctggcagagggagatgttgggtaagaaaaactgtgtttttggtaatgtatgtgctcaaatgtgattgtggagtggacttgttattgttaagctccatcacagtcatagagtgaccttgtctgacattagtgtatcgtgaaactttatatttgacaagagaatactattcctcacttttagatccagacaagctcctacccatcagttattgagagctgctttttcctttctcagatatgaccatgagatggatgattgcaagagaaggtaggaggacaagcttataagagaagattatttcagggacatgagatccaaagctgagaagttttaggaatgaggtgtcaagatggagcaaagagggcttgtgccacatattaccacattagtataaggaatttggaggataaaacatccacctctggagagagatacagggtaaatagtgttttcaggagaaacaggcttcacttagagcaaaaaagaaaagaagtttaacttcagtgaaaagtttgaatctacagaatttttttgataatagacacttacgaattcaaggaggaca

SEQ ID NO: 3283 - DNA, 1183 bp, Homo sapiens
tgaaaaagtacatgccattataaatttgtccaaactcttagaatatacaacaatgaaagtgacccctaatgtaaagtgtggttctaggtgataatgatatgtcagtgtaggttcattaattgtaacatgcaccgttctggtgggggatgtttatatgggggaagccatgcatgtctaggggcagagagattcaggaaatccctataccttctgctcaggtttgctgtgaacctaaaactattttaaaaaatcaattttgttaagaaaaagtaagttgggaaggagcgtttgacagagaaagtgcagaaattgataagtaaatgttatgttggatttgtgggttacaaattaattgtaactgtacattagaattatttggagtaatatgaagtaatatcagtgccaataaggggcctggacaagctttgttttgtttgttccccaaatgatttaaattatcttataagggtgagaaccacattggtatatgactagtccacaaaattatttctttttttttttttgtgggggacctaaaactactagattgcctttttacattaccttctacaaaattactggaattaatgaagacaataaaaaaatactaaaatttaactataatgcacctcatgcctcctaagcttcattatgttttacccagagagggaagaaattttggaatagactctctaattgcactgacggtgaggagaattagtttttaaattcattttatggcattccaggaggtattgtaaactattagtagcatatacttgtaaaagttattattccttaacaaattaaaaatatagttattgaaatattttgaagaggcatatgcaggaagaagcatgcgtgtaagttttgactggtaagtggaaaaccacaaatcaaacttgtaattgtcttatgttgatgttcataaaaggggagggcagtttctacatttttcactataagagatgtgtggttctgagtctgggacagagtagggggtctgtaaatgtttgatgaacaaataaaacatcctagaaaggaagggaaaagtggatggtaggtaactgatatggtttcacttagtgtctcaacccaaatatcatcttaaattgtaatccccctaatccccacatgtccagggaggaaccaggtgggaggtgattggatcatggggccgttt

SEQ ID NO: 3284 - DNA, 1221 bp, Homo sapiens
ttgtaaaaaatatccatgtgtctatacattgaacacattgtctagaaattaagaaacattttaccctttgggagctcatggtcataagggcagaatctagaggagaagacaagcacacaagcattgtggtgatgtgtacaaatataatagaccagagtccaaaggagatacacctaactgagcctgggaggaaagggaggtggtaggacctgggaggagtgggaatgggagctaagtcctggaggcacatgagggcctaagagattattgctcctgcaaatttcaagtggtgttaaattattagtttttatgaggtgatggtggatgaggctggacaggcaagcaaggaccacacatgaaagccatgaagagctgctgaaaagttcagattttgtccttaaagcaattgagagctgttggtgaatttcctaaagacacgaatatgaatagttttgaggtgtagaaagacagctctggcaatagagaatggagagtaagaagatgacagaggaagctaggtaggggccagctgaaagagttgcaataatccaagtgaaaagtattgtaactctgaattaaagcaatgacagtgtggatattggaaaaggaacagattcaggcccatttaagaaggggaattttgagactgattgtggtgagggaatgaaagggaagagaaaatctagatctatttggttcagtctattgagtacaaagtgctatttttccctggaagacagggtagagaaagttgggaggggacttatattatattgattcctgtcactaccaatacctctatttataaaaattgactctataaaatcttctaaggagttaattattgacagctcatgactagaacagtgagaagatgagaacattgattttgcatttttcattagaaatgaacatatacatgagttatttacttatttacatgaagaaaaagtatacaaatacctgtattaacaaagttattacttctacatattaattcatttttattgccataatttctggcattaggaattaccaaataagaaggggtatgacttataatgaggtgttcaataaattgggccaatttagtcatatgaagaattcatgttcaaataaaccaacatgccagagcgtgtaggtttcagttaacatcatgcaattgggggaagtaaataaataaaagttttcaattgtaattttgccctctatgtacatttc

SEQ ID NO: 3285 - DNA, 1150 bp, Homo sapiens
tgcaacaggccattattcaatgggtccaacagtttgagaatgtagtggatggcccagctggatttcagtgtgtactatacctgtgtaattatggggaaaatatctctcacttgagacagaaatttaattccattatttgaagccatgagattagatatttcctatgcatcagttaaaatcgtctaatttctaaaaaaagtatgtagagtatgcaaggatttgcctttacttaagtatttatgactttattttctttgtttttgtagagacagggtcttgctctgttgctcaggctggagtggagtggcgtgatcatagctcaccacagcctccaactcctgggtacaagggatactcccagcctcccaagtagctagaactacaagtgtgtgccaccatgcccagctaatttaaaaatatttttgtagagatgaggtcttgctatgttgcccaggcaggtttggaactcctggcatcaagcaatcctcccacctcagcctcctaaagtgctgggattatacctttgagccatcacgcccagcctatgaccttatttttatcaatacacaatatatttaaaggtcttagacacacacacaaatttacaaaaacacgcaaagaattatgaagaactgtcaaatgttaagtttattaaagtgtggcaagtcagttgatttggcttgaagtatgatcaaaagtgttttttgatagtttctgaagaaatcataatattgtcaacttagggaaataaagaaacttaaatatattagaataactaaacataaactacaattgtttattgagttactaaataatccagaacttctatgggccacaaaagtattattctgacattctaatggttattttattctttgtttagttttggcagctaactatggatccacctacatgtcagtgttaaggcattgactctttccctccctgacctaactcccatacagagttacgcaatattgaaaatctttttctcattgcgatcatatacaattttgtgctcctttacagccaatggttccagcaagggaatgggaaatatgagagcacgaagataatgggtttaggagaaaatttgaaagtaaaataaataggtccttgtggccaaattaaataggacctcgtgaatttt

SEQ ID NO: 3286 - DNA, 1109 bp, Homo sapiens
aaagctgagggagttcagtaccaccagacctatcttacaagaattgctaaatgaaattctcaaagcttaaagaaaaggatgctaattactaccatgaaaacaggaaaatataaaattcactggtaaaagtaaatacacagtctaattcagaatattctaatcctgtaatggtgacatgtaaatcacctgtattttcagtatgaaagctaaaagacaaagctattaaaaagtagtaataactacaataattatttaaggattacacagtgtaaaaggatgtaaattatgacatcaaaaacataaaatgtgagtgatatggtaaaagtgtagcatttctgtatgtagtcaaaattaattttatcagtttaaaatagcctcttttaactgtaaggtgtcttgtgtaagcctgctggcaaccacaaagcaaaacctctagtaaatgcacaaataagaaaaagtagggaatcagaacatactaccagagaaaataatctcaaaggaagacagcaacaaaggaagaaaggaacaaaggatgtacaaaacaactagaaaaatattaacaaaatggcagtaataaatcgtttcctatcaataattaccttgaatgttaatggattaaattctcccatcaaaagacatagagtggatgaatggattaaaaaaaacaagtcccaactatatgctttctacaagaaacttatttaatttttaagtacacacacagattaaaagtaaaaggatgcaaaaagaaattccatgtaaatggaaaccaaaagagagcagaggtagtgctgtgatttgaaaatgtcccccaaatttcatgttgatagctcagtccccaaattcatatgtttactggaggtagggcctttgggaggtaattaagattagatgaggttatcagggtgaggccaatgagatgggactggtgtctttacaagcagcagaagagagaccggagctaacacatttgctctgtcttgccatgtgatgcctcccaccattgtcatgatgtagcaggaaggccctcaccagatgccagcaccatactcttggacatctcagcctctagaactgcgagttaaataaacttctattgtttattattt

SEQ ID NO: 3287 - DNA, 1213 bp, Homo sapiens
gatgactgcttcaaacatagcactctttttgatatttaagttcggtttcgtatgttgaatacgtggatttctgataacagttcacatgtttacgaaaaattcaggttcctaatcttcctgacaggtggttgatcactaggtttgggatgtactttaggaatctgcatttttaatatcgtcccaggtgattctgctcatcactcgtatttggtaacaacttcctgtactcactccatgattcctcacttggaaaagtagttgccaatagctgctagcaaaactttttacccatgattctaaacactgactacacataagaatcacatgaagaacttaataagattctgtgtgctggggcctagtttactgaaaaatttctcagttgtgtctaatatgcaagacaggatggaaaacgactgatctaaagtaaagatcttgtgttgtaatctaaattcttctcataatgagatctattattaatcttcagtacttggcatataatgggcacccagcataagaaaatctggatagctgctacataaaaatgtcagtcaggcttgaaaagatcccctgtgctagctggcttgcttactgcaccactggcctctcatactcaaatacaaaaacatatattatacatatatgtgtaccctttttgtgttatctatgttccacagcccaaaaccagactctctgatagaaaattgaataaatcatgttgcagttacttctctggtttaaaaacaaattagcctttcatttacgtgttatttttgatggtattatttcttgactatgtgtcatatagtcattcaacacctaattgagcacccaccgtgtgctaaatactgttatgattgcacaaaacaaaacacttctaagtcccagtagtaaactgactggattagttaatatgatacagtaagatgaaaggtggtctagagaaaaataaagcaggggagggaaatgagcaacataggaggagtaaatactaaatgagaggaagaagggctgtgcagctgtgttggagaagggaggccggtggaagtgagccagtggagaatagattatatttagcatcgtaggctattggaaggacttttgcttttactctgagtaaaaagaatacccttaaggagatattttttaaagggatataaagagaagaatgtgtcagtattacagaaaaggagattttaccctaatattatgg

SEQ ID NO: 3288 - DNA, 1218 bp, Homo sapiens
cctagcatcaaagggaagttagagtgagcttataaactgtaattctagacaatgtctattggaagttcagggtgaggtagggaggaagtcctctctgtgtgatcaaaagcaagtgtgttttggttaatcaggatgaagcataacattgggggctgtttcatgattttagagtttggagctgttaggaagagaatttcagcttagttttgcaggcagcccaaggagcaaaggaaaggaaggaactaatgactgttcttgatgtgtccaaacaccaaatcattaataaatatttattcagggccagattgtactagattccagggatataactgtgagcagggctgtcttggtccatgtacatacagagcttgcttagagtctattgaggaaaatagatgatatcatttacaccaaaggagataagcactgtgccggggatgtagaggatgctatggaggaagcgtggcatgacctgagccatgcgcacacatgcgtgtgtgtgtgtgtgtgtatgtatgtgtgtgtgtttggcaggaaggctttccagagcctgaagaatgcgtaaacattatccaggtgcagggatatatgggatggggttggagaattgagaggatgtggcaggggaaacagagagaacatgggccatcaaagaaactgaaagtagttcagtcagtcttgtgtgcagatgttttggtggataagaagctgttggggaggagtgaagagagatgagttgaagactaagaggggactaaataatacgtgactttggaaagatctgttgcgaattgtggtctttatccaaagctgggattcttaactagtttttgtgacatggacctctttggcagtctgatgaaacctgtaagtttttcagaaaataatgtttttagttgaataagataagatgcataagattcaaaagaaaaccaattacattgaaatactgatatcgggccaactttgtgatatattaaaaccaactttgtgacatagtaatataaatgattctttttttttcttttttttgagacagagtctcactctgtcacccaggctggagtgaagtggcatgagcacggttggctgcagccaagacctcctgggcgatcctctcacctcagcctccagagtagctgggaccataggtgcataccaccacacctggctaatttaaaaaaaaattctatatatatatatatatatatattctga

SEQ ID NO: 3289 - DNA, 1166 bp, Homo sapiens
agatggagatgaagtttggaaccaggcagcttggctctagagccctcacttttaaccactatcgtataccaccagggctccgtactgctaggcttgtttagttcttaggtctatgtcttataattcttctattttttttcttctgtattattgtgtgtgcttctgatttttcagttaattttgcctgtaaatctggatgaggcctaaaggatgagtcagctgttcctatataataaaatacatggctttgtgataactttcttctttggtttggtttttgagggtgttcatttgctattttttactttcaaatttggtgttactggggtaaaaatttatacttagaaaatacttgtttttcactgagaattctgcagcttccccacccctcccccatcaatgtctcttttctcaggagaaacatcagatggagtgaggaagtcagttcacaaggtctttgcttccatgcttggagagaatgaagatgatgaggaggaagaggaagaagaggaggaggaggaggaggaggaagaaacacctgagcaacccactgcgggcgatgtatttgtattggagatggttctcaatcgtgaaaccaagaaaatgatgaaagtaaatttttacttattttggtatttataaacaatgaagaaagtgacatagtaattgaagtctgtaagttatacctgggaaacaattcaaactgtacgaaaggaaatactatgacacaactattgttatttgtttattatgtttcctattagataatgtttatgtaaaaccttaattatagccgggcatggtggtgtgcctgtagcccagctgctccggaggctgaggtaggatcagctgagcctggggaagtcaaggctgcagcacttcagcctaggtgtcagaacaagaccctgtctcaaaaaattaaatacagtacaacacaataaataaataaagtcaaagcaaagtggctcatttaaaccaattgggccatttattttttaaaaaatgctagaaaggtagaatctaacacacacacagacacacagacaaaaccttaattattgcttatgtcaaaatggactgcgcttttgctattaaaaggtccatactggtgaggcacagtggctcatgtctgtaatggcagcagttcgggaggctgaggcaggagg

SEQ ID NO: 3290 - DNA, 1224 bp, Homo sapiens
cctatgttttctgtaaactggtagttagatctagaatcttgattagattcagattaattttttatagtaagaatgttttataagtagagctgtggatcgcctattttatggtaccaggaggtacataatatctggttttaccacttttagagaaaaagatattggtaggctcagtggtgacagcatgatccatccattataaagtgcccagtcagtctttcacttgatggtttttagtagccattaaatacagtagacagaattttttgagaactataaatttttgatcagtagcattttctttcctgtatactttaggagttagtcaataatccttgaataacttctaaggtttttagtatgatttttgtaattagttcaccttttgacatctaggttatatcaacatggtgttttgatggactttgatggtgttagatactctatctattcaatccattgatgaatgagtcagaattccctatacaccgaagtagtatggaatatcagcaattttcataatgagggttacctttgaggataggccccttcttagtagcggcaaaaaccctttacaaaaatgggttggatctttataggctgctagattttctgtgtccaggctgtgcagatctgttctgttgtcttgcttctttaatgtcacattattgttctgggaagtacaggtaactgatacaggactcacacaagtattttgcctacagagaaacaccacacttttttatttgtttcctgtcagctttcttttatatattcctgaaaaatgtcttaacattttatgtaagctgaatgagagcagagactatgtctgcctgattcatcattttccctgagggcttagtatatcattccttggccatagaatggactttataagtatcagttgaataaaagcattgatttcttggttgtcctatctgtgattcaaaggacaaatttatgtagctatgtgagcagtgcttctcatcctcttatgtcttggtaggatttcactagttagataatcatatctcagaacattgctcttacttccttaaaagttgcagttaagatctcaggtcacactgctgtttttgtttgtttgtttttgttttgttttgttttgttttttgagatggagtctcgctctgtcgcccaggctggagtgcagtggcgcgatctcggctcactgcaagctccgcctcccaggttcatgccattctc

SEQ ID NO: 3291 - DNA, 1202 bp, Homo sapiens
ataatactttaagttctgggatacttgtgctgaacgtgcaggtttgttacataggtatatatgtgccatggtggtttgctgcacctatcaacctgtcatctaggttttaagccctgcatgcattaggtatttgtcctaatgctctccctcccctttccccccactgcctgtaagttaaagatttttaaaagattacttagcaagaaaagtagtgtattgaattaagttacttttcctgattatcattagggtatattgtgccatatggtagaacaattgtgtggtgacaggggagtgagttttgtctcttccattgcagcttaagagcagtgtaattagtaggttcccccccccccaactccccaagggaaataattttgaatcatatctttatgttttcttaattttgttaaggttatgtatgttcttaaaaattgaaataatgtaaccgttcaattattttagggtctgtttcacccagcccggaaagtcagagatgtatattggaaaatttacaactccatctacattggttcccaggacgctctcatagcacattacccaagaatctacaacgatgataagaacacctatattcgttatgaacttgactatatcttataattttattgtttattttgtgtttaatgcacagctacttcacaccttaaacttgctttgatttggtgatgtaaacttttaaacattgcagatcagtgtagaactggtcatagaggaagagctagaaatccagtagcatgatttttaaataacctgtctttgtttttgatgttaaacagtaaatgccagtagtgaccaagaacacagtgattatatacactatactggagggatttcatttttaattcatctttatgaagatttagaactcattccttgtgtttaaagggaatgtttaattgagaaataaacatttgtgtacaaaatgctaatttgtgtgtgttttttgaacatgacttgtaaaatgcggaactttgataaagtattggtttatgtggaataagtggcttaatttcattttctgtcacatggtttatagaaagtagttagctgaataaaaactatataaagtgatggcatctttgtcaaaattccattgttgtgttaataatgacagcaagaagagtagcctcaggggatgttcccctcaaactagcacaaccattccatcatcgtagaaa

SEQ ID NO: 3292 - DNA, 1099 bp, Homo sapiens
tacaggcatgagctaccgagctcagttttgaaaggtagaagtgtatgctacaagggatgtaggacttgagagtcaaggcctatggtcttgtcctggctctaccagtaagtgtgaccttcgatgtttttttctcaagtaaggctggtaataattaccacagttgtgagaattgagaatttggaaatgcagtgaaagagactatactcaagtcttgttctggactaacagtgatcttaaaatctctcatttcaaagaaataaagtattttgatgattctcttgcatggtgtattaataaacttggtataatggcagaaactgtaacctacaacaggtttacgtttaactctttttgtaggtgtttggagaagagggattgaccctgaatcttgaagacgttcagcctcatgacttaggaaaagttggagaggtcattgtgaccaaagacgatgccatgctcttaaaaggaaaaggtgacaaggctcaaattgaaaaacgtattcaagaaatcattgagcagttagatgtcacaactagtgaatatgaaaaggaaaaactgaatgaacggcttgcaaaactttcagatggagtggctgtgctgaaggtaacattcattattatgaataagtttcttgggttctgagtccaagaatgattttgcttctgtagtattccccagtagtaccatagaactaaacgaatacttgaggaattaacttcatagtggaattttgtttgttttgttttgagctcttcgtcacccaggctgggatgcagtggtgcgatctcggcgcactgcaacctccgcctcttgggttcaagcgaatctcctgccttggcctcccgagtagctgggattacaggcacttgccaccatgcctggctaattttgtatttttagtggagacagggcttcaccatgttggtcaggctggtctcaaactcctgacctcaagtgatccactcacctcagcctcccaaagtgctaggattacaggtgtgagccaccacgcccacctcaggattgctttttaagtaaactgcttttaaatgacttggcaattagcatcttgaatgaagaggccatactaactggaatt

SEQ ID NO: 3293 - DNA, 1199 bp, Homo sapiens
ttatgttaatatttaacagttataaagttagctttagttaactaaagttagcttttccagaatattttcttgaacttttacgttggagtcaggttttagtttaagccactgtgtattatttcaaagtgtaactacagtggtatttttgagtgaagatctgtaattctagtatgagtcgtatcacttagccacgaaatatatttttaatataattggatttgagtgaccatgtttcattagttgtagtgatttaaaagttaactgtttatgttgggtgaactagatatctttgctaataaacatccttccttttttaagggtggagagattcaaccagttagcgtgaaagttggagataaagttcttctcccagaatatggaggcaccaaagtagttctagatgacaaggtgtgtaaacttaataattctaaaaagaagtcagatatttgcaattagttgtcttaactaatggtttttttcacttgcaggattatttcctatttagagatggtgacattcttggaaagtacgtagactgaaataagtcactattgaaatggcatcaacatgatgctgcccattccactgaagttctgaaatctttcgtcatgtaaataatttccatatttctcttttataataaactaatgataactaatgacatccagtgtctccaaaattgtttccttgtactgatataaacacttccaaataaaaatatgtaaatgagtggttaatctttagttattttaagatgattttagggttttctagtttatgctttttttctgtttttcaagtaacctgcagagaattttgggaaacaggattttctacgtaggtgcattttcacactgaatttagctttattaatacatgattgatactgataccaagccatggatttactttttttttttttttttctgagacggattctcactctgtcacccaggctggagtgcagtggttcaatcttggcttactgcaacctccgccttctgggttcaagtgattctcctccctcagcctccagagtacctgggattacaggcgtgcaccaccatgcccagctaatttttgtgtttttagtagagacaggttttgccatgttgcccaggctagtctcagactcccaaagtgctgggattacaagcgtgagccaccacagcaacattcagatttcaaatataacaagc

SEQ ID NO: 3294 - DNA, 1155 bp, Homo sapiens
gtgaaatcctgtatctacaaaatatggaaaagttagcccggcgtgatggcgtgtgcctgtagtcccagctcctcaggaggctgaggtgggaggattgcttgagcccaggaggtggatattgcagtgatctgagattgtgccactgtactccagcctgggtgatgcagtgagaccctgtttcaaaaaaaaaaaaaaaaaaaagaaattatggtttgcaattttgatccaagttccagtcctgacaaatacaatatctgcatttatgtagtagattctatccaaatgaagttgaattgaaggataaataagtaagggtaacctactttttttcttagttactgattatgattctatacttggtttcctatttagtgtataacccaagttgaaccacaagagcagttatgtattaacaaattatatgtacttaacataagatttaccaggtgatataatttaattaaccataagaacttctttgtttttagtatattcaacagaacataagagcagattgctccaatattgacaaaattcttgaaccacctgaaggccaagatgaaggtgtgtggaagtatgaacatttaaggtaggaccttacatcaaaatactaatagtacctctcacaaaactagctttcatattaatgataattatgaattgtaaaatttactatgtaactgcagactaagaagccaaattttaaagctttggcattttcagtgtcacaaggttctcagctttcttcactggttgtttccaggtcaaattatgctgcagagtcactcattttgaaaggtggtttatttcagagttgataatttggacctgcctctgcacctctcttcttttcttttcttttttttttttttttttgagatggggtctcactctcttgcccacgttggagtgcagtggtgtaatcactgcttactgtgcctctacctcttaggctcaagtgatcctcccacttcagcttccagagtagctgggactacaggtgtgtgccagcatgcctcactaattttttaattttttgtagagacaggatctgattgtgttgcccaggctagtctcaaactcctggattcaagcaattttcctaccttgtcctcccaaagtattgagccaccctttctacatttattcatttgg

SEQ ID NO: 3295 - DNA, 1155 bp, Homo sapiens; identical to SEQ ID NO: 3294

SEQ ID NO: 3296 - DNA, 1155 bp, Homo sapiens
ctccaaatgctgttcgcactgggaatcgcaccacagtcaggatgtaactgcgtgctgagcccacacacaggaattttcttgtacaattcaaaactgaatcttatatttacttaaggcttacttttttttttgtctatgaaatcagcagtcctgtatatttagcatcagccttaagttagaatgtgaaacaattctggggggaaggaagtatccgtatggttttctaagtaatttaagaaacaggaaaacataaaagaactgattgtctgtgattaaacctcattctttccttcccatcttcctgtatagttaactaactcaattgtcggccagaaagaaatagcttattgcactgggttgtaaaatatctgagtgggccttggatgttgatgattgaatgaccttcttaacattgaacaaacaatgggaaggtttaataaatagcagatatgtgtttattatgtttttcttccctgtgcaggaataatcaagctgggaaggtggaaccctctccccctcagttatgtgacagatgcacccgacgcgacagtggccgacatgctacaagatgtctatcatgttgtgacgttgaaaatccaattacaaaggtgggtgtttctgaacatctgcttttccttactgtcagagctgctccgtcaatcatagattcactgcaaagatcagcatgtcctgtctattaatttctggacattggacaaaatgaaaagaaggagagagagggaaagaaggagagaaggagaagggtggcccttccccaggtgtctttatagtcacattccaactactttatgctttgttttcagaagcagtgaagtggtaacctaggggcggcttgacaaatcattaaaaatctatagcccttaggagtagctttacacagccccttattcaatgggtcctctaggcctgcttaaatgtgtagcacatagtatttgaagaataaacacctctgctgttttcacatttgtgttatgaggggagagttttgttcttgtaggaggtttaccaagaatgtcctgacataggagatctttttcttccctttccaagggccacatcaaaacaaacaaacaaacaaacaaacaaaaacacactttgtggcctgcagagattctggggatgatttctttattt

SEQ ID NO: 3297 - DNA, 1183 bp, Homo sapiens
atattcacataacagcttaggccttaaaatcaataccaccttagtaggaaggagctggaagctttgaaatatatttccagacaagagaaatatattacttttacacgtaaaagtaatatatttaaagagaaatatattacttttacgtgtaaaagtaatatatttattacaactggaagctttgaaatagatttttagacaagagcagatctgatctgaaaatactagtgctgatagttaatgataaaactatagacattaaaagattcgagtgtctgtgtggtcaccttcatctcacctatgtaccaggacacctctaattggtgaaaatgacgggaatctaagggcttctgccactgccctgggcaattctgtaataatagagggggaaaacccacagctttccattagacctatatgactaagaggcttgtttaatctaaaccactgtcgatcacagatgactgacttttataactgttgcttcccttctcatcgtggtgactgagatttgctttttaatgtttgtgttttgctcttgaattttgtcccttcaggtttgatgattcctgtcttttgtgtcgtggagcagttggacggctctcttgaatatgacaacagagaagaacacgccgagtttgtcctggtgcggaaagatgtgctttttagccagctggtggagactgcgctcctggccctggggtattctcacagctctgcggcccaggcccaaggtattaatgcctctcccctctcctcccaagtctcttgtgtgtcataatttgaggaagaatatgttttctgaaatagttctccaaacaaaggttgaaggagaattgtcagatttagcatttcctagtgagcagtagaatatttcttgtagaaggtcttgtttcttgttttgggaagcatttgaccagcacttctggagccacaaaatcaacttgcatttcaaaccgatcatagatttttttgcatttataacactgttattttctctaagttaggaccaatgttgagatatttaactcctgacttatccaaacttataatacatgacttataaagcattcagttttccaaatttatttattgctttgggcctgtggcttctgcactttgcaataagcttttaattaaacagaaaaaaaaatggatgtcttttatccttttgtttctttga

SEQ ID NO: 3298 - DNA, 1194 bp, Homo sapiens
tcatttaacatgaatcttgagtacgtggaccattgcttgcatgttaactttttgttttgttttgttttgttttgttttgcatttttaactccagatatcctaaagctcaattgtttggtctctggttttcatccttagagaagccatggagaacagacttgaaaagtttaggaaatcataatgtggcagaggtggtgggaagaagaaagttgagctttttccccttgagaaacttctgcatttagtttctatctttccaggcaaaacaaatgggtattcttttcatacaaccattttcaaatgaaccttagaaaagtcttaacatttaaggtattttatgcacagaatacacttagattgataggaaagaactcgtaatggagtttgagtaaagaaaatgactgatgtactaaacccagtaaaaattgttgaaaatgttaaaggtcagcatgttctaattgggaatctagatatagcttagatttcctattggcttagagtatttgctataacaaatgaagtgcaatgacaattatatattcctactcggtcatactggactggcttcgttctcttaatatactcagtaatgactcaagcctctggctattaacataccctagttgccgttttttaattgccatgagccaaatacttcttggtatacaattgatccatttattttaatggctgccttttcattttcatcttttcttgctgctacccatctatgtatgtagtcattggggggaaaatgtagccacattttttatgggaagactttgtgttaaaagtgaacattttgaaggtttttaactggtgaaactagcctggaataatgccaccagagactgagtggaaatcgccccttttgaaggtgccattcttatgagccaaaagtttgtcatttaaaagttcattttgagggaataacatgtaatataatttgaaataaaggtatagtaaccttaaaaagaacattataactgattgttgtgaatggggtgaatttgttaaaatgagtaactttgataaagtttttcatgcacaggcaaaatgtattcactagatttctacgtagtgatctgcttttactttgtaatttgtagttctcaaaagacttttttttaaaaaaataaagtccatacttacacttaggctttatacatcagtctttttttttttaaattccat

SEQ ID NO: 3299 - DNA, 1185 bp, Homo sapiens
tataattctggataactggaattagaagagggtctcttttgcacatcttatggtgggttaaagaaggtatgaggggaaaagttttttttttttttttccagtaggtagatatggtcatttcagaagaagaatgatagtgtattataaaaatttatgttaacaaactgttgtattttacctagtcgttttacatgcctaaatattgacagtatactagatatgtttgtggatagttgtacaaaaactggactaaataaagctaaactaacatctattagcatagtagaattctgtgtagattaagatttcccctaaattatttaggggaagtgttgatagtagggccattgacaacctatagcgaacattgcccaagagataaggtcagtgttgttattcacagctgcttcttatttaatttagctattgctgagtctgtctgatttgttttcttaggtgctgagggtgtaaatggaggagaggagtctgtaaacctgaatgatgcagatgaaggattttcatcaggggcttccctcagcagtcagccaattgggaccaaaccatcctcctcttctcagaggggaagcttaaggaaagtagcaactgggcgttcagccaaggataaagaaacagcctctgccatcaaatccagtgagagccctcgagattcagtagttcgcaagcagtatgtacagcaaccaactgatcttagtgtagattcagttgagctgacaccaatgaagaaacacctgagcctgcctgctggccaggtggtgccaaaaatcaatagcttaagtctaatccggacagccagtgcttcctcaagtaaatcatttgactatgtaaatggcagtcaagcaagtaccagcattggggttggcactgagggaggtactaatttagcagccaacaatgctaatcgatactcaactgtcagtctgcaggaagaccggctaggtcaagctggcgaaggtaaagagctcctcagcccaggagcccccttgaccaagcagtctcgatccccaagtttcaatatgcagctaatatcccaggtgtagttttgacatcctccctcatctttctgcttaccttttaaactgaacatttcattgtgcaagaagacacttcatcccacattgtgaaaatattggtcactgttatcagatttcatttagtttaggtatc

SEQ ID NO: 3300 - DNA, 1197 bp, Homo sapiens
caagacccaggaagagtcagtgtttcagtttgagtccaaaggcagtaaaaagccaatgtcccagttcaaatgcattcaggcaggaggaattctcttttacttgggggaagtttagccttcctcttctattcaggccttcaattgattggatgaggtccactcatattagagagtgcaatctgcttcacttagtcgaccgatttaaatgttagtctgatccagaaacaccgtgtgatggttaatattaagtgtcaacttgattggattgaaggatgtctagatagctgataacacagtggtcccaacctttttggcaccagttttgtggtatacagttttaccatggggtgggggatggtttcaggatgaaactgttccatctcagatcaggcattagattctcataaggagcagcacgacctagatcacttgtgtgtgagttcacaatagggttggtgctcctatgagaatttaatgtggccgctgatctgacaggaggcagaactcaggcggtaatgctcacccaccctgctgctcatctgctgtgacgctgggttcccaacaggccactgacccgtatgggtccacagcggggtttggggactcctgtggtaaagtattgtttctgggtgtgtctatgagggtgttgccagaggagattgacgtttgagtcagtggactgggagaggaagacccaccctcaatgtaggtgggcaccatgcagtcagctgccaaacggctagatggcggccagaagagggataaccttgcttgctgagccttgtggatttcatctttcttccatgctggatgcttccttccactcctcctgcccttggacatcagactctaggttctttggccttcggactctgggagttgcacaagggcctcctggggacttttgtgccttcagccacagaccgagggttgcactgttggctttgctgcttttgaggcttttggaattggatggagcaactgctggcttctttcttcctcagctagcagatggcctactgcaggacttcaccttgtgatagtgtgagccaattctccctagtaaactccatttcatatattcattagttctgtccctctggagaaccctaatacacatcctcacagagacactcagaataatgttattttttgtttgtttgagatggagtcttgctccgtcgcccaggctggagt

SEQ ID NO: 3301 - DNA, 1628 bp, Homo sapiens
gagtacggcccttggccaacaatgagcaaggaaatggatttcagtcacataaccacaaggaactgagttctatgagtatcccaaatgagcaaggaaacaaatcctcccctagagccaagaaaggaaggcagctctgtggataccttggttttggcctggtgctgcccatgtcatacttttgacatacagaactgtaagatagcaagtgtatgttgactaagctgctaaattggtggtgattgcttatggcagcaatagaaagctatatatcctagagaataaagaaggctagagctgctgtggaatgcacttgggaaagctggctacattgataatatgtaactgccatgggcatagttgcctttgtattcttccaggtctgggaagtacaacttagacttcagatctcgtaatgacccaggaggcatataaacctgagcagctagtggccctgtacaagtccttcatcagggaaaaacattgagtattccctgattaaggacttgtacagaggactctgttttccctggtgtttctggtgtgtctcaaaaattgtttgactgtgatgacagggaagtttggaagaagttcactgctaatgcatgtctccaggaagcagggaatgatctcacagtgacacttgaggcacattgctgaggccgtcgatgagaattcatgtaactttctccagcttacagtggactagattgacatgcaagctgatccagtccaattggtagggcatcatggtttctcattactcactgacttaaaatacttttattgccatcctggtgaagcactgcactgggtagataacacaggggcaccttgctgatcagagcccttggccaggtacaaagagctcagtttctaaaactctgtcatttcaataatgttataaattgaatcatacagtatgtaattttatgggattcgctttttttctgttgatctctttttttctgagtcatctcagctgttgtgtgtatcaatagttcatttccttttactgttttgtttggtttaactcattgacctattgaaggatatctgggctcattccagtctgtgaataatgctgctgtggacattcatgtgcaagtttttgtgtgaacattaagttttcatttctttaagataaatgcccaggagtgaaactgatgggttgtatgtagttacaaactgccaagctgttttccagagttggcggtaccattctaatttcccatgacaattttttgaagagtccaagctagttgctttagagtgcctcacctacattttttaattgtctgactttttcctaatgacatcacttaatttgttcctcaatctcctgaatttcctatagactggaggttaggtctggtggtttgattagattttttaaaaaaatatgacttcatctgtgatgctgtgtactttatgttgcataacatgaaccctaagaacagagtgagctgctggacagcaagtttcatggggtgcagtaattaacacaccacatagtataaatctgaaataatgacaaatgtgttaagggccttgggatattgggccatgtactctgaggagcacaaggtgaggtgcaggttcctgcccctaaagaactctatcttttgaga

SEQ ID NO: 3302 - DNA, 1123 bp, Homo sapiens
gggattacaggcacccgccatcatgcctggctaatttttgtatttttgtagaaatgggcttcaccatgttggccaggctggtcttgaacttctgacctcaggtgatccacccgccttggcctcccatattgttgggattataggcatgagccactgcgcccagccaagttatagttctaaaataagtcatcatatgatggacggaaggagccctgcattcttaccccctgtcagggagtttcatatcccagaacagtgatgggagtgagtagctgggatagattcagaaaaccaagcaatgctagaaagagcggaacagggagagccaacatctgcagatcagcggccagccatgaagctgacaggatggctgagattatagttcataaaacttagagaagcagtcttttttttttttttttttttttttccccaaatgctgcacgtagcatccaaaagtagtcttttttgagagagtggctagggacattaggtaaagagaaagcaaagatactttattgaggattaatgtcatggtagttggaaggaaaacttttagagaattttcttgggaatactaactttgcatttatatgaatgtatacagcagatctgttcagagtttaaataacctttgaacccttgttctcattatatatgtggtatattttacagggaaattatattttctttcacactttacttgttatttctctaggagaggactgctgttttttcttaaagttcataaaatagatatatttgtgtatatgaaccaaactgaaggcacttctaatgagtgtttctacatttttagggaagcaggaattgaggaacagattctccagccatggattgtggtgaatctcgtggtggctcttctggttggattatcttggctatttttgtcttataggccaggcatggatcttagtgaaggtattaaagaaaaaaaatagcataagaatatcctgaaatcttctataatggttttataaacctccttttaataggtatagcttataatattccaataacaaagacacatttaaattaaaatgatacaagaagagagaaaataaagtggtgtaacagaatgccaagagaagcagggaggagtgtc

SEQ ID NO: 3303 - DNA, 1438 bp, Homo sapiens
gtgaatgtgtctgttttgtcttattttttgcttattttatcttaacatggttatttattttgcctttgaacacttggaatctgtttctataatagcctggatgatggccgttaggagtggattgatgtgaggagtttgtaggatgaggctgaaggaaaggattagcctcctgcactttgtagaaattctcactatagtgcagaatattaaaaagagtcatttttaaaaagatgaattaatgtgaaatactgtgtgcttgaaccagatttctacaactgcttttgaaaatttaaaaagaaaatccaatttggttaaatctataggggactaaaagtttgctgttaaaatttttagttaattcactaacccttttttttttcttttttcttttttttaaccttcagatggtgaggtctacagctttgggactcttccctggagaagtggaccagtggagatttgtccaagtagccccattctagaaaatgccctggttgggcaatatgttattactgtggcaacaggaagcttccatagtggagcagtgacagacaatggtgtcgcgtacatgtggggagagaattctgctggccagtgtgcagtagccaaccagcagtatgtgccggaaccaaatcctgtcagcattgctgattctgaggccagccctttgttagcagtcaggattttacagttggcgtgtggcgaggagcacactctggcattgtcaataagcagagagatttgggcatggggtaccggttgtcagttgggtctcattaccactgccttcccagtgacaaagccgcaaaaggtagaacatcttgctgggcgagtggtgcttcaagttgcctgtggtgctttccacagcttagcccttgtacaatgcctcccttcccaggatctgaagccagtcccagaacgatgcaaccagtgcagccagctcttgattactatgactgacaaagaagaccatgtgattatatcagacagtcattgttgcccattaggtgtgacactgacagaatctcaggcagaaaaccatgccagcactgctctcagcccctccactgaaacccttgacaggcaggaagaagtatttgagaacactcttgtagcaaatgatcagtctgttgctactgaactgaatgcagtaagtgctcagatcacaagcagcgatgccatgtcctctcaacaaaatgtcatgggaacaactgaaatttcctctgccagaaacataccatcataccctgacacccaagcagtcaatgaatacctacggaaactgtcagatcattcagtaagagaggactcagagcatggtgaaaagccagtgccatctcaggtacctgctcaattttataaaataaaagtgtgtctagagttgaactgtatgggcttttctttagaaactttaaaatgagtaaggcttggtagcatt

SEQ ID NO: 3304 - DNA, 1195 bp, Homo sapiens
cccctgtagtcccagctactccagaggctgaggcaggagaatcacttgagcccgggaggcggagattgctgtgagctgagattgcgccactgcgctccagcctgggaaaaaaaaaaaagaaaactgatgttaggcataggtgatgtacccagtacccagggttgtgtagctgctctttcataattgagggctccagtgttttagacaggaatttttactgtttttactcatatgatatttgtgacttaactttattccttatactaggtgattgaaatctctgaatatcgaacccagctctatgaatatctacaaaatcgaatgatggccattgcacccaatgttacagtcatggttggggaattagttggagcacggcttattgctcatgcaggtgatggttttaatgtaatttgtaaatatgagtgtttgaagtattttctggttaggattttgtttacatctttaaactacagctgttaaagaaattttagctgataacacaaaagtagatgatatgtgggagatcactaagggccaagtgttcaatgatgatttctatttgtttgcctgatttccttttggataatgaaggcatctttagtcactacctcttctgagacacttgtggtccattgttagaagtttgttagggttaattagaacaatcggatgaatgcaggaggataaaacagttaacattttcataataaaaactcactagacctagatttgaatacagttttaagaaatcactgtagagaaagaaaaaaaaaagaaatcactgtagaggatttgtgcccttgattgattaccttagtttcactattgagtgtgaggatgtaatatatttgactttcaaaaatattttcaacaactgatttataataaaactttgtatatgtgtatggcagtattataaggatgatatgctataattaaaatgctatgtaattgaatacctacaaatacaatgaagtactgattcatcatttttatgttacttggagacattgttataattcatcaaaaaagattatatcatctgcatcagagtgtttaaaatggcataactcctttttttttgtttgagacagagtttcactctgttgcactggctggagtgcagtggctcactgcaacctctgcctcccaggttcaagcaattctcctgcctcaggctcccaagttgctg

SEQ ID NO: 3305 - DNA, 1195 bp, Homo sapiens; identical to SEQ ID NO: 3304

SEQ ID NO: 3306 - DNA, 1107 bp, Homo sapiens
tacgtggaacattcatatatttggaggtgcattctttgtaacttttttcttttgtaggttctcttttaaatttggccaagcatgcagcttctaccgttcagattcttggagctgaaaaggcacttttcagagccctcaaatctagacgggatacccctaagtatggtctcatttatcatgcttcactcgtgggccagacaagtcccaaacacaaaggaaaggtgtgttatagggttttgctttgtttttgaggttagactttttcattttttacaacccatttttcttctactctgtagtacacattaaatcttctattgtctctttcttgttaaatagggaatggtgagttatttaaataaaaagtgctttgtgtacactgaaggataaggttagaagaaactgttattggttggattaaagccagtttcttccattgtgttagtatttttttcccccctagaatctccctgtggttggcacactgaaaatactatctctggcagcaaaaaaaaaatctaacatttacgaatcataaaaaatagcatatgcattatgctaaaacactttgagagaagtcactaaactttttttttttgagatggagtcccgctctgtcgccaggctagagtgcagtggcttgatctcggctcactgcaacctccagctccctggttcaaacgattctcctgcctccctgcctcagccttctgagtagctgggattacatgcacgtgccaccacgcccggctaatttttgtattttaagtaaagaccagtttcaccatgttggccaggctggtctcaaactcctgacctcctgatccacccacctcggcttcccagagtgctgggattacaggtgtgagcacctgtgcctgtcctaaatcttcagtagccttatgagatgtaggtatctctatcttgcagatgatgaaactgaggcttagacaagttaagtactttcaatgtttttgaaagatgtgtcgtttaacagatctaaactgaaaattgataaaatttagagcagagtggtggaggaaaataaagcgttcaataaaataaaatgttaattagattgaaaaagaacccacgcttttttttgtt

SEQ ID NO: 3307 - DNA, 1192 bp, Homo sapiens
ctgtgtgttctttaatttttctcagcaatgtgctaatagtttttaatagcactgtggtacatatttcactgaatttgttgctaaatatttcatgactttcgatgttattaaaaatgagaatggattttaaatttcactttctaggctgggtgtggtggctcacacctataatcctagcactttggaagtctaggcgaggggaatcacttgaggccaggagtttgagaccaacctgggcaacatagggagactccatctctaccaaaaaaaataaaatttcacttcctaattgtttgctactaatatatagaaatgtgatacttttgttttacattgtctaattcactaattgctgaatttgctcagatctgttgcattagatctagtagatttttaaaagattctttaggattttttgcatacataatcatgtcacctgtgaataaagacatctttgccttttccttttaaatgtggaagtggtgtgagcagtcatctttgcctctttcccaatattaaaggtaaatattcactatttcacagttaaggatgatgttagctctgtgggtttttttgttgttgttttctttttttttttttcgggatggagtcttgctttgtcacccaggctggagtacagtggtgcactctcggctcactgcaaccacctcctcctggaatcaagctattcttctgcctcagcctcctgagtagctgggattacaggagtgcaccaccacgcccggctaatttttgcatttttagtagagacaaggtttcaccatgttggctaggctgctcttgaacccctgacctcaagtgacccgcccgcctcggccttccagagtgctgggattacggatgtgagccaccatgcccggccaaagaggagattttttttttttaaaagacagagtctcaccctgtcgcccaggctgaagtgcagtggtgtgatctcagctcactgcaacctccacctcccggattcaagcaattctcctgcctcagcctcctgagtagctgggattacaggcagatgccaccatacccagctgatttttgtattttttagtagaggcagggtttctctgttggccaggctgatctccaacccctgacctcaggtgatgcacctgcctcagcctcctgaagtgctgggattacaggcatgagcctccatgcccagccacac

SEQ ID NO: 3308 - DNA, 1226 bp, Homo sapiens
aaacatatacggataaccaaaacttgccacatgaggccagtcagaaaattccaaatattaacaaaaacacatttttcactggcccattaatcagagaactttaaaaattacataaaaattaaaattacctccgtataggaatacattttaattcacccagagatccaacacacttaagagagaagaattttactaatttaattttttaaaaaaccactacctattaaactcatgtagcattgctaagagtatctacggaattttcacatcgatgttttcttgcgaaagtggaaatcaaaagcacagagaccctctttaacaatgaaccgctgataagcaaaatataattataataacattccacttacgtgcatttgtgagcattaatttacatcaggctttccaatttaccaacatttatagaatttcttactagtgagagttttacaaaacttttgaagtaattgttaaatttgaaaacatttctgtattttccagaccactgtgcttccaatccagagtgctctcacatttataaggtccatctacagtttgttaccatgtgtctttgaacatgtgttagacaaatgaaggtattctcacactctgtacatttataggaatttttcaaaaatgagttcttttaagtatcaaatgaaacttatgaactaaagaaattactacacatttaaatttataaggcttatctccactgacttcttacatatttcaaggaaaaatggaaaaactgaaggctttgccacatttcttagaattacagggtttttctctattgtgaacccttttatgtccttgaaagaaactggggaaactgaggactttaccagtttttttacattcatttttcccccagtatgagtttttcttagttttcaaagggaactgggaaaattgcatgttttccaatattcctcacaatcccactatgtgttttttcatttgttctaatagaactagaacatctgaagtctttaccacatttcttacattcacatggtttttttccagtatgacttctttcatgctgttgaagggatctgggaaaagtgaaggctttaccactttacttccatccaaagggtttctcttcagtttgagttctttcatgtcgtcaaagggaactggaaaatgtgaatgatttaccgcattttttacattcctaaggcttttctccactgtgagcccttgtatgcttatgaaggaaa

SEQ ID NO: 3309 - DNA, 1320 bp, Homo sapiens
tattcttagcttctgggccatataaaagcaggcagcgggccacattctggcatggagccttagtttgccagcccctgctctaaaatactttttccaaatgtttgagtgttaaattttattatgatgcttgtattattatttaaaatattgtgtgtttctagagggaaccagggggttcttgagaccagatttttgtgcaacttgggcaaaaatactagattccgagagtttgtagagaagattgagttgaaggaatggagggttcagtcaggtcaaagacaagatcacacatttattggaatggcaataagcctcaagagttgtaagggtagagttgtttaggactagtagatactagttatctagggtattgagtttcttttcccattagtattcttttctctattgcctgggtaagaactttaccacctttcagcctcctagccctttcatctattttaacgaaaaagaacgctgagttggcctgaaaaagatcagggcatctaggctttaccctgactcttctgctgacttgtgtgacatttgacttctttgaacttaggttttttcatctgtaaggtaggactgtttagataatttcttaaatgttttccatcttgaattccttatttttgcgattctcacaaatgagcttgattttatttgcttccattctgttctgttggttctgctctttacctcaatctgtgtccactggtctcaaccctctattactttaatgtaactgaactgtttcccaaattactctgaattgtaatccgaggatgggaattccattgactgtactctgtatcggggagaaatacttcaacaaaacaaagtaataacccactctttctaaatgtcaaatgttttcaaaaacaagatattaattgattaggaatatatagtatcagacacttttttgtattaaaaggacaatatagtattaagtagtatactaatttttactacattcatcatatctataaggcagtattagggttggttcttaacatggattatgttatgtattttagggctggtaaattttaaagaaatttcatctctagctttgttgctgttatcctattcattctttggaaggatattattaaaacaaatgaaaatttttatcttcaaactgatagtggagttaaattaacattaaatatttcccctaaatatatacttatcagagcaaacatgtaattttactgaatacttgtacaggtacacatacctttaagtcagtatagtgtaacattattataaggatgaatgttgcttactgtgcccattattttgtgtccttttctg

SEQ ID NO: 3310 - DNA, 1107 bp, Homo sapiens
agttattttcaagtctcctgacagtcactgggagtacaaggtttgctaatgtgctctctggacgttattaatggccagtattagttgctgctgtattactgactcgcttagctgtagaaagggtaatactctcctgattttgtatgattggactcttaagtagctgctgttagtcagaattaaaacccatctcagactaagaatataatgaataagattaataggccaaaatatgtatctaatcacattgataaaaattaatataactgacacaataaaacacatttcccccatctgtacaataaatacagcttcaaattcagtggagtctgtagggcagataactttaatcatcactactgtagtcagtataagaaatgctgaaaaaaatccaggagggcttgtctctttgtgggtggtcactgtgatgttgggccagctcctgttcaggtccagagctgctaacgtgggttctactcagtcccagtgacttggccagaatagagctttgccaggtaactgccctgtgctaggtgaaaggggaaaagcagtagctggatatatttcaaatgaggttttgaacaagttcagaaagtggaacttgattgaaaagtgaacaagtgtagtagtgtgtgagaaaattcagatggtgtcggatgcagaagttaatattccacttaatgttatctgagcattaaaaatcatcagcatttaactgagaccccactatagagtttccttatcaagactttttggttttaaagttgtttttaatgcattgcaagttacaatagctattttgcttttagatttttcccagcactttgtatttattagctttcattaacttgcctccagtatacattccacttcgtgcttttcttaggtcatttctacatcccttattccttgttttcctgcagtgtaatggccctgaatgtcctctgagccttcagctccattatggacccaaactagactatacttggataagttaagctcttcttcgtgtactggtctataattagaaaaactgttttaaattagatgttcccattatttatttaaacagctttttgctgagaaagcttagtggattaatgaggc

SEQ ID NO: 3311 - DNA, 1198 bp, Homo sapiens
agctctccaccacagagagagggccccaaagagggttgctgttttacagttgaatatagaggcttttatgagaaatcagtgaaagctgggcatctcatttgcataaggcatgaatttctggtagctccaccgcatccttctagtgtgcatgcaagcccttagcttgagttactccatagttactccatactgctttgtttcctttaaggtacatgtgtcaggggatggaattttccattgtgagcatgtctgggcaaatctcctgtgtagcctttcttatctatgtggcagtgggcatgtcttaagcaagttcccccgtgcaaattcccttttctgtgcctgcagcttgatttctaagctcgttttttgtttgaaagaattttaccgaggacccaccctaactgcctgcctgaccatttccttcctcctctctcagaatgatttcttcacagttttgatagaagttttactaagattgaaagaaaacaaactttgaataaatagatgcacacaccatgtaactggatgttagtactgaattttatcatgatattaatctgggcaagttggctacctgaccagcaggctgaatctggcatgcatgcgtgtgtgtgtgtgtgtgtgtgtgtgtgtagttaattttttaatttacatttgaaataggcttggacaggacaggcattctgcagctgccagttacctccatattctcttatataaacctcatatttaaattcattccttccctcctccctcctgcgctggctcttagattcatttgagtttttgacagttttgtttaaataaatctaggaaggactgatgcatttttttttgtaattctgattaatattccagtgagactttagagaagggaaggaacaaatttacaggtcatctggatcatttaactcttagagaaaatagttaaatggagatttaccagtgtattttttaaataagcaagatgggatttggttaactgagagaagaaactaccttgcaatatttagctggcttgactgcaggataaaacagaggtcagtacatttgtttcactgagcagatggtgactgcacttgttctcaaagtgtggttgccagaccagcatcagtatcacctgagaggttgtttgaaaaatatttagccccatccaagacctgctgaatcagaaagcctggggttggaggccacagtc

SEQ ID NO: 3312 - DNA, 1197 bp, Homo sapiens
atagttgctgaatgaatgacgggcatgagcaaataagcaaatgaataggtgaatgaatcacctagagctgaggtcaaaaccccctgcctgcagccaggtttggcctagccagggttcattgtgtgctacttagtataacatttttaataagttgccaacatgtagagtctggagattttacttagggatttttgctttcttgttgggggaaggaaagggggaaagatttggaagacctggcctggccacactgggccacctcccctccaggccccagtctgctggagccagtcatggaggccacctttaaaccaggcatgtaagatcccagctttcaccacctcctctctctccaaccttcccctgccctcacaaccacgtctgctttcctcacttacagtaggtgtttggatccaggaaacacttgaacttgccacaccctgacctaaagacatagccccaaatcactttcaccatgtagggtctgagcctctttaaatccatattcccgtccatccagttttgtgcaaacatgagccagagtgtgctttggtccttccttggagtcagcgtcgcctgtagccccctccattattgtctcgtggccttttgtgctaaactcggggcctctgctgtggagtaaagaatgtgggtttgtgtccctacctctgtcactgctggttctgcaacccaggaccattctcattctactatggtgatgcccctgacttcgttgacagcacacagacatgacttcagagttccgtgcacatgtgtgcatcttctttcccttctctagagatgtttggcatcttcctcctgctgggttgcaacacaggctgctacagcattctcttatcttcctttgcccttacacagactccaagcccacggtagagacgctgggacccactgtgaagagcgaagagacaaccaccccctaccccaccgaagaggaggccacagagtgtggggagaactgcagctttgaggatggtaagcacaaattgcctccagatggcatgggtgcggactagtcagagtgggagctggcctgtggctggacagggacctagtggtcccccagatcagagatccaggggatctcaaagaagtggtaagagaggtgggggcacttaggggtttggggcagtggctgtttacaaccaatgtagaagcatttggatagtgtaacaa

SEQ ID NO: 3313 - DNA, 1225 bp, Homo sapiens
aaaaacaacccaggcgagggccaggcgcagtggctcacacctgtaatcccagcactttgggaggccgaggtgggcggatcacgagatcaggagatcgagaccatcctggctaacatggtgaaaccctgtctatactaaaaatacaaaaaattagctaggcatggtggcgggcacctatagtcccagctactcaggaggctaaggcaggagaatggcgtgaaccctggaggtggagcttgcagtgagccaagatcacgccactgcactccagcctgggtgacagagcaagactccgtctcaaaaaaaacaaaaacaaaaaacaacccatgcaaggatgtgacggtggtctggctgcaacatctgtcaccccactgatcaccagggttgattcggctgatctggctggctaggtgggtatgccctcctgagcctcaccactccatgttcatccctcctgaagctgcatgcttggttgaagaagacaaccttccccagtagaaggccaatatttggtcaagggtatataagtagctgcattcccttgctagaacctccaaacaagctctcaaggtccatttgcaggaaaatgttgggtagtgaagcttccaaggctccagacacatccaaatgaggtgctgcatgtggcagtatgttttttgttttttgtttgtttgtttgtttgtttgttttgagacagagtcttgctctgtcacccaggccggagtacagtggcacgatctcgactcactgcaacctccgcctcccaggttcaagcgattctcctgcctcagcctcccaagtagctgggattataggcacccgctgccatacctggctaattttttgtattttagtagagacggagtttcaccgtgttgcccaggctggtctcaaactcctgagctcaggcaattcacccaccttggcctcccaaattgctaggattgcaggcataagccaccacacccagccacttttcttaaaaacacacacacaaacaaacaaaactatgtgatcctccagttctttctcttcagtgaccaacttgaagtccatatgtttaagatggtaggaatgtaagattgaaggagctttgatccctgagtcactgagtgaaggagtccaccaaggaaagccactcaaattatgccagactgtaacatgaatgagaaataggcagtatgcagcccctaagatttggagatttgttactgcagaaaagcct

SEQ ID NO: 3314 - DNA, 1193 bp, Homo sapiens
gttttaaaaccctttttttccctcaagtgacttatgatcattacataaaaatgagactgtacaaactaagaattttttcattttatcaataatcccaccacctagagatattctggtacataaattcctaaattttttctctatatatgtactaaaagttgtcatatgaaaatataataactggccacgcatggtagctcacgcctgtaatcccagcactttgggaggccgaggtgggtggatcacctgaggtcaggaattccagaccaggctggccaacatggcgaaactccatttctactaaaaatacaaaaattagccaagcgtggtggcgggtgcctgtagtccaagctactcaggaggctgaggcaggagaattgcttgaacccgggaggcagaggttgtagtgagccgagatcgcaccattgcactccagcctacacaagaagagtgaaactccatctcaaaaaaaaaaaaaaatatatatatatatatatatatatataaaataactaaaaagtgtgaaataggctggtccatatgcagtggttttacaagtaatttatcacaaccagttagttacagatttctttgctccttctccactcccactgcttcacttgactagccttaaaggaaaagaaattttttaaatgtgtgaaataataaataataaactcaataaagaagctggccttctatcaggaggctgaggctgtagtgacccgtgattacgccactgaattccagcctgggcgacagactgagaccttgtctgaacgacaacaaaaagaatcagaatttgaactctatttccttaaagtaagataatgttttgaaatttttttttttggaaggcagtcccactctgtcgcccaggctagagcacaatggtgtgatctctgctcactgcaacctcctactcccaggctaaagccatcctcccacctcaacgttcctagtagctaggactacaggtgcacgccaccacacctggctaatttttgtattttttagtagagatggggtctcatcacgttgtccaggctaatctcgaattcgtgacctcaagtgatctacccacctcagcctaccaaagtgctgggattacaggtgtgagccactgcacccagccatgttttgaaattttaaaattcaatttagtgctttaaatgtgtatttcagttaaaagt

SEQ ID NO: 3315 - DNA, 1170 bp, Homo sapiens
tatttaacattgtgatctggtgatcattgctttccctgcctcctcctccctatctgtggcatggtaagtagatggaagatagtaggcatgatacttaagcatagtttttcctattctttaattaacatctgaatctctggagagaagttccccaatttttctgggacctgcccatagttattctgaccacaggataatttgctaggctttttattctgaataattacttttagaaaacgtgttttagctgatactcaggcatatttcacagtagcattggcaagatgctttggattaaactaaatctggttgtatatgtgtgtctgtatgttgggctaacaaattgaagacattcatgttacacctaagacttgggacaacctatattatagaggcaaatatggtttggtgttcagcttacttgtaatattttaaaatcaaagttgtttttttttttaaataggtcctaaaggaagctaaaaaaccaatggtggttttaggcagttctgcactccaaagaaatgatggagcagcaattcttgcagctgtttctagcattgcacaaaagattcggatgactagtggtgttactggtgattggaaagttatgaatatccttcataggtttgttgagtaattgctttatatactataaattcaagtaatgttgtgtatatgtatgtgttcctgatacactgttaaatttaatttacaaacaacatttagcaacattatcccagttacacatgtgaaatatagacctttactctgtgtgagaagagcccgagatgataaggaatatttaaaatatttgaaataacagtgagtgttgagaaaaaaagtgaagtactataaaaattgttatattagttacaccttggttcaaaaattgcaacaagttctttaattaaatgataaaaatgtaagctaatatgagaattcagctaaaggatttctttctttctttttttttctttttaattatttggctttttgttttgagacagggtctcagtacagtggcatgatcatagtccactgcagccctgacttcctgagctccagcgatcctcccacccctgcctcccaagtattaaatggctgaagctacaggcgcatgccacatgcccagctaattttttgtttttgtagagataaagtctcactatg

SEQ ID NO: 3316 - DNA, 1489 bp, Homo sapiens
actacaggaagtggagctacagatagtaaagatgatgatgacattgacctctttggatctgatgatgaggaggtatggcgtcttctataaagaacatatcggccaggcgcagtggctcatgcctgtaatcccagcatgttgggaggctgaggcgggtggatcacgaggtcaggagttgaagaccagcctggccaagatggtgaaaccctgtctgtactaaaaatacaaaaaaatgtggcaggcatctgtaatcccagctactcaggcggctaaggcagagaattgcttgaacctaggaagcggaggttgcagtgagccaagatcgtgccactgcatccagcctgggcgacagagcgagactccgtcccaaaaaaaaaaaaaaagaatacatcgatcagcaattgtatcaatgtggttaagccaaattgcctggatttgaatcctggctttaatttatatgcctttttcaaattctgactggttgcatgatgaataaaatcaaatcaccatctttcggctgagttcgtgatggatttgcttttttctgattaagccagtcttttttgtgatgaccccactagctttaagcagaggaacaaccagctttctgaagtggattaattttttttctttacaggaaagtgaagaagcaaagaggctaagggaagaacgtcttgcacaatatgaatcaaagaaagccaaaagtaggtcatttgtttttaacttcatttcatgttaatgtaagtaatctttttcaaagcttgaccttgaagtaatttcctccacattccttgaataggtcaatattttaaaacctgtacaggttcttccacagctactggtctgcagctgttcttatggtagcagttgtggcattcctctgtgggaaagaaactgttaacacaaacacctctttcttagcaaaacagaaagtgggtatatatgtgtgacagacacaagatgtatctgtagttttgtttggctaaggagatagtctcaaaacaaattgagatggatttgtttgtgtcttggagtagggtgaaaaaaatacaattcattatttgaataatgctgtttattgtttttagaacctgcacttgttgccaagtcttccatcttactagatgtgaaaccttgggatgatgagacagatatggcgaaattagaggagtgcgtcagaagcattcaagcagacggcttagtctggggctcatgtgagtttaggctttgcctttttttttttgaaactaacatctggaatttgcctacagtttcaacctttcctacaagacttttctaactaggatttttcttaatgctctttttagctaaactagttccagtgggatacggaattaagaaacttcaaatacagtgtgtagttgaagatgataaagttggaacagatatgctggaggagcagatcactgcttttgaggactatgtgcagtccatggatgtggctgctttcaacaagatctaaaatcca

SEQ ID NO: 3317 - DNA, 1489 bp, Homo sapiens; identical to SEQ ID NO: 3316

SEQ ID NO: 3318 - DNA, 1489 bp, Homo sapiens; identical to SEQ ID NO: 3316

SEQ ID NO: 3319 - DNA, 1199 bp, Homo sapiens
taagaaatgttaagaaataggccaagtgcggtggctcacgcctataatcctatcactttgggaggcctaggcaggcagatcacctgaggtcaggagttcaagaccagcctggccaacatgacgaaaccccatctctactaaaaagacaaaaaattagctgggcatggtggcatatacctgtaaccccaactacttgggtggctgaggcaggagaattgtttgaacctgggaggcggaggctgcagtgagctgggattacaccattgcattccagcctgggcaacagagcaagactgtctcaaaaaacaaaacgaaacaaaaaaagaaagttattcttagtaaggaacttcttgtttaatagcatttttgtttattttaaaaagtgatcagaagtagtaaactatctttgaggaaatactgtaaccccagaatatttcctcttgacttctttttgtaacaaggataatttagggatttataaagttgtaaggatttcactgtttttggactgcctataataatagcacattaaccttcacataataagaaatctggacaagttcagttacacagtatgatgaatacttgaattaggaacattgtggaaaatttgctttagagaatcaaggcagtagtttggtatttggtgcttattaaaaatgtggtttgttttgaactggaagcaagttgaccaaggacttatgactaatgtgatgctaagttccacttggccccttttaaaaacgtgtatgtgccttttgaagatacacaaaacactgaggattttagttttgaaatcaaagactattaaaggagctgtacagaggtaaaaaaataaatgtggaacattattaacttactttgtgtctaggaacaatggattttgtatctgatttaaaatgccaacactgttttgtctctgttcattttttctgtgaggatacttaaggttattattcctgtctgtttcctgtactcccctagtcatgagcacttgaagtacaaggtgtctccccctaggtgcaattaggttgtttctttgtttttagtttcaattctatgtgcatagcaggaatgctccacaggaatggcttctgacaataatctgtcctgttgattttgttttccttgcccatgacttgaacaactgtgttttaaagtactgtagtctagtaggtaactttgtggcaaaaattttc

SEQ ID NO: 3320 - DNA, 1227 bp, Homo sapiens
acctttggagaactctgagtgtaggagcaatttgatgaagcagacttgcttaatctgaatgtgaagtgctgagatggaggtgtacaggagaagggagtgttaaaagaagaaatctgtattcagttaggaatttccagcagtagtccaggaattaattgattatagcatagagtacatagcaaacatttattgacttgattttcctttccatttgccacacatgtgagtgtcacaaatgatattcacgtgtacttgtatggaaatcttgcacagattttagcatctaagtgccagaaagtaaaaattttgtggcatcatttaacagtattcattggtaggagagatgtaaatatcacagtcaggttaagaattatcagtaaggaaatagacacaatattagcatagttgtccattcataatgaagttattccaatggctgatattgtgagtgtattttccaggcatgtggtggctgcatcatatcagttggaggccagattccaaacaacctggcagttcctctatacaagaatggtgtcaagatcatgggcacaagccccctgcagatcgacagggctgaggatcgctccatcttctcagctgtcttggatgagctgaaggtggctcaggcaccttggaaagctgttaatactttggtaaggagagaaacaagtatctgtttctaatgttctattttgaagagctgcaacctgaatgttgactgaatgttgactattggatatgttaactacagggcagatagaatgcatacacttagtgaatttaaagttgttgtatatccatgattgcagttaatgctgattatgagttgatagcagtattctcattaagattcagacaatgaaaataatttcaaaccagttttgaacaagatttgatatttagaatcagaagctaggaattttatgtatttcagtgtccaatttacatttaatggtgcctttagagaataaagaagctgggctaccactcgagctaatgatacattctgtaattttattgcatattttaaactactcatacatttttattgttgtttctattaattagaatgaagcactggaatttgcaaagtctgtggactacccctgcttgttgaggccttcctatgttttgaggtaacactgtatattgttttccaaaacaatgattcaaaaattgggagatacagaaatgcatgctgtatgctaatagcactagggttct

SEQ ID NO: 3321 - DNA, 1208 bp, Homo sapiens
ggggaaaatttgatgtatttgttcttttaagagcttcttttgtaaaattatagtatgtggcaccttttgtggcttaataaaagatgtggagaaaaaatgaaatttattctaagaacataactatattgttaaatactttgctgttggtaaaatatgtttgatcctgataggtaaggcgttcctggaactatatctaatggactcctacctgtctcttattctcattctcacttttaacttttaatctcttttcaactaccaacattaatgtttacggatgtatattaaaatatactctgggcttggaatcaagagtcttaggtaccagcattaggtatattaccaagtagctaactgaactaaaaacaataatttggcattcctgtgcttcagtctttccatctccgaaatgggaataatgtattctctctagtgctgctgggaaaaacataatgagaaaaaaaaagagagagagagagtgtatgtgtgtgtgtgtgtgtgtgtgtgtccatgcacatgtgttgtgtatagaaagtgtaaaatctggtctatggccataccaccccgaatgcacccgatctcgtctgatctcggaaactaagcagggtcaggcctggttagtacttggatgggagaagtgtaaaatctggattactaaaatcatatgtgtctgtctagagtttatttacagtaaaagttcagaagtactagccgattaaaaactaattttaaaaaacattgaaatatttctataatagctaagaagccttagattgttgatagtaattatgatattgtgtgcatttataaacagcatttatggatattaacaggcctacacatgttcttgaagatacatttccctgtttttttaaatttaaagaacaccaagagtatactggaaaagcgaatgggaacacagactgaggtctaggccatatttaatatttctaagctatataatgttaaacaatcatctctattgtcatttgagaagtgattctcttcctgtattctcttcctgccctagccctttggagaagagattaaaatgacaccaaaagaaaatgagttacattcgataattaaaaatttttcagctgaaaggaaattcttaggaatcaatcagtttaacccagaaatgaaattacacaccttccacacctcatttgtttaccatgtctgaatctaaaatgaactgcaagtgt

SEQ ID NO: 3322 - DNA, 1172 bp, Homo sapiens
ttacaaagaaaggaagcatggaaggtacatgtatcaagatttggcatgtctgaacatgtctgttgtatgcattcacttggttgaaatgctgctaggtgtaaaattctaggttgaaacaaaactttgagaattttgaagtcacagctctatttgggagatggaatggaagaaatcgtccatatttttatcatatgtaaatttacataatacttctattttccccagagtacttctctttccattttgcctgatatccacagtccacagttcttttggtttaagatttcctagaggtaaagggaagaaggagatgtgtagtctaagtgtttcctaaatgtactctgaagcattcccgctgaaaacagttcttcttgctctgtttagggaggtttgtaatactactactcctcagcctttggtgttatacattattgggttgcttctcagtttccccccattaaattaggcttcagattgcttatgtttaccaagttggctaacactgataagccacttcctacttttactattctatctttattgcctcctttctgtgattgttggtgtctgtcttttaaaattaactctttttttgtcagtataatgaagttgaaatgaaagggaagtaatttgtgaattcaatctgccataccatgttaaatggaaactcaatataatttgtgtccttaattttttattttgaaatgtttcaaagttatagaaaatgttcaagagtaatacaatgaacactgtaccttcatatagaaaaaccaactgataatccattgccatatacatattacaccctctatgtgtatgtgcatttgtgtgtatatatatgtatagacacatcaaaaacatagatacgtatacatatattatatatctctctccctccctgtgtgagtaaactatttgaaagtaaatggcagacacaagatagttcatctataaagacttcaggatcttctaagatcaaagaatactactttacatagctgcaataccattaccactctcaaatatttaacattgatataatagtacatgatatatagtccctatttagatttcctcaattatcccaagaatgttttatatatttttttatccaagagccaaagatgcaacattgctctatttctgtaataaatgttagtttgaacatcata

SEQ ID NO: 3323 - DNA, 1093 bp, Homo sapiens
tttcttctccttataaggacacctgtcaggtttgattaggacccaccctaatggcctcattttaacctaatcacctctttaaaggctccaagtacatactccaagtagaatctccaagtacaatcacattctgaggtactggggattagggcttcaatacatgaatttggagggggatatgattcagccagtaatacccactagctgataataatagcccttccctgctccatggagatatgtgtgcaggtcattttccatttgcaccttgcttgctttttatttcaaagtgggatcatatttttactcattagaacacagtgtcaatgcagattatctaaagtcagccttattgcaagtcttgacaatgtgcattttttttattattttacagtctttattttgaatttgtcaccttatttatagtttacttaatatgcttctttatgatgtgtatttcttgaaaacttgtgtcattctaagaatagtaggcaattttataaactcatgacataaatatttgtgttttactgatcatagaactcatgaaagatttgaacgacttaatatcgctttacaattttctaatattaatagggaaaatgtctgatatgaagggaatataatcttaatgtctttgtcttattacttttgagccattcaatatctcttttagttggcacatgttttaaatattttttacgcagaactttctagaatagttgctatatctttccatgttagtattaaagacagcaaaacatttgcttatgttcttggaattcatctcatgcaatatttattccatagtaaacatactaagggaaagagggaaaacctcgtatttttcctcttaaggaaactattcttgtgtaaatggatagctttacactctaaggtcttagcccaaattctttaactaaatagttatgttgtcagctaggaaaattcatttctatattataccacataaagaatatatcacacataattaatcaaaacatgagagcatattggaagtattaatctactttgattatagcactttttgttggaatgccttacactaactaataacttggaagttctttgc

SEQ ID NO: 3324 - DNA, 1198 bp, Homo sapiens
ctccataatctgagacttctgtaagacttgtcatatccatgatatttatctggcttggttatgtgttctattagagtaagctttattagagtaatgtgttatattagagtatgtgttttatttagagtaagttaataattgattcatatgaggctatctgacctatagttaggtttatgttgcaggtcaatatattcctctaacccagacttattacataatcattgacaaatatctttaatcatgtatttattaatctggaaagagaatatcacttcttcttcactcttttttccccatatttatttctaaaaatcttctcagtaatataaaaattaacagacctcttactttcccctttcaatttgggcactatctgctatgattgtgccacagagtaaatcagtgactaaagaaaattttcttgccccaaatcatatgcaattttctttatttgttagtttccaaagccgaggacaaactaataggaacctttctggaggccaagaatggaactgacgccattcttgtcatttatctcacttgtcttatggcactctagttcttcctctttacaaatatgtgtgtgtgtgtgtgtttatatttgtaatattttcagttagactgactcattaaaacttgaagccttctaaaaacatgaatgatatgtggaaaatgatgactttgaaagaaatgaaggcatatgtgtggtgtacacacacacacatcgtttgcttttatgcaagttcacacttggtcacagagaaattatgggaagagatgcacattcactttttagatttttggaggttttgttgttattgttgctatactataatgtgctgttcccttaatctttttgttatttattattcctatatttattttatggatttttaattcatcaccaacttccttcaaagtcaaaatagtcactgttaaggtctttgaaatgttttagccatggatgtaatataatatacagcattattattggtattttaaaaattagccactgaataatgtctatctgcctatttttatgtataaacacgtgtttgcagtaattacatgttttatgtcaaatcacagtagctatatatgtgtgtgtatatatatatatggatatatatggatatatatatggatatatatggatatatatatatggatatatatggatatatatatatggata

SEQ ID NO: 3325 - DNA, 1219 bp, Homo sapiens
cttactaagttttttaaatagttattttaggctaaaataggtgtgtgtatattttgtaggaaaacactttgtaaattatacagagatatgaaaatatagattatcattgtcattctgattctgcttcctcatccattcagcaaagaggtgcgctgtgaccatgactgttcgctttccctttcatttattcatatttgccttcttcagcaaattttaagtaaaatcaaacttaggaagttgtcagggcttaactttagcaattttgattatgccattggtcttggtctcttcatgaaaatttatcattcttgagatggaaaagacctaggaggtcattttgttcaaccctccttttaaaatcgggaaacaagtctagagagaattatataaatgctggactgctaaccaaggtatcttatttcctagcctcctgggctaattcttcaatattgtaattctgtccgcttcactttacatttatttcaagtgtgtggcttggaaaatctcacataggtagatgttggcagaactaggcaagagcagagttttactatcgttgtattataatatttctgattgtctttgactgtcaatttgtactgtgttagtttctaaggggtgtgtgtgtgtgtgtgtgtgtgtgtgtgtgtgtgatgtttccctttctaaatagattgcaaaacctttatgatctttgattaaaacaaatagttttgagtgccgactatatgtaaatcattgttgctgttttcaaaagtcattattaattgaccaccatttgttttgtgggaaagaaacagtttaaactttgtaggtaacaaaacttatttggggtcaataggctcgaagtttcactctagaaaactgacatagttgcttaaaatatataatgtacttctagctatgtcaaattgaattactaattgacagacattggtactcttataattagaactcctttgaaactacgatccatgaaatgtgaaaatgagaataggaaattaaattctttattggttctcaggcagctaaactggcactcccatgttaaaatgtctaagtattaatttcataattgctatgaaaaaaatctgttcttacctgtttacaaatgtataaaacaaaaataatgaacaacaaacaaaacaaatgactgcaaaatgattctaccggaatggaaccatgcttgcaaatatttacttacccataaaaaagagag

SEQ ID NO: 3326 - DNA, 1197 bp, Homo sapiens
taggaaattttatataagtttgacattgttataacatgcaaacacatgacattttttctagtaatttatttttactatatttaaaaagtgttgtagagtagcagtttcaaactaaaacaaactattcctttacgtgtagatagtttgagaagtaccgctctttccaattatatactttctacctctctgcatttgccttcattaagaattacttaaggtaggttttttttttaatatggaactcaaaacatctcaaattgcttaataactttttattatctgtctatttgtaaggagtatgagaagtcaggaagcaatagcaaaaaagaaaagaaaggcttaagagccacgtacatctggattcaaataagctatattactttctagctgtgcaattgggggcaatttatttacatttcttgagcctctatttccctaattgtaaatggagataataacgtctatggtaaaaggttgttgtgccaatatattttaggtttcagtgcattttagcgtcctctctctcctgggtctcttccttttagtaggaaagttgaataataaagaatatttatagatacacattttataatgtactatactcatttattgaacaaaccacaattgagaagcatgaacactattaatttatgttgaacatatttgattgatgacgtgttggattttgcatgattaaatatttaataagttacaactagttataaaatgatagttgatttacaaatggatttcctaatttttattacagaaaatagatgttacttacttaagtatgagagagtttcaagtacttgtgacattgcccctaatttgagtcagaggaggtgacaaacaacaggtgttaaaacctttcattttcttgttaactgactggataatttggtaaatataatctagatttgcttttggctgtcatcaaaacagaaaacaattattattaaatatactatagcagtgttattagcattaacaaattacctgcaaaataatttacatatgcaaaatgtaactttgaatcttctttatgatttttgttccagaactaataacaacagcaataagtgcaaaaaggaatagattatttttagaaagttgtgcgttttcatttatattatagtaacagattttaaaaacaatctggtcttatccactaaaataagctaggttgtttctttg

SEQ ID NO: 3327 - DNA, 1199 bp, Homo sapiens
taaacagttaataatatttcccagttgttaacttcaaatttagcagcccattgtccctggtgatatattgaaacctttaaaaacgtattcggaattaatggaaattgaagtgattggtattcagatataattctttagtggcccttttctttcttctaaatacaggataaaaattgaaagtataaaaagcttcaagatatattgaaatagacaaaacattttatgcaactgttggtaaaaggggcattcattatttttttctgtgcttactgtattgcttgtggccagaattagcacaccatgagccagagaaaaagataagacaaatagaatggcatgtagctaattttgtttggcaaatttagatccgatacatgctatttcactcctacaaactgactcagtcactctttgagaagtacagatgaagtttgtctcccacagtttaacagctttcactcaatatttataggctatataaaaataaatttctataagtaacatatttcttactggcaggatgagctctgtgaaggcagatttattaatgaaaaaaaaggagaaccaaaaatatttcaattgttccagatctgcagaaaataaaatacctgtatgtcaaaatatcagtaatagctttgtttcaaggacatttgtagtggacttttggtattcaagagttttactacttgtgagtcagtcagaaatcccattattttatgataattttgtgatttgaatctggtagaatttcatattctaaaagtagtcattcacctgccagatgagccaacagaatagaatccactgtaataatcaggaagttgcttaaaacaaaacaaacaaaactcaaaaccttatttttgtggaaaagtattatccaacagagtaaactttagtgaaatttcttaatgaggtttaactagtgtgagaaaatgttcaccagatgtgtaacatttgtggaaatgtggttctagagaaaacctggaatttgtacaataatatctatattggggaatgtcaagatgtgttcctaacagccttttgtagcacagtgaattgtagagtattcagagttgtaatgttatttatatatctgttaaggatttgtcatgacttcagactatattctccataatcaagttcactgtagagaataattctcattcatgaattgttcatctcatcatatttccagtggt

SEQ ID NO: 3328 - DNA, 1160 bp, Homo sapiens
aatatataacttatcaattgaatgtttccaaacagaagagttttagcttctgtcaggcattgcatatctccagcatacgtttttgagaacattttgttctgaaaatttcctgttggcatttttctctgtgggtctctaggtttctgaataatgtgttcttatgtttacaaatcatgctgtactttagtcaaccatggtttatctttggaggataactagtacgttaacatttgccagattttttcttttaggctgggtaatcattgagctaactagattgcaaaatatgctactttaaaaaatgtaattagattttaatcatctctatattgtatgtgtggtttgtgtatctgctgctgctttttcaccattgatcacaaggggcagtcatctgattccagggaatagaagatggaggcttgctctggcgtgtgcgtgtgttgttaatgtatgcatggaactaatttcagcttgtagaaaatgaggccccatatgcttaacagatgctcttctctttttctccagggttccgctatggaagtgatatagttcctttctctaaagtggatgaggaacaaatgaaatataaatcggaggggaagtgcttctctgttttgggattttgtaaatcttctcaggtatgattgtgaacaaactaaatgagctttttcctagctgttatttgaaatggtatgcttttgattggtcattttatttataaggtatatttatttcacttttaatttttctaaaatgtagtctgggggttaatgttgccatggtatgtattttatacattgggaaactgaggttcagagccgttaagtaaatctatatgagcatagcaaactaaaaatacaggatggtttttgaatggggaatggaagcggagatgaggggtatttgaattatgtgggcctaaccctcatccctttgaggttcagtcttcttgagctggtattatggtgaaagtgctcataatgtctcaactctagaggtgggagggcataaaaatgcatgagaaacattgcccaatacagcacattgcatgttcttgaaaataaaccgcaggctccagatttcatagatcagacaaagttgatcttggtagataagtgcaggtggttatgattttcagaactcttcaatactcattttct

SEQ ID NO: 3329 - DNA, 1219 bp, Homo sapiens
caccatgttgttgatgtctgggaagctgtgtagtaaatgtcttttgtatctatccttaatgtttggaaacttcccgcctttaagcttcatatgacaactgaccaacaaacactacgtactatgatgtcaatcttttttagagacattctcattactaaaatgagtggatacttgaatgtttaactcctaaaataatgagcggtgaataaatgagcaagtacatgcatgccttccaatgtagagtcattttcattaaaccctctctcaccagagaagcagtggtatgaaattggcctgattcctttctaagtgtgttgttcttgttcacagttggacatgatataggtcgtggatgtatggggaatctaagagagctgccatcgctgtgatgctgggagttctaacaaaacaagttggatgcggccattcaaggggagccaaaatctcaagaaattcccagcaggttacctggaggcggatcatctaattctctgtggaatgaatacacacatatatattacaagggataatttagaccccatacaagtttataaagagtcattgttattttctggttggtgtattattttttctgtggtcttactgatctttgtatattacatacatgctttgaagtttctggaaagtagatcttttcttgacctagtatatcagtgacagttgcagcccttgtgatgtgattagtgtctcatgtggaaccatggcatggttattgatgagtttcttaaccctttccagagtcctcctttgcctgatcctccaacagctgtcacaacttgtgttgagcaagcagtagcatttgcttcctcccaacaagcagctgggttaggaaaaccatgggtaaggacggactcacttctctttttagttgaggccttctagttaccacattactctgcctctgtatataggtggttttctttaagtggggtgggaaggggagcacaatttcccttcatactccttttaagcagtgagttatggtggtggtctcatgaagaaaagaccttttggcccaatctctgccatatcagtgaacctttagaaactcaaaaactgagaaatttactacagtagttagaattatatcacttcactgttctctacttgcaagcctcaaagagagaaagtttcgttatattaaaacacttaggtaacttttcggtctttcccatttctacctaagtcagctttcatc

SEQ ID NO: 3330 - DNA, 1861 bp, Homo sapiens
tgaaaacgcccaaaccatagagctcagttcctagctaggcctctaccagccacttccgctcgtccgcctaataccgcgcctgcgcaccgcgtctcttcctttctgggctcggacctaggtcgcggcgacatggtgagtgtgggtctctgtgcggcctagaactctatctgcctgcatctgtccttgttttcttctcccgcacccatctcctctcctgccttaccccgtgttctctcctgtctccatgcctttgcaggagacaccattgtcggaagctccccaaggcggaggggcgggggcgccttggctgggcctggcgcgctccagccgggttaacgccgggccttcggagcgcgcggccagccctgggcactggtttcgttgggttgaatttagggaaaactaggtcatatgtaattcacatgtcggtcacacgtcagtgaggtggaggaacggtgtgtggaggctccagggcctgcctgggttccaggtctatcactggtttctcccttcactctaaacaggccaaacgtaccaagaaagtcgggatcgtcggtaaatacgggacccgctatggggcctccctccggaaaatggtgaagaaaattgaaatcagccagcacgccaagtacacttgctctttctgtggcaaagtaagtaaggcaaagtctctggtgagaggagagggagggcaggtttcttacccaagtgaggcctgacttcaaggtattttataagccgtgtgctggtgggcagttggaattactcataccgttgattatgagttttaagataaaagtgttgatggtaacttcagattttgtgagacgtttttcatttaaagaaaaccgcttaaacgttaatgggtaaaataatcatttgacagagtgcccccagcctaagccaaacctgctttgtgggaaatgattccatcagttttgtctactgatgtttctgcaccaactcccaagatgtctgtgcatctaataccattctacttgttctgcgagggatttttgtttgataaaggtttgaacgtttatgtgcaaaatactgcattacagcaatccctgttttgtttttgagggagaaagggaggctttcacatccctgacaataaggtgaatccaaatttagacttctggatgcttgtaagagaaaatacttacttggttcatagtgaaaattggttctcttttatagaccaagatgaagagacgagctgtggggatctggcactgtggttcctgcatgaagacagtggctggcggtgcctggacgtacaagtgagtctagttccttgtggtatttggaagtgtgtggaccacataggcccaaattccaggttgctgctggatgggctagttttaacactttctcaggactgagagaataaggatgcctttgtattttcaggattcttccgtggtggtttattttcagttattgaaagagtaaacacaaaactaccaaaatagaagtcggaaatctaattcacagactactttagaatttgatggtcactgggcacattgttgtgaacattgtcatgatactgtgcaggtccattagtggggctgaatctactgaacgttgatttgcactgcaagttttgataaaaataggtgaaggggtcagttagttcaaaactgtatttggaacttgaggccatcaggaccaccacagtttcgtctttctgaacagtattagactgctgcaggtttgtgaatctgcaactcagtatcacctgacagggcgatactacaaacactatactacaaactagcatctagacctgtgttgtccaatacactaagcacatatatggctagtgtaattaaagaattggattttaaagttt

SEQ ID NO: 3331 - DNA, 1118 bp, Homo sapiens
tagtcatttcaatagctgtctttcccaaaggcactttagtgtccgctcttatttccttaatcattgttctcactgtatcatcttgtaatttattcatttcttgtaatctgtccattcccttttaataagtttaggtcagcctcttagaaccatttctttttcatgggatggggtagggggagttaaagcttgcttgtccacaactgagttacttataaaaaaaaaagcaactctggttgagaaatcagatgcatgagattgtatgtctaattctgcaagatcctgaaggcatggctcttaaaggatgccatcatgtagtttagaagccactaatttccgaggagtaatctaatgttggttagatctttggattgactgcagcaaagtattggtagagcagtctatctcagtataattctttctaggaaaatttgggaagcgactttaacacaaaaacgaggcagatttacttatttgccattttctatgttaacatgcttaattatgttggaaactgaatctttctttccagtaccacttccgctgtcacggtaaagtccgccatcagaagactgaaggagttgaaagaccagtagacgctcctctactctttgagacatcactggcctataataaatgggttaatttatgtaacaaaattgccttggcttgttaactttattagacattctgatgtttgcattgtgtaaatactgttgtattggaaaagcatgccaagatggattattgtaattcagtgtcttttttagtagtcaaatggtaaaatgcagcataagaatataagtcttccaagttagatatgagtgttagctttttataagtctgctcctgccagtttgactttgagatacattggagccaactgtaaactttagtttttaaattacagttagtttttttgtttgtttttgaggcggagtctctgttacccaggctggagtgcagtataccagtcttggcccacttcaacctccacttcttaggttcaagcgattctcctgcctcagcctcctgagtagctgggattacaggcacgcaccaccatacctggctaatttttgtattttgagtagagatggagttttcaccacattggc

SEQ ID NO: 3332 - DNA, 1158 bp, Homo sapiens
atgagctttggacctagaagttatgttatccaacttcagctctgccatttactcgcttaaacctcagagaggacaggtgtggtggctcacgcctgtaatcccagcaatttgggaggctgaggcagggggatcacaaggtcaggagttcgagaccagcctgatcaacatggtgaaaccccgtctctactaaaaatacaaaaattagctgggcgtggtggtgcgtgcctgtaatcccagctactcaggaagctgaggcaggagaatcgcttgaacccgggaggcagagtttgcagtgagccgataccacgccattgcactccagcctggacaacagagcaagactctgtctcaaaaacaaacaaaaaacctcagagagtataagaaacagatgcagagtggcatattgcgacagattttggtgattgggagggccaacccaggcatgagacaaagggataaaattaagggaagaacaacagaatggaaaggaaagaatgttttctcttttgtcttttactttatttatttatttatttatttatttatttatttatttatttatttattttttgagacagagccttgctctgtttcccaggctggagtgaagcggtgtgatcatggctcaccacagcctcaacttcctgggctcaaacgatcctcctgcctcagccctcctgagtagctgagacaataggcatataccaccacactcggctgttttataattttttattttttagtagagacaaggtcttactctttcccagtctggtctcgaattcctgatctcaggtgatcctccaccttggtccctgaaagtgttgggattatgggcatgagccactttgcccagcctggaaagaatgtttttgaaagatgatgttaataaagaacaaacaggattccactgattaaattaggacatgtgcacattctgtgccccaaacaggagtatgagtgtgtcactttctatataggaaaatgagtgcagagaatggacagcagagggagcccttgatgagttttgaccatcaaggtaagaagacggagggagtgacattttccctggtgctctcagaccatgagcttatttctccccactctatctttacttctttacaataatggttgtatattatttcctaacagaagtgg

SEQ ID NO: 3333 - DNA, 1200 bp, Homo sapiens
atttcttggaaataagaaaaatattcattaaactttaaaactcaatgaacagattaaatagtagattaggcatagttgagaaacaattagaaaacttggagctaaatgtgggaaagtatctggatggagaccggagatgaaaactctgaaagagatattaggagacatggagaataaaatgagaaagtctaacagatattcaagaggacttccaggagagaaaactgagagaatggggtgaggcaatgtttgaagtgaaggtggctgagaaccgatgaaagataagaacatttagattcaggctgggtgtggtggctcatgtctgtaatcgcagcactatgggtggctatggtgggaggatcgcttgagtctaggagctccagactgcctgggcaacaaaaagagaccccatctttaaaaaaattttaaaaattagctaggcatggtggagtgtgcctgtagtcctagctacttgggatgctgaggtaggaggatcgcttgagctcaggagctgaggttgcagtgagctatgatcatgccactgcactccagcctgtgtgatacagcaagactctgtctcaaaaaaaaaaaaaaaatttagattcaggagtcacaatgatgaaccccaaaatagataaataaaaccaaatgctcttttagatatacactttataaagatacacactctatatattttataaaagaagccagagagaaaagactgagctctactacagtggagcatgccaagggagaagccatggagatcacatgaatgggagtgttcccaggatctgtgacctaggtgtggggcctgcataatgagaaacctgtggccgattgaatgcgacacaggtaggggctcaggcagaggctgagatcaaggatgactttaaaagcagatggaggatttggacttggtacagaaaacttcaaggacctcttgcattgttacaaggatccaatgagacaagataaataggcttgttaactaaaaagcaattttcaaaggatgatttcgcagtgactatggtgtggaaatgaagctattctgagactctttgttttcaacttcaaactgctattttttgtgtgttttgtttgttctttcctttcttaacctctctttaatagcacagagaggttttgcaacaatctgaggtgtttgagaaaagtgttaaattagtttgtgcaaatgct

SEQ ID NO: 3334 - DNA, 2093 bp, Homo sapiens
caataaactcagcttttttgtggggcacagtactggatttgacagtgattccccacgtgtgttcatctgcacccaccgagccaggcagaggccagccctccgtggtgcacacagcacgcgcctcagtccatcccattttagtctttaaaccctcaggaagtcacagtctccggacaccacaccacatgagcccaacaggtccacgatggatccaccagtcccaccccagccttttcctttcatctgaacagaatgtgcatttttggaagcctccctcactctccatgctggcagagcaggagggagactgaagtaagagatggcagagggagatggtggcaaaaaggtttagatgcaggagaacagtaagatggatggttccggccagagtcgatgtggggaggaacagagggctgaagggagagggggctgactgttccattctagctttggcacaaagcagcagaaagggggaaaagccaatagaaatttccttagcttccccaccatatgtattttctaggatttgagaggaaagagaggaaaatgggggaatgggttgcaaaatagaaatgagcttaatccaggccgcagagccagggaaggtgagtaactttaggagggtgctagactttagaagccagataggaagaatcagtctaaactggccatgctttggaagggacaagactatgtgctccgctgcccaccttcagcctgcaatgagggactgaggcccacgagtctttccagctcttcctccattctggccagtccctgcatcctccctggggtggaggatggaaggaaagctgggacaagcagggaacgcatgattcagggatgctgtcactcggcagccagattccgaaactcccattctccaatgacttcctcaaccaatgggtggccttgtgactgttctttaaggctgaagatatccaggaaagggggcttggacactggccaaggagaccccttcgtgctgtggacacagctctcttcactctttgctcatggcatgacacagcggagaccgcctccaacaacgaatttggggctacgaagaggaatagcgaaaaagcaaatctgtttcaactgatgggaaccctatagctatagaacttgggggctatctcctatgcccctggacaggacagttggctggggacaggagaagtgctcaatcttcatgagacaaaggggcccgatagggccagcagccacaaggccttgacctgccgagtcagcatgccccatctctctgcacagctgtcccctaaacccaactcacgtttctgtatgtcttaggccagtatcccaaacctcttccacgtcactgttctttccacccattctccctttgcatcttgagcagttatccaactaggatctgccaagtggatactggggtgccactcccctgagaaaagactgagccaggaactacaagctccccccacattcctcccagcctggacctaattcttgagaggggctctctcttcacggactgtgtctggactttgagcaggcttctgccccttgcgttggctctttgctgccagccatcaggtgggggattagagcctggtgtaagtgcgccagactcttccggtttccaaagttcgtgcctgcgaacccaaacctgtgagtctcttctgcatgcaggagtttctcctgggcagctggtcactccccagagaagctgggccttcatggacacatggaactaagcctcccaaatgggagttctggctgagcccagggtggggagatcctgggaagggaggcactggaggaagacggcacctcttcccccatggcagggtgtgagggaggcaggtttggaatggtgcgagtatggcaatctaagcaggggtctggtctctttgactccaggctggcctttggccgactgtctgctcacccagagaccttggactccggactatccatggctccgaatctaagtgctgcccactcccatgctcacacccacagaaggtcttcccatcccctttagattcgtgcctcactccaccagtgaggaagatgcctctgtctttcccacgactgccaggagataggga

SEQ ID NO: 3335 - DNA, 1127 bp, Homo sapiens
ggtaatgatctgacgttttgttttcttgtggtgtctctttgtatgatgacccagtaatgctgacttcagataatgaggtgagaagtgttccttgctcttgtgttttttggaagggtttctgaagtattggtatcaatttttctttgaatgtttggtgagttttaaacttactaatgcaattgttttacttgttaaagatttattcattatttctatatttcttgaggaattttctgtaatttgtgtcttctaaaaatttatctaattcaggtatattatgtaattcattggtatgtagttgttcataacattcccttataaatttttttttatttatgtaagattggtaatgatgtctcttcttccattctgactttataatttgagccttctttattttttttttttttgattattctagctaaaagtcttgtcaattttattgctccaaactttatacttagttttcctattggattttagccagttttgcatctattagtaaattcacaccaacatttctgtcaccctacatactttgttcttcaaattcttttttgtaacaatattaacaggttactaattctctcattaattaataagttgaatttatacttttatgaaagtgatgtttttaaacttttgaaaattatactttagcaaaagaaaatatgaaaataagagtcagagagtcatggaaaatgagatgagagggaaagacagggcagaccatgacaggccttgaaggccatgctaagaagattagtttcactctgagtgggatgagaagcttttgtcatccccttagacaagtcttgcccctaactgagacctcagctatctgtaatatgtctctatgcctcctcacagggtgactgtgaaaatagaatgagacagaatgaaatcaaaaattacattgttattgttagtgcccaattggctcacctatgaggtcagttttcaggtacaaacaacttggcctaaatttattgttttcaaattcttacctattaccaggatttctgagggaagcagatacagagaattccagaaggctaagccctggattctgagaaaggtaattttgtccaagaaaattctggtgatttgtgcatgggcatgggata

SEQ ID NO: 3336 - DNA, 1194 bp, Homo sapiens
atgaacaccagaactttggggcgacccttccgatcatgaaaaatgacccactctggtagggctgccagtcattctttcatgtcatttcttcaagttcggtgactctgcttatttgtgctgcactaagaacatgggaactttagaggagaatcggcacccattgcatgtgctgtaaatccccctggtgtgcacacccagctatcccctctgagttgtttcatagtaccccaaacactgcttccaaaaagcaggacatgggccattcctcatggtggatgccagaaccgtctgtttgaatagtttaggctttgtttgaagttaagctgaaactgagagccaacttcttttatctgttgtatacgtcactgagggaagaaatattaaggttttgggcatttgtttggaattagagaggagggaaaataatttctttttttgactgcttccttaggaaaaaatattgacgttgaaaatttacaatataccaggacttggactgttactgtatttaatcatctaacacatctagaggaagacagtaacctccagattttacaattacaggaaaagaaacagagactgagaaaggataaggaacttgcctaattaaaaaaaataagtacagaaaagtgaagttacttgccaatgctagagtcaccatgggtctctcgactctgaggccaaggtttatttcctcacatcattatgggtctgtctgacattgctacaaaattgactaaaagaatattcctctaaaactcccattctttagggagcaatacacagttaggttgtgaaactattgacccatttacaaggacagctgtaaaagatctttaatatttggaaaatcaaatttcggcacaagtctgagttttttcattcaaggatttcttttgttgttgcttatgggtatcacttgtataagaaaaatcaagttttgaatccaagattaccacaaacattgagtttcaatccctgcatctcttagacttctcttcctgaagcaaaatgtatactgtattgcaaaaaaagataaaatttgtcttcatgtgcaaaatgatgcttatgttttgatggacatcctttcatgtgcaaaggatttgtcctttagtatatgttctattcttaaagtggtctatggctgaatcaacccagactgatgcatagccttgtgcaacttcagattttcca

SEQ ID NO: 3337 - DNA, 1195 bp, Homo sapiens
agtgtagtggtagcagctagcacttgtcatatttcaggtttggtgtagtttatttttaacctcctgctggtctggagggctacaaaggtcacaccacatagaacaaaccctatagcttgagttgccactcatcttacacccacttctcttctggttgcttttgctttgtcttggcaggagttcaaagaaggacgcagagccagccacacagccccacaggtcctctttagccacagggaacctcctctggagctgaaagacacagacgccgctgtgggtgacaacattggctacattacctttggtgagcagggtgcacttgctgcttttgtgccgctttaatgagttcacacagcagaatacctaaatctgcacagaaccttggttaacattttaaggtaggcaaacgcaggcataccaacttgttcctgttgccattgcagtgactaaaggagggatgtcacagggtattaattacagagcaggccatatgctatttttgtacagtaatcctttcctttttttccccatttttcttaaatcttaaaaataagactgaattctgatatcaagagttaaggtcccttcaatagttcagctggtagagcagaggactatagctacttcctcagtaggagacgtccttaggttgctggttcgattccagcttgaaggagacaagtacagttttggctgggcacggtggttcatggctgtaatcacagcactttgggaggttaaggcaggtggatcacgaggtcaggagatcaagatcatcctggccaatgtggtgaaactctgtctctactaaaatacaaaaaaaaattagctgggcatggtggcgcacgtctgtagtcccaggtactccagaggctgaggcaggagaattgcttgaacccgggaggtggaggttgtaatgagctgagatcgtgccactggactccagcctgggcaacagaacaagactcttgtctccaaaaaaaaaaaaaaagagttgaggctgggtgcggtgtctcacgcctgtaatcctagcactgtgggaggccaacatgggcagatcacctgaggtcaggagttcgagaccagcctgaccaacatggtgaaacactccgtctctaccaaaaaaataacaaagaaattagctgggcgtggtggtgtgcgcctgtaatcccagctactcgggaggctgaggcac

SEQ ID NO: 3338 - DNA, 1266 bp, Homo sapiens
gagcggggaaaagcaggagtcagaggccaggggtgagcgtctcctgtcccatggcctgaggagcggcagttctcacctgggtccggcggaccgggatcaagttctaccacctcgataatctcttcatcaccatggaagcttagggtctccagtgggggggtgtcagcagcagccccgctttccgattcggactccatgcggcgcaagcggcggatccacttctctgggcccaaacgcctcccagagtcagctctgcgcgacgacgcggaactcgagcccctcctcccggcaggaagtaggcgtaggcgactccccagcaggaagagcgacggccgttcggccaatagctacgaaggttggctggccgcctcaccaatcacagagcggcattggaagatggggccggggcgtggcggagagaacccaaactccgccccacctgactccgcccccaactggagggaaacaagcgagcgcgcgcgcctccggggtctcctgggaagagtagttctcctgggtccgctctgcgggcttctgggagatgtagtttctggtctgtaggcaggacggaaggagcgggggaggccccttacgcaaactacaattcccggcggggagcgcggtgaagcgggggtgggatctgaacatggcggcggtggtagctgctacggcgctgaagggccggggggcgagaaatgcccgcgtcctccggggtaaggagagggaccccggggagggcaggactgcagaagatcccttttctttcacgtccagcccgacgatagcaggaggtcagggctcttggttcctccccacacttttctgcaagatcttagagtctgggggtgcagagatgctctttagaggtcacccagtgcatccccccgccttcgggttgctcgacacctccggggtcttgctgcaagagggagctcctaggaagcctgttggactcccgcgctccaggtgtttcacactcaccgcagtgcagaggaaagagccccgggcttctggaggtttgagttccagccccggataattagcagtttgaccttgggcaaagcagtttttctctcagggcttcagtttcctcttccgtacagtgcaagggatggagtagactatctttaaggtcccttccagtgctaacatttgcagtttcaaaaccttttcccggatttccttcatacgtcttatgtgagtcccactgcagtccttcccatgctgtcgtctgaggaagaacagcgaagcttttcgtcctggcac

SEQ ID NO: 3339 - DNA, 1142 bp, Homo sapiens
ttctcttatggatcactgttttgtgctgcctattgtctagtatctgaaaatagctgttttctctattttgtccagttttctcattgtttatagtaggaaggtaattccagactctcaaacttcctcataggcagaagcagaagcagtagttctctcaggtactcaaaattgacatcacccatgggcaacacaggaatatcatgtattcctggatgtgatgcccttagaaggatacagtgtccaccagacatgtggctcacacctataatctcaacactttgggaggtcaaggcaggcagattgcttgagcccaggagttcaaaaccagccttggtaacatgacaaaattctgtctctacaaaaaaatacaaaattagcctggcatggtggtgcgcatttgtaaccccagctactcaggaagctgaggtgggaggatcatctgagtccgggggggtcgaggttgcagggagccaagattgtgccactgtgctccagcctgggcaacagaatgagaccctctcaaaaaaaaaaaaaaaaagattggatgtgagggcgatctgactgtgacatctgtcaccccgttgttcaccagggttgatttggctgatctgactggctaggcgggtatccccttcctccctcaccactccatgtgtgtctgtcgcaaacctgcgtgctcagtcaaagaggatgaccatccccaatagaggaggactggtcttcagccaagagtatacgagtagctgcactcccctgctagaaactccaaacaagctctcaaaaaaaaaaaaaaggcatgacatggtatcactgtttgttcatgtgctcttccagtttaggctgaatctcatcatgaggaaatagcaaacccagtatgagggatgttctattaaaaataaggctaggtcaggtgaagtgcctcacacctgtaatcccagcactctgggaggctgaggcaggtgaatcacttgaggtcaggagttcgagagcagcctggccaacatggggaaacgccgtctctattaaaaatacaggctgggcacggtggctcatgcctgtaatcccaacactttgggaggcaaaggcgggcagatcaggagttcaagacaaacctgatcaacatgatgaaacctctactaaaa

SEQ ID NO: 3340 - DNA, 1181 bp, Homo sapiens
ttcgtaccttcagcatgagagtggccgcatttccactaagtttgaatttgtccccagccctggaaaccattttatctggtaaggtggggagctagggagggctgtgagagtagaaaagaatgatgggagctgggtttgacccattcactcactcagttttgatcgttcttattcaggtatcgggggaaatggattcgggtagaacgaagtcgagagatgcagatgatagacttgcagacggggactccttgggaatctgtcaccttcacggccctgggcactgaccgaaaggttttcttcaacatcctggaggaaggtgtgggatggcacaggcaggctttctagggacattgcagggatggggacatttgacatcagatgagcagtttggagaagtggaataagcaggccggggtgagcccatgggaacagggggccagaaggaagctgtttggcacagctccacctaattgaagaatcagccatggtgaagagaattattggctttatctcatcttctccttcccagctcgagagctagccttgcagcaggaggaagggaagaccgtgatgtacacagctgtgggctctgaatggcgtccctttggctatccacgccgccggcgaccactgaattctgtggttctacaacagggtctggctgaccgaattgtcagagacgtccaggaattcatcgataaccccaagtggtacactgacagaggtgagaagcagctggggtcttggctgtgctgtttttgacatttttagaagggacaggttggtctccagccagatggggtgatataaagctctagtccaattcccagagattaagaggaatgaaaagttgtgtatgagaatgatttatttccgtaccaaggttatcaggcttccagggggcagggctgggaatgaacgtagatatccggggcaaaagacatgatcatcctggctctatccctaggcattccttacagacgtggctacctgctttatgggccccctggttgcggaaagagcagttttatgtgagtattcaaaatttctctcaacttggcaaaacgaagcctttgtggaaacactaggctgatagggttggaaggggaaatgaatctggggatcggggaccaggataaacatgaaacgtgtggaacatcagggtgtgaggtagaagtcag

SEQ ID NO: 3341 - DNA, 1198 bp, Homo sapiens
ttccatttgggttagtggatgtgaacagggctagggaagtccttcccacagcctgcgcttgcctccctgcctcatctctattctcattccactatgccccaagccctggtggtctggccctttctttttcctcctatcctcagggacctgtgctgctctgccctcatgtcccacttggttgtttagttgaggcactttataatttttctcttgtcttgtgttcctttctgctttatttccctgctgtgtcctgtccttagcagctcaaccccatcctttgccagctcctcctatcccgtgggcactggccaagctttagggaggctcctggtctgggaagtaaagagtaaacctggggcagtgggtcaggccagtagttacactcttaggtcactgtagtctgtgtaaccttcactgcatccttgccccattcagcccggcctttcatgatgcaggagagcagggatcccgcagtacatggcgccagcactggagttggtgagcatgtgctctctcttgagattaggagcttccttactgctcctctgggtgatccaagtgtagtgggaccccctactagggtcaggaagtggacactaacatctgtgcaggtgttgacttgaaaaataaagtgttgattggctagaactgctgcctccctgactgtgagctgccttccacaccctgcactgcactgtgttctctcctcacccttaacctgcttcactccagtctgttctggctgtttattaccttgttgcaaaacagggccgaagcaaggattaccttgacaaccctagcttctccttagccatcttccttgacagtgtgatctgtttagtgagatttagcatgtgtgaataaagtatatgcaggaggaaattgctttgtcttcccaatcggtagaaattcgggaccataaaaattgtgttttaccatgtggcctacaaccttaacactgctttcttaagaagtcttcacccatctacatgctaacaactcactcagcctggatttatctttactggggaagccaaacaagcaatagaggacctttacctgtgttagaaatgagttggagccaaggaacactgaagaaatagtatcttaacagttactgagtccattgtatgtgcttggctctgctctgagtgatttatatgtattaagatttttcctcacaggtcagatatatact

SEQ ID NO: 3342 - DNA, 1428 bp, Homo sapiens
accgctgccctgccatcccgtctgcctgccatgggacggctcctctgagtgttccctggccccacgtgtgtggtgtttgtgtgtctgtgcctggccaagggaggtgccaacactgggcttgccacagccccaggagaggaatttggggcctaggaaccgagggcacacgggactctagcctcatccccaggacccccttggctcagagtgtggtgctagaaactggcccccagcccagccccagtactgccacctttacacctacccctgcaagtccccagagggctgcccacgatagaagctgccaagcagggagaacctgtgccaactgtggagtggggaggttgggcctggaccctcaacccctgcaaccttccctagccccctcaatagatgagcaggtcaggctgtggcccttacctcacccgcagttctcgcccagtgctgcagccggctcacctctctccgcttcttgcacatcactggcctgtgtgtgctgcttgctcctgttctgttcgcttgctcccgttccgttcggcttttgctttgcgttagggtgaagaccctagcgtccagctcccctcaacgctatattttgacactaaaaaagaaggtttctaaattgtaggagcaggatggaaatactttgctgcccttgccatcttttaggatgggcccccaggagactgaggtcttcctgggccctcattgctgcttatcgtaccccccatcacctgcacatgggacagaccgggctggagggtgaccttggctgtgtgcgtcccagcaaaagagctctggcccgcatctcgctgtgccctgaagggggatgaagggcgatgcctcgcccgaggctttgggctgctgcactgcatgctgggactgctcctactctctgtcccacccctcacccagctgtggtccggctttgggagagtggtgaattgcgctgcccgaactcggagcggagcagggtagggaccgtgtacagcttgataacccttaataaaaagggagtttgaccagacttcttgttgtctcgcgcggctagaatcctgggaacaagagaaatgggatggggactctgccggggtctagaagaaagtatgtttaggccgtcgctcagatacgctgagcaaggcggctggcggaagggcagcttccgacccacagttccgtggaggtctgtgtcctgccccgagccaggattccgtgaggtctgtttccagccccgagccacgattccgtggaggtttccagctcggcctggtcgtcagatttcccgccctgggcacgtgaccaagccggctctgcttctctaatttgcattcgttgcctgcaccattccccccgctcccccctcggagacatttggccaatgggagccgtgggtaggggctgtgggcggggctacagccgtggagcgcg

SEQ ID NO: 3343 - DNA, 1428 bp, Homo sapiens; identical to SEQ ID NO: 3342

SEQ ID NO: 3344 - DNA, 1264 bp, Homo sapiens
gctcaggccacatgcatgccctggtccttccaggggtcacccgagaggatgctggcgaggtcacctttagcctgggcaactcccgtaccactacgcttctcagagtaaaatgtgagggcaggaaggcctctggacaggcgaggcagggcaggaggttggccagatgccggagctgggttggtgaagtagatttaaggtggaagggctgtggaggcccaagcaaggccggaacacatccctgccttggtctcaggtgtcaagcacagtcccccaggaccccccatattggcagagatgttcaagggccacaagaacacggtcctgttgacctggaagcctcccgagccagctcccgagaccccattcatctaccggctggagcggcaggaagtgggctctgaagactggattcagtgcttcagcatcgagaaagccggagccgtggaggtgccgggcgactgtgtgccctccgagggtgactaccgcttccgcatctgcacagtcagcggacatggccgtagtccccacgtggtgttccacggttctgctcaccttggtgagttggtcctgccagacccacccatcacttctcctcccttccccagccctcagtgctggtcctctcacaggcttgccatccgccagcctctgccctctgccacaccttctagttctgacagctgcactctgtccctgcctcagtgcccacagctcgcctggtggcaggtctggaggatgtgcaggtatacgacggggaagatgccgtcttctccctcgatctctccaccatcatccagggtacctggttccttaatggggaagagctcaagagtaacgagccggagggccaggtggaacctggggccctgcggtaccgtatagagcagaagggtctgcagcacagactcatcctgcatgccgtcaagcaccaggacagcggtgccctggtcggcttcagctgccccggcgtgcaggactcagctgccctcacaatccaaggttggtgccagtggggacctgagtgggcagaaagggtcaagacacagaagtcctgttggcaaaacgaggcagatgctgtttttatttcttgtatctgggccaggagagcaaggagcatccatgatgggctgaggttgagggctcagaggtccggaaggccaatttcaacccacatgcaacatccagggcaccccttgttatcttgatatatgtcagcatcatatcccaattctctggagtgctttgtggtttacagaatcctgtc

SEQ ID NO: 3345 - DNA, 1217 bp, Homo sapiens
tcaatgatgcttactaactgtaggaataatagagggaaggtaagctttgacaaagtcattatttgttagcacacagaggtgaatgggataatgttaaattgtaagatccgattattttggattatgaaagaacattccaggcatttgaaactatattattacacaaatatttaggtgctttaaaagtatatttgataagaaatttgagacttgcagtccttatattggttaattctcatattgatgaataacattcactaccaaaatatgcttgttagcattgctaatatgatttctgcattagtattctgggtgagcctgccgtgagagtatatatgttacttacaagtatgtgcagagataggtgtgactgtatctgttatgggtgattctacacctgcaggttaagaaacgcagtttgaagtgaacatttgatttgatcaatagatgctcctgatggcctggtggctgatgaacttttgcactgaactttctctgctggcctaaaagaaaacatgatggttgacaatctttttcatttcagctgtgtcagatcccagcagcaccgttcacagacctcaaccgcttcctccaagcactgtacaccaaagcacgattccttccaacccagacagcagctctgcctactgcctccccagcaccaggcatggattttccagctatacagacagctttgtgcctccgtcggggccctccaaccccatgaaccccaccattggcaatggcctctcacctcaggtcagtcccgtgtttctagacagacgatttgctgtataccagaaccaaatattcaattccctgaggcagtagtgtaatgaattgccaaatttaaaccataatgtattctttatagaagccacatgatttcagttttctggtttcctttctctccacccttcctactggcttcatcaaaagttgtagcttagacttaaaattcaagtgatttttgatataatcttggagactttgtgttcatatttagctgtgaaggtgtttgccatgttttgtcttctccatcctagttctgggctttggttaagaagcttgcaaacagtggcaggttttttgttttgtttttttgttttaaattgtatttaaaattgataaggtttcaatcaattgataaggttttaaattgatgaggtttcaatcaaaagcacctcataagaaaacactaaagctttgacaaaaca

SEQ ID NO: 3346 - DNA, 1167 bp, Homo sapiens
tttttttttttagatggaatcttgctctgttgctgggctggagtgcagtggcgctatctctgctcactgcaatctccgcctcccaggttcaagcgattctcctgcctcagcctcccgagtagctgggactacaggcgtgtaccatcacgcccagctaatttttgtatttttagtagagacggggtttcactgtgttggccaggatggtctcgatctcctgattttgtgttctgtcctccctggcctcccaaagtactgggcagcctcatcataattgcttaccaccaatgtctgtgttgtttttgacagtgccattaggcatgaacttttccattctttgttctaaatatagtcggtcttagaaattgctaaggggctctgtgttcttacagcctgcttctccagcctgtgcagaacctttgtgccattgttctggagctggggctggggacagcagcttgattttcttatagttatatctgttctgtgagtggtctactaggccatcaatgtacccatcagtcttctctgtttggagcttcttggcctgcatggaacctctgctttacaagaggtgaggcaaagatgatctgtgcttggtgtccttggcctgatgcatctggggtagagcttctgccctaagaatggggactggatgaaagagaaaggattcttcagttctctcatctatctacacttgcctggaatagaatttctgcaacacagagctaggggtaggaggtgaaaaatgctggctgcttgcgtcacttgggaagaaatcgtagtcctggatttggagctgggtagggttaactagttactagttagcttcagttttgtttcttcaagaatgatggccggatgtggtggctaacacctgtaatcccagcactttgggaggctcaggtgggagaattgcttgaagccaggagtttgagaccagctggggcagcatcatgagagcctgtctctacaaaaaaaattttgaaaaattagctgagtgtggtcacacatgcctgtagtcccaactgtttgggaggctgaggagagagaatcgcttgagtccaagagtttgaggctgcagtgagctataatcttgtactgtactctatcctgggtgagatcctgtctttaaaaaaaaaaaaaaaaaggtattattacccacct

SEQ ID NO: 3347 - DNA, 1215 bp, Homo sapiens
ttgtagtgttgcttagcactttgcgcattgtgtaagttgggtaacaaaaatggcaaaagaaatgcagatttcccagttatcttgctctgaagacatttctttagctagtcttatttaattttaaaggtttgataaatatacaaagacccaagcatacaatttgagcatgctgtattctaccacttgcacttactcatcttctagccttatgaccaggaacctttgttttgggctcaagtacacatcctgatttggtttctccctgttgtaatttgagatttcccaaattaagtcttataatgattaggttttgttctgagttatttctagagaaagaaagtattttagtatgtgtaaattgtacaataatttttttgctgttgtactcactgctaatagtggattgtatagggtggtgtttttatttcatttattgtagacaaaaataatgaatttagtatacacatacccactaattcaagtatgtcagagcacaaagttggcagctggttatatttaattcagcccctctgaaaagcacatacagtctatactttgtttataaataccctaggtcctccctgcccctaaatatatattttggtgaagctgtggtgcactattaattttctgtttcaaaatgcaatctaaagatgcaataaatatgatgaccttgatagttttaatgaaatcttcaattcttgcagctgtgttttggaaagtgattaagcaatatttctcaaacctgatgattcttggatatttagctattgtcctccaaagagtcatcgtttcacgttttcaaacatgtgctttgtgctgaagattcttgtcagatatcctgtgcttccagagtatttttatcttcaattttatttaattttgtttcattttgttttcataagacaatgtttcagatatgtaatggggcaaaccactatagatttctgttggatagaaaaatgaaatgttactaataagtttaaattgacccttcgttgactatcagtactgttgatacatttattagaatgtatgtctcagaagatggtttctgtttaaatttatggtcaagttacaacaactgaattctaatatggattaaaaactccacataaatatttttccccatgcgtcttgggttataattttccttttagacttgcaaatatgcttttattgcaattttgtctccatctgtactgtagaattaca

SEQ ID NO: 3348 - DNA, 1192 bp, Homo sapiens
gaatcattgatgctaataagcagttattagatggaaggttaaaattaagtagagaatatctgtaagttttccaactttagctaagtcacaaagcagaaactgattgtagtgtatatagaatgccatgcctatggctccaaagccttctggctgctgacacctcaaatctggggcattgtgagaaggcacaagaaatgtgtctttactcaacaccacgtgtttctctacagtctgttgctaatgttttattagctagcctttttaaagaaatcacctccacaaattagtggagatagttaaaagtatttaattataataatttaaaggaaggtgaacttttatttttgaatattctgtgtgagttcagtaagatggtgtattgtttaatgccacatgacgaatttcaaaagttagtgatttaaaacaaccactaacaatttattatctctcgtttctgtgggttagggattgagaagatactcagttgggtagttctggcttggggttcatgaggttgcatttagatgttgtctggggttctggtcatctgacggtttgactgaagctggagaatacacttccagggtggttcacatggctggcaaatttgttctggatgttgttaagtggccttagtttctctgcacatgggccttttcatgtggctctttgtcctcaaatcttggtggctggttttcccaagagcgagcaatccagaagacccaggcagaacctgcagtgcctttttgatctttccctggaagacatgtagtgtcacttctcattttcttggttgcccaagtcagccctgatagtgagaggaccacacaagattaacatataccagggttattacgtgctgtcatagaagctggctacaacaggtggcattaatttgtagtgtcatatttaatctgtagtagtcaggctgctgctgaggttttttcttttcatgttttttgaatgactaaaggtaagtttattgtgatttagaacagctaaaaataggaaatacatacagtggtagtctgtaccttggactttagtaattagcagtgggtttttgaaagaggtatggataagaactattaatacatatttttgttaatgttctttattttttataattttatgagaatgagtctgaaatttaaaaactacagacaatagcactattaatgtcagaatttaa

SEQ ID NO: 3349 - DNA, 1170 bp, Homo sapiens
tggagtttgtgatttgtatcagaaataatttcgacttgcctacacttaaaaacttgacgtgggttgtacagaaactaaagatatttttggtgctgatccaggagatacgtatttttaaatagcccatatcctggatctttgttgagtattcagcatattgacatgtatctttgtaaggtgaagtaactaagaatttaacttaaaaagcctcgaacattctggtgctattcctgctgtcttctctacattaccatagccagttgctttcattttgaaccagaagcactagcatattattgacttgtagcttcataaattaaaaaaataaaaactagattttgtcttttagaacataggccattttccaggaaagcagctaggttttaatccattaatcttgtatactgtctccaccaccacaattcacataatcctgtagacagtcctgcttcaccctggtcaactgcatgatccttattgtaatagtgaatcagtataacactttagacatgcacacagataacacgctgttgcaagagttcatgatatgtctgctgtccaactagttttatttgcctgatcctactggtttaggcactgcctatagtctcgagttcacagaaatgttgggttttttccctccccaaagtcctcattttttataaactgtagaaaggcaaaatgacaagggaaaaggaattctaagagtgaagggatgattgttatattggggcaagaaccacagagtggctcaggctttggaaaaaatatggtgtggatagtgacaaaaaacataaatataaaaattcaagaaaaactaccagttttgaacaacaaaaacaaagggagagtttatcctttataattttaatatgtaagaaaaaattacataaacttttcccagaggaatattttataaatgtgcattgagtatttttcgtactgtggtataggagtatattttgtactgttgatgtctgctactgacttagaacaaattgattattgggttactatggagaaaggtggtcttaagaacagcaagggctgagcagcagtaggttggggcagagtgtacagtagaaattatttagtgtggggcctttgtcatttaatatctagctgagttacttaggactctctcaaggtcttgcctatagaaagttgaaa

SEQ ID NO: 3350 - DNA, 1173 bp, Homo sapiens
cctcctgctgtcccagcccagtggggcccagcccactaccatcccgctcccgctctccgaacttcccccctcccactccccaccatgtgaccaggaccctcccaaccgccgctccgagctccaccaatcagcaaccacctccacccagaacccgggacctggcgctccactttcaaaaaggcagcttaatcctcccgccctcagccacgccccctttccgcttccccgccccgccggcccctcccacttccttcagttccctgttcccctcctcccctccggtggcgcccaccctctcccgggcttcgccccgcccaccaggggggcagcgcgctcgccctcttctcgcgagatctgagcgtcccccgcggcggccgccgggctccccctcccgtcctcccacctccctcccccggcatctctcactctccggctctcctccctccctcctcccccctccaccctctgggccggatctcgtctcgctcaggcggaggaggagaaggaggaggaggaggacgacgttcggcctgcgcagtgagatgtttgtccgtcgccgccgccgccgccatcgcggaggagcgcgataaagggagccgagccggacgtgagggggaccccgcggagccgccgcgccagcgcagccccccagccgcatcggagtcgccagagtccgagccgccgccgccgccgccgccgcccccgccgccgccgcggctgcccaggggccggccagctccccagccctgcccgggggtcgcgccgccgccgcccccagcgtcgcccctagcctgcctgcccgccttaaatgtgacaccggcgtcgcggagcgcgacctgaagccgccgccggggaggggacgagcaccatgtcgaatctgagcaaaggcacgggcagccggaaggacaccaagatgcggatccgggcctttccggtgagtctctcctcggcgtccgggaccccggggccgggggccgggccgagagccgcacgcgaggcccgggctgaagtcccccaacaggccgcaggcccggcctcccctcccccacgcccgccggccgcggggcgcgagccttcccggcaaccgggcggcgcggggccccggcgcggccgccctcccgggccgttccccgcgccgggagcccgggcctggcgccgcgcccccgtccggga

SEQ ID NO: 3351 - DNA, 1176 bp, Homo sapiens
ggatcccaccttccccaccccacccccacccccgccaatctaatccttccttgatcttccaatataaattgaattttttttttttttttgagacggagtcttgctctgtcacccaggctggagtgcaatggcgtggtctcagctcactgcaacctccgtcccccaggttcaagggattctcctgccttagcctcctgagtagctgggattacagacgcccgccaccacgcccggctaacttttatatttttagtagagacgaggtttcaccatgttggccagacttgtctcgaactgaccaggtgatccacccaccttggactcccagtgtgctgggattataggcatgagccactgcacctggcctaaattgattttttctttctgggcttccttcagtcctccactctgagagctgataggtaaacccaaaaactatggggtggaggggaggatatgcatatttttgtgtgaatatcatttatttacataacatgtgctatatcttatataagacactatatagtctatggccatagtactctgaacatgcccgatttcatctgtttgaggaagctaagcaaggtcgggcctggttagtactcagacagaaggtactgtatacccacatgtacgtgccaggagaatgatccccattcagtagttttccttagacataagcaagatgtagctgggcccgatggctcacgcctgtaatcccagaactttgggaggccaaggagggtagatggatggatcatctgaggtcaagagttcgagaccagcctggccaacatggtgaaacccatctctactaaaaatacaaaaaattagctgagcatggtcgtgggtgcctataatcccagctacttgagaggctgaggcaggagaattgctttaacccaggaggcggaggttgcagtgagccaagattgtgccactgcactccagcctgggcaacagagcgagactctgtgtcaagaaagaaagagagaaagaaagaaggaaagaaagaaagaaggaaggaaagaaagaaagaaagagagagagagacagagaaagagagagagagaaagaaagaaagagagagagagaaggaaggaaggaaggaaggaaagaaagaaagaaagaaagaaagaaaagaaagaaagaaagaaagaaagagaaagaaagaag

SEQ ID NO: 3352 - DNA, 1208 bp, Homo sapiens
cagattcagtcccaaacaggagacccatgtcaacaactgctaatgatcctgcttttcctgttcctatacacacacctccccttggtatttctcttctgggttacttcccttttgtaactcagagaaatcctcatgctcagaaattagcaccaattacaaactttataaaacattttaaataaaagacatatgttatgtgctaaatccccagttatgtgtcagtttgtttgttacaatattgctgctattttgctttaacagtataagcactgtggaacgggtattgtacagcatccacacggccatataggaactcggtgggcattttgtgttggttatatatctacacatataatgtttataaggcatatgatttttcattgtagagtgccttttttttttttttaagaaaaccaaatttgagaatctgcgtggtatatctggggtaaaatcatatgatatttttagtactttccttatgctttctggtttctgtaagaaaagataacatcccaatccaattaaacaaggtaaatcctccagccttggatgtctggatgaaagagagcaggatgggatggtaggcacggaactcagaatccactaaggagtgtgtaacaactcacctgccaaatcaactagcccttacattttttttttaattttgtatagtccatgagatcctgatactgacctatgaaaggtgcagaagcctgaagaaaagaaacaacttgctcaaaatcacatgacacaactgccccacctgtttcaagaggcacctgtggatagacacaaaacccacccaatggcagtggaatccggtgggggggagcacaggctgtggagtcagaatgctgcagttcaaatccaggctctgctagttactaacgagggaccctgggacagtcagatgaacttctctatgcctcaactagttcatctgtgaaatggggctacacctggcacttaaaccgttgagttgccatgaggatgaaatggctctatgccatgaaaagtgcatagatgagtgcttaatgcattaattaacacctgttctttaatgtcagttctgtgttattgtcagttctgtgttattaagacttctatttctttttttttttttttctgagacggagtctcgctctgtcacccaggctggagtgcagtggcacgatctcggctcactgcaagctccacctcccgggttc

SEQ ID NO: 3353 - DNA, 1228 bp, Homo sapiens
acagatttgaaccttctgaaaacctatgtttaatactggacttagtaggaacatattcatactttattttttgaaagcattatatatgacagttgtaattatgacaggctgatattaactgttttcttatctaacctcttagaagctgcagttcatcatctgctgtgatagttccacaaccagaggatccagacagagccaatacttcagaaagacaaaaaacggggcaggtgcctaagaaagacaattctcgaggagtgaagcgcagtgctagtccagactacaacaggaccaattctcctagctctgcaaaaaaaccaaaagcacttcagcatactgaatctccctcagaaacaaataagccacatagtaagtcaaagaagagacatttagaccaggagcaacaactgaaatctgcacaatcaccatcaacaagcaaggctcataccaggaagagtggggccactggcggttcacggagtcagaaaagaaaaaggacagagagttcttgtgtaaagagtggctccgggtctgaatcaactggtgcagaagagagatctgcgaaacctaccaagctggcttcaaaatcagccacctcagccaaagctgggtgtagcaccatcactgattcttcttctgctgcctctacttcctcctcgtcttctgctgtagcctcggcctcctccactgtaccaccaggtgccagagtgaaacaaggaaaagatcagaacaaggccaggcgttcccgttcagcgtccagtcccagccccagaagaagtagcagggaaaaggaacagagtaaaactggtggctcttcaaaatttgattgggctgctcgtttcagccctaaagttagccttcctaaaacaaaactgtctcttccagggtcttctaagtcagagacatcaaaacctggaccttctggattacaggccaaattagcaagtaagtttacaaaaaggtatttttctttaattaaagaaagtttctcttggtttgtcaaaagcaattatgctttaaagttaagggttttttccccccagtcttagataatcttagatgtattactgtctgtgtaattaagtacataacagcatgtagtaagtgctactacatttagttttgttgagacaggtaaggaatactaccttcctattattacgaaaccatcacattttagtgtctgtgtctttattggtcctcgcggcatctcctacttcactgattt

SEQ ID NO: 3354 - DNA, 1135 bp, Homo sapiens
tttggcttctcttaggaaaagacgacttcctagtcataggtgtcctatggggaaatttattttttttaatgtcctgttccttaatgctgcaaattatcagtatttataaagtaactgattttgcaccacttttttgttactgtgaccacggcagaacaatgtcttctagactatatctatgtaaagttattagaatggtatctgttcattttagtgatatgaagatcacaactaacaactgacaaatcagagtttgccagttcaaattcagcatggctgcagctgattaagaaattgatatgattattctttgctagcctctcttactaatggaattatatactggccagtaaaatgggcctcccaattgctgtttcagcaggttttaaaccttcaggaacaccagttaggaaaatagctccagaaaatatagatatattttatttttattaaaatggcagtctacatcataattggcatttctcaagactgtctttaccagaatctgtgtgaaataaggcaatctagtctccttgaaaaaaaaatctcttggatgtttaggaaggaagacttggccgtgatgtggtgtcctggctttgtggtgtagtgctgtgtgtatggagttagtgtaaaaacatggattacaccaagtggaagaaacgtcttcttgccaagctcattcttagaacttacacatctagaacagcttccactttggcagtgaggtcgtagccttttaggtggaagaagtgagggtgcagcgtgtcagacacaacattcatgttactcttacattggaatctgaaggtagttcagacttcgtgggttttgtttttaagcaaaacaatgtgaaaacatttaagtttgaaatgttgcatttgaagttatgatcatttaatatattcatattaccaagactattatactggaagtggtttttgtgttataaaggtttaattttacataaggcagttacttaatgtgatttttaacccttaaaaaagtggagatgtatacatttgttaacaatgccatgaaagcattttctttctcctaaggaaaagtgaatttcttatcagaatatctggctggccctgtaatttaaattaaaataaaattttggagaaacagcatt

SEQ ID NO: 3355 - DNA, 1235 bp, Homo sapiens
tgctctttatgacctcttaagagtgtaagtcattctcatcctcattattatttttgctgcccattttaaagatgaggaaacaggtgcagagaggttaacaccctggaggtcacacagcagggaggtggcagacatgggcaggctgactccagctttcgagctctccccatttctcactgtgctctttgggtgaatctgggtgaatggtgtcacttcctggccctcctgtggctcaggctgaggctggtggtctttgtgactcagccaggatgcagggctcactggggtttttctttttcctcccagggatcaacaagcgtggggccaagaactgcaatgccatccgccacttcgagaacaccttcgtggtggagacgctcatctgcggggtggtgtgaggccctcctcccccagaaccccctgccgtgttcctcttttcttctttccggctgctctctggccctcctccttccccctgcttagcttgtactttggacgcgtttctatagaggtgacatgtctctccattcctctccaaccctgcccacctccctgtaccagagctgtgatctctcggtggggggcccatctctgctgacctgggtgtggcggagggagaggcgatgctgcaaagtgttttctgtgtcccactgtcttgaagctgggcctgccaaagcctgggcccacagctgcaccggcagcccaaggggaaggaccggttgggggagccgggcatgtgaggccctgggcaaggggatggggctgtgggggcggggcggcatgggcttcagaagtatctgcacaattagaaaagtcctcagaagctttttcttggagggtacactttcttcactgtccctattcctagacctggggcttgagctgaggatgggacgatgtgcccagggagggacccaccagagcacaagagaaggtggctacctgggggtgtcccagggactctgtcagtgccttcagcccaccagcaggagcttggagtttggggagtggggatgagtccgtcaagcacaactgttctctgagtggaaccaaagaagcaaggagctaggacccccagtcctgccccccaggagcacaagcagggtcccctcagtcaaggcagtgggatgggcggctgaggaacggggcaggcaaggtcactgctcagtcacgtccacgggggacgagccgtgggttctgctgagtaggtggagctcattgctttctccaagctt

SEQ ID NO: 3356 - DNA, 1177 bp, Homo sapiens
tcacatgaggctattgaacagctgagatgtggcttgtgtgactgaggaactgcatttaaagttttgtttaattttaagtaatgtaaagttaagtttaaatggcacgtgtggctagtggctcccatattggacagcacaggtctagaaggtatgctatcatcattctcttccaaggttgatttatttccatggcctgattaacaacttagtttagattggttttcaggtttagacagtgacaggacaaaggtactggctgtggcagacactgttggttttctgctcattggccactcatgcttactgagccctgattttggtgtaaaagcaatggacccagcctcaggggttgaagcgtgaatagatgaagccaactgttcttcattgctagtgattggtcttgaggtgggcatgctgctcacttctagccagtccaagacaaggagagatttccaggaaagatttccttccctgactagggaagttgacaggcccttttggggccatcaccttccttgcttcacagaatgttgtgtgaagacttgatatttggagctatggcagccatcttgctaccatgagggaaaggccaaaagaattagtatctttctatgaattgttaacgatatttggaaaagctcagtgaacaccttacttctttggtgttgtcagttttcactgctttgagaggaattctgcccttcaaattgtataacccaacatcttccttaaattgttttatattgagataggacataaattattaaataaaatatttaaaataggtcaaataatagattgcctttagaaggaaatccaagctactggtaacaggatggcttctgacaaagggaaatgacaggttaagatttatgggtgggagggacatttaacactgcctatccatttgtttgttttgaattttgttccacaggaatgaactgtctactcaaaaataggtttattaaagttaaggccaggcgcagtggctcatgcctgtagtcccagcactttgggaggccgaggcaggcagatcacttgaggtcagaaattcgagaccagcctggccaacatggtgaaaccccatctctactgaaactacaaaaattagctgggcatagtggtgagctcctgtaatcccatctactcaggaggctgaggcaggagaatcacttga

SEQ ID NO: 3357 - DNA, 2740 bp, Homo sapiens
aacagaagaaactcttcaggaagtatttgagaaagcaacttttatcaaagtaccccagaaccaaaatggcaaatctaaagggtaagataatacctttgtatcatcagttataggctatatatgtcttagaggtctaaaggaacgtaaggtcatgtgatcctgtcagaaaagccaaataattttagctacgtaaatgagtgtaaaataaagatcatcatttaggtaccaacttgagagaaggggcttggcagcatcatgtgacagtgaaggagcatgtgcctggtaacttactctaagcattaactgttcatcctcaggtatgcatttatagagtttgcttcattcgaagacgctaaagaagctttaaattcctgtaataaaagggaaattgagggcagagcaatcaggctggagttgcaaggacccaggggatcacctaatgccagaagccgtaagttcacctggttagggtgctgtggttgggggtagcactctcggtgctttgtttattttttgcacaaattctgtgtttcctgttgctactgagtgaacaataactggatatgatgactgattacctgagaaataattgatgaaatctcaagaaaattcctctagatagtcaagttctgatccagctgtgtcaactcagagtagcaagtttgcccatgatttcctgccccatccactgggccccacctgcttgggttgcttctcccactttccatagaagatctggggcaggatatcaactatgcaatggcaattaaaaaatgtaaacccagaatagcctttactttaattaaggactagttggcttagttgcttttaactgctttttcactataacaagtattcttggctagtagtcatactaggcattgtgcaaattcagtgttacgaactgtgacttcacataaagtcacatttttttttccttcccagagccatccaaaactctgtttgtcaaaggcctgtctgaggataccactgaagagacattaaaggagtcatttgacggctccgttcgggcaaggatagttactgaccgggaaactgggtcctccaaagggtaagggaaggaagcgtgagtgctgcttccacttgaaggggtttttgttctgtgcagaccttgagtctaatgtgtcttctcattgagctcctttctgtctatcagtggcagtttatggattcgcacgagaagaagagagaattcacagaactagcattattttaccttctgtctttacagaggtatatttagctgtattgtgagacattctggggttcaagctgtcacaccagttagttttccatagagagctactctgtcactggtatcttttcccaaataaacaaggctactttctgtgggatggctccccagcatgtacagttaacttgggacatgtgtagtaggtgctttttataatgggcaatttcatttggtgttctaggtttggttttgtagacttcaacagtgaggaggatgccaaagctgccaaggaggccatggaagacggtgaaattgatggaaataaagttaccttggactgggccaaacctaagggtgaaggtggcttcgggggtcgtggtggaggcagaggcggctttggaggacgaggtggtggtagaggaggccgaggaggatttggtggcagaggccggggaggctttggaggtaaggcacgcagagataatgacaccacatagcatgtgctcttcagaccctgtgccctgtcacggttcctaatcactggggaggaggagctttgtacccattcttttaacagtgtcttgccttcctcctgtagggcgaggaggcttccgaggaggcagaggaggaggaggtgaccacaagccacaaggaaagaagacgaagtttgaatagcttctgtccctctgctttcccttttccatttgaaagaaaggactctggggtttttactgttacctgatcaatgacagagccttctgaggacattccaagacagtatacagtcctgtggtctccttggaaatccgtctagttaacatttcaagggcaataccgtgttggttttgactggatattcatataaactttttaaagagttgagtgatagagctaacccttatctgtaagttttgaatttatattgtttcatcccatgtacaaaaccattttttcctacaaatagtttgggttttgttgttgtttcttttttttgttttgtttttgttttttttttttttgcgttcgtggggttgtaaaagaaaagaaagcagaatgttttatcatggtttttgcttcagcggctttaggacaaattaaaagtcaactctggtgccagacgtgttacttcctaaagagtgtttcccctggaatgtcactggagagcatggcaaagccagctctgccacttgcttcacccatcccaatggaaatggcttagtgcgtgtttccagtatcccagccctaactaacttggttgaaatgctggtgaggggacctgctcctgcagccctggtgctgacttgaaggctgctgcagcttctcctacttttagcaggtctgaggattatgtcctgaagaccactctggaaagaggtgcaggaacagattagtcaggtttcctaggacaaggaagagcttcagggaagagcagtggctaactcctgtaatcccaacacttggggaggccgaggcaggcagatcaactgaggtcaggagttgaagaccagcctggccaacatggtg

SEQ ID NO: 3358 - DNA, 2740 bp, Homo sapiens; identical to SEQ ID NO: 3357

SEQ ID NO: 3359 - DNA, 2740 bp, Homo sapiens; identical to SEQ ID NO: 3357

SEQ ID NO: 3360 - DNA, 1197 bp, Homo sapiens
cccggccccaagtgatctattcttgccatgactgttaactaaacatggtgacaggattgcattttctttacattagatttgaaaaccgatgttggttttgggagattgctgcaatttttaggtgacttctctttcagactctgaagaagaagctatggagactacaccagccaaaggaaagaaagctgcaaaagttgttcctgtgaaagccaagaacgtggctgaggatgaagatgaagaagaggatgatgaggacgaggatgacgacgacgacgaagatgatgaagatgatgatgatgaagatgatgaggaggaggaagaagaggaggaggaaggtacttaaattagattctgacatacgacatgagttatgtttaaaggaggcacttaagtgtttgtggctactgatgtgtgatacattgtttgacatcttgtccagagcctgtcaaagaagcacctggaaaacgaaagaaggaaatggccaaacagaaagcagctcctgaagccaagaaacagaaagtggaaggtaacttgcagaattaggggatatgggggagataaacagcacaaatgatgaataacaaagggacttaatactgaaacctgatgttacattgtagtgtgctgatgtgctgtgtatagaaattttgctttggaaactaactttttaccacactacaagtagactgagttgagctttttttgtgcaggcacagaaccgactacggctttcaatctctttgttggaaacctaaactttaacaaatctgctcctgaattaaaaactggtatcagcgatgtttttgctaaaaatgatcttgctgttgtggatgtcagaattggtatgactaggtaagtgcttcactgcacgttacatacacgtgggtctgttaatgcttttccttcccctgttagcacagttactttagcctgctactgttaaacatgaatactgtaaacatcttcaaggattagcattagtgaactaagttagaattaaactgtagatcccctaagttgcaatttccataatcagtcgtaacttggtatagcacagaataatttttagtaagtttttttgttgtttttgttatgtattgagacggacgctggcttttgctcaggctggagtacagtggcgcaatcttggctcactgcaacctctgcctcccgggttcaagcgattctcctgcctaa

SEQ ID NO: 3361 - DNA, 1197 bp, Homo sapiens; identical to SEQ ID NO: 3360

SEQ ID NO: 3362 - DNA, 1100 bp, Homo sapiens
tgcctccaaaagggccaacgggaactccgcggtccctgaacttccggtgctggcggactcctcgctccagggccaccaggagccgcggcgtgagtgcgtgccgggaccgagcgcggggtctctgaggaactccaaggctgcccaagcctacggacccagccacattggcgaaccggagaccgcccgattccaccacccccgcgctcccctcacagccggcgccaaaaacgccagtcccacgacgcaggccgggacccgcgcgcccacggcccaatcagcgcggaccttgcacaaagcgagccccgcccccacggcgccgttgccagcccctccccctcccgtggccgcctcggcccgcctactccccgccccgcgccgttcacggttagaggctcgcgattggctcatggggacggccgcgagctttggttggtcggcgcggagtcacgagggcgccgtcgtcgcctttccacaggcgattactgggcaggctcagtctttcgcctcagtctcgagctctcgctggccttcgggtgtacgtgctccgggatcttcagcacccgcggccgccatcgccgtcgcttggcttcttctggactcatctgcgccacttgtccgcttcacactccgccgccatcatggtgaagctcgcgaaggtaaacggccttgagcgcgagcgcagacgtgtaggcctgctttccgaggggcgagcgcggcgccgcggggaggagggcctgcgcgcagtcccgggcgcgttctagggcgccatgctgcgggaagtctcgcgcgattagtggggaggtctcgcggcttctggctacttggtggcgaggtgaagagcttctgcaggtgctgggggcggcgaacgcggcgggaaagacagagtcactgagcgcggggagggggcgctgggcctcggggtggagagatgagaccaaacttttgcgacgcgtacgagctgggactcgactcctgacgcacgtgcccgggagcgcggcctgccacgtgggccgcgccgcgtgggtcctggaatctccagagggaccgggtgccttgggccgggaaatggcggtatcggccctagtcggagtcccggctgc

SEQ ID NO: 3363 - DNA, 1188 bp, Homo sapiens
ccttttgaaggacttaaaggagaagaaggaagttgtggaagaggcagaaaatggaagagacgcccctgctaacgggaatgctgtgagtgtctgctttgctcctgagccctggcagctaccgccccacaaaatttttcctgttctactttaaacatacctatatatgtgtgtgtatgtgtatatgtatagctttgcacagtggcagtatcgtagccaatgagctttacccgaggcgcgattattgctagttaaatatttataaaaacctttcgagcagcgcctgaacaagaataggttcagaggagactccggtagtctgagtttgggcttggcccagggtggggaaaagcccttgtcctggggcagttaatgtgcaggtttcatgatggagcctggagggtgttgactggagaagggtctctggggtgggcttggcttggctgggctgtagatgcagccgccagcctctggtgggaggccgggcatcaggagcaacgctctgtccagcctggggccagctggtaatgacatggcctgttttctgtcgaggagaatgaggaaaatggggagcaggaggctgacaatgaggtagacgaagaagaggaagaaggtggggaggaagaggaggaggaagaagaaggtgatggtgagtagccttgtctatcttccccttttcaggtactttttcctggccttgtctggcagaaggggaaggaaggaattggggctcctgggagtgggacaatggtacttggggccagtggaccacatggccctgggcacccacctgtagagtcagggaaggtctccctgacatggagttgtgcccatgcccactcacactcactcgcacacctgaaagtttctttcgtgcagctctgaaagccactgatctattgggctggccttttggggtgcagctgcttgggcctctctcctctggagagtcccacctgtgtagtgggcgtgggtgccctgattgggcccagttgcaggcagtagaggcagggcagggaccttgcagtccactacatgttcctcgggatttccccaggagccacagtaggagggaagtgtggtttacctggcctttgattctctccaggtgaggaagaggatggagatgaagatgaggaagctgagtcagctacgggcaagcgggcagctgaagatgatgaggtgggttct

SEQ ID NO: 3364 - DNA, 1219 bp, Homo sapiens
catgtatatctgcttttctttccccaatatcataacaattataccacctaattttataaaatattttattttaggtgattttcatatctattcttccaggtgaaccagctaataatattgccaagttggagaaaactactattgggactttgattggaattgtacaaaatccataatatagctggtataaattgacattttggtaatattcagtcttaacaaatatggttgtccctgttattttaaattttgtaattttcttcatatagatcctgcatatttattgttataatttcttctgattatcttatactcttattactattgtgaatacattttcccctacatttcattataactgataacatacagggaagttttagattttataaatccatcttttattctgtcactttactcactcctcattatttcaaattgttttttggttgcttctctgggattttcttgtttgactctcatgtttgactctcgtgtcatctacaaattaccattgttttgtggtgtactttccaaatacttatgacacttattcagatttcataacttattgcatgggccagtatttctaaaacactacagtggggaatattggaaaaagaaaacatccacctcaaggagacatactgtgagaatcgctatggaccacctgggaagggcatgggatagcctctgtcacctagttaccacttgataaaaggtaattgttgctgtttgtcatgtccaagaagaagcagtcttcttctagttttagaaagagttctgaaggactgagtatttaatttttatcaaatgcctttttaatatctattgtgatgattatattataccccttatttcatttactggtaaaataattttatatatttatatttggtttatatatgtgaaaccattttgcatgattacaatgaactattcttgatacaatacttttttattgtactctgaaacttatttagggtttttatatatgtattcatagttgaggttgatttacctgattttggttatgttatggttttaagtcatgtatattttacaaaatattctggaggcatttatgtagcataattattatctgatttttgaaatacttaaaaaaagttggtaaagccacttcttctcaatgccatttatacagataattctttaatatttacttcaatttattctttagtgttgaattggtcttgtt

SEQ ID NO: 3365 - DNA, 1243 bp, Homo sapiens
gataccagggctgtcacccggagttcagagctgggtcctagtactagcaggtagtttgcatcccagctggggtagttgagcagaaattgaaccagcctggggaaacattcagtacctggctcagaactgtcaaagcatgaggagggtaggaaacagagcacaaagaacagaacctggagagttggactgactccagtactggcctaataactggcagcgggtaagtgaaaggagccagctttcaaagcagggaagattttgccgtaaaaatgggatggaatttatatggtgggagctttgggttccaggtataaggagggacttagctagttacacagtggactggctgagtgatgaactgccttgactgttgtaaagagagttccgctttggaggaggagttgggatggggcgcatcaacgccccttcccagtcccactccactcctgtgattccatgatgcaccgggcacctgcagaggtcgatgatgattggtaaaaggtctgattgcactgaatgtcacggtccctttgttgccctcaactcccagcagcccattttttccctcccgtcacatttaagtcatgtgtatgggatcatggagcagctgataatttgggattctgtcagtgtgtgtttctgagagtgatcggctcacagctgacgagtatccaacaaaaccagttacacaggagactgacgagtggcagtcatgggtgtgatggtgcatgatctcaagttttcaatctgagacctcctaaggagaaagaaaccataaaaaagaaaaggaaatttcatgggggtaaaaggtttggtcacctgtcatacttttcagcagtgggtcacaagagggaggcaaagtggaaaatgaagttaccaaagtgatgcctgttgcccagcctgttaatagtcactccctccgtgatacttcaagcattttatttttttttagtcccaagcaaatgtaaatatcacatattctcttccccaagtgaccttttagacaagtgattatctacttaacaatctcatattgatagtctatgttttctagtctttcttttccttctctattatagaaatttccaaacatacgcagtatctcttcccccccacacttatgctggagcaatttgaagccaattctaggcattatatttcatccaaaaatattttactgcccataatcttcttaagagagtatagtgaatttttcgattattcccttttcccattctagaat

SEQ ID NO: 3366 - DNA, 1168 bp, Homo sapiens
gtttggagtgcagtggcatgatctgggctccttgcagcctcgaccttctgggctcaagcagtcctctcacctcagcctcccctgtaacagctgagactataagtacccaccacacccagctaattcgaatttttttgtagagatgagggtctcactaatttccccaggctggtctcaaactcctgggctcaagcaatcctcccaccttggcttcccaaagtgctaggattaccagtgtgagccactttgccaacccttgcattttctaattagaaagaaaacatcagtgaataccttctgaacctctggtgttttacacatagaaaaatgttgatcatgcactgcatagaggtcaatgatgaatggtaaaaggtctgagtcctcagatcccctcccggcatcccagttatccccagctgcctctcctccatcgcacttcagaagtgctgcgatgggcagaagggcagctgacactccgtgatgtccctcattctgtgttcctccgtgagctcagggaagacactggttggcatccaacagcttagtcacaaagggatttgattgttgggagtgctggtatctgtggctatgatctgccttgttcaagctgagacctctgattgaaaatcccccaggggttttaattgtttacataaggagtcctgatgtttccttttgtaaattatgcctgtggtgaccttgtctagtctgactttaaatatggaactgactttcagcagcatggcgcaacatcgaggctttaaaaattctttaatttgatataattcagacatagaaaaattacaaaaacagtacagcaggtatctgtggtagagctgatttcaaattcaagattgaggatggggagcacgtgaagcttggtgctagtgatgttgaatttttgtttttaatgttatttttagtgggagttttatccttttggtcttgatacctcacctttggccaacactcaaagataggcttcctatgagatacatggcccctggataagactcagtgaatgaaattgttgcttcttgtcctgtttgggatgtgtgtgtgtgtgtgtgtgtgtgtgtgtgtgacaggatcttgctatcactcaggtggagtacaatggcactatcatagttcactgcaacctcaacctcccaggctcaagcaatcc

SEQ ID NO: 3367 - DNA, 1237 bp, Homo sapiens
cttgtcgcctgctgctgggcgtgatgtcgctggaggtgctggcagggactctgatttggtggtccgcgctgcccctgccctgcctctgtcctggctctgaactagtagatgatggtgccagagggcagggagctcgcctggggagagggctgtgccccgtagggacagtgcccaggtgaaggatgcccctggtcctccagggcactgactttgcccttttttcccgttgatagtcatggctcagaggtgcttgtaaatgtcttgggaagaggtttctgtaacccctgccctggtgtgaggaggaaatggctctggcctggctgcctggccgtggcttctctttggctcccaaagagaaggacagtgttgggagtatctgccgtggcttctctttggctcccaaagagaaggacagtgttgggagtatctgccggcgctgtccaggtcctttagtcagcgtcactccatctgatgtgcagaagctgggctgcacctgcgggggtgggcatagaccgggctgggtctgcagcagcccctggtcctgagcaggcggcagtgaacagcactggcccacctcccactcacagcccctctgtcccctctgcagtgcacccaggtgggcccctctgcgtgcctttgggtgctcccctctcgtggtcgttctggcccgaggcccttagagtatggaggctgagccaggccttgggtttccccagcacagcctcctgtcgctgcatgcgacgtgttgggatttttggatgaaagactctcccacgctctgttggtggacttagctgcctcactggaagtgatgtgggtggaaggtggttgtatgttaccttttccacctctcattgttttccccagaacattgtagatgggggttggcagagggagaaataagccagccacggcagtcgcttggtttcccaggtggaatgggctaacacaggagatgatgggaacctgtcccgcagtccctgcatgaccattggccctgctggcctggcgatgtgggcatcctggggttcttagggtcccagaacaagccccaggcaagctggaacttgggtggggaggggacatgaggaggataaacagctgactgtggcttcaaggacatcagggccaccccaagtcctcagtgtcctactcctggcaaggagttgggtttggatcaaaagtgtttaaaattaatatgttgtcagtgattagaacaacactgtttacataaaaa

SEQ ID NO: 3368 - DNA, 1099 bp, Homo sapiens
caaatttgaactctcagaaatcttttaagttaaatgaaagagacttctttgtcttcagtcacttttctcaggggatgccactgagtgagatgattggcatgttccaggatgagactctgtagacatgacactaatacacctggcaaagccatagacgcaagtcagccattcccatgcatcccttccatggggctcatgctcacttgttggttatgaccttgcctaagtggaggtcttgggttcctgagtatgtcgttaatgaaaccttggattttaatcatttcagacaagtaatggaggtgggagtttaagcgactattcctcctccgttccatcgactcccagcaccagccagaaggaacttcggatcgatgttcctcccactgccaacacgcccacgcccgttcgcaagcagtctaagcgccggtccaacctgttcaccgtgagtgtcaaccctgggtggagatttgaatgcgattccgaagcgttcccattaacgtaaacctggttgccacatggttcagtggtatttgtagaatctcaactatattaaagtgaataacattgatttctgtggaggactaagaaaattaagagaagcaaagatttggatgttgagtagaatgggaatttcttcatgtagacattcctgacttcgtgtgtctgaaatgaagagctgggggtgtgtataaaggcacttgttatcctgtggctccagctaaagatgtgtcacagtggatacaaggagatgacaaaactctaagattcccagatgtgtgtctctaaccgttcagatgatatataagctattactgtccacaggccctcttcttcttctgctggggtgcctggcgctgccctcggggtggaggtgggggactgggaggtgcttcctggaggctcattgccatgaggctctccacttgggttttttgctgtagagcatgttgaaagcagagatgagctatctgggttcaggtttataaattcacaatctgggtgcactcgggcatgcattgttccttttttttttttttttcttttgagacagggtctcactctgttgcccaggctggagtgcagtggctcagtcatggct

SEQ ID NO: 3369 - DNA, 1198 bp, Homo sapiens
tcacagtgggaaaaatccagaaaattgttggaatccagaatgctgtctctcagacattcctagaggacatttctgggttttgtaggaaatgaaaacattttgcatggggcatgtggtccgtgtgtgtgtgtgtgtgtgtgtgtgtgtgtgtgtgtgtgtgtagcaagtgttttttttttctttctctccaaatgatgaacacagagttaaagaaaaggtgttcagacttcgctatctagtatttattctgcacagtgactttaaaacacccctgcagggggaagtcattcacaggaccatgtgtcatttccctgcggttcctttacacccacacatggaggcgggcaattgctatctgcaggggacatagccattgacaccagaagaggagctgggggctggttctgggggggtcccgtgtgtgtcagatgcctagtgtgaccaggccacagcacagcagccaccgctgacagtgactttgtgaatgggcctcttccaggccctctgtctcccagctctccctctgggcatgtgagaaaaactagtatgggtatgggaaatgaaccaaagtcagaagctaatctggcttgtctccacctggacaaacctgttccctgaagtctgtgacaataatgaacattgaagctttagaaagagctgaaactgatcatggctcagaaaatgacgatgattggactggatatcatgtgatcaactttgatgcctccattgagttcagggactttcttcttcccctacttacccaacctcattccctccccatctccttattttatgcaggtgagtgttttagaatctaattgttaccttgatattcctagtctatctcttggttattattatcaatttccccgttctcaagtttcttgtagacccagttaaagcacaaacaagacaatcctggaaagcttaagagatgagtgactttttaaagtttaactttattctaaccaaaaaagcttcacgttcatttaattccccatattctaagttatttggaaatttatactttaaaatgaagtgaactttataatgtagttttacattatatttttagctgtctaacaaggttatttcctatctgtaaacataactcaaataagtactatagattttatagttaatgagggaatggcaggaaacagttttatttaagccttcacaatttttgaagtat

SEQ ID NO: 3370 - DNA, 1197 bp, Homo sapiens
tttgtgaaactgaaagcgttttgataaaattggaaaataagattttcttccctgtcttcccatggccatcctgccagccatcgcctagcgctgtctctatccccagttgatatgaaaggaagtgctgggaagggaggtgcgtggtccctttaaatgatacagaagggctgggcaggcgcagtggctcacgcctgtaatcccagcactttggaagaccaaggtgggcgtatcacttgagttcaggagttggccagcctggccaacatggtgaaaccccgtctctactaaaaatacaaaaattagctggatgtggtggctcgtgcctgtgatcccagctacccaggaggctgaggcaggagaatgggttgaacctgggaggcggaggttgcagtgagctgagattgtgccactgcactccagcctgggcaacagagtgagactccgtctcaaaaaaataaataaataaataaataaataaataaataaataaaaataaaaataaatgaataaataaataaatgatatggaagggggaagggaagtgctgggtagaggagggagtggtccttggctagggctccatccccaggcctgtgcccccgggcttagatgaggactggcaattttgttttcctgtccaaatgttgcatttcccaagacccccctggctgccacacccccatcttgtgcctataaaaaccctgagaccctagcaggcagacacgcaagcagctgcacgtcgagaggaacacatcagcagaacacacgagtggctggacatcaacagcacaccgacaggcaccggcagaacgacacagagtttggctggagcagtcagagaaggggtgggccaccaagtgtccctattccgggggaaaaccatctcccttctggctcccccatctgctgagaactactgccactccataaaaccttgcacccattctccaagcccacgtgtgatccaattcttccagtacaccaaggcaagaaccccaggatacagaaagcccactgtccttgcgataaggcatgggtctaattgagctgactaacacgagatccctatggatggctaaactaaaagagcaccctgtaacacacgcccactggggcttcagctgtaaacattcacccctagtcactgccgtcgggttggagccccacagcctgccctgtctctatgctcccctagag

SEQ ID NO: 3371 - DNA, 1224 bp, Homo sapiens
ggtgcggagccctagcgtcactgacgaccgggacagccgagcagctgcaggatccgtcgtgttccccagcaattttaatatttaaaaattcgttactgttgctgttacttgttttctatgtattggatgtcttcgtgaagaaccctcaaaagtgcaacgaactcctccctgccagagggcggccgcgcgctctgagtacagcttcccgcggagccggccaggtcctccagggcaccgagaaagccggccagaacggcggcgccctatcccggccgcagcgatgtctgacggcgccccggaactgacggtctggtacgcaggggcgctcggcggcaacggcggctttaaacgtcatcgcgggcgcgacgcctgagggacagtctggggtttggctgtccggacggtgcagcggcgaggccggccgcgaagatgccagtggcggtgatggcggaaagcgcctttagtttcaaaaagttgctggatcagtgcgagaaccaggagctcgaggtaaccctttgcgtcgcgctgggagaaactgcggagtagtcttaggccctggggcggcaccagtttccagggtaacggggtctgaggctagcgggctttgggagctcacggggcgggcgtgggaggtggacgtgtggatccctgaccgccgcaacctgctccgaccgggcccggtctccccgaactcgccgggacctttttgttatgtgtcttcagcttgtgagcccgaaaaccctgtgcgtctttgctccagcacctaccgatgagctcatattaattaggcatctttccttcccagtatcgggttgggagagggtagtaaagtgggttttattaaagatcttggtatacacacacacactaacacacacaccgcaactcacacgcacaccaagaaaaatgtgaccattgtaacctttttttaactcacaaagcctttctcgtaatgttgtcaagttagcttgccattttgtcttcagtaagacagatgaaagttatgcagctgttaaagttaatgtttttcttagacacttaaaaagggtttatatcattagttttaaaattaaataaaggagacaacatccagaagcagcagctcactaatagataatagatactttccagttgagttaaaatggaaagaattgtctttgcaacgcagctgtggtgattttctgtctcttattcaggacgcttgatgtaatgggcagaatcaga

SEQ ID NO: 3372 - DNA, 1311 bp, Homo sapiens
ccttctgtcccccaatatgtgaattttgactcagtatatgatcagctgtgaacaccaaagcatcggtgggtttaacaccttgaaaaaggctttgggcattttcttaattcaagagattttgctgttgcagagggcacttagtcattaagaaaacttcatttccaactcattttcgataagctgagttacttgctctaaaataaaagatggcaataaatatctcatctttggatatgaacgattcacccaagttcagcctgcatctgactcacttcagtccatttaagagaaataacccacatccaaagggttaaacatcagaatgagagctgactcattcaaacagggccacatgtgaactcgccctgagccctgtgtgcccgtgatttgctgcccgagggctcttgtactcacccaccctcagaaccttcctggaaattgtgctctgtagacatctattgctgcccagtacgtggtgcgtttaattttatttaaatataataatggaaaggtatcagtgtagaatgtagtattgatgactcttcctaatatcaattaaaatttatttcaatatttaatatcaactaaaattaaatatttttttctgtgcgtgaactcaaaagtcctaatttggccccatctcctagttttgtcagttgcctggcccagccgtctttatttccttctgaccctcgttctctccctcccccgtgagtgcatgcctgttactgttttggttgtataaggtaatcgtctctgaactcactggactgatgtacctttgcgatgccgtgagggtgtgagcctctctctcctctctgctgcccatttgctctgattacagggactctccggctccagccttgggcttgccggtggtggcctggctcccacacccctgtctgccccaaatggaagctgggtctgtctccttttcacatcactttgtcgctccttccctttccttctgtgcatcactttaattgctgattacatttagtggatagttcagcctcctctacacaaagtcacaagagcaaagcttagcaactgttttaattggcttgactagtttgctaagacttttgtcaatcttttagaaaaaccatgtcaaataagttagaacctatatagaaaaggagacttaaggaaaaggagggttttattaaatgcatattttcaaaaactcgagtccaaaaaattggtctcttgggtctctcctccttttccagcaattgttccccatttggggtttcatttgtttttttaaaaatattttttctcttgtaaatgtgtccaggaagcaatttg

SEQ ID NO: 3373 - DNA, 1264 bp, Homo sapiens
ttgctgtaacaaacagtgctgcacttaataaataacctttatacacactattttgtttcactgtgaatgtagctgtaggaaaaagtccaagaactagaattgctgggtcacggggctcatttggtagatgtgataaatggcccacagtagaggttgtaccaatttatactcccaccaatagtgggtggctggacaaaatactctttatggcagatttataaaatttaaaaattcataatattctatgcatataaccacactgcacttataccaatacatttatataaattcttaaaaattaataatattgcttaactataaaacagacataattgactggaatctcatgtttttgaatgttggaaaaccccaaatctttcaaaaggtcccactcaggaagttgaatttctttgaagcttttttgatgttagccacaaaagaaattaagtaacagaaattgttgctctgacccttacctcagcacagtttttgtaaatgctttttttgctgtatctctgcagtcaaataatttagtaatccattctgtggtgaaacatttccacgcaaaccagacctcaaagggacacacaggtgggcaccacagcccagtgaagggggccaagccccatttcattacttcctcggtggaacacgactccatccggctgcccctggagcacctggtggaagaacaagtggcaggtgagtgagtgcagggtggccctgggaccagcctgctgagctccagctgcgaggcgggaagtggcctgcgagcagagcccgggatccgctgcagagatgtagattcagtgtgccactcactgtaactcactggttctgatgaggaggcaggccctggcaccttggtgaatagttgcccctcactgcactgggctccctggctgcccctctcggtgcagaggccagctgccacaagggggttggcaagtgtggccaaactttcccttaggaagttcattgagaatgaatatgtagaactagccatttgtataactgagtgatatttgaaacttgcatgtaataaatatttaacctttaaatagtacgcctgcaaataggcaaatgatgcttgtcattatttggttttcatcataaaatctcagctcccactctcctctcacatgaaggaaaaggatcaaatagacctaaacttcaggtgtgaagcctggaataagcgagctgccgcacctgatctcagcacccatgacgcgaggcctcctgctatgtgtggagaagcggagtg

SEQ ID NO: 3374 - DNA, 1264 bp, Homo sapiens; identical to SEQ ID NO: 3373

SEQ ID NO: 3375 - DNA, 1176 bp, Homo sapiens
tgcctctcacatcacagatcagttttcattttctagaaatgtctgtaacaagaaacgcagtatgaacactttttcctttttttaatttttaaagtcatcatatagtcatatagattttttcattttagcttgcagttccatgcatgtaaacacatgatcagttacaatcaccacaacaggtccagggctccacctgcccccaaatcctttgtgttatttcttttctttttttctttttctttcttcttcttctttttttttttgggtgaaatctcgctctgtcgcccaggctggagtgcagtggtgcgatctcggctcaccgcaagctccacctcccaggttcaagcgattctgctgcctcagcctcccgagtagctgggataacaggcacccgccacgatgcccagctaattttttgtatttttagtagagacggggtttcaccatcttggccaggctggttttgaactcatgacctcaaatgatccacccacctcggcctgccaaagtgctgggattacaggagtgagccaccgcgcccagcctcagctatttctttatggtcacacactacctcccccccccgccccccgccgatctgttctcctccaccatagttttaattattgaaaatgagaatggcacatacatggaatcacacaatcggcagcctttgtgaccagtttctttcaccaacacctgccttggagagttgttcacaagctcgtatgcattgatagtgtggtcctcgtgtggccgatagagttgcactgtggatatatcaagcgtgtgggtctttcgcctgctgaggggcgtctgggctatgccagcgtttgaagttgggaatacgctcagactttgtgactttaccttgcagggcgctgggcatctcagtcttcctataaatattcttgagctctgttctggaagggcttaaactgcaaagaaagtttagtccttttgtttctttgctagttgggacctgagcagaatcgaatctagggctactcttgccccttcctggggcaaaaaagcccttctgagtgcttacccagtgcccacgagggtggcatccactcagccggcgggagtaggagctgcgcctcccctgtgtgcctggacgttgccttttccagttctcagggatttcctcacacacatgctctgatgggctct

SEQ ID NO: 3376 - DNA, 1280 bp, Homo sapiens
gcccttaggccatatgggaggacatagggagggcaggcagagcttgggacagacagcgagggtggaagttggtaggggcaactgtgtcattgatcttcttatccaattgccataccttcttagtgagttatttgttctggcaagattccattaggttcgaggcgtgtgtaagtttcgctgggaaccagcgggtgagttgcagcctgcactgcaaatcccaatgtcagtggactgggaagagcacgatccatatccgcggcagtggtggctgtggtttgttatgggtaaaagtgaaatagttgtattaaatcagaactccaagctatgccttcaacatgtagatgagttgaaatctaaatctttttgcattactataattgtctgagttgatatgagcaaattgcctgaagcacccactgaaagtctgagtagatccccttgcttgctttcttactctacttggcattttcttttaagtaaattttttggattgttttggaagtggttttattcagtgtgaggatttggggaaaacacataaaaccataaagatatctctcagaggcacctgcggttaataatctgtgttcacctccttctgtctttgtacacgtgtgtgagtgtgtgtgctgtttctccctttgtccttgtatacttgtgtgagtgcgcgtgctgtttctcccttatctgtccttgtacacgtgtgtgagtgtgtgctgtttctccctttctgtccttgtacacttgtgtgtgtgtgctgtttctccctttctgtccttgtacacgtgtgtgagtgtgtgtgctgtgtctccctttctgtccttgtacacgtgtgtgagtgtgtgtgctgtgtctccctttctgtccttgtacacgtgtgtgagtgcatgtgctgtttctccctctttgagtggggctctgcggatttgctgcttccctggcatcaacgctgtagctggtgctttgcttgctgctcttgtgtaggccagaaaacccacacttggtgttcgttccctgtctctgcttttgtgagtggccaggtcctgttgcgtctgtttcacaagtggcttcgcttcttcctgttgacctccaggctgccatcattcccacctgagcttgttcggcggcttcctcttggtctccttgggtttagtctctgccctcagtccttctccagtaaggcagaagcagccgtgatctcaatgcagaacccaccatctcagtcctgtgcctgaagtccttcctttcctgtaggaggtgtgttaaagtctgccactctt

SEQ ID NO: 3377 - DNA, 1216 bp, Homo sapiens
ggccttggtggggactgcaggtgaccatggcccttctcaggcggtgcttccgctgctcccagtagccgggatgtccttgcgtgtttgacctggttctgttctccacagattgaccgactcatcagtcacggggccgacatcctgaagcctgtaatgctcaggcagggagaaaaggaggcagtgggcacagccgtggactatggctacttcagattcttccaggtaggtggtgagcctcccatgaggaaggagggggagtgtgggtcacgtgcagggcccccggctggggcattagcttctctggggcaaagctgggctcaaggttcctagcgccgcccccagagcagccccttggctgcagaggtgaaccccccaaagtgctgagctcatgccaggtgcagctgtatgtgctcccagctttgtgtgtctgtctgggttcgtcctcagttatatatcacaagagctgacaggagccctcgatcaccgagagtcaccccagcagtgaggggcgggcccgggaccctgtggtgaccctggtgctgtgccgcaggaccggaggattgcccgctgccccttccacacgctgatgccagcagagcgcgagacgttcctggcgcggaagcggctcctggagtacatgggcttgcagctacggcaggctgtctttgccaaggagagccagtgggaccccacgtggctgtacctgtgcaagagaggtgagcagtgggccctgctctgctctgctccacagggcggcgttccggcctcgtgcctggggctgttatccctggagatctggaccccctggggctcttggaggggccttcctggggctgggctcgtcggcttgtcccctttgtgtcccgtcgtccaaggagctcgtccaggagagactgagaagtggggtctggactggggagatgtccctgggaagaggagttggtggcctagggccagggcccaggtcagaggggccccacgcccaggagagaactaggcactgctgcgggagccctgtcaggagtgccagtctatccggcacagggactgtgggcccgaggcctggggtgctgctcccctgcatggtcacacccctccctacagggtgcatcctgcacacccctacatgtccccagctccccacatgcacccactccacaaacgcagtacctactgacatctactcccccatgtacccacacccacgtactcaacc

SEQ ID NO: 3378 - DNA, 1099 bp, Homo sapiens
ttaaggcatttgccttcgttttccaacctctccttcacttctaagcacctgggtgcggacaggccacattttgtgagcttagcagccatgtatagggccatgcagcctgaggtgtggcctggtcaggtgcaggcttctgtccgatgccttcacaggggtgttcttttctctttgagggtttggggaaagctgccctggtcttttcagcctagctgctttgaagacagctctaggccacgggcattggtccttgctgaagaaggtcctagaatgaggttatcactccaatttattctaatgacacttttttggttctttccaaaggaacctccaaaattcccagttgttccaatcctttcatcatcatttatggacacaaacctggagtctctgtactatgaggtgaacgtgccttcccagggtagctatgagctgaggccaccgccagcaccactgctcctgccacgcgtctcaggcagccacgagggcggccacttccaggacaccgggcagtgtggggggtccatagaccacaggagcagctctctgaagggggactccccgttggtgaagggcagccttggccatgtggaaagcgggcttgaggacgtgttgggaaacacagaccggggcagtctgtgcagtgctgagacgaaatttgagtccaacgtgtgtgtgtgcgacttctccatcgagctctcgcaggccatgctggagagaagcgcccagtcccacagcttgctgaagatggcctcgccctcaccgtgcaccagcagcttcgacaaagggaccatgcggaggatggcgctgtccatgatcgagtaggtcctggcaccagctggtgggggtggagggccaccatcagggctgaatcctatgctcagcagacccacgtctcttccctgtgccagtgggaggcgttgtgtctggagatgtgtgtctgaatgtgtgagcatccctgtgtcggtggctccacgccatggccagccctgtgggggtgccacggtgacgggctgttttcagtgccaccccagccctgtgggggtgccacggtgacgggctgttttcagtaccacgccagccctgctttggcctttgg

SEQ ID NO: 3379 - DNA, 1132 bp, Homo sapiens
tggctttgcaccctgtgggcccaaagagcaactttccatggagatgatcctaaaggctgaggaagggaaccacgaatggatttgtaggatcctgaaggacaactttgctagtgctgacgtggcggacgcaaagggctacactgtgcttgctgcggctgctgtaagccccacaccctcccagctggtgcccgcaggagcttagctgtgagggtcacacatgtgggtggccctctgtggccccctctgcaggagcagagctgaggtacatggggacactgattgtccacacctccacctcgccgttcagcagaaacccactcagctgagtgtgacactcgtggtccagtgcagaagggtttggggcagagtgcctgttccattcctctgtcccacacttgtccctttgccaagctcccgaatgagcactggttcctgccctgccatagggtggcctcatgagggcatcaggacacccagtgacccttcccacccctgagggccaggtgcatcatcctgagtcctgcctcatctccctccagactcactgccacaacgacattgtcaaccttctcctggactgtggggccgacgtgaacaagtgctcagatgagggtctcacggcactcagcatgtgtttcctcctccactaccccgcccagtccttcaagcccaatgttgctgaacggaccatacctgagccccaggtaagccccccggtggccactgcaccaccaactgtctcctgtagtcttctctgtctctgtaaatgtccaccaagcctcctccctcctgtgtggaccaggcttgtacagggtgagttataaggcagggagtgggcaagagagacagagcctgggcatcccctaagggaccctgagcagatgccaaggtatgtgtgttctttactcatctcctgcatagcagcctggggccccgagacctgccctgccagcactgtgcaggaaaggggtgctgtggagggagagtgggcatccatgacaatgcccccaaggtggggctgagaatctgcatgcctaaccgtttcctggcagtaccgatgttattgaaacaccaggggttcggtctcagtcctgctgctcaccacacagaaagccaatcactgagatgccaa

SEQ ID NO: 3380 - DNA, 1199 bp, Homo sapiens
ggtgaggaggcgagtccagtgtccaggcctggcagcccctcctcagagaaggggctgtatgtgactcaagagggccaagggcatccgagcagatggccctgggctgggctccctaccccaaggctggccccctcagtctgagcctgcgctttcctcaggtcccagagggtggaaggagccaggacgcacccccactgctgctgcaggagccgctgctgagctgcgtgccacatcgctacgcccaggaggtgagccggctctgcctcctgcctgcgggcacctacaaggttgtgccctccacctacctgccggacacagagggggccttcacagtgaccatcgcaaccaggattgacaggtggggctctgggacttgggggcggccagctggaggctggggtgctggagtcttagtgctcgcctgtccccccacgtctcctgcctgcccctcaccctcaagcccctatctgtcctggcagaccagggctgtcctgcctacctggggacccttccttgctggtctgagcctggaaggagagtctagtgggaggtgggccaggagcacacagccacttgtgtgacaagtgcagtctgggagcgctgatctggtgtctctccacaggccatccattcacagccaggagatgctgggccagttcctccaagaggtgtgtatgcagccccgccagcccggctcacctgcctggggctgcctggtggcctagggtctacctgcaacctcaggcaggtggtttctgcctgggacgtgaggtgcccttgactcttcctgtgagagccccgggcggtgccttgaagggcagggggagctgaggctgcgtcccattccctggctgcactcggggtggggtgtgagaaggggcgagtgccaccgctgcccgggccccccatctgtctttgcaggtctccatcatggcagtgatgaaaacctaacagggtggccccctgtgccagctcaggtgactggagcccgagggcctgacaggttcccagcagctgggccggccagccttgcactgtgggggctggtcctgagtcttggcctgcctcccagccctgccaggaggctgcggcctaggggtccacgggaagcctccgtcaggagagacgcagccctgggggccagctggtgctgcaaggaagggtgggaagcttgctggcttctgttgcgccactgagac

SEQ ID NO: 3381 - DNA, 2237 bp, Homo sapiens
tttgttcttgtcccatttcaccccctctgcagacaccaatgtccgagggccacccaggacaggacgggggtcagccccaagctgagagtctggtcataggagtcatgtccagaggcctagggaggttttagggccctccccacccacacccacaggtcgatttggtctctttttagctcaaggaaagacagtagccaagcaacagagcccctctcccgccgtggcccgtgggagcagttacatcgggtctggtgctccagacctagggcccagcactttcatcagatcctgcctcctggagtgggggaaacgcagcaccccactggttctgaggcccctaccctcccaggctgtcccacgtgatgctgacatgagcctcagagaccccaatcccatgcctgggggagagacagcggctcaggagtgggggagcacgggccttctacaccacatgggaaggctctggcatgaggttttcctttgggaaggttgtttgggcccctgaagttccatctccgagagtggtgtgcagggcaggccagggcccatgctggctgcagtctctgtggctgcctgcctgggccagcctgtttgggagctgggactgtgggctcgccttttcgtacctgggctcaggtgcggtgtggccaccgccaccctcatcccctgcctgggaggctctcccaggggctgatgggggggttctgtgagggagaatcagggctcgggaagccacgcctgggaaggcaggacacaggacacagcagctttctttggaaatctcccaggtgaggattcacatcccaaaataaaattcagaagccaggtggcctgtgctccccatgggtgacctctggaggcagtggaccaagatgcagcaaggagaggatgcagaacagcttcttgcagaagcacctgctccggcatccagcgctgcctggaggcaggaaggagaggcagggcaggacacgctggtctgagatgagggggagccccacgggccccaggcaggctagaggaggcacaggccctgccacggccaactcaggtcagccagcctgaggctgtggcctccaaagggtctgggcgcaccccccaggtcgcaggtgtctgaggccagccaacctgcagagcactcgcggcgtgggtgggctgagtggaggtgcctgggagctgcctaaattcagaagcctccactgccatggagactgcctggctgtgtcctctcagccaggtgccgtgttggccttggctaggacccagagccacactgcagcctccgccgactccctccttccgggcctgctctagtgaggagtgcctaagccaggacccagaaactcagagttgatggtgagaggaggccgcctgagtcaggacacctggcttcttgaaaagttcgctctgccagaaaccacctagggaccacgttagctgccttccttgagctccccaggagtcggtttccacatctgtgaggtggagggctggtgtggaggtgctcatggggtgcggtgcttgggagacagccaggcccagggtggctgctgcttcctgctaagtgggggaggtgagacagatctggaaagccgtctccctcagatggtttcatttaatgctttatactgccgagtctgggggcttgttttggtttgggggcagccatcctccaccagaaagggggagctccttccgctgcggctccagatagatggggatgccgggctccaggccgaccagcacttgggatctgatgggacacggccagtgcctaggggtgccaagtccaaggcctcccactgggagtcatcgctgagaagatgccaatgtttcatccaccggctgcacaggcacaaactcccccacccaggacggctgtgatgaggtggccctccctgtcaaccctggtccctggagtccccagcacctggggccctggtggggctgatgtcacaggtgtttactgtgctgctgcactggtcctatgccagcctcacccatgtggggaccacggaaggcacactcccttacccccggtgccgggccgtgcggtcccccagacggacagcagctgtggcgacctgcgtttctccctgggcctgtgcttcctgtagttagtccgtcccctggttcccctgtggctcagaggccgcgtccctggcttgtacatatgtgattgctgtgggcacaccccagaccccatgtcatagctgccgtcccgacgtcacgacgcctgt

SEQ ID NO: 3382 - DNA, 1225 bp, Homo sapiens
tgtgtgatgggtctcagagaagggagtggtagacagaggtgggtgaaggatgtgaggacagaggctgtttgtcaggagctggacacgagtggagggtcagtgggagctgagggacaggtcctctcgggccaggcctgggtgctggtgaaatgtgcttggacaggtgtagtaggctgtggccaaggtgtggtgtaggcaatgggcctggcagcatggcagagcggccccgtgagggttgtggggcttttgaacaagggtatgtgcggctgccctgttggttcttggggtcttgaccactgtcctcctcatgagctgtgccgagtgtacatggccatgtgcctttcctagccggggcacagagaacgtgagcgtccatgtgacgtgctaaggccacagagtgcccaggacccggtgtatcttgggaatggctggggttggctggttgtttcccttgaggagggggaggtgcccttgctgcctctgagtccctttggccccggcatctcctccttgagtgtgcccttggcacgtgataggtcaggtctcccatccatgcatgcctccctcctgtccctacagtgcccgccaccaagctcagcacactgacgcggccctgtccgggaccctgccactgcaagtacgacctgctggtctacttcgagatctgtgagctggaggccaacggcgagtgagtgctggtgctggggcccccagggcgtgagtgtgtgtcggggggtgcgcggagagggacgaggacttgagctgcctgagggttgccagcatccagagtcgttcttccagcgggtgttcactgcagacctcttgtgggcccggcctcatctaggtcttggggagtaaaagcagacaaagtcctggaggagctggcatgaggggcagggaggtgctggacagataagcacctgaattagtgtccccatggtcctgagcactaggacagcaaaccagggtatggctcaggggcagggcagggaggcagacagcacttacaaagtgatcaagggacttttgagggaggtgggaggggagccctgaggccctggggaggcaggttccagggccccagggtggaggccagtgggggtctgcctggtgccctgggggcagctgggagctgggctgtggctggcagctcagagtggggcctggtggagactcggatccttgcccagagtgggacaggagccttagatgttggagaagacga

SEQ ID NO: 3383 - DNA, 1136 bp, Homo sapiens
cctgcaggcagcgtctggacctgatgcgggagatgtacgaccgcgctgcagaggtgccctccagtgtcatcgaggactgtgacaacgtggtgaccggcggagaccccttctatgaccgcttcccctggttccggctggtgggcaggtgggcgcctcctcccttccttggcagagagagagattgagagagagagatggcagtgggggtaggagtgggccctggcctgatacaaggagcggccctgacaagtgcttttccagccccatattcccagccctgtcctccctggcctgaggttcctcccagccattcctctccacacaccacagggcctgttatttcaggggacgtgggatggggtcttggcactgccacccaaacccactgcagggctgtagccgccagaacccatgggtccatgtgtatgaatatgtgaggctcccaagcaaactttccaggtcacctgttggtcctgagggtgggaacatggaggcagggctgtgtcacctgagccttacaaatggctgcctccttccccggtctccagtctggggtctgcacccagcccccttcaccccatgggaccgtggtattctgaggcctcaacgtggccaaactctcgaggtcctcatatggcctcagccactcccagccgagacccctgttctcagtcccacctgcaggtgtcctccggaaccttccggaaccttcctgctggccatacatgtgatttctttccaagcctgggggcacagttttggttctctcatcttttaaagcagcattctcgatggtctgtgtgtttggttttggttttaaacagaagccccccagccccggccccggcccctgttcgtccctgcgagtcgctggtgttaacttctctctgtcttgtcgcactaacctcagttcagccatctctggctgcaacagctaccctcttctcaacacatgcatgagcgagcgcatggctgctctcaccccctcccccaccttctcgagccccgactccgacgccaccgagcctgccgaggagcagagcgtgggggaggaggaggaggaggaggaggaggaggaggatgaggaggaggaggacctggaggacgacgtctttccggagcacgcgctgtgcgac

SEQ ID NO: 3384 - DNA, 1186 bp, Homo sapiens
gtgggccttggagccctgaggcgccctggcacgtccaccggcctgaggcccagccaggagcttcaggggacaaggtggcacttgtgtttccagaggcaggcgaggtgcaggggtgagcaggcgggcgggatgctgggggtgctgggcagactgaccctgtcttcctgtcttctgcctgcagctagctgacgtggtggacagtgaggcgctgcaggtatacatgaaacccccagcacacgaagaggccaaggcaccttccagaggctttgtggtgcgggacgcaccctggaccgccagcagcagtgagaaggtcagatgcgggcttctgccctcctgggtcccagggagggtgggcgggcaggcgggcttggtgtcctgagggtggcaactgcgtcggaagctgcttgcgagttggggagcatcccctcctgaagccgtgtcctctctctgcacaggctcctgacatgagcagctctgaggaatttcccagctttggggctcaggtggctcccaagaccctcccttggggccccaaacgataatgatcaaaaagaacagaaccctctccagcctgctgacccaaacccaaccacacaatggtttgtctcaatctgacccagcggctggaccctccgtaaattgttgacgctcttcccccttcccgaggtcccgcagggagcctagcgcctggctgtgtgtgcggccgctcctccaggcctggccgtgcccgctcaggacctgctccactgtttaacactaaaccaaggtcatgagcattcgtgctaagataacagactccagctcctggtccacccggcatgtcagtcagcactctggccttcatcacgagagctccgcagccgtggctaggattccacttcctgtgtcatgacctcaggaaataaacgtccttgactttataaaagccaaacgtttgccctcttcctttcccacctccctcctgccagtttcccttggtccagacagtcctgtttgtggagtgcaatcagcctcctccagctgccagagcgcctcagcacaggtgtcagggtgcaaggaagacctggcaatggacagcaggaggcaggttcctggagctggggggtgacctgagaggcagagggtgacgggttctcaggcagtcctgattttacctgccgtggggtctgaaagcaccaagggtccc

SEQ ID NO: 3385 - DNA, 1179 bp, Homo sapiens
agagaaatgtccacctgaccccaagaggcccaggtgacaggtgaatgagagcccttgggagcctcagagaggcccgggtgacaggtgaatgagctacacctggaggcgccactgatcaaggacccagctggagctcctgctcattttctggaaggagacgcaggagaaaatgctccaggccccagatgatacatagtgccagagacctcacccatctggcaagtaccgagacacagcccaaacctcaagccagaattaggtcctgagagacttgccactctcaacttggccctcgaacccccatctaggcacatctggttactgctcccaagtcacaggaaaggtcaacaagcacctctgcccccgacacgctccaaccgaggctctcacctggttcccatcgtccttatcaggaaactggatgttcacgtcatgctccaaccggatttgggtaattactgccccctttctcccgataatcttgggatggtatttggggtctacagtgacactcagcttaaaactccttaaagcctacaaatgaaaggagcaagaatgaggcaaagattgagctgatccaccctgtgactccattccccttccaccctggtcataggacactggagatgctgcagtgttctgtaacccgtggtccggaatggtccgccatctctctggtccgacctctgccaccttccattatctgctaataatgagaaccagggaacttggctgctccacaaggaggtctataaatccttcaaaagagggcttgggaccacttgcgaggatcgtgctcaggaactgacagagctaggcagtgagtcacgagcttggggccccgctctcctcatttgtcaaacagggatctgatggatacgcacagaaatgctctggatctttttaggactggggcagatgcagaccaagaagagggggcagccacagcccctgaacacccatggccaaaggctacaggtatgacctggctgcaggagacaacccagagtccacgcaggggtacactgacaccatgtgaggttcacgagctccaccccattcaccagactcgacgtgctcacgggaggagtggaaagccaacccccttagcaaaccagcaccccagcacagtctgctccaagttccagaacccctgctcctgtctgcagcactctgctc

SEQ ID NO: 3386 - DNA, 1187 bp, Homo sapiens
gaagtgtttcctctaagcgggggaaacctaggaaggcttcctgaacgaggggtatttgcgccaagccttgacgtgagtctcgaacagttgcagtgcctccaggccacgcgggagggaggaaaggacaccccgggccggggcacaacccgcgggccggagccgcccgcgcccatcccgctcaggccgcagccaggcacggcaccctcccgtccccgagccacgtcgctgctcgtgggctcgcggagcactccccaggtctcacctcgggccccacaccagaaggagaaagctaggggccgcgccagctccgccctcccccgcggggcggcgggccccagcccgggcacaggaaggccacgtccccggggagggacgcccgactcgatggtctgcgcagggcccgtcggccccacgtgacgtgcgcgcagccaatcccagagaggccccccgatcatcgagacggcggcggtggtgggctagacgagtttcgcgcggccgctcgccgtcccccgcccagtcgtactcggcgccccagctcggtgctgccgccatcttcttggaggacaggaggagaggcgaaggctccccctccccgtgatcgctccgcactcccgccaccacctgccctcccgcgaccgcctctctcctcctcagtgggcacttgtctccttctaacaaacggccttccccccactccagttacccaccgcaaggcgaagattctcattacctgttccactcttataagcataagaaaaccgagctcataaggtaggaactgtggcgaaacagggacaagccgccatcttggtaaaggagaagaggctacgcttgacctccccccccacccccagcctctatatggccaactgccgtgggaggagcacggcgcttgcgcagaggcggacaacgcggacgactctgggcttgcgcactcggaagccggccgcatgggggaggggaagaaggccaggtcgcactgagccaggaagcagttggcaaaggggcggggtgacgcggtgacgcaatccgcctgcgcgctgggcggggcggggcgggctggggcgggctgtgagcggaccgcgagcgctgggcgggtccgcggcgcggtcggtcggcgcctgttctcgggctgtttggcgggtgagtgtctcgccggtgtaccccgcacaagttgtgggccggcc

SEQ ID NO: 3387 - DNA, 1855 bp, Homo sapiens
gccctatctacaagaacctcttgcctcctgccagcctctactagcttcttgccttcaccagcctttcttctagtcagacacttactggtagctgttatctgccctccccatgatcctgttcactcaggcttcctgtcatccacctgcaattgctctctcatgggcttggccaacagttcagttctcagatgtgggccccacctgtggggtttgtgtgattggcaattctacttctgaaacttcccttccttggctgctgaaccactgtgtttgcttttctatctgctgttttttaccaccttccttcctgatccctgaaggtcagtattccttagtattattttgatcacattatttctgtggcttctgatttgcccttccaggtatcttatttcttgttgtgaaccacatttacccacaggagtcctcttttgaccactgatggactcctgtccttccagctcccctgtctctttaaatggtcccacaattcttgaaatcatccagactgagaaatgtgtaaattattttttactcatcacttctgactcctctgctcacttttaaatagcttactaactgtttccgaactcttctctcctccaaagtgtaagctccatctttatgaggccagcataggacaaaagatgaggttagcatggatggatagtagaccaggaaaggggccgtaagatgaggacaggtgagcaagttcatgcttcttattgctcagtttctcccagagataagatggttcctcccatttaggaataaggatttatgaaaagactgaaggtcgagttacagagtaaaggatgtagagaggagggccttttctggagttctgaattagtgcagacattgtactaagaccaaatctctgaccattcaaggccctttttaggtcacattaaggctttccattcttaaaaaccagaaagcaaatccagtgcacagtttgaggtcgggatattttctgctcacgttgctcttgttctctcttccctgaatggctcaggtactgaggtgagaccaaacaaaactgtggcctgcctggtgcctgtgagaatgcccaccatgcaatgagcatttgagtgctagggttttaattgattgactgatgaatgcattcgtatttcaacttcagcccagttctttctcccctcaagccccatcccccacactactgcctgcttgataggtccgattgtgggatttcactgctgactgctggctgcctgttgaatgaaatacagatccccaggtcgctagcctggtgttgatggaactctccactttgtaattccaatttttgtttccttatccaactggatgtcttagattccaaccttttgaatttcttattctcaaaatgcaccccatgtgtcctctctgtgcctttgacgaggttttgtttttttttctttctttcttcctttttttccatctggggtacttctcccttctctctgcttttaagactcctgcctgttctccagggtcttctcatgcctgtagcttctctgtggcaattacccttcttgaggctgattgtggtgtgatttccattttagctgttgtgctggggctatcgttagtcttcctgctgctttgtacattgagggtagtggtgcattattgctaatgttatttttattctgtacagaggatcctcaaaattcaagtataaatacctttctagcagttttgtaaattttttttttttttttttttttttgagacggagtcttgctccgtcacccaggctgaagtgcagtggtctcagctcactgcaagctccgcctcccgggttcacgccattctcctgcctcagcctccccagcagctgggacta

SEQ ID NO: 3388 - DNA, 1189 bp, Homo sapiens
tcagcgatgcagctcatttgaagcaggaagcagtgacaggtgtttgcttattttctctgagcttcattttcaacctttatggaatgaaaattttacttttagatcgataaaattttatttctgtatactttctagttttgcagcatttccagtttccaggagcctcatgaatggctttttggtttagttaactttgtggtcatgtaagccctgccttttgctcagtttatgacctttgttaaggagaaaagtagaactgttaataattaacgcagcagacattgcctcactcccacttaagtgtgttttgttttcttttttctagaaaacactttcctggataaaaaagaaaacattccagatgcatgatccagctgtgtgttttcaatccttgggagggtgccatccacattttaacagtacctgtgcctgagaatttaatttttaaaagactttgatgtgtttttgtatgaagtacttttaacgtatgtatttcattgctgtgtcacactctgtgttttgtgaggtgaatgtcttccttttctttctccctaaccactaatgttagaattgatttccaagaatcggcatgtatacttaatactgaatttctttgatttaactgacttaacaactgactaaccattgatgagcactcctgatttttatctagaacattcagatttaccataatgttccttagtggtagaggtgtgtgcctagtgatgtagaaagatacactgacttggtgcaaggccatctgcttaccacatcacaccacttggagatctttgcttccttgcttttatgtttgtacacaacacctaaaaccagttttgctgctataattctatactgttgattcgtctgcgattttatctgttaaccaaataaaacataatagaatttcctaatgagatatatctttatacttaaacagcttttttagaggtgagttttaaagaagtctcttaattctgatgctaggttgtttttaaaaccactatgcaaagaactcaccacaagccaccttttgtagtgttctccactaatactggttatcctgtgctacagagaaaatcaaagcagtcataagctccagttttcgtattgcaaataagactcttacctacaaaatgagattcagtgaactaatttggtttttactcaaccaaattaaaaatttttt

SEQ ID NO: 3389 - DNA, 1110 bp, Homo sapiens
aaggaaaattagcagttggtctattcagaatcaaacctttttatattttatactgcactttagtgtattttctgtcactgtaggtatagaagatctgcctcccctgtggaaattggggtctgttggtgggcgtgcccctgaagcctggcttgggttgaaaagtgttcccgccctaaggccttggtgccctgaacctctgatgcctaccgggttctcctgatttgagtttcctttaaatactccctttttgagtaattttctgatgggaggaaagtagcagtcatcatctttttgtgtgcaggctgtctcatttatttttagccattgtcgtttcattcattttgtgtaatataaaccgtgtgtcatgtcaaagtgaaagacatttcaaatctgtagcataggctagtgggcaggtccgcacagtcgaagccacacctggtctgttttctgtgcactgtagccttagtgtcacctttcttcttgtgtctccttatggtacactccagcggttgccttttttatcatttctactgaagttgggaaattcaaccccagaaattgacagatgaaaggagacaatggttgtgtagggagatggagaaaatgcttaatctgaggatgagacagggttttttcatttttgtgggggctagaaaaaacataaaatgaggcagttaaataataatagttaatgaaggtgtgctacagaaaataatctggtgttcttgctaactttgcccttcactgttgcttaattgtgaacagccaaaagctatatgttatggcttattgtgtgaaggtaactaagaagtggtgttccatgacttcagagtacatccatgcggagtccattatttgagtttgacatttaataactttgctggaaaatctgtaaaaaagaaaaacaagtttgctagtgactaagccccgcatatgtgagtgaaagtacttcaggcacgctgcctcctggtaacagctatgcagggagggaggacccacactgctacacttctgatcccctttggttttactacccaaatctaaatagatacttttgataatagataactgctcttttactaagacatagtctctacctatagaaatgta

SEQ ID NO: 3390 - DNA, 1132 bp, Homo sapiens
cccggcctcagtggccacatggctgtcctcagctggcctctgcccctccacctggtggctcccgggagctactctgacacgctggtggcaaaacgtcagagctgcccctgtgctgactcgagtccttagcaaagagacagggcaggacagatgctgggccctccaccgcccaacggacttagggtccaaccgccatgccgccggcagatgcgccaagtcctggtccacacacagggaccccttcccggcgcccctgggcagcagctctgggggtggggtctgggccagtcattgctgctcctgagaccctgtgcattggggacaccttcagacccacgtggtgcggtggcttgtcagggctgccaccgcagactgcacacccaagaggccgtcaggagcctgggcacagaggtgcacgcacgcagcagtgggctcttctctctgcaggttttcacacaacagaaaccacctgacatccacccgctgaagcgcactgctgttcagataggggacggaaggtcgtttgtttttgttctgagctccataagaactgtgctgacttggaaggtgccctgtgctatgtcgtgcctgcagggacacgtcggatcccgtgggcctcacatgccaggtcaccaggtcaccgtctccttccacccctgcagtgtgctgttgtgcacgtcagggacgctgttctctatgcccactgccctcctccctctcctggcccagcagtattgctcacgggggctccagccgccggcgtggccctcatgagctacgcctgggtcttctgcagactcatgcagccctatggccgctcagaccaaggcgcagagcaactatcagggcagctctgcctcctcctcccatgaggtggggagaggcaacagggcagcccccagaggagtgtcctggccgctgtcctcccggggcccatgatggccatagatttgccttgtggtgttggatcaggtactgtgtctgctcataagtacttgtgtcatccagaatgttttgttttttaagaaaattgaattacttgtttcctgaaatattctgaggttaatatgttagttttcatagaacattgagaggcccctgccactttcaataaagacctgacttggagaca

SEQ ID NO: 3391 - DNA, 1345 bp, Homo sapiens
tcgcgcgggaggtggcgggtctagctcaccaactcccagttcggtgtcttgagctgccagaagcttgggcagccctggaggatgctgagactccgcatgcttgttccttcagccacttacatcttcttgttgtgatgtgtgttccgtattttaagcaatctcaccaggattattattttatggccactttctctgccctccactctcttgtgtccgatcttctgtctgggattatgttgcaaacatatcctcgttcatttcctgcagtaaaggtctcctggtgaccacttcttcacttctggcgtgtctgaaaatacctttatttcatcctcattcttgaaggctcttttccacaggcgcatggcttcaggctgttgtttgttttcttttatcccggtggaaacgctgacccgctgtcctctggcctcctcgctgttgggaactttgctgtcggtagctgctgctgtgaagggattctgcctctctcctggccccccttgggccacttaaagatcattctttctgatcttctaaagttttcagtgtgtggtgtgtgtgtgtacgttctttttcatctccttggaattactgaatttcttaaacctgtggcttggtatcttttaccagttctagaaattcttagccattattgcttcagatattgtctgtgttttcctctccttttgggactgtgattcaggatagaatgtctcagtccgtcttctgtgtctcttaatctcccctccatattgtcatcatcgtgtctctctgtgctgcattctgtgtgatttcttctcatctgtcttccagttcacgaatgccctcttctgctgtgttttatttgctgctgaacccctccatgagtggttccctccgtccattgagttttacattttgattatgaaagtttttatttctaaaagttttgttatttttgtcaaatctgcaatgttactttttatagttttctattctaggtattctcaagctcaccatttgtgtctttaaacatagtttgacgtctataatcccagcactttgggaggccaaggcgggtgggtcatttgaggtcaggagtttgagaccagtctggccaacatgatgaaaccctgtctctactaaaagtacaaaaattaggctgggcacagtagttcacacctgtaatcccagcactttgggaggctgaggcaggtggatcacgaggtcaggagtttgagaccagcctggtcaacaaggtgaaaccccatctctactaaaaatacaaaaattagccgggcatggtggtggacgcctgtaatcccagctacttgggaggctgaggcaggagaattgcttcagaccataa

SEQ ID NO: 3392 - DNA, 1133 bp, Homo sapiens
cgaaggctttttgccacagcgtgggtgggccttacgcaatcagttgaaggctttttgccacagcgtgggtgggccttacccagtcaaaggcctttgccacagcgtgggtgggccttacccaatcagtcaaaggcctttgacacagcgtgggtgggccttgcccaatcagtcgaagtccttcgccacagtgtgggtgggccttacccaatcagtcgaagtcctttgccacagtgtgggtgggccttacccaatcagtcgaaggacttcgacacagcgtgggtgggccttacccaatcagtcgaaggccacaagagcagaaatctaagatctcttaaggaagagaggattctgacccagatggagactcaagctgcagcaccagctcctgctgggatctccagcctgctgacctggacttcagattttagacttagctccctcagtcacatgagtcagttcattaaaatcagtgtctgtcatctccctgtgtctcagtgtgtctctccatctttctctctctgtttgtttctctaaatatgtataatctcactcttgctcgcactgtctgtacacacacatcctgctggttctgcctctctgggagccctgatggctgcacagtgcgaggacttcagggccccgtcactttggctgtcgtttaccccccagtttatggtggcccctgtatttgcgggctccacatctgcagattcaaccataaaaataacaatacaacaataaaaaataaacaaaagacgatgtagtataacagtgacagacacagcatttccgtcgtaccaggaatcgtaagtaatctagaggtgatttaaagtatacaggaggggccgggcacagtggctcacgtctgtaatcccagcaatacgggaggccaaagcgggtggatcaccggaggtcaggagttcaataccagcctggccaacatggtgacaccccatctctactaaaaatacaaaaattagccaggcatggtggcgtgtgcctgtaatcccagctgcttgggaggctgaggcaggagaattgcttgaatctgggaggcggaggttgcagtgaggcgaggttgtgccacttcactccagcctgggcaaaagagcgaaactccgtctcaagaaaga

SEQ ID NO: 3393 - DNA, 1319 bp, Homo sapiens
tcctgggaaatcctttgatccgggagccctaggtttcctctccagccaacggggcgtcgctgccttaatgggaggagcactcggaagggttggtttgggcctgaaactctcccaagtggcatagccccttttccggtatggggtctcctacacccacgcgcaccacctctccggtcgcgtggctgcctctacagcctacctatacgtccctttttccccccaactgggaattgagaggtaaggtctttctctggaaatccagcagtagaggaagggaccacccaagaaaactaaaaaccaaggcaccttaccagtctgtctggggacaggatccctgctgcaccttccccaccccctcctgggaagtgccccctcacctcagggcacccgcaacctgggctcctccctgagcgcaccggcccttcctgtcacccaggtccaccctcagtactcaagctgcagtatacagcgggaaaaactgaggcactttggtgctaggggtttgggactgaggcgtggagagcagatgtgatggcaggaagactctcgcttttaaacatctggtttgggagagaccatcgacttggccagtgagactgagaatggattccgagtagtgatgggccgtttgcacctcggtttttccacgtgagaaatggggagaacgctgctgttaggaggaagttgtgtccagttcagggtgccctcgggagccctgtccctgttgctgtggcccctctcacgccgccatctctctgccccgccccgcccctccggcctccccacaccccccttgccctcactacctgtatctcaccggcgtgtgttcaccctcccgggtggctcacacactctcattcacacacacaaatctcaggaacaaacggtcccagagtcctccggacccctgcccagggtctctgcaggtctctgccccacgcgttcccgtcgctgacaaagccaccagctgcctcctttaagcttggtgctccggctctgggcctttcttgcgctctattttttttttttttttttttaagaaaaacaacaacaacaaaaaaagacaatgaaaaaaaaaacgtcatgtgagtgaagagatgtcactgtctgtggtcttggagaactagtctcgtagctgaggggtggggtccctctgtctggggcactggcacccacagcaggactccgccagtctgatgccaggactgaataaagtgtatttgccccgaccttgccctgtggttctgcatgtctgtgctcttcctcaaccctccctaaacagtttgccagattcaagtccgtgtgatttgggcccgagc

SEQ ID NO: 3394 - DNA, 1194 bp, Homo sapiens
cttcaccccttggacctctggcaggctcaccagtgattgctgctgccaacccccttgggatgcctgttccagctgccgctggcgctcagcagtaacggccctatctgtctcctgatgcctgagcagaggtgggggagtccaccctctccttgatgcagcttgcgcctggcggggaggggtgaaacacttcagaagcaccgtgtctgaaccgttgcttgtggatttatagtagttcagtcataaaaaaaaaattataataggctgattttcttttttctttttttttttaactcgaacttttcataactcaggggattccctgaaaaattacctgcaggtggaatatttcatggacaaatttttttttctcccctcccaaatttagttcctcatcacaaaagaacaaagataaaccagcctcaatcccggctgctgcatttaggtggagacttcttcccattcccaccattgttcctccaccgtcccacactttagggggttggtatctcgtgctcttctccagagattacaaaaatgtagcttctcaggggaggcaggaagaaaggaaggaaggaaagaaggaagggaggacccaatctataggagcagtggactgcttgctggtcgcttacatcactttactccataagcgcttcagtggggttatcctagtggctcttgtggaagtgtgtcttagttacatcaagatgttgaaaatctacccaaaatgcagacagatactaaaaacttctgttcagtaagaatcatgtcttactgatctaaccctaaatccaactcatttatacttttatttttagttcagtttaaaatgttgataccttccctcccaggctccttaccttggtcttttccctgttcatctcccaacatgctgtgctccatagctggtaggagagggaaggcaaaatctttcttagttttctttgtcttggccattttgaattcatttagttactgggcataacttactgctttttacaaaagaaacaaacattgtctgtacaggtttcatgctagagctaatgggagatgtggccacactgacttccattttaagctttctaccttcttttcctccgaccgtccccttccctcacatgccatccagtgagaagacctgctcctcagtcttgtaaatgtatcttgagaggtaggagcagagccactatctcc

SEQ ID NO: 3395 - DNA, 1171 bp, Homo sapiens
actggccagggtcttgcatgcactattttatgaaatcctcacaacaaccttatgagggaggcattttattcattaccattttatagataagatgaagaccgaatctggagaggtcacatcacttgcccaagcccaagtggtgaagctgggatttgagcctgatattcacactacctacattccctccagtataataggaactcatcgctaactttgagcacttagtgttctgagtacttcgtataggttatctcaatcctactccagctttgcgaactagagggtagtagtagtattattttataggtggggaaactgaagccagacaggattagtgaattgcccacagccataccccacccggtggtagagtgggatctgggcttggatcacactgttctgtcatcgtcttattccctgtcttcccctctgtctggcagacacccccaagtgggaattgtgcctgactcaccttcatgtgcttagggactggtatgatgtcctccacaacagggagaggttgctacattcaactgactttcttttttctcttccagctgccaaggggccaagggatgagctggggccctccttcccaatggcatctccccctggtctggaactgaagacactgagcaatggtccccaagccccaaggagatcagctcccctgggcccagtggccccaaccagggagggtgtggagaatgcctgcttctcctcagaggagcatgagacccatttccagaaccctgggaacacgagactgggcagctcacccagtccccctgggggtgtctcctcactgccccgatcccagcgggatgatctgtcccttcattcagaggaggggccagccctggagcccgtgagccgcccggtggattatggctttgtttccgccctcgttttcctggtgagtgggattcttctggtggtgacagcatacgccatcccccgtgaggctcgagtcaatccggacacagtgacagcgcgggagatggaacgactggagatgtactacgcccgcctaggctcccacctggacaggtgcatcatcgcaggcctcgggctgctcacggtgggcggcatgctcttgtcggtgctgctcatggtctccctgtgcaagggcgagctgtaccgccggaggaccttcgtccccggcaagggc

SEQ ID NO: 3396 - DNA, 1614 bp, Homo sapiens
tttattctcagtctggactgcacatgagagtcacctgggaaatttttaagactttcctgatgcccaggtcaaaccctaaaccagttaatcataatcatgggagtggaacccaggcattaagagttttttaaagcccccaggtgatgcctatatgtagcacagtttgagacccaatgatagtggggaactgtattgtcagcagcatgggtggctagccctcctgctgtcctcagcaaggcaaacttaaccttagattaaacaaaacacacagatcaatttaaggagaaagtttgtttcacctgggacccagcccaagtctttctggctgtctccagctggaacagaagtggcttggtctcagactgctcagctgttggggaagggatttggcgtggcagatggcatcgtggctgtcgccactgcacacaaagaacactgagttgctggaaactcacagattttctgtccccaacagatctgccatggagggatctggtgcctccagacatgtgcacatgaatccatatggagcttttcctgatgttccactccactttgtatagacatctgccctgactgaatgtgttctgtcactcagctttgcttccgacacctctgtttcctcttcccctttctcctcgtatgtgtgtttacctaaactatatgccataaacctcaagttattcattttattttgttttcattttggggtgaagattcagtttcagtcttttggatataggtttccaattaagtacatggtcaagtattaacagcacaagtggtaggttaacattagaataggaattggtgttggggggggggtttgcaagaatattttattttaattttttggatgaaatttttatctattatatattaaacattcttgctgctgcgctgcaaagccatagcagatttgaggcgctgttgaggactgaattactctccaagttgagagatgtctttgggttaaattaaaagccctacctaaaactgaggtggggatggggagagcctttgcctccaccattcccacccaccctccccttaaaccctctgcctttgaaagtagatcatgttcactgcaatgctggacactacaggtatctgtccctgggccagcagggacctctgaagccttctttgtggccttttttttttttcatcctgtggtttttctaatggactttcaggaattttgtaatctcataactttccaagctccaccacttcctaaatcttaagaactttaattgacagtttcaattgaaggtgctgtttgtagacttaacacccagtgaaagcccagccatcatgacaaatccttgaatgttctcttaagaaaatgatgctggtcatcgcagcttcagcatctcctgttttttgatgcttggctccctctgctgatctcagtttcctggcttttcctccctcagccccttctcacccctttgctgtcctgtgtagtgatttggtgagaaatcgttgctgcacccttcccccagcaccatttatgagtctcaagttttattattgcaataaaagtgctttatgccggcttttctcagctctgtgtcatggtggttattttcaggtgcctcccctgccatt

SEQ ID NO: 3397 - DNA, 1280 bp, Homo sapiens
gggtggctcttctctccccacccctccttggctctccagcacttcctgggcagccacggccccctccccccacattgccacatacctggaggctgacgttgccaaaccagccagggaaccaacctgggaagtggccagaactgcctggggtccaagaactcttgtgcctccgtccatcaccatgtgggttttgaagaccctcgactgcctccccgatgctccgaagcctgatcttccagggtggggaggagaaaatcccacctcccctgacctccaccacctccaccaccaccaccaccaccaccaccaccactaccaccaccacccaactggggctagagtggggaagatttcccctttagatcaaactgccccttccatggaaaagctggaaaaaaactctggaacccatatccaggcttggtgaggttgctgccaacagtcctggcctcccccatccctaggctaaagagccatgagtcctggaggaggagaggacccctcccaaaggactggagacaaaaccctctgcttccttgggtccctccaagactccctggggcccaactgtgttgctccacccggacccatctctcccttctagacctgagcttgcccctccagctagcactaagcaacatctcgctgtggacgcctgtaaattactgagaaatgtgaaacgtgcaatcttgaaactgaggtgttagaaaacttgatctgtggtgttttgttttgttttttttcttaaaacaacagcaacgtgatcttggctgtctgtcatgtgttgaagtccatggttgggtcttgtgaagtctgaggtttaacagtttgttgtcctggagggattttcttacagcgaagacttgagttcctccaagtcccagaaccccaagaatgggcaagaaggatcaggtcagccactccctggagacacagccttctggctgggactgacttggccatgttctcagctgagccacgcggctggtagtgcagccttctgtgaccccgctgtggtaagtccagcctgcccagggctgctgagggctgcctcttgacagtgcagtcttatcgagacccaatgcctcagtctgctcatccgtaaagtggggatagtgaagatgacacccctccccaccacctctcataagcactttaggaacacacagagggtagggatagtggccctggccgtctatcctacccctttagtgaccgcccccatcccggctttctgagctgatccttgaagaagaaatcttccatttctgctctcaaac

SEQ ID NO: 3398 - DNA, 1181 bp, Homo sapiens
gtgaaaaggataagttgccattgtaaattatgttgatgctattaaagagatgtacgaattagccaactgtatttaaggaaaatatttccatgacagcatttgaaatcatgagtcatatttgaaaatgcagttgccttctctcacttggattggacatgcttacattcaggtctagaagatgggagttgggcattcaagcttgatctttcccgacatgtggttttggatgggaagtctggtgctgagagttgtagcattaagggatttggtgtctgttatttcccactgtccttccccaagttggggaggagagtgggaagctgcattgtactgtactcttctaactctttcttcttatgtcctcttaggtgatgaccccacaaggaagaggtactgttgcagccgctgcagctgctgccacagccagtattgccggggctccaacccagtacccacctggccgtgggggtcctcccccacctatgggccgaggagcaccccctccaggtgaggagcccataaggagaccagtgctaattgatagaagatgccttagctggattaatgatgagatataaccttgactgaagctgatgatgagtttgtataattaagcaggattactctgagatccagcgtggctgactgatgagactaggtggacaagagccattgggagccctgggtgttaggctcaaatgtcagttttctgggagctgctgagagggtggaatggtccatctatctcagaacttggtggaaagctttgtagtttttttgctaccttttcaagatagacacttgagctatattcttggggcttttctcttgcaggcatgatgggcccacctcctggtatgagacctcctatgggtcccccaatggggatcccccctggaagagggactccaatgggcatgccccctccgggaatgcggcctcctccccctgggatgcgaggtaagtgcctgcagtggtgactttggcttctttccctagagcctagtgggataggaaatggagggaagattgcatttagatcatatcccatgggctttcaagccttaaatctagggaaatccagaaaggaaagagaagagggaacatttcttaaattgggcttacctcccctcttagaaaagttagagcagccatgcacccagggtgtttctcaatatcta

SEQ ID NO: 3399 - DNA, 1181 bp, Homo sapiens; identical to SEQ ID NO: 3398

SEQ ID NO: 3400 - DNA, 1161 bp, Homo sapiens
acactaacaaattcttgatatgtggatttcatttttcaccttgaagctgatctccttcctgataacaagcttcttgttgattagatttttagtttcagccctattctagctcttcctttactcagtgtttttaatgagatttgaatgttccatagcacttgagtcacatatctataatctgcacactggtagatggctctagtatgtatgcattggattattttggggacaccctatactctcatccctgcaactgacacgacaaggagaaaggcaattataatatgagaaagaccgatttcaagggaagagagaatagcagattactgggtagaggtcagggctaaaacagggtggcatgggagaattcctaggaaaaggctgtgggtgggagactgagctaagaatctgttgagaaagttggacacatggacaagaacgccatgggaagttttggggagggccagaggtgcttgggtccaaaagagcagagtctcatccctgtccatttctccttgcagacggtgggcaagagcagcaagatgctgcagcatattgattacaggatgaggtgcatcctgcaggacggccggatcttcattggcaccttcaaggcttttgacaagcacatgaatttgatcctctgtgactgtgatgagttcagaaagatcaagtgaggagtggactgtggggggcggagactggaggatgggaatggattgagtgggtgggccaagcaatagaggtggtgatgtagctagttggttcttctctgtttattctccagttttagagggcagacttaaatggggacattgaacgctaagaaatctttttgagtccagcaaaccttgctctctagtctagcaaagtacaagttgtgaagggctgctaggctttttgtttctctcactttgcgtgcccctgggtactggggtaaagggctctcatgttctccccacaggtgtgtgaggggggagagcttgagtttctggcctcattgcctatttgtaaagctgtagcctaaagggctctcccaatgcagcctggtctgaaactgctttaagaagcctctgaccctcttcagggtaagtgctcagctccccatgtgggtttggggccagtgatttttgttggcatttatacaaacaattggagata

SEQ ID NO: 3401 - DNA, 1227 bp, Homo sapiens
gggtacaactgccagactggaggagtcatagctgagatcctgcgaggtgagaccatcatctgttatattcctgttatcctggacattttgggggaggaggttctggaaacttggttgcttgttgtgatttctgggaaggccttcaggctgggctggtgcccgtgggtgcgggagctagctcagagccccttgttgctcaccgtcttgccctcttcttaggagttcgtctgcacttccacaatctggtgaagggtctgaccgatctgtcagcttgtaaagcacagctggggctgggacacagctattcccgtgccaaagttaagtttaatgtgaaccgggtggacaatatgatcatccagtccattagcctcctggaccagctggataaggacatcaataccttctctatgcgtgtcaggtaaagtgcaggggccacccataatactggagcctttggtctgtagttcagttaattttgagtcttgatgaggactgaccatcctgtgggtagaaccatgtgggctggggctgggtgtaggcctcctggtgcttaccacaggctgtgttcttacactgactgtatagaaagaggaggtagagtaaacctaccccatatacacctcagctcaggccctgtgcctggtctgtattgtgaatgggggaacatagaattgaggaagatttggatctttgtcccatttcctccaggcagagtaggtgtggagaaggcaaggctgtagctctatggtttttgatgaagcagctgggccagggagtgactgtggctctttgcagggagtggtacgggtatcactttccggagctggtgaagatcatcaacgacaatgccacatactgccgtcttgcccagtttattggaaaccgaagggaactgaatgaggacaagctggagaagctggaggagctgacaatggatggggccaaggctaaggctattctggatgcctcacggtcctccatgggtcagtgcagagcctggcaacctgcataaggtatggggctctaaatagctggcctcttgcattcacacttggtttttcctaggcatggacatatctgccattgacttgataaacatcgagagcttctccagtcgtgtggtgtctttatctgaataccgccagagcctacacacttacctgcgctccaagatgagccaagtagcccccagcctgtcagccctaattggggaagcggtgcgtcaca

SEQ ID NO: 3402 - DNA, 1227 bp, Homo sapiens; identical to SEQ ID NO: 3401

SEQ ID NO: 3403 - DNA, 1174 bp, Homo sapiens
tctctcagagccctgaagacaaggggtaacactccaaaatatggactcattttccactccaccttcattggccgagcagctgccaagaacaaaggccgcatctcccgatacctggcaaacaaatgcagtattgcctcacgaatcgattgcttctctggtatgggtgggggggcgttggcaggtgtgagaaggggctgggtggctgggtggggaggcttgcaaccatagcttccacaatgatggcaatatttttcgtcaacagcagttcacctagtgagtgttgagactctgggtctgagtgaagctgagggtagagggaacacagggttggggtagtttctctctttgggctgacaggctttgtcacccacacacatccagaggtgcccacgagtgtattcggggagaagcttcgagaacaagttgaagagcgactgtccttctatgagactggagagataccacgaaagaatctggatgtcatgaaggaagcaatggttcaggtcagttgggctttgctgggtgtggagtggcatagctagctgttggaggtgatgaactgtctgagcctgaccttgtagaatggaggcaaaaaaactgatttaatgagcctgatccaataaagccagaaaggagtcctcagagcaccagaagtcttcaggcccttttagcacttttctttgaccaggcagaggaagcggctgctgagattactaggaagctggagaaacaggagaagaaacgcttaaagaaggaaaagaaacggctggctgcacttgccctcgcgtcttcagaaaacagcagtagtactccagaggagtgtgaggtcagtaggcagcacggccctggcagagatcctaggttgtaggattttcaacagcagaacaaaggatatgctgcatcaagctgtggtcttgagtccaggcttttggactgaaacaaggacctgaaacatctaaaactacctcttgattctataggaaggagataggtgctgaacttgctcaagagcccagagagctggttgtagctcacacccgttccctgggcatgtgtgttctgtcctcggctgcctcccaggagtcctcaacctggggtagtgtaaattcctgctctgcttattatcagacgtgtgtccggaggtggtcgtgtttcacagtggggatgggggcag

SEQ ID NO: 3404 - DNA, 1174 bp, Homo sapiens; identical to SEQ ID NO: 3403

SEQ ID NO: 3405 - DNA, 1174 bp, Homo sapiens; identical to SEQ ID NO: 3403

SEQ ID NO: 3406 - DNA, 1438 bp, Homo sapiens
taccaggacctggggacctccgatagtggacgggcctccagcaagagtgggtcgtcgtcatctatggggcggccaggccacctgggctctggggagggcggaggtggaggcctgcctttcgcggcctgctcaccgccctcccccagtgcactcatccaggagctggaggagcggctgtgggagaaggagcaggaggtggcagctctgcggcgcagcctggagcagagcgaggcggctgtggcccaggtactggaggagcggcagaaggcgtgggagcgggagctggccgagctgcggcagggctgcagcgggaagctacagcaggtggcccgacgtgcccagcgcgcccagcagggcctacagctgcaggtgttgcggctgcagcaggacaagaagcagctgcaggaggaggcggcccggctgatgcggcagcgggaagagctggaggacaaggtggccgcctgccagaaggagcaggccgacttcctgccccggatagaggaaactaagtgggaggtgcgggctggggatctgggcctcccctctgcctcccttctgtccctctgggaaaccccagagcagttgcccctcactatcataacggtgggatggggggggggatgaaaggagcaggggggacaaaaatcaattgggagtgtctgtgaggacccgaggccatccgctgggtgagacatgtccatcttgagtccaggcagggaatcgggtgcgtcgctgctgatgaggggctgagcctgcagccccgggaagcttggtgcccctggctccagatctggtagctgggttggggtgagcagagctctgcctttacctggcttctcctctcacctgttcctgcccaggtgtgccagaaggctggcgagatctccctcctgaagcagcagctgaaggactcgcaggcggatgtgtcgcagaagttgagtgagatcgtgggactgcgctcgcagctgcgggagggccgggcttcgctgcgggagaaggaggagcagctgctcagcctgcgggactccttcagcagcaagcaggccagcctggagctgggcgaaggcgagctgcctgccgcctgcctcaagccggcgctgacccccgtggacccggccgagccacaggatgctctggccacctgcgagagcgacgaggctaagatgcgccgtcaggccggggtggccgctgccgcctccttggtttccgtggacggggaggcggaggctggcggggagagcgggacgcgggccctgcggcgggaggtggggcggctgcaggccgagctggcggctgagcggcgggcccgggagcgccagggtgccagcttcgccgaggagcgccgcgtgtggctggaggagaaggagaaggtgatcgagtaccagaagcagctgcagctgagctacgtggagatgtaccagcgcaaccagcagctgga

SEQ ID NO: 3407 - DNA, 1099 bp, Homo sapiens
ggccgcatgggtggggccgggggccagcatggcactgacttgcaccctgccttgcagaccggcaccacggcacgcccatgctgctggatggtgtcaagtgtgtgggcgccgagctggaatacgactcagagcacagcgactggcacggctttgactgaggcccgaggccccgcctgccccgggcccctcagccttaaaccccgccttgtccccccgacatgctgcgtgatggtgtggcttcctcgcccctctctggggtgggtgtgggggtggagtggccttgcccacgcctctcacctctgccttcatttgtgctgccaccctgcccctccctcgtcctcctctcccacttcctcctctctgtgtgcctcagtctcctgccggaagaaatgggttgagcccgaaaggaggctgtctgaggaagggagagggagggcctggggtgggtcccccactccccaccccaagccacagggactcccaccagggtctgggagaggacggagctggctctgtggcgtcgtggccccattactgctgccttgcttcagccacctctcctgcccctccctagtccccactgctgtccaccatgagtaggagggaggtgcagtccccagcccccacccctcaggtctgtgttacttggtttttaagcgactggttgggatagaaccctaaagaaataaacttccagtggataccggaggccaggtggatttttgttctctggggttggggtaatgcctactcctttgcagatgggccagggaaagacttgggtagactcactcaggaggcaggggcaccgcgtggtattatagcacctagccccacaagaggtatgcacaggtggtggcattttaggccagaagctggctgccaagacaattaatttgaatgaggagagagggacctcatgtgtaggccagagaggtcttaagcagtggagttgtttgggatgcttgatgggagacagcagcacccccttctggtcagttccctatgcacagctgaaagctttctcccttctctctctagcaccgggaacccttgcattcctcccactattagggtctccacgccatatcagcaggct

SEQ ID NO: 3408 - DNA, 1296 bp, Homo sapiens
tgaggaaagctgctaacatggaagatagaaaataaataacaataaaaacaagtcaaaacaagcaagcaaactaataattaaaataaacagaaaaaggcaagttggaggaaaccaagatttatttttaagaataagaggtgataggcagttcggcggtccagtgggtctgtctcttgcttcaacagtgtttggacggaacagatccggggacggtcttccagcctccgaccgccctccaatttcctctccacttgcaacctccgggaccatcttctcggctatctcctgcttctgggacctgccagcaccgtttttgtcgttagctccttcttggcgaccaaccatgagctcccagattcgtcaaaattattccaccgacgtggaggcagccgtcaacagcctggtcaatttgtacctgcaggcctcctacacctacctctctctgggcttctatttcgaccgcgatgatgcggctctggaaggcgtgagccacttcttccgcgaattgaccgaggagaagcgcgagggctacgagcgtctcctgaagatgcaaaaccagcgtggcggccgcgctctcttccaggacatcaagaagccagctgaagatgagtggggtaaaaccccagatgccatgaaagctgccatggccctggagaaaaagctgaaccaggcccttttggatcttcatgccctggattctgcccacatggacccccatctctgtgacttcctggagactcacttcctagatgaggaagtgaagctcatcaagaagatgggtgaccacctgacgaacctccacaggctgggaggcccagaggctgggctgggcgagtatctcttcgaaaggctcactctcaagcacgtctaagagccttatgagcccagcgacttctgaagggccccttgcaaagtaatagggcttctgcctaagcctctccctccagccaataggcagctttcttaactaccctaacaagccttggaccaaatggaaataaggctttctgatgcaaaaaaaaaaaaaaaaaaaaaaaaaaaaagaataagaggtgatattacacccatgaaacaagaataagatgctattttgagacaagaaacaaaaaataagctttaaaataaacacacacacatacacacacatacacacaacagcagaaatgaaaaattcaatggatggcttgagaaaaatgtctagaatatctcacagaaaatagatctgaaagacaaaacaatgaaaaacaggaaagaaaagatgaggaatgtagggggaatagtccaaaaggtttaaca

SEQ ID NO: 3409 - DNA, 1171 bp, Homo sapiens
ggtgggtacccagtgcacgtatgaagattcgctgagctgcacagttgagatatgtgtaattcactgtatgtatctacatagacctcactaacaagatagtcattcctgccctccaatcaatccgtcaaaggctgccacactgactttcttctccatgcatttcagggtctgaccactgaggtttctatcccacttggaaccgcagcgtccttaacatcccttaagtgacatgggtgaacaaaggaggctttttccgaaatacgcttaggctgagaagctgctctttgtgcctcccccgcccattgcacctgcccccgcgatgcctgggcctggacgggaatcctccctccaccaccccccctcccacccacccaccctccagcccctaaaatccctccaagtccccctgagacccaggcccgccaactccgtgcagaatcggttcccaaaagggccggtaggtggcgcccgagacccggagccacatccgggcagcgtccagttcggaggcaagggctcccgctccccttcccagacagcgggtgtcgcgctttcgctggggatgaggccacgccgggagcagggcggctccggccctttcctcctccccgcctctgtcctctgactcccgtccctctcctccctcgccccagagatgctaggtcctgcctccctcccgagaggacacggatcagggctggctccagtcctcccccaccctaccccaggttctccttcctgcaaactaaatttagaggtgaggatgtggccgcctgcacggggcgggcggggagggtcagcggcgatgccgccggatgtctgccagccgggccgggacgctgcgtcaggtcggtaaacacgcggcgtgctccggaggggccgcgccagctgcgacggggacgccgccaccctgggcaccctggactgacgtggcgccgcaacccgcccggcgggtctgccccaggccaccccacacacagtctcctatccactacggaaagggatggctgcagtggctctcacgccttactggtggaaccccttcttaaaaagctgctatgggggtcagggtgtagcaggtattaaactgggggtccccctcaccccaggctccctggagcaccacctctgaaaaccaggggaccagataagctccagcgttgggaagcca

SEQ ID NO: 3410 - DNA, 1172 bp, Homo sapiens
tctcagattcaaacccacatgcttctctctaattctcctctttctctgcatctagagacttctagttaaagaagcacttatcaaacaatctatgatggaagaccagttttgttttatttccaattgtcatgaattaatctttttggcctgtacactgttgaatgaaatgagtctgccaatcatgcacttggatattgtgacaacatcatattgctgtaacagctgctaaatgtttgttctcaatatctgtacttaactcatcatggacagtaacagacagttcatggatcagcaggggtccaggggccacagtgtgtaacctggtatagagtgtcactcgcctcatctgctatttcaagtctgagaaagatggctgggtgcagtggctcatgcctacaatcccagctttgggaggccaaggtgagtggatcgcctgaggccaggagttcgagaccagcctgggcaacatggtgaaaattagcctggcgtggtggcgcatgcctgtagacccagctattaaggaggctgaggcgggagaatcacttgaatccgggaggcagaggttgtggtgagccgagattgcgccactgcactccagcttgggcaatagactgagactccatttcaaaaaaaaaaaaagacagaaagactttagaaactaaaaatttcaagaacttgacttcctttttctacattctgctgtgtcattccttccctaagccagtaggcactgaacacgctagctgctgccaggctggagagaagcagtcatggggtcacagaagacagtagaaattaaattgtatcagttaacacagcaactttcagtcttgctgtagaaatgagaagtatgaaactggtacaaaaagaaaaaggaaagaaacaaagatgagcaactaatcataatttgtgaacacattaattgcaacttacaaaaaccaagaggatttttcttctttattttccggcgtctacattaaggacacagagattttttcaaaaagctgtttgcactaataagagagcttagcagcaggatagatgattacaaataatatcaaaattgagagaacttctactctactagaataacatttaggaacattgtctcattcacaataactataaaacaaaatacttgaagatcaaattaatagaaagttactgaagat

SEQ ID NO: 3411 - DNA, 1198 bp, Homo sapiens
tctagctgtgcgtgttggggtttcacactcaaatacagtcctggggaaagatagggccaactagagctagtaataaacagcaagaaaagtcagtaaataatgaaagagtcattaaagcatactatttagaattggggaggtaaccactagaaaaataaaaattagaaacgattagaagtggttatttttgggaatggagatagggatgggagaaagaaggaaaactttttgttccttttacaattaaatttctctcattgtttacgtatatttctttatcatgaaaaaaggacagatgaccttttagtttgcaacctccacttattcagtagtcattcagtaaacacttgaatatgtactctgtgctaggtactaggtatgacttttttggtattttttatgtttttaacttactccttaatgggttaccagaattttatgggtgattttggtgctggaatttaagaatggcactattttgtgtacttttgaggtactgtcaccttgcttgagttgatccttactttggttcatttctaggttcattgtccccatatcttgtgtgatctgtaatgacatcatggcctatatgtttggctttttctttggtcggaccccactcatcaaggtaaatggattaccctaatgtgaaataccactgtgaggggagggtggtgctctcaatgtgagtagatcagcctggcagacagaagaaatctagctgtgttgtattgtggccatgtcttcatgtcttcctggagaaaggccaaaggaaaacactgacaactgattaaaaaaaaaaaaagataataaagaaaataggctgggcgtggtgggtcatgcctgtaatcctagcactatgggatgctgaggcaggaggattgcttgaggccaggtgttcaaaagcagcctggggaacttagtgaggccttgcctttactaaaacatttaaaaattagccaggcatggtggtagcatgcacctgtagtcccagctccttgggaggctgagatgggaggatctcttgagcccaggaggttgaggcttcaaggagctgtgatagtgccactatactccagcctgggtgatggggcaagatcgtgtcttgaaaaaagaaaggaaaatatttttacagatttatataatcttttttggggacacattttttgggactttgatctggatttgagtgtagtca

SEQ ID NO: 3412 - DNA, 1101 bp, Homo sapiens
ctttaacccaagtcacattttcctcatccttgcattggagttgatcgttaaaagagcatctaactcataggatttagtgaggattaaataggagagttcatctaaagcactgatggtggcaggcagtgggtgggggtggcctaatggctaagaataaaggctgggtatctaagataattgacaagggcctttctttttttttttatggttaatgtaccattctttatgagaatgtgctagcataatgatagagggctgaagcatgtaatctataattaatacaaagtgaactgtcatgggggatggggagggaaatgggcctttctgcagaaatgtaagtgcggtcatggaaacggctatagctccttgattgtaattattcaacctcactagaggtctgcaactagctattaaagtgctagtggtcccgacaagggcctttctaagaacactgtctttgcaactgtaccccttttgaataatataaatatcatggttactcacttggcagagtggacatccctaagaaattcaatcagacattttgaggttggtgagagagggagagttgacggagttggaggaagaagaagtcgtgacaccatgactgagaactctgtctgatgacccagggtcataaaatttatcattataaatgtcaaataaaataaatgataattaatcaataaaaaatgacacatgataaataaataaataaataataaaattaccatctgtgcagggcaggctgaaaatgctgagaaggtaaaactctctaggagaatccttcagccagtgactgatgggagttggtggatactcaactcccttgcctcttgagccagatgactgaaacgtatgctctatactgtcccccagagatgcccagttgaactgggctccagttacccacagtggtaatttgcttaacagcataccttctattgactgctttcccttacctgtatcatttttcctttcttttcccagtgttttgtgagagcatcttccaaataaattacttgtactcacattcttgtctcgtgaccagtttctgggagaatctaaacttaagacagtctgcattgcacaacttatggc

SEQ ID NO: 3413 - DNA, 1199 bp, Homo sapiens
attgcagaacattgtatcacattttagtccagagatagaataaagttgaataaccttgacttacacaaaactgttttggtagttggatttcattatcttagtgaatttagtcattttacaatatgtttgtatttggccatttactgtaatcacatttttatatctgtacaatgacactttttgcagttgtggggtagtgtgtaacactgtccatcttgcatcattgaaactactacaatgatactatcatttaataatattaatattacttgaaatagactaagataaagaaaaggggtctgtatgatgtgcagttttgtgcctttatgtatttgccttgttctttgtcgaatgtgtgaaattccgtactgtggtttttcctataatagaaagtagagctgtgtattaaattagactgtgtctctctgatacctttacactactgagaatagcatggttttggccatgtaaaccaattttcaaagttctaatgacatagccatgtgtttttggttttttatatttcattttaaaatttgagtatcaccatacattaattaatactcctgtagtagataagctgtcattaagtaattcccaaaaaaagggccatttgcttgcattactttgaatttaatgttgcgcttgtgcactgtgttaatattgtttgtgatggattggacgttgtgactcttgccttttaagaagaaaaaaaagataggacaaagtatttgaagctcttaaaatgtacatattttggttcttctatctcaaattatttaaaatgcataattcacatttttgtaataattctatgcaattttgtggcatgatgtttcttccacttgtaattttatgtgctttcatcacaaatccaaaggaaagaataaaaatttcttaacacaacccagcggttatttcttggggtcagagtcaaccttcttttgacagggaaagtggtgggagcgggcataatgccagtctttagggccatcatgcctaccctgacagggcacatccatgcctgtaaaggatattgggatgctgcaatgtgtgtgccagaggacacagttgtccttgctatcattccaccaccctccatccaggagtggaattacacttgccattgtttgcgtaatggagaccctctcttcctttctctcttccttcctttctccctgtcttccttgaccaaagtt

SEQ ID NO: 3414 - DNA, 1179 bp, Homo sapiens
gctggtaacttgatcttggactttgcagcctccagaactgtgagaaataaatttctattatttataacttacccagtctgtgctattttattatagaatcatgaacagactaacacaatcagtggttagttggattttaagtgagttctaagttgctatttctccatctgtcctgttggtacctagtcctaccagttatatggcaaatcaatggtctgtggtcagttttgtttggaaatataccccgagtccctctgctagggatctataatacacagactacttctcccttctcccctccagcacctccaaaatatattaagcatctcacaggtacaggtggtgctaaaccatttttccatctcgaatatatttctataggtctgctatggtcatggctatgtccagatattaattcattctgtatgtttttttttttttttaaatatacacatccttagagcttaggtatgatgctagtaggctattttgctcctctgtcatttttctgccaaacccttctgactttttagctgtgctaccaccagaccactgagtgattaacgtgaatggattttcttgaaatagatcctgagaccttttgcatctaaaagcaggttccctatctctttcagctatataattgtgtatttaaacagtgggactcaacaaggtaattgcagtcttggagttcctagcagagtgagccatcgagccggcagtagggagctgtgtgccatgattgattccatgggggtttgggaaatttgaggtgatatgagccgaactgctctgaagagttgcccacaggtatctctgctgttacaccttgtatagttttgtgatgacttaacctaatataaaagatcacactgtcatttctctttgagaataatcagtgccaagggaggtttcttaggaggtctttggcactttattcttgatgagtttttggcagggccaggttcatgaatgtgtgacctgtggaattgcacagggttctagactcagaaaggtcctgcctgtgttttgtgtttggtttaaagatagctgtcagagtcttgaatttttttttctttttttttttttttgagatagggtcctgctgtgtcacccaggctggagtgcagtggtgtgatcaccgttcactgtagcctcgtcctcccagggtctccatag

SEQ ID NO: 3415 - DNA, 1319 bp, Homo sapiens
ttctattttctttttccccattaaaagaggaccaaacaattctttatacaaatggagtagcaactagttttgtagcactacatttaatgtaatgagatacctttgttcatttttttaaatttgaaatatactttacctgatccactttgattgtatactatattctttgttaattttaattttgtcctgttcctagactgctagaatctggcccctggccatcttaaagtgccaacatatgcctgcagggtttataaaaaatggcctggagtgacacattttattatacctaatattcactgcatcagtatcacatctagctcccttacttgtccacagataatgtaaacaaaggagggaaaaacttattaaattctccttcgctgctggcttgtgctggtttagtgcctgtgtccctggcagtgtccagtgtgttcacttccagttgaagtatccatgtgtttctgggcagcttttctgctcagtgtgatcctgagatggcttccccgccgccacccagagtgtggtccttggccgcctcctgctcctgctctgcaagcctgaaactggcttgtctggagccaggagttagtcctggggtgtgtgtgtgcctgcgcacccatgcgcatgcaagtgtgtttgccagctcaggagctgtctcctctctacctggctagtaagaggtgggacagtaatggtcctcctgctggccccagcaaggcccatgagtgactgccctgacgtattcactgtgcctctgggccacttcttcccctgtagatgtgggcttgttgccttcagccggcttccctgagggaggagaacactggattattggaaatgttttaatcactcttgccattacctacatctattagcatagatgatgaaaagctgttactggtgattatagatgagtatttccaggacaacgttctaaaagtacaattatttcttattggggagattacaggtagtttggcaaagcattgaagtacaaaggtacattttcaattaaaaagcacacttctacaaaagatttggtttttaaattatggttacacatttcagtaactcatagctgctgtgcaaattggtagaccttataagaaggcacttgtttgtaagccagagaagaaactttaattgcatcctatcagattgttgaggtgggtgtgatagtcttcaggtgcagtgcgttcattcactaacgctcactgtcagtgcccatgtttgctagctgcctccatgtgactagtgagctgctggtgaaagtcgtgtgaaatcctgtacactgtgtatagaataatgtaatttta

SEQ ID NO: 3416 - DNA, 1230 bp, Homo sapiens
cattattctccatttttcaattttcttgggtctcccactttcccctcccccatttgccttggccttcccttgattttttaaagtgaacttttgcttgaccttgtgtttgctgtttttcagcatgttccagtcctagcaaaagaaaagttcttagtcttaaatttaaattcgttggtatttcagaaaaggctcttatttatttaccattttctagtataccacagcattagagatatggtcataaatttacatttctaaagtgctctcagccttctgaattttgtgatagacaatttcccggggcacaaaatggagttaacccaggatgtggtgagaaaaacatgggagtggagatgaaaaacaagagcaaaatgaaaacaagaatttcatctgaaatcagctcctatcaacaatgctgtctctccctatgcctgagacaaagggcctttatcagatggcacggtgaataggcagggccttctctcaaaactgccaagtctgtttatgtatctattatttcctttgaaaattgcctgaagtggagccttgtgaagaatttctcaagcattgcctcaaaccattgccaaggttgggttgtaatggaagtgcagaaagaacaaaggacaggcaccagaatgttcttttattgcttgcatgacaaagaggaaagaaaaagagaggaatgggatagaccagtggttctccaagtgtggtagctgaaccaggttcatccacgacactagggaacttaataggactgtagaatctgaggtcccaccccagacctactaaatcagcaactctgaggaccagggtccgtccagcttgtggtttaacaagccagccaggtgattccaatatcagctaaactctgcgatccacaggtacagacattttacctctttaatcttaatttaaaaaacctcatcttctctgcccgagcccaacgcttctgcccgggacatggaggacctagacgtgcaggactgggctgtcagcaccaggtaggagaagggttttgttttgttttgtttttttgcctagaagtatttttctttagtttgatgacaaaaggggaccaggatagtaaggacagaaggaatagcacagacagaaatgaaccttactctttctgtcagcttcacaaagtaaacagagtcatatagaaggaaaagttaccattaggtagtttaatggactagtctatctctaggacaacaatggctttaa

SEQ ID NO: 3417 - DNA, 1198 bp, Homo sapiens
ctggctttgccactccagggagcccagaatacaggtgctaagtagagagggcatcatcagaaattaggaaactcggacttggtccagtttaaggtgtatgggactgtcctgtatccatgcattatgggatatttggcattggcatccttggccaatgcctaccagataccaggatttcctcccagtctgaaaccaatcgagaaaaaaaaacctcattcacacacagataggtatccaaggctaagtggccatgttccacctggtagaaccattgtactagcgtaaaattgctgtgtcttagggtgccagttttactggtggttgttaagtgattcttctgtagacattttctgccagcccttgatttttcccagccttggttaagaaatagtatcgtaaatttgtaattccctgatctgtagaggttaaactttactcacgtttatatgccatgttctaagcaatatatttttatattgataaatgtaaaaggctgcagggatagtatatttcatgaaatgtctggttctttttttcttccttctaggaggtagatgacttctttgagcaagagaagaacttccttattaactattacaataggatcaaagattcttgtgtgaaagctgacaaaatgaccagatctcataaaagtaaatatcatttaccgctagtcagagctttgctgatgagcctggctgtgtttggataaaaagacttgtccttgtttctgcagatgttgccgatgactatatccacaccgcagcctgcttacatagcctggctttagaagagcccacagtcatcaaaaagtaagtttttttggaaaagcatttcccctaacccaattgaagagtgccgagtggtgtaattaaaagcataaatgagtagtgactacatggtcctgctctggagttacaagctcagtaagacaagtctctagcactcatcttacatgttctctggacataagacacttgtaagacaattgtaggggacttgggctcttctatatgtaaacaaatacagtaaatgttgtcaaagcagtagtttctgtcacacttaaaagcctgttttctttagttttggagtttgtaagagtttatcttgcatcttcccctggcaattggtgcttgcaattttgcctggtaatgccctagaccttctttttttttggcctgtgatgcagcctcaggag

SEQ ID NO: 3418 - DNA, 1274 bp, Homo sapiens
tagttcactgcagactcaaaatcctgagctcaagtgatcttcccacctcagcctcccagagtgttaggagtaaaggcataggccaccgagcctaggtgattttttttaaggctttgctgtgttgcccaggcttgtctcaaactcctggccgcgggcgatcctcctgcctcagcctcccaaagtgctgggattacagacaagaacctctctgcctggctgggtttcttttattcatttgttggacctgctttcttggtagcagtggtgtattgattcccagtaggatttatctgccaggagatccttacagatcattagttcagctgttttgctttgtgaattcatttgaaagtattataatttcggtacttagtaattagatggatttcttgacatgcattagatatttaaggcagtaatttaactctggttccatgttgattccattagtacatgggcttgcagccttgtgaaatgatgattcagtttatccattcgctgagtgcgctgcactgaccttcttccaagcctcagttcctgttctaggaacttgaggctatgtagcctgaaaatgccctgcagtctgcagtgttctactgtgaactgcttgtgtgttggcaggctaccggtaagaatggttggtgtcagcagggacggggccctctgagacccatctcacaaagatgagtggtgaaaatctgatcacttgctgcagccctttagttttttattaagccgatgcctgagtagctttaatagctattagctatgttagtagactgagatcttctgttagaagtctttagttctgttttccttgggggactaagaaattatattgcaggcctgaattacaggaaggggagaaccaatggctagggaatgagagccaatacctgtaaaagcagagttgggctgggcgcggtggctcacgcctataatcccaggactttgggaggctgaggcgggcagatcacgaggtcaggagttagagaccagcctgaccaacatggtgaaaccctgtctctactaaaaatacaaaaattagctgggtggggtggtgggcgcctgtaatcccagctactcaggaggctgaggcaggagtatctgggagaattgaaccccgggggtggaggtcgcggtgagctgagactgtgccactgcactccagcctgggcaacagagtgagactccgtctcaaaaaaaaaaaaaaaaaagcagagttaatatattgcttatagttagttgaaccagttgtttctcacacaccagtg

SEQ ID NO: 3419 - DNA, 1208 bp, Homo sapiens
cacagattgtccacatgggtggctgagagagtggcatctttgcttctgatggttcaatgcacacaaacttaattttatgcaaaagttattaaaatattgtataaaattaccttcaggctatatgtataaggtgtgtctgaaacataagtgaattttatgtttaggcttgggtttgatctccaagatatctcatgatgtatatgcaatattccaaaactcaaaaaaatctgaatccaaagcacttctggtcccatgcatttctgataagggatattcaacctgcatcagttttcctgtttgtttcctttgacttctcttccacactgctggtttcatcatatgtctggtcggtcctccctgtctgttatggaaaggattctgtgatttgtgtggatttcctatccttctgtgtaggaaggcctgtttcctggggataggtggaagaagggggtttgtccagggcttacagataagatttcactctagatcgcttcttggccttttggttaagttcaagtgtagaatctgttcttaccagtttaatatgctgatatgtcctttatctgaggacaatatagtaaatggattttttgagcagggagatggaataggagcttgctccatccactccacacatggacctggtattgagtacctccaggaatgttcaaccctcgggggatatttaaaaaaaaagatttcaatctagaggctacaggctgcagatgctgggggtgatcacatgagagagctctgctgcagggaacgatatgtgagaagccttggctttctccagccgctcactcaactttttgttagagaagaattctctggtttgtctgcactttttttctctacctggcaataaatgaggatgtgcactgttccttcacaagggcgtagaaagaggactgagctctcagggggattccatacgtagaattttaattcgatctccccagttttcagcataatttttcactcttgctttccactttatgtgccagtgtcagatacagactttttttttttttttttgagatggggtctcactctgtcgagcaggctggagtgcagtggcacgatcttaggtcactgcaacctctgtctcccaggttcaagcgattctcctgcctcagcctcctgggtggctgggattacaggtgtgtgacaccatgcccaactaatttttatatttttagtagaga

SEQ ID NO: 3420 - DNA, 1188 bp, Homo sapiens
ttttcctggctccgggagtgaataccaagtagcaatagtactacagcgttgctgactttctccctaggtttctttctcctccttactgattttgggttttgtttctgattcgcccacagctggcggatttttccccatgaatggcgacaccaattaggaactcgcgggaaaccccgttgctccctttcccctggctggcagcgcggaagccgcacgatgcctggagttcctgtaaaccacgtgaaccagcgggacttcgtcagagctctggcagcctttctcaaaaagtccgggaagctgaaagtccccgaatgggtggacaccgtcaagctggccaagcacaaagagcttcctccctacgttgagaactggttctacacacgagccggttccacagcgcggcacctgtacctccagggtggcgctggggttggctccatgaccaagatctatggggacgtcagagaaacggcgtcatgcccagccacttcggccgaggcttcaagagtgtcctccgccgggtcctccaagccctggaggggctgaaaatggtggaaaaggaccaagatgggggccgcaaactgacacctcagggacagagagatctgggcagaattgccggacaggtggcagctgccaacaagaagcattggaacaaaccatgctgggttaatacattgcctcattcagaaaaaaaaaaaaaaattaggaactaggttttacattctgaacatttggtgatctctttaagtgaattaatagtttttagagatctattctcttttggataagagatgatgaaaaatctggtttgttagtctttttgtttgtttgcctttttgtctacttatgagttcaaatcagttaagacttccatgcccattgggaaggagaacagctttttgttatctagtccactgaatttttatgtttctgaatttactttcgacctgtggccaaagttgcagaaccaaagctatatgctatgtgtctatgtgtcttcccggctgtaatcaacaaaggccttcccctcttgttgtgggagtaaaaaaatcttactacctttgtaaagttttaataagttatattatttcatgtcttaaaggagctctgttataattcacttatggaaacaaacacatgtaaatcaattatttctaaaattccagaaaataagtaaattaaact

SEQ ID NO: 3421 - DNA, 1141 bp, Homo sapiens
cttggctcccttttctgggcttttcaaggatgtcgagagatttgggattgattattttgcgggagagggaggcaaggagaaaatccagataaaagtgctgtaggagaacagagttgggcagtttcagaaagcaggtcaccatattttgaacacttttctttctttatttttaaaaaatatgttttacttaaatttaatggtggtaaaaaacacaacatgaaatttaccctcttaaccattgttaagtgtacagttctgtaatgttaactagattcgcttagttttgtaacagatctctagaacttctcccccaccccagtttatgaaggtataattgacaaaaatgcatatatttatggtgtacaaaattatgttttgattcatgtatacattataaaattgttaaatctagctaattaacatatctgtcccctcacatacttaatactttttgtggtgacatttaagatctactctcatagcaatttttgagtatacaatatgttattattaactgtagtcaccacgttgtacagtagatcgccagaacttattcatgtcttacccaaaactttgcacccctacccaacaactccacaacccccgacaccagcccctggccacttctgttcactcgtagcttctctgcggccagctgctctagaatccacatctgagtaaggtctgtggcgtttgtctctctatgccggccttatttcacttagcgttaatgtcctctaggcgtatccatgttgttgcaaatgaaaagattttcctcctttttgaggtgtaataatatttcattgtacacagaagtacagtgagtcttttgtgtcagtgggttctacatctgtggatttaactaaccatgaatcaaaaatgtagttaggcatgtgatggttgcctctatactgaacatgtagaggctttttgttttcttgtcattattccctaaacaatatggtataacaactacttacacagcatttaccttgtcttaggtattatacgtaatctagaggtgatttaaagtatacaggaggatatgcataggttataggcaaatactacatcattttatagagggacttgagcatctgtgattttggtatccatgagaggtcctggaaccaccccctat

SEQ ID NO: 3422 - DNA, 1198 bp, Homo sapiens
gtggcacacagggcacattcggccaaagacacacatggacacgggcacacacacacaaacccacagagagagggaaagaaactcacagagattgagagacagagagagaagagagaatgggagacacacacacagacacacagatacacacacacacacacacacacacacacacagacacacacacagagtcatacagcagaggcatgaaaacacacacccccaggcaacccctgaggctgcggggttctgctgtcgaccctctggtgagagagcaccctaggggcacgcattccaacctgtcttcgagatctctgacggcggcacgacttttggggagactcaacccaaccaacaccatcccggcaggcctgaggctgggatgccgtgctgcttccccaggactccgcctggggtttcctcatcctggtcggccctttgcgactcctggcatccggaaaccttcccgtcgaccccgtggagaggtcaggccggagcctcagagccccgacacacaagcactggcacagagggctcctgctttgccgagcctcagagactggtttctaagacaactgtgggaagcactgtgacgggagaagccgctcgcacctcacgcatgcgcattggctgggccgactcgctctccgctcctggcaggcaggctgcgtcctctttaaataatgccaccgctgcgcagcggctggatccgggctccagtttggggcggcgtgggagaggcgaccgcgggtgtcttgtcctgtcccagggccaaacccccaggtgtcctgtccccaggacctccttgagctgacttccaccttgggaggaagggggagcttcaggacgcctgctgtgttctcaggactccccttcagatcccattttggcccactccgagtgagataggatgggctcgccacatctggtgaggcaggcagggcctcgctgcagcacagaatgatcccataggtctcaaggcctagtgtcagctgcaaattcactgatccatcagccctctgcctccctcctcctttgaaagagcagtggcctgcccagcttctaaaagccctggtgctccggaaagcccaccatgctttacaggacacttgcaggcaggaaccagggcaaatccgatgtggagaccatgtgaccacgcgtggcactggcgtatcccacagcagatggtgtgaatgtg

SEQ ID NO: 3423 - DNA, 2412 bp, Homo sapiens
acacatacaatacacacagataacttatttttatttgttcgatcactcctttagtccctcatttatttcacaaacattcattgacacttacgtggcagcactcttgtaagaatagaatatggtgatgtcatgctctccctggccgtgtccgagccgcgacgggcgaggggcggacattcgtggcgaatgggacccttcttctcgtcccgcccgcgggggccccttgtctctcctcttcctcgcctgcgggtggtgcgttgggaaggcatggggtgcggaacccggcctgacctcgctgtcccgcccccgccttctgcctcgcggggtgggtcggggggtcctctgacgcggcaggcacccctcgctctcgcctcctgtggttgtcgacttgcgggcggcccccctccgcagcggtgggggtgctgtcccgccggcccgtcgtgctgccctcccggggagtttgcgcgagcgttggctccccctgggcctttgcggtgctcctggagcgctccgggttgtccctcaggttcccgaggccgagcggtggtgtgtcgttcccacccccagcgccccctcctccggtcggcgcctcggtgtccgcgcgtgggtcctgagggagctcgtcggtgtggggttcgaggcggttgagtgagacgagacgcgcccctcccacgcggggaagggcgcccgcctggtccggcgagcgcacgtccggtgctcccctctggcgggtgcgcacgggccctgtgagcgatcgcggtgggcttgggctggtgacgcgtgcgccggccggccgccgaggggctaccgttctgcctccgaccggtcgtgtgtgggtttactcggaggtgctttgcctctgaagaaaagaggcgggtggacggggtgggggggggggtgggaggcgggggcttgtggagttgcgctcacgctcgcacctgccggtccccgccctgaccgcgaacgctcaaggttgccgcacgcaggtttttcctggtaccacaggccccctcccttccccaggcctccctgagcgcctctgcgggcccctcgggccccacgaggggcggctggcgggtggggagtgtgacccatcctcggtgagaaagccttctctagcgatccaagaggtgtgccttggggtacgggatcccccggcctgccgcctctgtctctctctccgttatggtagcgctgcagtagcgactcgcttgcagaggaaccctcctcagcttccccctcgacggggtgacggggggagagcgagggttccgccggccaccgcggtggtggccgagcgcggctcgtcgcctactgtggccggcgcctcccctttccgagtaaggggaggatcccgccggcagggcccagcgtcctagcgggttgggacgcggctgacagcgagcgatggctgcgcgcagcgttccgtccggcgagtgacccccctccgccgcgagtcagctctccgcccgctcccttgccgagtcgcgaccggtgcggacgacggcgtttgcgtggcacgtggtcgggccgcctggccctgggaaagcgtcccacggtgggggcgcgccggtctcccggagcgggaccgggtcggaggatggacgagaatcacgagcgatgtggccctggcgttgagtttgtggctgtggtcgcttcggggccccggtggcgggaccaggggctcgtgaggcaggtcttggtgggtgccgagggccttccggcgtcccaggcggggcgccgcgggaccgccctcgtgtctgtggcggtgggatcccgcggccgtgttttcctggtggcccggccatgcctgaggtttctccctcagccgcccctctgcgggctcccaggtgcccttgccctcgcggtccccggcccttgcctgtctgcgcccccttccccgcccgccgcccgccgatcctctctcctccccgagcggctcaccggctttacgtcggttggtggccgcgtctgggaccgaaccgggcaccgccttgtggaaaaaaaagaatagaatataccctgttaaatcagacatgatacttgcttttgtggagcttatgctttagtgcagaaacagaaagtcaagcaaaaactcaaactatgtaactttaaattggatatgtgctaatgaaggaaaatgtggcactgtaagaaaaaataatagggagttaaaggataaataggagtttgctggatgaaatttatgaagagctgaagatttcaaacaaaagaaactgatgcaggagggtgcagctttggagtcaagaatgaagttctaggagatagagagcaaagaaatggtgggagaggaggtcaaagtaggtaggattttatatattatcaatgggaaaatattgaacaatcctaagcagaaaggcaatgatatatgttcatcttcattacaaattc

SEQ ID NO: 3424 - DNA, 2412 bp, Homo sapiens; identical to SEQ ID NO: 3423

SEQ ID NO: 3425 - DNA, 1237 bp, Homo sapiens
aaaacccctgagtggcactgttaagtattatgttatgttactttagtcattaaacgtataagcatacctccaaaggttgaatgtaggccacttgcagaaagtaggcagaatgctcacatttaattcttgatgatactgtgtttagctttcttattctttgaaatatcattgagaagaaatactggcatctgctcaaagtaatttctttttcagttgacaatattataagtaatgttattgtatcatttccctacttggacagagtgtgaaaattttgaggattgtctgccacaaatttcttcttcatttgcaaaacattcatgagatattatatttaaatgattttatttaatattaagtgtacttggtgaaggtggcatagaaaatacaaaataaaactaatttaaaaatattaactattacatttataagaaagacttgctaatcataacactgttcataatgattctgaataaagcattatttcttttactgaaaacaattgtagctataactcaatcatctaaattgtcattagttttatttctttctaatcgcctctagctgaaattttaattttgattaattttctttttctccattggtttcgtgtgtgtgtggaggtaaaatatacagaatgtagaatttgttagtttttctatttttacgtttacacttcagtggcatttaaatacatgcaccattttaccttcccaccagcgttgcacaaggtttcagtttctccacatcctgcccaacatttgtttttctggttttcttggtttctgttttttgtttgttttgataatagcattctaatgggtgtgaagtggtattgcattatggttttgatttatatttccctaatgactagtgatgttgagcatcttttccagtgcttattggccatttgtatatcatctttggagcaatgtccgtgtatatcctttgcccagttttgaattgtatttgtctttttggagttctctatatagtctggatattaactccttatcatgtatgtagtttacaaatattttctccattctctgggttgccttttactgtgttgacagtggttcttgatgcacaaaactttttaattctgatgaagtccagtttgtctatgttttcttttgttgcctgtgcctttgatgttctatataagaaatcattgccaaattcattgtcgtgaagcttttcccattttcttctaaaagttttctaactttagctc

SEQ ID NO: 3426 - DNA, 1098 bp, Homo sapiens
catattttcctccaagcttttccccctacctaagtttttgtttttatttatgtaccactctctcaatttgtcctatatccttgtaccttacataccaatattattattttaaaaatcaactcactttgtaacctaacgtaaatttaaagggaacttttaaataaatatgtaaatggaaaaccagtaccttttgccacaaataacacagcaataatagctaatacttatataatgcttattacatgccaggtctttattctaagctttttacatttatataataatgcacttaattctcacaacaaccctatgaggtaagcactgtaggtacttaatccattttacagttaggaaacatagaggttaaataacttgcccaaaatcacaaactagtgagcggcagagctagcatacgaatcttaggtgatatgattccagggtccatgctgttatataaaaatagaggttaccttttaaaatagaaggttcttaggaagtatgtgcttatttaaaaaaaaaaaaaacaacagtctacacctcacctaagatcctttctcatagcatcagtcacacctgaactactgtttttttttttttttgagacaatctcactctgttgcccaggctagagtgcagaaatgtagtggtgtaatctcagctcactgcaacctctgcttcccaggttcaaccaattctcatgcctcagcctcctgagtagctgggaatacaggcacacaccaccatgcccagctaagttttgtatttttagtaatgactgggtttcgccatgttgcccaggctggtcttgagctcgtggtctcaagcaatccacctgccttggcctcccaaagtgctaggatagtaggcgtgagccactgcacccagctgaactacatttttgaaaacactgattaggaaattggtttgtcagttgtgtgtactctagaaatgctagggtgaagtagtaagtagggaagggtgaccagagttcattaggagttagttgagatcttagagtagttgggtaccaggttatacctgtgaaaattctgtgtaaacagatctgcaaagcactaggtaaggtgtgaccgaattgat

SEQ ID NO: 3427 - DNA, 1111 bp, Homo sapiens
ggcctggctcctccgtagacccctgttcttttcaacctctgcccacccgtgcatgtcatcacaaacatttgctcttaagttacaagagaccacatccacccagggattagggttcaagtagcagctgctaacccttgcaccagcccttgtgggactcccaacacaagacaaagctcaggatgctggtgatgctaggaagatgtccctcccctcactgccccacattctcccagtggctctaccagcctcacccatcaaaccagtgaatttctcaatcttgcctcacagtgactgcagcgccaagcggcatccaccaagcatcaagttggagaaaagggaacccaagcagtagagagcgatattggagtcttttgttcattcaaatcttggatttttttttttccctaagagattctctttttagggggaatgggaaacggacacctcataaagggttcaaagatcatcaatttttctgactttttaaatcattatcattattatttttaattaaaaaaatgcctgtatgcctttttttggtcggattgtaaataaatataccattgtcctactgttttgtcttgaatctcatgcaggggttggaggtctgaggtgagacaccttccccgagtgggttgagttgcacagtttcccccgaagctcattctcgtgtcacacttcagggctcaagccactgttgttccctgcctggtacaagtccattgcctagcccctccatactaaattgcagtcatttgctcttctgatcccacaagcaggaaatgacaatcaagtgtgttttggtagcagcaagatctggttttggattcccagcttcagtcttttactgtcagctcatctcactctatgaaacccagttcttcaattgtaagcaacagaaacatcggtcaaactggttttagcccaaaaatgaattgattggttcttaagtcatcaaggattttgtttattttgcttcaggtctggctggatccaggggctcaaaggatagccttagggctctttccccttttccactgtgctcctctccggcgtcactctgtcctgttatccacagtcttcctcctgatgggtgaggcagggagggcag

SEQ ID NO: 3428 - DNA, 1099 bp, Homo sapiens
tcagagtgctctgaagtaaaaccaggcaggtcagaaagtaaagagctggggtgtggctgagctggattgggagggcagggaaagcatctctggagtgatgagatgtacatttgagcagagccctgagtgaaattagggagcaagctgtgtgtctggtacctggaggcagaatattctaggaaataagagtcagagtgtggctgggcatggtggttcacacctgaaatcccagcactttgagaggctgaggcaggcagatcacctgaggtcaggagttcgagaccagcctggccaacatggtgaaatcctgtctctactaaaaatacaacaattagccaggcatggtgacatgcgcctgtaatcgcagctactcaggaggctgaggcaggagaattatttgaacctaggaggtggaggttgcagtgagctgagattgcgccattgcactccagcctgggcaacagagtaagactcagtctcaaaaaaaaaaaaaaaagagtgcaaaggaggtgggagtgcatttagagacaggaaggggacaagtgtgcttagtgggcagtaggttaggaaggtgggcagaggcaagtcgtaagtgaattttatttttgagccattggacacttctgagcaaaagagggaaatgatctgacaggaatgctctcaaaggatccctctggctgcttggtggagacaaactgtaggtagcagaaggggaagtgaggagactgcttggagtggcagggggtttggggacacggggatggggtgaggaaggtgcagtgggccggcaaaggtaatgcagatgagagagggcagcttggaccaggcagtggggacagagaagtaggaacgtgccttagatttattttgtctgctgataatcagagatgagaggggagataaaaagaagcaacaatagttccaaggtttttgatctgaaacttattgaaattcaacctatgccacttgtcgcccaggctggagtgcagtggcataatcttggctcactgcaacctctgcctcctgagttcaagcgattctcctgcctcaacctcctgagtagctagaattacaggcatgcgccaccacgcccggctaa

SEQ ID NO: 3429 - DNA, 1132 bp, Homo sapiens
cttggccaggcgtggtggctcacttctataatcccagcactttaggaggctgaggcgggcagatcacctgaggtcaggagttcgagactagctctagtctctactaaaatacaaaaattagtgtgtgtgtgtatatatatatactaatcaaacttccttgggaaagaaaatgtgaatgcatttctgtgtcatacatttcttgtgcagcactatatattctgtggtttagcagtattaacagcatcaagctgaacagtaaccagtgttgctaaggtctcgcatactataccatgtatgctgagaagatatgcatccttagaattgagaattagaacatttcagttaattgcagtaacttttcagtaactagatatatgtgtaatttgatttctgaagtaattttaactgtggaaaaactaagttgtcaccagcggtacctcatagcataactttagcccatgatatatggatggatggatataaatggaaattgcacactgaaattaggacgtttatatttcttcaggtattagaaaactactcggatgctccaatgacaccaaaacagattctgcaggtcatagaggcagaaggactaaaggaaatgaggtttgtattgttcttgttgcttaacatgagggtttcataggatatgtgtctttctgtagttgtagtgatatgagtaagtacacctgtgtatgtatttgtgcttctgtgtctggtagtgagatggaactatccatttcccaaattgtgtgtcgtctcagtggagggtggcagtgggtgaacatccatttgttttcatttagaggtgcagtggctttccccatctccttgttcttccttaaatcttggcatagagcttgttttttgtgtaaggagtcagggcacattttctcttgtgctgttttggaagtttcagacctgatagcctctattgtgcctaacgctacccttttctctatgccgtatcactgaagttctttcttttagaataaaagaacagtggtctcatcaacataaaaaaccactgacttttttccccttactaattgcagtcatatatgatgtgaatttactaaattttgaggtgacctttattttccaaatttatggtgtagttttcctggag

SEQ ID NO: 3430 - DNA, 1217 bp, Homo sapiens
tgcaatattcgtatcagtgaatgtgcttttccagagacctcagagccttcttatgagggttggagttcacagcaagacagcagtggaggccagctgtcttctatctgtgggccgtcttatcccctatgaaccattataccctgtttctcccttcaccttgattttttccccccacctttgttcagcatttaagagccaacctcttctcattgctaaaggcttcattagacactgaaatccttggtccttcatgtaggacacaagttaatgtccccatctttagggagataaaacaagaaatctagtgccgccttatataagatacagaggagatgagatagtgctggctggggcttctatatcttggtggtagagttaattctgatatgtctgccttttgagtgggaggtgaccactgacattccctagggggaagagatcctatttggtgcctgcatgaaaagatttaaccacaaccccccttccgaggcctctccctgcacaggcccctccttcctctgtcacataccacagcccaggacagctgtctggctatgaaagggcccagtgtgaaggggaatgtaggccctggctgggggaatccctgggtgtggcctggcgagcacctcctccccacccccccattcatcacagactctgcctttgcagaaagctagggtgcgagctggcaagaccttccccagcagccctggagactcattggaggaccagctgaagcccatgttggagtgggcccacgggggcttcaagcccactgggatcgagggcctcaaacccaacaacacgcaaccaggtgggaatgagtccccatggcagcacccgctgcctctgctggtgggaccacttcttgggagagtcagccacccctgctgccccacaccccacccagctttctagcagctggtctcaactctgaatgttggaaaaataggagcaggcatacgaaggctgtgccagctctatctggcttccccggccactttcttgctgatggtcacgtgcatataatttgtattgaatctgacatctgtcttgaagtcaggatgcagtgttgactagcaccttttttattaaaggaaaaaatagttaagctatgctcatttgagaaaattggaaagtgttaaagaagaatatgccacctgctaacattttgaccagtaccatatttctcccattataagataactctggtttct

SEQ ID NO: 3431 - DNA, 1643 bp, Homo sapiens
tgtaaagactgaattgaattttaagctaatgtgaaatcagagaatgttgtaataagtaaatgccttaagagtatttaaaatatgcttccacatttcaaaatataaaatgtaacatgacaagagattttgcgtttgacattgtgtctgggaaggaagggccagaccttggaacctttggaacctgctgtcaacaggtcttacagggctgcttgaaccctcataggcctaggctttggtctaaaaggaacatttaaaaagttgccctgtaaagttatttggtgtcattgaccaattgcatcccagctaaaaagcaagaggcatcgttgcctggataatagaggatgtgtttcagccctgagatgttacagttgaagagcttggttttcattgagcatttctctatttttccagttatccccgaaatttctatgtattatattttttggggaagtgaggtgtgcccagttttttaatctaacaactacttttggggacttgcccacatctctgggatttgaatggggattgtatcccattttactgtcttttaggtttacatttaccacgtttctcttctctgctccccttgcccactggggactcctctttggctccttgaagtttgctgcttagagttggaagtgcagcaggcaggtgatcatgctgcaagttctttctggacctctggcaaagggagtggtcagtgaaggccatcgttaccttgggatctgccaggctggggtgttttcggtatctgctgttcacagctctccactgtaatccgaatactttgccagtgcactaatctctttggagataaaattcattagtgtgttactaaatgttaattttcttttgcggaaaatacagtaccgtgtctgaattaattattaatatttaaaatacttcattccttaactctccctcatttgctttgcccacagcctattcagttcctttgtttggcaggattctgcaaaatgtgtctcacccactactgagattgttcagcccctgatgtatttgtattgatttgtttctggtggtagcttgtcctgaaatgtgtgtagaaagcaagtattttatgataaaaatgttgtgtagtgcatgctctgtgtggaattcagaggaaaacccagattcagtgattaacaatgccaaaaaatgcaagtaactagccattgttcaaatgacagtggtgctatttctcttttgtggccttttagacttttgttgccctaaaattccattttattgggaacccattttccacctggtctttcttgacagggtttttttctactttaaacagtttctaaataaaattctgtatttcaagagtatcatgtcttctgaaatttgtcttgccctgggtatatgctgttaggttcaagtgatgggaaaccagtgcttctttcttcagtgaggactgatcttttcacatcctttactgatttttcagatgtgcttatttcttcttcttcttcttttttttttttttttttttgagatggagtcttggtctgtcgcccaggctggagtgcagtggcatgatctcggctcactgcaacctctgcctcccaggttcaaacagttctctgcctcagcctcccaagtagctgggattataggcacccaccacc

SEQ ID NO: 3432 - DNA, 1148 bp, Homo sapiens
attttatgtctggccggtgggagtaggttagtttggtgattcttgcatccaggttatttctctgttggaaagaagtagtcatttagagtgtgttgagtaagggctgcaggatgttgcagtatgaaacactctcgcatcattcagatcatacatacaaatatttatcgtctggtgtaagttggtcacctgggtgctggtgcagctggtgtgaccatgacagacaaggcctatttctaaacattcaccttgataatgtttcctttctttgaaggatggtgggggcatgcaacatgtaaaatcttacttttctattacaccttgtccaatctgaagcctgtctctctgtatgcctttgtgggaagagagttctgcacttgatcatttgatcactttgggacacactcttaaaaaaaattatattttgtttcaaagagagcctggcacatagagaaaagtcaattatgattgttactattgctactattccctctgccacttctagggccggtagcaaatgaacaactgccttatgttttttgctcattctgtgactgttggtgcttccttccctcactctcgtcatctgtaaaacggggataagaaaccctacatcctagtgctgttttgaggatgaaatgatgttggttatgtaaagacacctggttttgcccctagcacacagatggcacttagaacccctcctcccccacttttttttttctgagacaaagtctcactctgtcacccaggctgcaatatagtgatgcaatcacagctcactgcagcctcaacctccctggctctggtgatcctcctgcctcagcctcccaagtagctgggacttacaggcatgcaccactacgcctggctaattttttgctgagataaggtgacaacatgttgtccacgctggtcttgaactcctggactcaagcaatttgcctgcctcggcctcccaaagtgtggggattactggcatgagccacctcacccggcttcagaccacatttttctccccaagtccctgttctctgctttccaccaacataaaccaggacccatttacatgacaatgaagggaaaaggtgcatcccatggcagtcgtgtattaacctgaaagaacattcagaatccactttcacccccac

SEQ ID NO: 3433 - DNA, 1138 bp, Homo sapiens
tcacccttgttgcccaggctggagtacaatggtgcgatcttggcccaccgcaacctctgcctcctgggttcaagcgattctcctgtccctcagcctcccaagttgctgggattacaggcatgtgccaccatgcctgggtacttttgtatttttagtagagacagggtttctctatgttggtcaggctgggcttgaactctcaacctcaggtgatccgcctgcctcggccccccaaagtgtggggattacagccatgagccaccgcacctggctggtggtttaatttttttctgggcatttaattgaattgctctggaacccttttctgtggttttcttatataggaagatacaggctccagtgcgatgggagtgttggttaaatttgaaggatgatactcaattcttagagaagttttctgtgccctggtctctaatcccagctacagataaagtggaataagaagaagccattaaacaccaggtggatttggggaaaggtgcttgtttctttttcccttccaggctgcatggctgagaggttgaaggaggagattctcaacagagagaaaatggtagatattttggctggtcctgatgcctaccgggaccttccccggctgctggctgttgctgagtcgggccagcaagctgccaacgtgctgctctctctggacgagacctatgctgatgtcatgccagtccagacaagcgccagtgccacgtctgcctttgtgtgagtcactgcctaagagatagggaataagcctcttcctcctttcacacttttttttttttttttgagacagggtctcactcttgtcatccaggctggagtgcagtgtcatgatcagggctcactgcagccttgacctcctgggctcttgctttagtcccctgagtagctgggactacaggtgtgcacccccacacctggctaatttttttttgaatttttacagagatagggtctcactatattgcccaggctggtctcaaactcctgagcttgggtgatcctcccacctcagccttccaaaatcctgggattataagggtgagccactgcgcctggccatggcattaaattttctgtaacagaggttgccaaatagcttactacctctttttgtaaataa

SEQ ID NO: 3434 - DNA, 1130 bp, Homo sapiens
cccaccccacgaggccctcgactaccacttcggcctcgaggagggcgagggcatcagagacctcttcgactgtgactttggggacctcacccccctggatttctgacagggcttggagggaccagggtttccagagatgctcaccttgtctctgcagccctggagccccctgtccctggccgtcctcccagcctgtttggaaacatttaatttatacccctctcctctgtctccagaagcttctagctctggggtctggctaccgctaggaggctgagcaagccaggaagggaaggagtctgtgtggtgtgtatgtgcatgcagcctacacccacacgtgtgtaccgggggtgaatgtgtgtgagcatgtgtgtgtgcatgtaccggggaatgaaggtgaacatacacctctgtgtgtgcactgcagacacgccccagtgtgtccacatgtgtgtgcatgagtccatgtgtgcgcgtgggggggctctaactgcactttcggcccttttgctctgggggtcccacaaggcccagggcagtgcctgctcccagaatctggtgctctgaccaggccaggtggggaggctttggctggctgggcgtgtaggacggtgagagcacttctgtcttaaaggttttttctgattgaagctttaatggagcgttatttatttatcgaggcctctttggtgagcctggggaatcagcaaaggggaggaggggtgtggggttgataccccaactccctctacccttgagcaagggcaggggtccctgagctgttcttctgccccatactgaaggaactgaggcctgggtgatttatttattgggaaagtgagggagggagacagactgactgacagccatgggtggtcagatggtggggtgggccctctccagggggccagttcagggccccagctgccccccaggatggatatgagatgggagaggtgagtgggggaccttcactgatgtgggcaggaggggtggtgaaggcctcccccagcccagaccctgtggtccctcctgcagtgtctgaagcgcctgcctccccactgctctgccccaccctccaatctgcactttgatttgcttcctaacagctctgttccctcctgctttgg

SEQ ID NO: 3435 - DNA, 1245 bp, Homo sapiens
ggcctatgttccggtgtccccacgcctccagcaggggacgcccgggctgggggcggggagtcacaccgcgcctggtaccatccggacaaagcctgcgcgcgccccgccccgccattggccgtaccgccccgcgccgccgccccatcccgcccctcgccgccgggtccggcgcgttaaagccaataggaaccgccgccgttgttcccgtcacggccggggcagccaattgtggcggcgctcggcggctcgtggctctttcgcggcaaaaaggatttggcgcgtaaaagtggccgggactttgcaggcagcggcggccgggggcggagcgggatcgagccctcgccgaggcctgccgccatgggcccgcgccgccgccgccgcctgtcacccgggccgcgcgggccgtgagcgtcatggccttggccggggcccctgcgggcggcccatgcgcgccggcgctggaggccctgctcggggccggcgcgctgcggctgctcgactcctcgcagatcgtcatcatctccgccgcgcaggacgccagcgccccgccggctcccaccggccccgcggcgcccgccgccggcccctgcgaccctgacctgctgctcttcgccacaccgcaggcgccccggcccacacccagtgcgccgcggcccgcgctcggccgcccgccggtacggaccccagggacgccgcgccgacagcgccgcctgtgccccccgcgcagacccgggagggcgccgtgtttggcctggaggcggcagggggcgggggaggggttgactgaggcgcccaggctgggcggtgcagagccggggttgggcctccgggccccgccctggggtgcggggtgacctcgggccggtccctgtttgctgctctgtgctctgcgcctcagcttcctcaccggagcctccccagcgtcggactcagtgataataatagcccacgtgtattcaactggcgtttactgcatgccaggcctttgggcgacttcaagccagctaaaactcacaaccccgctgtgagctgtgttgtcactgtgcccatctgacggaggaggaactgaggcccagagagggaaagtgacttgcccctggtcacacggctgcaggtggtggggctgggatttgaactgaggcctgctggcttcagctcagaatttgcatctcggtagtgagcacagctgctaggggaagtgaaggcggggcggaggaaagtcctggggcctaaccgttggtgagc

SEQ ID NO: 3436 - DNA, 1262 bp, Homo sapiens
aactgagaagcaagcccagtacctgggcatgtcctgtgatggccccttcaagccggatcactaccgctactgagagccaggtctgcgtttcaccctccagctgctgtccttgcccaggccccacctctcctccctaagagctaatggcaccaactttgtgattggtttgtcagtgtcccccatcgactctctggggctgatcacttagtttttggcctctgctgcagccgtcatactgttccaaatgtggcagcgggaacagagtaccctcttcaagccccggtcatgatggaggtcccagccacagggaaccatgagctcagtggtcttggaacagctcactaagtcagtccttccttagcctggaagtcagtagtggagtcacaaagcccatgtgttttgccatctaggccttcacctggtctgtggacttatacctgtgtgcttggtttacaggtccagtggttcttcagcccatgacagatgagaaggggctatattgaagggcaaagaggaactgttgtttgaattttcctgagagcctggcttagtgctgggccttctcttaaacctcattacaatgaggttagtacttttagtccctgttttacaggggttagaatagactgttaaggggcaactgagaaagaacagagaagtgacagctaggggttgagaggggccagaaaaacatgaatgcaggcagatttcgtgaaatctgccaccactttataaccagatggttcctttcacaaccctgggtcaaaaagagaataatttggcctataatgttaaaagaaagcaggaaggtgggtaaataaaaatcttggtgcctggaagaattttgagcctttattttatagataatcctctgccaacaatgtatgccatgaatagggggttatagttgtgctgatgaagcattcacggggtactctgcagtggaacggctgtctgtggtccttaggcttgaaagaatgggtaaagtgaagagggaactctttcgtttttttttgagacagagtctcgctccgtcacccaggctggagtgcagtgatgcaatctcagctcaatgcaaccttcgcctcctgggttcaagcgatcctcctgcctcagcctcctgagtagttgagatcacacccagctaatttttttttggtatttttagtagagacggggttttaccatgttagccaggctgatcttgaactcctgacctcaagtgatctgcctgggattataggcgtgagccactgtgcccg

SEQ ID NO: 3437 - DNA, 1169 bp, Homo sapiens
tttgtccacaagtatttcttaaaggtgtaatgtatgactactaactatctgtaagaatgttatttcttatcagaccttccatattataaccaacatcaaaaattggtctgtaatctgcacggtttcacaggaaagcagttttaaggagctggaaaattaataaatgaacttaaaataccaaggaatattaataatttcctattctaaaagtttttatttccagtgacatcagaagatcagagaacctgtacatgcttcgtgattagtaatgggacataggggtagacaggaccgaaaaagtaaacaagcctattaactggcagcgttggttatttcccattacttatttctttaagtaattttcacctgtgcatctacatcttaagttttatatttatcatctgccttttattttttacagttaaaattctatcctgaattttagaaaatgaaagattcttttcctattttccccaaatcttttatagcatctgtcaatggttcaccatctgccacttctgaaagtgatgggtctagtacaggctctctgccgccgacaaatacaaatacaaatacatctgaaggagcaacatctggattaataattcctcttactatatctggaggctcaggccctaggccattaaatcctgtaactcaagctcccttgccacctgggtgagtaactttttaaattaacatatgttgtctttaggattcttcataagcctacttattaataaggaaaataacagtaaacaacagtaaactccattgttttgatgactgttttttaatttcttttttttttgagatggagtgctctgtctcccagactggagtgcagtggtgtgatcttggctcactgcgacctccgccccctgggttcaagtaattctcctgccttagcctccctagtagctaggattacaggtgtgcactaccaagcccggctaatttttgtatttttagtaggggatttcaccatgttggccaggctggtctcgaactcctgacctcaagtgatccgaccacctcaacctctgaaagtgctgggattacaggcatgagcacccagccaactgtttttatgttattgtaactgattttgggggatctggagtcaaaatgaacaaggaaaacacaccatatttgaaatcttcagggca

SEQ ID NO: 3438 - DNA, 1190 bp, Homo sapiens
gttatatgtagattgagaaatgggataattttcaccatttgataaatgagagaatagtggcttaagcaataccactttaatttgaaaaatgtggaactatctaaaaggatccagaaaagtacaattaattcacagcaatctgtaggatgaactattaggaaaagtggaagtcgaacaactattggataaaataacaatatgtgggctgtttatactttaaggaatacataagtggtttctttaaaaccccacatgttttttggtctctgttacctatttaaaggcttcaaaaccttaattgatagtgtttttcactggagaaagaagtaccagttttatttcttaagcagacctacttcctaaaacaatataatgctggttctcccttaacattatagccataaatttaaacatgagtactagcaaggaagcaaatagataacatattttaagaaattatgaaattcacatatgacaatgattatcacaatacagaaagagttctttaacttttaggctacatgtgtgtcccagatgatctctgttcccatgctcctgggaattcagcaggagtgaaagtgatggcagcagctattgcttttgtggaactgggctgttgattttgtaagttgtaagaagaatgttggccagccacggtgggtcacacctgtaatcccaacactttgggaggccaaggtgggtggatcacttgaggggaggagtttgagaccagcctggccaacatggtgaaaccccgtctctactaaaaatataaaaattagccgagcatggtggggcgtgcctatagtcccagctactcgggaggctaaggcaggagaattgcttgaacccaggaggtggaggttgcggtgagccgagatcatgccactgcactccagcctgggtgtcgagcaaaattttcctgggtggaggttgcggtgagccgagatcacgccactgcactccagcctgggcgacaagagcaaaattttgtctcaaaacaacaacaacaaaaaagaaggaatgaagcaatgttgccactatcgtgtctgctgcaaggcttgagggacaggttctcccaacagtccgttctccattgacaaatacttcctgtacccttccttttttaagttttggccagggaattggggaaacatcttttttgaggacattttgtgccccctctgtaa

SEQ ID NO: 3439 - DNA, 1293 bp, Homo sapiens
gtggaggaggaggagaaggctcaccctgggaggtcgcagagggtaggaaaagctatggagagttagtattaggtcaaccagaaggcttgccaaccatcagagctattcaagtagaatagatacatcatgtcattttctagctcttcttcggtgcagtatgttcaattctttgaatgtaatatcttattggctttttaccacaactctatgatataaatataattatattctccattttaaagatcagcaaactgagacacagagaggtgaaatgattccctgaggttgcctactagtgagtggtagagctaggatttgaacccaggtctagagttggattcttagccactgttctctaccacattggggcggacattcaagttttggccagtagactcagagaggattcaggagtcaatgactgaggatgggactccttgaaattttaggtccaattaagcctgcaaaatgttctctgtttcttcctccagcaccatcaaacaggatgactttaccgctcgtctctttgacatccacaagcaagtcctaaaagagggcattgcccaggtaaccattcccagccctactccagtctgtaacctgtccctcccatctctgtttgttttctgttttgcttgaagaatttggtccaggccctcagctcatgggaatctgcctctcactggtcctcactgggtttatcccagtgaccaattctaggatgaccagaagaatgattccactgggcttgggagtgtttgctggtacctctaatctctgtgtagagttcatggtacctgtgtgctctgtggctaggtcctcagagtcagtccctgggcaggtactgtcagccttcagttttccccacagactgtgttcctgggcctgaatcgctcagactacatgttccagcgcagcgcagatggctccccagccctgaaacagatcgaaatcaacaccatctctgccagctttgggggcctggcctcccggaccccagctgtgcaccggtgggtcccctgggcagcccccggcatacctgtggggtgacatgctgatgggtgtacagtcactggctaggccagggaactccagctatgattgtgctttcctgggccccgggtcacatgttgcccctggccaccccgacagcagtttccacttgtaatgagatccttggtatgtcagggagaaaaaggacctcatagctcatctagtcctgtccctccattgtacaggcagagggaacaatatcttgagagccccagagagaggaatgcagggacttctgtc

SEQ ID NO: 3440 - DNA, 1203 bp, Homo sapiens
gcagtgcacgacagaggcaggattctgcgtgatagttcttcaggttcacttcacagattagctgacacttaactgttctggaagctgggccaaggagtgctaacatggaaattgagtaactatagttttttgcccaaggtacaggagaataaatatgagtagatagaatctcttaaattaaaaatttctccagtaaatttttcctaagtctttgcctcctgcctgtttagttcccattaaaagcttggagatgaaaaagaatacaaagtaacaagcaagcattcgcagaaaaactcagttttctgagaacttaacttctatttagtttctaattgtatgttgcttacttggggctatgttccaggcaccttcagtatatccctctactccttacaacattaaggggtaggtatggttgtcagtattgctgttttacaaaggaggatggatactgaagcacagagaggtccactgatttactgaagaccacccggctagtgaatggggttcaaacccagtagtctggcttcagggtcagtgctcttaactaccgtgtcacactgtgtctcagtcacacttcattcagcagcttgtcgtcttccaaggttgtgattttaacatgacggggaaagatagttccaagtctgtaggatagagtaagttagattctctcttttttttttttttttgagacagtccagctctgtcgcccaggctggagtgcagtggcacgatctctgttggttcactgcaaccttcaccttccaggctcaagcgatccttccacctctccctcttgagtagctgggactacaggcgcatgccaccatgcccagctaattttttaaatttttttatagcaatgaggtctcactgtattgtccaggctggtctcaaactcctaggctcaagcagtccacctgcctcggcctcccaaagtcctgggatcataggcatgagccaccacacctagtcggaataagttagggtcttctgtcttgatactttaaagagtatcactgtgttttctgtatgagccttacctgaatatatctgataaccactcctctataacacatagaggcctttgcaaaaggcctctagggaagcagttcctgtaggaacttgagaggaccttggcagttactgattcatctgttcacctttaaaatgaggaaactgaagggaagtcactctgctaag

SEQ ID NO: 3441 - DNA, 1163 bp, Homo sapiens
agcctagcaccattgccaccagcatgcgggattccctcattgacaggtacctggggcctctcctttcttctgctcagggttgggggttaacttgcattttgagagtatggggaaaagatgtcatctagaatgggagcctaccagtttgttctggtagcttctcgagtgtgagagcatatctgtacactgctgagcagataagagccagcatattcaaaaaatatttcttgagcatctgctaatcctcatctttgtggtttttcagggctaggatactagagcagtagctgcttgagcagcttgtcagagctggtcccgggatgagggctgaggcaggcacctcacttgagagtgaggtgggctctgtgaaacagctactgaccgtgcgctttcctttctcttcagcctcacctgagtcaccttccaagttgttccatgggctcctggctctggactgtggccaaccttctccacattccgcccaatctgtaccggatgctggcagggaggtggcagagagctcactgggactgaggggctgggcacccaacccttttccacctgtgcttatcgcctggatctatcattactgcaaaaacctgctctgttgtgctggctggcaggccctgtggctgctggctgagggttctgctgtcctgtgccaccccattaaagtgcagttccctccgggccattctgaatgtgatgtttggggccctcagcctgtgtacaatccctgcactctccagttgttccagcattctgggaagatagggtgggatgaacacaacacacacccaacccagttcaccacctccacacacgccattcccttctcctctaccatcaggatgtgaggcttcatcctggggcaagaaacactctccactacagttctccttttttcttttttctttttgaggcagtgtctccctctgtcacccaggctggagtgttgtgacgcaaggatggctcactgtagccttgacctgttgggctcaagcgatcctctcgcctcgtttatttttttgtagaaacgaagtcactgtgttgcccaggctggtttatactcctgaactcaagcgacccaccgcctcggcctcccaaagtgttgggattacaggcgtgagccacggcgcccggtctagttctcacagttttca

SEQ ID NO: 3442 - DNA, 1206 bp, Homo sapiens
ccaagatcctggaggaggacctggaacagatcaagctgtccttgagagagcgaggccgggagctgaccactcagaggcagctgatgcaggaacgggcagaggaagggaagggcccaagtaaagcacagcgcgggagcctagagcacatgaagctgatcctgcgtgataaggagaaggaggtggaatgtcagcaggagcatatccatgaactccaggagctcaaagaccagctggagcagcagctccagggcctgcacaggaaggtaggtgagaccagcctcctcctgtcccagcgagagcaggaaatagtggtcctgcagcagcaactgcaggaagccagggaacaaggggagctgaaggagcagtcacttcagagtcaactggatgaggcccagagagccctagcccagagggaccaggaactggaggctctgcagcaagaacagcagcaggcccagggacaggaggagagggtgaaggaaaaggcagacgccctccagggagctctggagcaagcccatatgacactgaaggagcgtcatggagagcttcaggaccacaaggaacaggcacgaaggctggaggaagagctggcagtggagggacggcgggtccaggccctggaggaggtgctgggagacctaagggctgagtctcgggaacaggagaaagctctgttggccctccagcagcagtgtgctgagcaggcacaggagcatgaggtggagaccagggccctgcaggacagctggctgcaggcccaggcagtgctcaaggaacgggaccaggagctggaagctctgcgggcagaaagtcagtcctcccggcatcaggaggaggctgcccgggcccgggctgaggctctgcaggaggcccttggcaaggctcatgctgccctgcaggggaaagagcagcatctcctcgagcaggcagaattgagccgcagtctggaggccagcactgcaaccctgcaagcctccctggatgcctgccaggcacacagtcggcagctggaggaggctctgaggatacaagaaggtgagatccaggaccaggatctccgataccaggaggatgtgcagcagctgcagcaggcacttgcccagagggatgaagagctgagacatcagcaggaacgggagcagctgctggagaagtctctggcccagagggtccaagagaatatgatccaagagaagcagaatc

SEQ ID NO: 3443 - DNA, 1179 bp, Homo sapiens
ccaggctcccctcccaccccaggtactgaggacaaatcagttctctgtgaccagacatgagaaggttgccaatgggctgttgggcgaccaaggccttcccggagtcttcgtcctctatgagctctcgcccatgatggtgaagctgacggagaagcacaggtgaggatgggggcaaagcggcctctgggggcctgggcctgagggaggaggatgcctgctgagcccaccctctccttctaccaggtccttcacccacttcctgacaggtgtgtgcgccatcattgggggcatgttcacaggtaagaggcccagggcgtctgtgagctgtggggtggggagggtaaagcctgggtgccccaggtttggttgggggtgaaggggcagatgctggcctggccagttaagtgacaaggctctcagcgtcaaaagccaaggcccccactgggccagtgccagcccttgtctctctcccagtggctggactcatcgattcgctcatctaccactcagcacgagccatccagaagaaaattgatctagggaagacaacgtagtcaccctcggtgcttcctctgtctcctctttctccctggcctgtggttgtcccccagcctctgccaccctccacctcctcggtcagccccagccccaggttgataaatctattgattgattgtgatagtactcactggtctccgtgtgatccttgccatggccagagcctcatcctggccactcactgaaggcaattgtgactgacagatcggggcccagagccctcgggagccccacatgggcatcccctagttaaccggggtttattcaaaccagattcatgtccagcccacagccctgtcctgggtccctcctccactgtggtcctcaggcctctcgggttcagccccagggctcagatggaccttttcagcgtgagcttcctggagccaccatggcccccaggctcatgagtgatcaaccccaggccactaattcagggccctgagtgcatattggggcttgccacttcttcattgatgggtaaagctggggccgctctccgccaccctgggctcaatacacctgatcctgtcacactcactgatcccactctgtgccaaaccccacgctggctctcactgcagagaggaatccctccaggtcctctgcagtctagatgga

SEQ ID NO: 3444 - DNA, 1218 bp, Homo sapiens
caggtgaggagcttgccccctaagtggactgcgctggagaagagaacctggggagggacttattctcatctgccacctggcttgtttatgtccacacacacctttccctcaggtgcaatgctccgattatgacagtgacgggtcacatgatctcatcggtaccttccacaccagcttggcccagctgcaggcagtcccggtgagtgctggtcttgccaggggtgtggaaatgggcctagatagctgaagcttgtgggagagaggaaggagaaggcagctcgagtccttgactgatgctctgagaatttcctaccctaatttttctgtcctcaccaggctgagtttgaatgcatccaccctgagaagcagcagaaaaagaaaagctacaagaactctggaactatccgtgtcaagatttgtcgggtgagacaaaagcccatgtaaccaaggctctgattcctgagctccatgacaccaactgctatcaccccaggcatgaccctggtttcatttgcaggtagaaacagagtactcctttctggactatgtgatgggaggctgtcagatcaacttcactgtaagttactttaccaagggcaagagaacaggtctggggctcagggtggcctttagctgccttcctcacctcctcccaggtgggcgtggacttcactggctccaatggagacccctcctcacctgactccctacactacctgagtccaacaggggtcaatgagtacctgatggcactgtggagtgtgggcagcgtggttcaggactatgactcgtgagtacctgcttctctgggctatacccgctccctgcagatgcttcagcctctgagcttacagtcccctcactgccttttgcccaatacactgtcctcccacagagacaagctgttccctgcatttggatttggggcccaggttccccctgactggcaggtgagctccctctctttctgccactcctgttttcagtttcagggtcctgattttgggggatgtggtaaatttacttgctacttggcactcagctttaagaggagatgcagggttggattcctgcaggcacgtagacagcaagtgctcaggactccatagctcctataggaatcttggcacacgccagtgtcctttttcattcttagcagaggtcatggggaaagaacctcattttcattcttgtctccaggtctcgcatgaatttgcc

SEQ ID NO: 3445 - DNA, 1144 bp, Homo sapiens
ttaagagggttaaatagtttttttgtttcttttttttttttttttttttttttttgagatggtcttgctctgctgcccaggctggagtgcagtggtacagtcagctcactgtaacctcgatgtcctgggctcaagcaatcctgcttcagcctcctaagtagctatttttttttttttttaatttttttgtagagatgaggtaattgctggggtaggggtgatggtggagtggaggggtagtttcactatgtggctcaggccggtcttgaactccggggctcaagtgatgctcccgccttggcctctcaaagtgctgggattacaggtgtgagccactatgcctggcctcagtttcttaaaaggttttaaatcacaccaactggtaccagtgcctctgattgccttgatttttctgtgatcccacttggaagtttgttaatgccacactccactatactccacacattagattgcagtgggggctggagagtggcccagcctttatacataactcccttctgtggtttggcctgtgggaccagtagggtccctgtgctgtaactctgactgaagtgatggacattaatgcaactactaattactgatgtagatgagctgctttacttctatgaccattgaattgacagattggaattggaagcacctgtcaccttcaagcttttaagacaacttcacatgaatgtacagcttagccatagctgtatctcatactaacagatttttgcagtggtgtgcacccagcacttatactttggtggaaaagcaaaataaggttcctgttcttcaacagttgagggttttaagtcacaactaagtgcttggttgtgcttatactaggtacattcctataccacgggaaccaggtagtggctttcctggccatttgctaagttatggttagacaggaacaagtgtaaactagtctttgtcatagtgtagtttcctgttgttgaaatattcctttgctttctcggcttccctaacatgtaaattctgaagacccatcttaaactctccccagtgtcccaaatgaatttattccagtgaagggtaaggggcttgcattatgaacaataggtaggtttcttttccaagagctctggtctgcttttgttcatttact

SEQ ID NO: 3446 - DNA, 1173 bp, Homo sapiens
aactttacactctaaaggtcattttcacatttagaggctgttattgccatatccctagattgtaaattatcatttacagagcacttactctatgttaagcactgtgctaaatactgtagttttcaaaatcctgtaaataatgttgagatgcccattttacacttgacactatgtgtaaattgtagagctgactcttgaacccccaccttactccaaaatcattaacaccaagaaactaaaagacagatgtctttattgggtcttaaactgcaggcaacaccagtcaaaaaagctggtttctctatgtattttacactgcatctgctgcctcccacaaactgaaggcagttaatacgacatccaccagaaaaataccctggagacccagatggatctttttccttctcattacccaccccaggtagtaagatataatatccagtaagtggaaaatcagatgtaggggttgctagactagtgttagcaaaaaattggaaaggagcagttaatactctttctgatatttttgttaccaaatagctccatcttggtttcctcctcaggatcggaatgcggggtcgagagctgatgggcggcattgggaaaaccatgatgcagagtggcggcacctttggcacattcatggccattgggatgggcatccgatgctaaccatggttgccaactacatctgtcccttcccatcaatcccagcccatgtactaataaaagaaagtctttgagtagtcagtgtccctctcttaaaggaatattcttctctcagcctattatccagctttgccaaggatcttctgcactaaagagatggactaacgtaatgactagggttagtatctctttcacaaggcctgcctctcttaatccaaaattggaaaacttgggagtgtctagtattttccatagatactattcaactaattactcagtacaactctgtgcttgttactacggtcaccattttaaaggagaaaaactacttcaaaaaatggatttataagccgaaatttcctcaaggtcacacattgcattatttccaaagcaatgttcatcctgaggttggttgtttccttggtcgcccaggttggagtgcagtggcacgatctcggcttaccgcaacttctgcctcctgtgttcaagcgtttctcctgcctc

SEQ ID NO: 3447 - DNA, 1205 bp, Homo sapiens
ttttctccagataagccattgtgggtatatgtgtaaaccaaaattttatatatatgtaatttatatcaagttatgtatttatttgcttgtgtatgaagtatttatgttttatatatgaggattatattgactattttgtccctgggcacatttttgttagaaaagtactaaattctacctcaggtggtctgcctgcctcggcctctccaagtgttgagattacaggtgtgagccactgcacccagccagttttcacattttctaaccacaatccccatgttctcaaatataaagctgtcattacttgtaatatcttttatttaaactaccacatcaacaagcctaatttgcgttagctagcgtcgtcatcatgtatgttgtgtttgctacttacagcttgcagtttctaccttagtattcagaagtaattattgaatatgctaaaaatataaatatatttttaagtatagtttgtattttaaaaattaaagcactgtctcctgtccttgcctcccctatcatgtagttttctgactcagaatgtgccaaaaaggctttggaacaacttaatggatttgaactagcaggaagaccaatgaaagttggtcatgttactgaacgtactgatgcttcgagtgctagttcatttttggacagtgatgaactggaaaggactggaattgatttgggaacaactggtcgtcttcagttaatggcaagacttgcagagggtaagtgtttcttgctattacgaatgatttactgtgggtattgtagtggaaaagaaaggtagccatgtaaactaagaaagggaaaaagattttatcttattttgtagttggcgttatccttggtcacactgcatattattttatagatgatgtgccttgtattaatgtatggaaatctatattatgtgttttgaatgccacagtataagttgcaagatttcttttcctttatgtagtgtttatatgtcatacttaggaataaatttagttgcagctattataatgttacaagtttttctttttgtaatttcttattttttgatgcagggtctggctctgttgcccaatttggagtgcagttgtgcgatcctggctcaccgcaacctctgcctctttggctgaagccatcctcccaccctaatctctaaatagctgggactaacagttgcaaacaaccaccaccacgcctggcta

SEQ ID NO: 3448 - DNA, 1201 bp, Homo sapiens
ccattaaagaactcatctatgtaaccaaaacccacctgtacctgaaaacctgttgaactatatgaagaaataaaaaagataaaaattattttaaaatctgttatgaaattaattttatatgttttactcctattagagaacctattgataatttaactcctgaggaaagagatgcaaggacagtcttctgtatgcagctggcggcaagaattcgaccaagggatttggaagagtttttctctacagtaggaaaggtaatcttaacctgtttagggaggtcaagtaggtagaaattgcaagagaaaacatgtaaacatcaaatacttcatttgatttagtagcagtatttgtttgtggtaatgtttccattttgcctcttgtagtattggagttgataaatgttactacaaatttgttcaaagataaagataggatataggaattgtcctacagatttacttttttaattaaatttttaaaaataccttcatccttcaacagtgtctcttgaaataattctacatgtgttacaatggatgtttgcacaaacaactgtgttttctttctaggttcgagatgtgaggatgatttctgacagaaattcaagacgttccaaaggaattgcttatgtggagttcgtcgatgttagctcagtgcctctagcaataggattaactggccaacgagttttaggcgtgccaatcatagtacaggcatcacaggtaatttttttgttggttaagagtttgattattggtggtgttgaaagcctcctgttgcatggtatagtgctgttgtgttctgtgactgctgctcattacgttgagtcggatgttttcaggactttttttttttttttaactttgcgtttattaacattgatacagttttctcaagactgtcgtcctgtcgtttctccttgtgtttgaaatgtaatgattttgccttttttttgttttgtttttgagatggagtctctctcaccaggctggagtgcaatggcatgatcgctgctcactgcaacctccacctcctgggttcaagcgattctcctgcctcagcctcctgagtagctgggattacaggagcctgccaccacgttcggctactttttgtgtttttagtagagatggggtttcatcatgttggccaggctagtattgaactcctgacctcaggtgatccacctgccccagccttc

SEQ ID NO: 3449 - DNA, 1216 bp, Homo sapiens
tttgagacggagtctcgctgtgttgcccaggctggagtgcagtggtgcagtctctgctcactgcagtctccacctctcgggttcaagcgattctcgtgcctcagcctccctagtagctgggattacaggtgcccaccctggctaatttttgtatttttagtagagatggggttttgccatcttggccaggctggtctcaaactcctgaccaattttacggcattgtatccctaacttctagaacactgcctggcacattgtagatcttctgatcttttgttaagctgtctggtcttttgttaagtgatcattctggccaggcgtggtggctcacacctgtaatcccagcactttgggaggcggagacaggcaaatcacaagatcgggagtttgagaccagcctggccaacatggtgaaaccccacctctactaaaaatacaaaaaattagctggatatagtggcgggcgcctgtaataccagctactcgggaggctgaggcaggagaatcgcttgaacccaggaggcggaggttgcagtgagccaagatgatcatgccactccactccagcccgggtgacagagtgatattccatctcaaaaaaaaaaaaaaaaaaaaaagtgatcattccatgtagaacgttgtactaagtctcatatgcaaggtcttcttcttttgagacagggtcttgctctgttgcccagacgggaatgcagtggtgcaatcatggctcactgcagcctcaatctcccaggctcaagcgatctttccacttcaacttcccaagtagctgggaccacgggcccaccacacccggctaatttttaaatttttttatagagacagtgtctcgtattgttgcccaggctggtcttgaactccgggctcaagtgatcctcccgccttggtctcccacagtgctaggattataggtgtaagctcgtcctgcagagtcttttataagcccttaaagaacttggaattgattggactgtattccatttttctaaattttatctctatgcctggagcttttactgacttcaaaatgcagtatgaagtattagttttaaggtttttttgttttgttttgttttaagcagtgaaagcacagatttattgaaatgaaagtacactccacagagtgggagcgggctcaagcaagtagctcaagagccgtttttttggtttgtttttgagacggggtcttgctctg

SEQ ID NO: 3450 - DNA, 1131 bp, Homo sapiens
aaggcctgtcctctgggagtgacctttattagtccaccccttggagctagacatcctgtacttagtcacggggatggtggaagagggagaagaggaagggtgaagggaagggctctttgctagtatctccatatctagacgatggttttagatgataaccacaggtctacaagagcgtttttagtaaagtgcctgtgttcattgtggacaaagttattattttgcaacatctaagctttacgaatggggtgacaacttatgataaaaactagagctagtgaattagcctatttgtaaatacctttgttataattgataggatacatcttggacatggaattgttaagccacctctgagcagtgtatgtcaggacttgttcattaggttggcagcagaggggcagaaggaattatacaggtagagatgtatgcagatgtgtccatatatgtccatatttacattttgatagccattgatgtatgcatctcttggctgtactataagaacacattaattcaatggaaatacactttgctaatattttaatggtatagatctgctaatgaattctcttaaaaacatactgtattctgttgctgtgtgtttcattttaaattgagcattaagggaatgcagcatttaaatcagaactctgccaatgcttttatctagaggcgtgttgccatttttgtcttatatgaaatttctgtcccaagaaaggcaggattacatctttttttttttttttagcagtttgagttggtgtagtgtattcttggttatcagaatactcatatagctttgggattttgaattggtaaatattcatgatgtgtgaaaaatcatgatacatactgtacagtctcagtcccataaaattggatgttgtgcctacacacaggatctagaagaatatgtcaaactataaactgcttgtgattgtgaatgactttgttctttgcttgtgtttttcaatttcctataatgcacatactaacttttaaaaaataaaggttattttaaaagcctgtattaagccctcgttgcttgtagaatagagttagtatacgctacagaagcacaggttcatgctccttcatgcttgggctctgaggtatctggaatttctc

SEQ ID NO: 3451 - DNA, 1158 bp, Homo sapiens
ggagagaggagggggaggtgcagagagctctatgccatcctgtttacagcgaggcaagatgaatcattatgtctgtgcattttgttttacttatctgtgtatatagtgtacataaaggacagacgagtcctaattgacaacatctagtctttctggatgttaaagaggttgccagtgtatgacaaaagtagagttagtaaactaatatattttgtacattttgttttacaagtcctaggaaagattgtcttctgaaaatttgatgtcttctgggttgatggagatgggaagggttctaggccagaatgttcacatttggaagactctttcaaattataactgttgttacatgtttgcagtttattcaagactgctgtatacatagtagacaaattaactccttacttgaaacatctagtctatctagatgtttagaagtgcccgatgtatgttaaatgtataggtagtaaaataccactttgtaaatatctttttgctaaaattcataggaaatgcttttggaaattgaattgtgaagccacctttgtgaacagtatagtaatgtctatacttgttcaatagtttagaggaggtaggagggaagaaattgcaaaaggtaatattactagtgtgttcatacttggacattttcagacaccatttttctatatgttttgtgcattttgttttgctctgtatatagtatatataatggacaaatagtcctaatttttcaacatctagtctctagatgttaaagaggttgccagtgtatgacaaaggagtaaaattagcatattttgtacactttgtgttgaaattcgtaggaaaacttgtcttctgtaaagacttttgcataggaatttgtttgaccatctctaagcattacacgtgcctgtacttgtccactggattgaaggcagagaaggaagggaggagggaatgattcaaggccaaaatggccacatttagaagatacctcagatgataaccattgttatgtgtgtgcaattttatttaacagtgctgtgtatgtggtggacaagttatatgaaatatctagtctttctagatatttggaagtgcttgatgtatttaaaagtggtagtagaataacactttgtaaatagcttttaaaaactgatgggaaatgctgtt

SEQ ID NO: 3452 - DNA, 1191 bp, Homo sapiens
atcctaggttattgctagccaaaatatttttgtcctgagtagtgtcactgggccaaaagatagatcaggacgacagcctttagttttcctgaaatcaccaggtcaggcacaaggagaaaaggttcctggatactgactaacttgggtgggtggatctagccaggagaaagacagtaacatgtgttctgtactttctgggaagatccctgaagccatcacagaggctccccaacttctgagtcgcccatctgttgctgtgggagtgtgaacggatcgctgaaggagagggagctttgctctctctaggtgggcaagtttcctgggctctctgtgttgcctccctctggcttcttcctcccgtgccctctccccgtgtgccccagggggatcagggatcctcaccctcctgaggcccagtggggaagaatgaacatggcttcatccaggttaactgatgctgccatttgcccagcctcttccatcccagccctgtcagtgagcccaggtctggtgcaactgctgcaggatgcctgtagtagggaactctggaagtgtattgggctgaggtgggattttccctccccacagtgcactgagcaatggagggtggtgagggagccatgctgctgaattctggttggcatttccccattatgtaaaatggggtgttgggtagggcagactctgcttgggtttggttgtaagataaacctggaggagaagcacagttgtcccattgaattatttgagcaaaaactactgtaaataacttttttgtcttttgtcaaataaaatttttttttgtttttttaagcagaaacagggttcttgattgatccaccagggctcagggcccaggcttgaagacaaagcagtcactggcttcttattttgctttacatcttttactctccctctagtagccagctgtgagttctgtgcacgctgtacccccattccctttcaccagctccattctgtatcccattcaactcagggtaaagggggcatttgcatctcacattgggccagtcttccctggaatcaacagttaagctctggggttgctaagtggtgaggatgtaaccttgaggaactggcaactttgtcctccccctctctcggtaagaaacaagcatgactgcagtgtgaacccggcacagagagaagcagctatgagatggaagctcc

SEQ ID NO: 3453 - DNA, 1206 bp, Homo sapiens
tgcggtgactacaatcagctgagattccaaccagatctaaaggattaaagtggcctcacatatcgccactcacctagagcaaatgatacaaaatggggatggctatatcttgtcctgggtgtcatggtaaatgagtcggaaaagctaaacataaagactttgatgagactcctaggttagctgggcttaaccggggcttcatcttctagtccccttggttctctgttacagtaccatctgccagcatgactcggctcgcccgatcacgaacccactcaacctcgagtagcctcggctctggagaaagtcccttcagccggtctgtcaccagcaatcagtcagatggaactcaagaatcctgtgagtcccctgatgtcctggacagacaccagaccatggaggtgtcctgctaagcagatgctcctcccctggaccattgcaagtccatccttcaaatgaccactccataatataacatttcatccagtaaactggcctctactatctttaactcatgcatggccactgaacctctctctagtagcctggatttatcattctctctgcctgcccacccccttttttgtatagcccaagaaccacttccatgccatactgtaacattccaacatctttagctgatcagatctctccatatcctctcttgccagctttttcccgtgctcccccaactatgtatcagataagattctttgatcccgactctgtgtgtgcgagcacgcgtgtctgtgtttgtgtgtgcatagttctgtggttttagacacgctttcttgtagtgcttctgcaaaaaacaaaaaagggacttattttgcattctcaatggtgtttttaagggaattaggcagaacagatttctaggttgggtaggccactgcattctcttttgtttgcaaattggtcaacaaaatttgcaaagtgatttcaggagagagcagctttgaggaatgtggaaaatcataattgccgtctggaccattgattgattgtgaccagtagcagaagggtgcctgttacatagagaggctccttctgtccaaatgaatttctgtatactcttctataaataaaagggaggaatatattctgctggaagcccatgaaccatcgctgaggttctgatacaacatagagttttttccaaggagtgaatgtggtttaattactggactctcttagcacaggaag

SEQ ID NO: 3454 - DNA, 1099 bp, Homo sapiens
tggtggcgcacgcctgtaatttcatctgctccggatgctgagacaggagaatctcttgaacctggagggtggaagttgtagtgagccgagatcatgccactgcactccagcctgggtgacagaacaagactctgtctcaagaaaaaaaaaagaaaaaaaaaagccaggtttggtggtgcacacctgtagtcccagctactctggaggctgaaatgggaggatcacttgagcccaggagtttgaggctgcagtgagctattattgcactactgcattccagcctgggtgacatatcaagacctgtttgggagaaaaaaaaaaaaaagaaaatgcagacagaatgtgggactgggcaccaacaacatctctacaagaggtgaacaagacggtcctggtctttgccctcacgcagcacacggaccagggtggtagaccagagtgtgccctcagtgttatttccactaataacgacgtttcctcctctgtccttcgcagaaccaaatctgtttcttccatgtctgagtttgaaagtttgctcgactgttccccttaccttgctggcggagatgcccggggcaagaagctgcctaacaaccctgcctttggctttgtgagctccgagccaggggatccagagaaagacaccaaggagaagcctgggctctcgtcgagggactgcaaccacctgggtgccctggcctgccaggaccccccagggaggcagatgcagcgcagctacacggctcctgacaagacgggcatccgagtctactatagtcccccggtggcccggcgcctcggagtccctgtggttcatgacaaagagggcaagatcattatcgagcccggcttcctcttcaccacagccaagcccaaagagtcggccgaggctgatgggctggctgagagctcctatggtcggtggctctgcaacttctcacggcagcgcctggacggaggctcagcgggcagcccctcggcggccgggcctggcttcccagcggccctgcatgactttgagatgtcaggcaacatgagtgatgacatgaaggagatcaccaactgtgtgcgccaggccatgcgctccggctcactggag

SEQ ID NO: 3455 - DNA, 1138 bp, Homo sapiens
ggggacctggacagcgcgctgtcagccgaggagctggccgatgccccccactcgcgggagaccgagctgaaggtgcacctgaagctggtggaggaggaagccaacctgctgagccgccgcatcgtggagctggaggtggagaaccgaggcctgcgggctgagatggacgacatgaaggatcatggaggtggctgtgggggtcctgaggcacgcctggccttctccgcgctgggtggcggagagtgcggggagagcttggcagagctgcggcgacacctgcagtttgtcgaagaggaggccgagctgctgcggcgctcctctgccgagctcgaggaccagaacaagctgctgctgaacgagctggccaagttccgctcggagcacgagctggacgtggcgctgtcggaggacagttgttctgtgctcagcgaaccttcacaggaggagctggcggccgccaagctgcagatcggcgagctcagcggcaaggtcaagaagctgcagtacgagaaccgcgtgctcctctccaacctccagcgctgtgacctcgcctcctgccagagtacgcggcccatgctggagacggacgccgaggccggggactctgcccagtgtgtgcctgctcccctgggcgagacacacgagtcccatgcggtccgactctgcagagccagggaggccgaggtgctgcctgggctgagagagcaggccgccctggtcagtaaggccatcgatgtcctggtggctgatgccaatggcttcacggctggcctccggctgtgtctggacaacgagtgtgctgacttccggctgcatgaggcccccgacaacagcgagggccccagggacaccaagctcatccatgccatcctggtgcgcctgagcgtgctgcagcaggagctgaatgccttcacgcggaaggcagatgcagtcctcgggtgctctgtcaaggaacagcaggagtccttctcatcactgccccccttgggctcccaggggctctctaaggagattcttctggcaaaagaccttggctcagactttcaggtaaggtgcctcatgcacagatcctattatttatttttttcctttgttttgttttgtttttcttgagatagggtctctccccgctggccag

SEQ ID NO: 3456 - DNA, 1130 bp, Homo sapiens
tggaggtctgtcattcagcctgccacatccaggtcccccacggtgcttcattcagtcctaggtgtggccagtactccggcctcctagctgctactgtgggcccagtgacctgactcttccttccctccgcaggacgagattgaggagctgcgggccgagatgctggagatgcgggacgtctatatggaggaggacgtgtatcagctgcaggagctgcgacagcagctggaccaggccagcaagacctgccgcatcctgcagtaccggctgcgcaaagccgagcgccgcagtctccgtgccgcccagaccggccaggtggacggcgagcttatccgtggtctggagcaggatgtcaaggtcagcctgggctcgggtgcccttgttgctgggatgggaccacaagtctaagtggggcccaggttggccttgcatctcatttccgtgtgtccatggccaagttctaccacctctctgggcctcagtttcctcatctaagtaggaattcctggtgaacccacagggcttctatcaagggtatcccaaaatgatatcataatatgaatccttcctactagcagcagctactgttttttttttttcctttgagacagagtttctctcttgttgcccaggctggaatgcaatggcgcgatctcagctcactgcaacttctgcctcccgggatcaagcgatttctcttgcctcagcctcccaagtagctgggattacaggcacctgccaccacacccggctaatttttgtatttttagtagagacagggtttcaccatgttggccagcctggtttcgaactcctgacctcaggtgatctgcccaccttggcctcccaaagtgctggggttacaggcatgagccactgcgcctggctgagaagctactgtttattgagtatcaaccaccacctggtgctagcctctaattgtccccgcacagttccatgggggtttctttttcttcttgtttttttagagacaaggtcttgctctgttgcctaggtatcaggcagtgatgtgatcatagctcactgtagcctccacctcctgggctacccccacctcagcttcctgagtagctgggactacaggcacacaccaccacacctggctaatt

SEQ ID NO: 3457 - DNA, 1099 bp, Homo sapiens
caggccctgtgctgggtgtctggacccagtggccacgtagtaggcttctgcatgtagctcttctcttcttggctcccaggagctacagggggaggactctagtctgtcactgggtggaggagaggaggtcaccacagtcagcaaagctcttggctgctccttaccctgagtcccagccgcagcctccttggggctgagcctgtgtccctgggcatactctgtcttgcacatacaaatgcacatatactgttcacagctcaagctcagagacacacagccacttgcacacatctcacagacccatccagtgactcgctggtgttggatgctttcagaagcacgcctccagacagattagagaggatactcactcagagaagtgcacaaacccatgcagccacacaactcccattctatcacacgcacacatcaccaaacagacacaacggaggctcagaccctgctgcaacccccacgtcagaaacacattctcatatacacatcttacacccctagacacacccggatatgtcccagagacagactgacatcctgcagacacactcagacttatcagaagtacacatgtaggcggagacacaaacccacacagacgttatacacacacactagcatccacagaagtctgcacatctacccttgccaggctggcccaggcacaagctcaccacccgggtacctcccctgcctcttctacaaagagagcagcagagacttgcacacctacccgaggcttacagacacccaccaaggggactcccacatgcacatcagcagggacacagcacagtctggcatgcaaacattaggcatgtagcatttgcccacaggagccagaggctctcaaaccagggaacctagacacacgcacacacgtgcgcgcacgcacacacacacacacacacgctgtgacatttcatccacacacagaaacaggaaatcctggtctgtgtctccctggagctaatgtgtacaaactactactgttttcagtggctcactagacttacttctacaaggctgctgggaacactaaggagtgtggccagggccttgactttgtaaccttctggagctg

SEQ ID NO: 3458 - DNA, 1146 bp, Homo sapiens
agagtgacctaagcataagtgaaagacacctcccctcacccttctagccccctacaaggtgccaggttggggtaaagagttggagatgatggccaggagtggcctccaacacgctggtgagaggcctgattaggttttggggaagatctgagagctctggcctcttcgtgagtggaacataaagccgcctcttgttgggagatcctaccccagtgacagaggaatcccccaaactaggctgtgccctggctccgtggcggctccagacccgggtagtgcctttgtcccctgaatactcactcccccggtccagagggccttcccactgcccagcctggagaaggcctcccctgacctgctctctcagtatcctggagagctggccagaggccatcacaggcatcatcctcagagctcctcagacctgggactttgtttttgctggttcagtgcattttgtgtatttaagagcaaacactagccaggcgtggcggcgtgtgcctgtagtcccagctacttgggaggctgaggcaggaggattgctcgaacctgggaggcggaggttgcagtgagcctagatcacgccattgcactccagcctgggtgacagagtgagactccatctccaaaaaaaaaagcacaaacactgcactgcctgtgctgaaattagtgaccacccagtgggctccaggctccgctaggtaacttcgttttcccagcagtggagtgggcaccaccttggtggggcagtgcccctgtgcccagggcacacctcattcccagttctatagcaattcaccaagaacaaagtctgcagttagagccaaagctggtggtggccagagggtgctgaagatacaggccagtggggatgggagccatgagccccgaatgtcttctgctctgatgctccccggactaagcctccctggcacactgggagtgaggggcagcctgagcaagtaggggaactcagaccacaggccagcagatttcccagcagtccatcactggccaccgtgtagccagattctgttccgtccacactggggtgaagagtacttggaatgtctgccatcctgtatgatcaccccaccccctgtccatccatcagtagataataagggttggttacaattcataaga

SEQ ID NO: 3459 - DNA, 1175 bp, Homo sapiens
atacaggaaggccgttttcatattatagcaggcactattggggttacgtagatgtgaaagttaaggccctggcctttgagatatggcatagctcatgggagggatgagatctgaattctgataacaattcaggatgatgtagaaaagtgaattgtacaatgtgcaaaatgctaattaactaataaccaacatttgtgtagcatgttgttgtttacatagtgccttcctgcatgcctcactttggattggcgtgatgagagtaaacgtcttgcaagacagggcatttgagcaaggggttgaagaatggcaagggtttatcagatctggggctgtggggtgatcattggggaagggcttgcagaagagctcaaggtgctttcagtgcaatgggagcggttgtgttttgccagagcacctgaatcctgtcaaaagcaggaggtgatgagcttggaaaggtagcagaggccaaattgcaggctttgaatggtggttgactcactttgcaagacaaaggggcagctgcgttttctcgtgtggtattcaagacttcttttcttctcctggacttcaggctgtttttgtacaagagcgcatactcatttctttctctctttttcaaatgtgactaaatcacacttcccagggacaccaagctgtttctgattgcaactgtaacagcctgtgtaccagctgggatttttgtattaagcagctctatggggctactataccagcagaaaattagaagtcttgctctaaaaagcattttcagcaaatacttgttttgttcttaaagtttttactgcctcaatttgtcagctaatggatcagaagtgattgggactgcctggagcttttttcagttatggtcttagatgtgagtcagagaatattatctattgagtttcacccacttctctgcccctgtgcttttacagactgtccttatttttctaggctgatgtggtcatcaagttccctgaggaagaagctccctcgactgtcttgtcccagaaccttttcactccaaaacaggaaattcaggtatatcccaaagggcctatccactaaacgtgggagaagagagggcaacaaagccctggacagtggctctgctccctttaacttgttttgtgatgttttatagtttgatcctcacaccctgtggattaggc

SEQ ID NO: 3460 - DNA, 1201 bp, Homo sapiens
cagagtggagcctggccaggggtcagccttggaagggcaggaaagtgctggggagcaggcagggcagggccctggagcaccggagtcccacgcagctggcaggagaaacccttcaaaggaatggaggaggcccaactgagaggtgcgggaaagtctggcctccgtgtctggggcccagggagaggctgctgtccagaagccagcactggcctccatggggcaggggagcgaagaatggataggctgcaggtttgtcaaggagcaggtaggcagacttgcggggcactatgaggggcttagggcaggggtcctcagttgcagaggggaaggcagagaaacctccaggcctaatactccctccccagctcatctgtggccaaacaggagggagcctatgagggcgcacagtctcacccccacctccaccacctcatctacctgctgagagggccatggggaagagagagcgtcaggtgggggtgggagtgagattttgcggaaaagattgtgaagacctggggcacattagaggtagggcagggagaggggaggggtggccagacagctgggtctgggagtgggggtgggggtaggaggatggagagtttgatcctggctcagggagtctgtgaagctggtggaaccagtgaacagagcaggggagagaatagtgaacatgtgatgtctggggcttgagctgaagagccgtgatggggggacactgaggtgaggcagtttgttgcagggcctttgaattcccaggagtggacaagcagggagatctcagggagggagagaagcagaagagggaggcgcagctgcagaggcatctgcgctagagcaaggaggaggcaaaggggctggagaagtagccaggagtgaccccacccatgcacacatgcacccacacacatacacacatgcgcacacacacatgcacacgcaggtgcacactcatatgtatacacatatgcacacacgcacacatgtgcacatgcacacacactgtgatttgcagcgtgacataaagtcttaggaagcctccatcagccatcttttagtgcaggcataactgctctgtattctccctggactctgagctcccacaggccatggcctaaggctttgtggcctgtgaccccagcgaatacccagtgggtgctcagtgcaagtctgttaatggatggatgaaaggatggac

SEQ ID NO: 3461 - DNA, 1136 bp, Homo sapiens
cattgtcacctctgtgacccctccttgtcagggtctccttccttcccagaatgttactgactcctcagtccctcttctggtttccctttatttctcttctacccttttccttttttggggagtacctgtccaagacagggctcatttttgcacttatctcgaatttgaagagattgctgacgcccgagagcctcgctttttcatccttctttccttgttcagcaggctagacagaaacatgtcttgactgttagttgtccacaaatcttcagtattttctccacttcatttttaagaaaggaagcaacagatagatgttgctctttcacctgggtgtctgggctcaagctttcccgcccagcctcacttcctttgcccttcctcctgcctttctcaactgtcccaaggagggggcctcattgtgtctcccgtgcatgctctgcagcattgaagtatggtgtgttcacgtagttctagcagtccccagctgagtgagtgggagagtacctgtgtgtttcgtaacggccttgatccccttgatagatgtttggatattttttggtgtgccctgtgtgtgtgtgtgtacaaatacatgtgtatattccttttaaagaagctttatcgaacgtggtctgattttgaggtttagcaatagctagctatatatggtaggtgccgctacagtttttatttagcatggggattgcagagtgaccagcacactggactccgaggtggttcagacaagacagaggggagcagtggccatcatcctcccgccaggagcttcttcgttcctgcgcatatagactgtacattatgaagaatacccaggaagactttgtgactgtcacttgctgctttttctgcgcttcagtaacaagtgttggcaaacgagactttctcctggcccctgcctgctggagatcagcatgcctgtcctttcagtctgatccatccatctctctcttgcctgaggggaaagagagatgggccaggcagagaacagaactggaggcagtccatctagggaatgggactgtgaggccatacttgtgaaacgtctggactgctattctagagcttttatttggtgtgttcgttgcacagctgtttgaaatgtttaataaagcttt

SEQ ID NO: 3462 - DNA, 1182 bp, Homo sapiens
acgctgggctgtttgaaaaaggcaagcttagcctaggctgccatcttaaaatatttcgaggctgtagctgcctcaggatcctttgcctgtggtctggtggccggcagtgccccgctaacagctttaactctgcacttagtgcctgagcacctatggctgtgagagatgctagatacagaaccctgtccttaccacgtgggggcacagcagggagcccttggtcgtcctttggcaaccactgggcggtattgtgaggtctgggccccttgaggacgggctgcagccccaggaggcgatacatgatctctgctgggcagggcccaggcaaagccagcccactgtgtgaaaccgtgccaaagagccctctccccgatcccccaggagaagccccggggagacatcccaggaagcttcccgaattagtgacttggagaggagtagaactttcacgggtgggcagggaggaaagggcatttcacatttgctgttgttaaccatgatccattttcccaaataagtatacattctgttcctgttttttttttttttttctttttttttttttttttttgtctgtctgtctgttctttgtctgtttgtctgttgtgttgacttttctcttcaggatccctgctgccttggtgatcccgggctgacagccagagagcacagcggctcagctcctggagagtgagggttgaagaaagcggagggcagccgcctgcgcccgctggctcccattaggtcggttcctgcagcggtgcccggcagccttggtgaaggccctgcccggcagagatcatgtattgcctccagtggctgctgcccgtcctcctcatccccaagcccctcaaccccgccctgtggttcagccactccatgttcatgggcttctacctgctcagcttcctcctggaacggaagccttgcacaatttgtgccttggttttcctggcagccctgttccttatctgctatagctgctggggaaactgtttcctgtaccactgctccgattccccgcttccagaatcggcgcatgatcccggcgttgtgggcacctaacggcctgccctgttagctttccaaggaagcagaagacgggaggggaggcattgacataggtcataaagcattggagtttcaaatcccgcagcctcgcgggtgtcacattcctgacgg

SEQ ID NO: 3463 - DNA, 1209 bp, Homo sapiens
cggttcacctgaggtcgggagttctagactagcctgactagcatggagaaaccctgtctctactaaaaatacaaaattagctgggcgtggtggcacatgtctgtaatcccagctacttgggagcctgaggcaggagaatcacttgaacccaggaggtggaggttgtggtgagccaagatcacgccattgcactcccgcctgggaaacaagagtgaaactcagtctcaaaaaaaaaaaaaaaaaaaagaaaggaagaaaagaaaattacaaagaacaggggagggagggagggatggactagttaaatgatctccagtacatttatataacaaaatactgtgcaacattttaaaagaataaaacaggatgtaagggcgatctggctgcaatatccatcaccccattgattgccagggttcattcggctgatctggctggctgggcagttgtccccttcctccctctccactccatgtgtgtccctcctgaagctgcacactctgtcgaagaggacgaccatccccaatagaggaagactggtcttcagtcaagggtatataagtagctgagcccccctgctagaacctccaaacaagctctcaaggtccatttgtaggagaacgtagggctccaagcttccaaggctccagacacattcaaatgaggcactacctgtggtagtctgcctttgaaagaataaaaaataaaatagcaatagctatcagaattttaaatgcacataccctttgactcagcaatcctgcttttaggaatttacttgccatgatcaaagatgatgaataaagtgtttgttgatgcattgtttgcattaatgaaagaatggaaacaacctaaaagtccatcaagagagtactggctaaataagtgcctcataaacatgggtagtgtaccacatagcctttcaaaataatgaggtagttctttgtatagctccaagatacattattaaagaaaaagacaagcagcggccgggctctgtggctcatacctgtaatcccagcactttgggaggccgaggtgggtggatcacccaaggtcaggagtttgagaccagcctgaccaacatggcaaaaccccatctctactaaaaatacaaaaattatctgagcatggtggcaggtgcctgtaatcccagctacttgggaggctgaggcaggagaattgctagaacccaggaggcggaggttg

SEQ ID NO: 3464 - DNA, 1277 bp, Homo sapiens
aatagtcagggtagattatggagtgagacaggtctgatgtcattcaggaaggctggagtgtcctggatgacgcggctcataagtaaatgcctacttgtgagatcaactgtcccagtttgcctgagattgagggacttcccagaaagtgggtttttcattgctaaacccagggagatcttgagcaaactgggacaagttggtcagcatgtgtgggatgtaaaaatccatggtgtcagcttgagaggacaggttatggggtaacagtgggagtagggtgaacatggagcagctgccattgatggaactgaggggtactcttaagttcaggctttggagattagggtaaagtcacttattgcaaggcctaggcatggtgccttgtgcctgtattactagcactttgggaggccaaggtgggatgatttcttgaggccaggagatcaaaaccagcctaggcagcagaccccgtctccacaaaaaattagccaggcacggtagcgcactcctgtagtcccagctactcaggaggctgaggcaggaggattgcttaagcccaggaattcgaggattcaatgagttaatgatggcaccactgcagcccagcctgggtgccagagtgagacctgtttttaagagaaagaaaaattgcagcaatgacatgatctaaggatgtgcacgcatgaactgtcatctctgattcacagagggaggaatctacacatgtcccaggggccatggtgaaaaggtgcagttaatctccccacttgaagttaaaaccaccttggctggagttggggcaaaaatcacgctggtaagcctgtcttgatgaatttggcacattaatggtctgccaggcattctttgttttttttttttctcatgttttttgttttttttttttttgagtcagcctcactgttgcccaggctgcagtgtagtggtgtgatcttggctcactgcaacctctgcctcccaggttcaagtgattcttgtgcctcagcctcctaagtagctgggactatgcgcatgtgccgcaacgcccagctaatttttgtatttttagtagagatggggtttcgccatgttggccagctggtctcgaacttctgacctcaagtaaatacccgcctcggccttccaaagtgttgagattacaggtgtgagccaccatgcctggcctaaggggcaggcatttatgtttaaaggcaccataccagcagtcagttccctgcagaagcatccagaagtcacaggtcctttttctgccttggcctttg

SEQ ID NO: 3465 - DNA, 1178 bp, Homo sapiens
aggcggagtctcaccatgttgcttgggctcgttttgaattcctgggctcaagcaatccttccaccttggcttcccaaagtgctgggattatggatagtaagtccaggcctggccgacgtgtggatagtatcacacaatccctgacttcctaatccagtgaattctcaacatttcacccagagttgatcttccatctcattctcttatgagggaagcatttgagtagtggttctcaaactgtggtcccagaaccaggtaccatcagtattacttgggaacttgtaagaagtgcaagttcttagccctgtcccaacctactacatcagaagttttggatctggagccagcaatctggcttaacatggtctccaggtgattcgtattcatgctaaagtttgggaaatcaaaccatgttagaaatctttgggaatcagaagcagctgctgcaattctaggctgcaaatctggtcactgacttgtttccaggtctcttagtttgggcccttcctaagctgctgtcagtgcctcccctctcaactcactcactgccctattttgtccctgtattcgaaagtgatcgtgggctgcctttgccctggtcattgatagtgcagggagaggaatcaatgaaagcgcttccccgtgtttgaagggtccactcctatcccttccaaactctggagctttcgtacatgcctttattctcaccagtgatgttacctcctggtacctggttgtcgtgccagacccctgtttacctcattagggatggcaccaggttcaacaggccggagaagagacctggagccagtgaaggaaacagggtttatctggggaacttgagggcagtcagcagtctagtggtggggggctggatgggggcacctcatccacttgtaaaatgcatgcagattatatagcaccttcccccagtaacctccacatggcaaccctcgtttcctaagaagctattgttacatgcatctaccatacactggtgctgtatggttcattgagtgtcccttgtgcctagcatgggactcagaggctcctgtcaaaggacagtgaagcagggacctgccacactgagtttatgtctctgagctagttttggagccacagtagtggttaccccttcctagagctccccccagaagctctctctgcctccccatcac

SEQ ID NO: 3466 - DNA, 1112 bp, Homo sapiens
ttactgggatctggttatgtagacaccacctgcctagcacgcaccaaaattccagactttcaggaaaacaggtgcctgtgccacattatttgcacggagagactgtgtccagtgaacggttctgatcagtaaactgttgactaggaacatcccgagagccaagttcccagatgccagccaagggccatctgacctgttttgaatctcaatttcctgatacagaaaacaaaggtagggcataattgatttttacagacgtgaccccatgatcctgctctctagtccccagatttttccagggcttttgtcagaggtgtttcccctttgattccccttggtggttaggttttatgggattttacaggacagatggcagctgcaggagtcttgtactgtccctgacttgggtcatcccacaggccctggcaccatcctcctgcccttcctggctctcctgtctgtttctgctcctgcatccgaaagtgatcataggctgcctgtgcctaggtcattgatagtgcagggagaggaacgctgaaagaggttgtccccgtgtttggagggtccaccctatcccatccgaaccctgaagctttcacacaactcctgttgctctcctgccagcccttgaggagtccggcgcttgcttggctgccacatgaaagtcagtgcggggggacatcatgcttaagtctttctcagcttgacctctctttgcagaaaccaggctctgtgttctgaggggtagatcaggaagggaatgtgatatgtaatgagtcatggtgtgtcgcagtggatagcacagtttcgaataagtgcaatattggcatataaacatgagggagactttgaggttggggtgagcagggctgaccccgtgtgtgtgtgtgtgtgtgtgtgtgtgtgtgtgtgtgtatgtgtaacttggggacaggatagggtagcatctttacatctttacatgtcattggcctggaatagggggtcctgaagggtttgtcgtaagaaagagaaagtgctcattgctgcaaggggagcacagccgggttctgagaggcaaaacacttccctcacttcccacccaagagtttcgcctgttctctcgaccctct

SEQ ID NO: 3467 - DNA, 1205 bp, Homo sapiens
cctgcagcactctgatctgcaccccctgaggggcttccactgtccgcggggtgagaatgcccctgggtaagtgccgctgcttctgcgcaccttggggaaggacccttctgtgggacgcagtagaggggacagtcaatgagctcagccagttctgagttctgagaactgtctggcaaagcgggtgcagagcaaagcgtgacttaggagacgggctgcgcttggggtcacatgctagctaagttccttcattcccctgaggttgactttctgtaaagtagggaaactgcaaaggctctctgagggcagaggccttggctgtttttcttgattttgaacccacggtgcctgtccacgtgtagatactcagaactggtgggctgaatgtacagccgaggcatttttaccagaagtctgttttcctgtggactctgggtggggacagatggaatctgcctgtgaagtgatgatggctctcagggtcctgggtacccttctcttccctggggggtgagcctccctctggagatctggcagctaacacgctgacgtgggctcacctgcccttttttgcacctgtattcgaaagtgatcgtgggctgcctgtgccctggtcattgatagtgcagggaaagaaatcgcggaaagtgcttccccgtgtttggagggtccgctcctgtccctttcaaactctggagctttctcacacctccttctcaccatctttcaaatgcctcctggcacttggtgtcttattagtgagtgctccctgtgcaaggctcagtgcagggttccatgaggcgttcaccagggtctatgaggggtgagtccctgcctcaggattggtggtgaaaccacagctgcagcccccactagtcacaccctgtggcaattactggcttgattgtctttgcctctctctattgtgaccttgaggacagtgtcttgagttttgtttaatattttattgtatttttttagagacaggatctcactctgttgtccaggctgaggtgcagtgtgcagtggcgtgatcatagcttgaactcctgtactcaagtgatcctcgcacctcagcctcccaaatagctgggacagacagggtctcgctatgttgcccaggctggtcctgaactcctggcttcaagtgattttccctcagtcttccaaagtgctggaattacaggtgtgagccacttcgcctgtct

SEQ ID NO: 3468 - DNA, 1205 bp, Homo sapiens; identical to SEQ ID NO: 3467

SEQ ID NO: 3469 - DNA, 1211 bp, Homo sapiens
ttgcgccactgcactccagcctgggcgacagagcaagactccgtctcaaaagaaaagaaaaaatagtctggttttgtgtttaagaggtaatgaccttgagatgatttgcagtgggtcagatgtaatgaatgtaacttcctatattttgactttcacaggcctctgtatgatcttggtatagattagcattgtatgaatgacatcagtgatttgtggactggctgcatcacagtcatttggaggaatttttagaaatagtgattccaggattccgccttcactgattttaatgtagaaggtctagagcaggcgaagagaaccttatttttaggagatttcccagatgattttgatatactctgctctctaccctcccccttttatttttcatttgcaagggaatttcttagtttccttcctttaaaagtgagtttttcaagagcagcactattgccatcttgggccagataagttctttgttacgggggctatcctgtgtattttagaacatttagcagcatctttggcctctaccactagatatttgtagtgtgcctcaccagttatgacaaccaaaaatgtctccaaatgttggatgtctgctgaagagcaaaatcacccctagatgagaagcactgttttagaatgaaggactctttgtgaggccagtagaaaccccacgcattacatttagtgcttagtgaagaggagagaactttctggacacttcatttttcctggaattctcttctttggcctaagaaaaggatattttcatactcatttattaattacacctaatgtttattgaattttagtagattttatagcatttatcaagatttatagttaaataattgcatacctatgtaatgtttctcattaaccagacagtaaactctgtgaaggcagggacatagtgtcttttagtaaacatgcctggttcagtaattgttttgccaggaagagagctcagggcttttcttgcattacttcacaaccattattattatctctactttatggattaagaaactgaggcagtggggttaagaaacttgcccaaggctcagccaatccaaatctgtctaactctggagaatgcatttttctctatagtgatatatcctcaaatttattctgagcttggacatgatttgtcagaagcttcaaaactaaccaatttttatgaagatttattttgatatatt

SEQ ID NO: 3470 - DNA, 1127 bp, Homo sapiens
gtgcctggccctgagctccttatctttaaaattgttgtaggacatcaggtggagcttttcagcactctgtgggacatcaggtggagctatgggaggacagaatcaaatggggaggaagaaaagaaaaattcctggagaatgccaccacttgaaagttaggtgacagaagaaaagccaggacgaagattgagcaggagcagtaagagataaaggaagccaaaagggttgatgggagagttaaaagcttgaatggtcagcttaacctaggatgagaattattttttgaaacaaggaaagcttgaaaggataagaaaataggatgtgagggtgatctggctgcgatatctgtcaccccattgattgccagggttgattcggctgatctggctggctaagctggtgtctttctgtcctcaccacttcgtgtgtgtctctcccaaagctgcatgcttggtcgaagaggacgaccatccccaatagaggaggactgatcttccgtcaagagtatacgagtagctgcgctcccctgctagaacctccaaacaagcgctcaaggacatgaaaatagataaggaagtagaatgaagaataaagagggaagttcattttttgaggcaactaagatgatcttttaagatttccagggttgagattagaaaggagactgtggagaagggtgttgggaaagggcaggcagaaggaagctgagaagtaaccacaggattgcctaaatagcacctgggactttctgcactcctgcccccctggagcatatttaacttttctattgctacaaaaaccattccaaacttagcagcataaaacagcaaccattttattgtgctcatgggtttggtgggtgaggaattgagagaggctacagggatctctgcttcaagttgcctggagccactgctgggaagaattaaatagttggggactggaatcagctggagggttttttacttacctgtctggtatctgggctgggaggactcaaggtctgggttcatgggggactcttgacccaggcacccacatatggcctcttggtgtgccttgggctcctcccagtgtggccactggtttccaagagggagcttcccaagagagcagctagagagtga

SEQ ID NO: 3471 - DNA, 1180 bp, Homo sapiens
ctgcttggaggaaggagggaagggcattccagactagggaagcagattgcaagctctgagagggcagactggcgtctgtctggttcactgctgtagccctgcacctggtgcagagttggtgcctggcgaacatttgcggagcgggaaaggagggagagaggagttgggcatttctagagcgcaggaggcagagaagactggttagagaggaagctggagacaccattctcaaacttgacagtgcactggaatcactggcagggtttgttaaagcgtagattgttagacacccccctcctgcagggttcctgatccagcagggctggggtagggccaccggatttgcattgccagcaaattcccaggtgctgctgctgctgctggtccagggatcactgagaaccactgggctagaccacgaaccctgtgaaggcagagaggagccaggagaggtttctgagaaggagagaggggagcacttaggtttgtgatttagaaaactgtgggtgtgcggcacggtggcgcatgcccgtagtcccagctactcggtaggctgaagcaggaggatcacttgggtctgggagatctgggctgtagtgcgctatgctgatcgggtgtcggcactaagtttggcattaatatggtgacctcccgggagcggaggaccatcagggtgcctaaggagggatgaagtggcccaggtcggaaacagagcaggtcaaaactcccctgctgatcagaaaactgtgcatggctgctgaggacaggggtttccacctccgtcccacctctcctgccagggcagtggcacccttagctcaggagggtgcgtcaggacccagttccatcctcacacggtggggaagcctgggctgtgctcccagaacaagaaacagacctgggtgatgagtgacaaatgtggacggttctctgcactgtgggtggaaatagaaacccttagtcagctgtggggttcagcaaagaatttccctggttaacggaaacttgactggctgtgggtgagggggaggttgggttctgagacgtctgggaggcctgggctcttcggttctcgtggtgcccagctcagcgtgatgccttcaggtttgagaccacttcctcctgttgagcctcttctctgggggcactcattatgtatgctgcgtaacaaatcacccca

SEQ ID NO: 3472 - DNA, 1156 bp, Homo sapiens
caagcactctgctgggagaaaggccctttgttcatcccccaaagcaaagcattcaccacgtttttggagaatctcatgtctccaggatccctccagttatttattggtgcatagcaaaccacctcccaacttggtggattaaatcatttccagatgcttctcaactatggtggttccacttacaatttttcaacttcataatggtgtgaaagtaatacacacccagtaaaaaccgtccttcaagtacccattcaaccactctgttttttactttcagcatggtattcaataaattacatgagatattcaacacttgatttatggactttgtgttagatgacttttgcccaacattaggataatatgtgttccgagcacatttaaagtagaagaggctaagctatgatgtagactaggtgtattaaatgcatcttcaacttatgatgtttccaacctacagtggttttattgggatgtagctccatcataagtcaaagagcatctgtatttagttcacaaatgtacatttgctcaggactgcacagggaaggcccatctctgctccttgcagcatcagctgggcagcttgactggggcctagaatatccacttcgaagtggctcactcacaagactgtcatctgagagctcagtcaaggctgagggccagctaagggtttctattcttctccacatgtttctcatcccatgggccactcaacgggctacttagccttccttataacgtggtggctgagttccaagaatgagtgttccaagagacagtaggtggaaactaccagtttcttaaggcctgggcccagaaactaacacagtgtaactttcaccatattctgttgatcaagcaatcacagtactcagatccaaggttaaagtgcacaacctcccatttcaattggagcagtgtcaaagaatttggcaactaggttttaaattcaccctatcctgaataggccttctgtcttccccaaacccctaggacatatatgcaagggcttcttggatattttatcccaaaagtctaagacacttttttcttctaggcctgagagcctgaagactacgtagacaccttacatgagtgttagttaccttttaccatataacaaactcctccaaaacttaaaacagcaatt

SEQ ID NO: 3473 - DNA, 1225 bp, Homo sapiens
gggagggacttctatctcttatctcttctcttcctccacccactttctcctatatcctcccccacttccaggtttctctggcccttccaacagcaagtatcgccaggagcagctccctaatctacatactacagatctatccacaagaagacagatggaaccactcttttcttctgaattctagaaccttaaggaagttaacctgagtggctcagcttggatcaagtgcccatcctggtccaaacaactgtagcagcacatctgtgtatttgtgtatcttgttcctccataatcttgcagtccggggaaagtgtgcagatggatgggtccctgaaaagcaagagttgtttagacaacgctagaggtgttcagttctgggagacaagagttgggccaggttgataactagcctaagagagtcggaatcagatgaataagaactagatcttgggtgacaacctagatcaagagtcttgaggttcagtcatttcaaaaagctcaagtctcattgcttcttggccttctggctaagatcatgtgcagtatctgttcttaccagtttaatatctgatacatcctctatctgaggataatataataaatagatttttggagcaaggagatggaataggagcttgctctgtccactctacacattggcctggattgcagtacctccaggaatggtgcaccctctctaccacccccaaaaagcccaagtctcaagaggtagtctggaaaaaagtgtttttggatttacctacatttttttttccaagatggagtctcgctctgtcacccaggctggagtgcagtggcgccatcttggctcactgtaacctctgcctccaggattcaagcagttctcctgcctcagtctcccaagtagctgggattacaggtgtgtgccaaccatgctcagctaatttttctatttttagtagagacagggtttcaccatgttggccaggcaggtctcaaagtcctgacctcaggtgatctgcctgccttggcctcccgaagtgctaagattacaggcgtgagccactgcgcccggcctaatttttgtaattttagtagagacgagttttcaccatgttgaccaggctggtctcgaactcctgacctcaggtgatccacccccgccctcggcctcccaaagtgctggcactacaggcatgagccaccgctcctggccgggtttgcctacattttggagatgctg

SEQ ID NO: 3474 - DNA, 1149 bp, Homo sapiens
ttcaggtcacttaccagctagctgtgtgagaaaatcagtaaattacctaacgtctctgcctcagtttcatctgtacgtttttcacttgtacatctgcagaagcacctactttagagatcactgccaagattaaatgagttgatcacataaaacctttagaacatgcttggtgcactattaatttgcatcctcactagacagatgtgaaagagaagatggaacatctgaccctgggcctcagatatgggccattgctgagtcaccctaatcccccccttatttctcctttgtttgcaggtgcaagaagtggggtgtcccaattgagaagatttacaacaaaacccagcgggagaagtttgcctgggccattgacatggctgatgaagactatgagttttagccagtctcaagaggcagagttctgtgaagaggaacagtgtggtttgggaaagatggataaactgagcctcacttgccctcgtgcctgggggagagaggcagcaagtcttaacaaaccaacatctttgcgaaaagataaacctggagatattataagggagagctgagccagttgtcctatggacaacttatttaaaaatatttcagatatcaaaattctagctgtatgatttgttttgaattttgtttttattttcaagagggcaagtggatgggaatttgtcagcgttctaccaggcaaattcactgtttcactgaaatgtttggattctcttagctactgtatgcaaagtccgattatattggtgcgtttttacagttagggttttgcaataacttctatattttaatagaaataaattcctaaactcccttccctctctcccatttcaggaatttaaaattaagtagaacaaaaaacccagcgcacctgttagagtcgtcactctctattgtcatggggatcaattttcattaaacttgaagcagtcgtggctttggcagtgttttggttcagacacctgttcacagaaaaagcatgatgggaaaatatttcctgacttgagtgttcctttttaaatgtgaatttttatttctttttaattattttaaaatatttaaacctttttcttgatcttaaagatcgtgtagattggggttggggagggatgaagggcgagtgaatctaag

SEQ ID NO: 3475 - DNA, 1136 bp, Homo sapiens
ctgcagggcatgtctacgggcacctcaatctcagcgtctctagaactgagctcagtacccaccaccccaagcctgttgggcctgggcttcacatctcagggaaaggcaccagatcctctgtcccccaacccagaaactagggtagccaccatccttcactcctctcgtttccacacccagtaaattactccaaaatcatctcctcaataccataaaatttattttctgaaaaaattttactccttagaaattcttcaaataatgagacactatcaacttgttttgaaccaaaaagcactttttagagaaaacacattaccctgaaatgacctcagtcaggccagttttggatgcttataagtagtcccctgacaaaaatcagtaaacaaggagacaaagaaatttaacacagacttagtaattttcacaatcccaagaattccattcagacaagcctcttagaaatcactaaatagcaaagacttttttagattttataattgtactgtgtgtgtgtgtgtgtgtgtgtgtgtgtgtgtgtgtatacacacacaattttttttttttttttttgagacggagtctagctctgtcacccaggctggagtgcagtggcgaaatcctggctcactgcaacctctgccgcctgggttcaaaccattctcctgtctcagcctcctgccaccacgcccagctaatttttgtatttttcgtagagatggggtttcaccatgttggccaggctggtctcgaactcctgacctcatgatcttcccgcctcagcctcccaaagtgctgggattacaggcgtgagccaccgtgtctggcccacacaaatgtttttaaaggagtcttttaggccaggagcagttagctcatgcctgtaatcccagcagtttgggagaccaaggcagaaagatcacttgagcctcggagcccaaggctgcagtgagctatgactgtaactgcattccagcttaggtgacagtgagattctatctatacacacacacaccacacagtcttttagaaaaattgagatagtaatggataataagagttgaggtttgggtcaaaataatatgggaggggttagtgggtagaatttggcatgaaacaaaagtggccaccaattc

SEQ ID NO: 3476 - DNA, 1093 bp, Homo sapiens
acatcacgctccaggccccgccccaccggccgcccatatagcgaaagcctggcgcgcgcgcgcgccattgtgtggctggactcggccgcccctgtggtgtgaggcgcgtgttcgggctcttgccgtccccgcacccgcaccgcggttactggcttgcggtccgccgttcgacaaccagcccttgggtccccgcccgccacggacatgccgcgcgtctacataggacgcctgagctacaacgtccgggagaaggacatccagcgctttttcagtggctatggccgcctcctcgaagtagacctcaaaaatgggtgagtcgggcctgggcgcccgcgcccagcgtcccaggcctggtggcggcgggaactctccaaggaaagaagcggccaaggccgcggcgccgcgtggcagggcctcaaagatggcgacggcgcggcgtcgcgggggcgcgcggtggggtacgggcgcgcgcacgtgcgcgtcctggctaacgactcccccgcggttgtccggccctcgcaccgcccctaggtacggcttcgtggagttcgaggactcccgcgacgccgacgacgccgtttacgagctgaacggcaaggagctctgcggcgagcgcgtgatcgtagagcacgcccggggcccgcgtcgcgatcgcgacggctacagctacggaagccgcagtgagtcccacccccgcgcgctccgcgcccttggggaccctgggggcgggggtgggtggggtggggcctcccagcccgggcaggcgcgagggccgggggtcgtttgacttgggtgtccccgagccccgctgccttcacgtctgcccggggcagccatgggacgccggagcgcggggattgggtttgggtgtttggttttgtttatttgccaagttgggaggtgggtggcttcttctggccccttgtcagcactgtcacgggttcttcccacagaggaagtaaggggtggctgtatttgttgtattctccttacttacctatcagtgcattagttagaggttcgggggcaggctcgggtggaggtggggtagggggcgcgggggacggggaaggggaggagcataaagtatagg

SEQ ID NO: 3477 - DNA, 1147 bp, Homo sapiens
ctgaagttcagtcgtttcattttgcctaaatgaatatgagagatatcttccatttttccatcccaattccctatccgcctgtctgagcctcaggaaactagcctcatgacttcctccacacacttccctgccctctggtttctgagtgggacgtggagagagggaggagatggaagttggggtctttattcccacagcaccccacccctacccccgcagacttaactaaggctggcagtggccttcaaccaaaggccatagtgtctggtgtacacagccctcttgttccaagtcccggtaaccactgcctccccttgtcctagcccctccgtcttacgctaaccattgtaatttttctacatcctgcccacaccattataaataagttaatgatttattgtgtcgtcttcaaattactgaagtggggagtgtgccttctgtttcctgttgtgacgctgcagataatagcaagtaagttaaacagtaagtaaatatttcctatttcagaggaatataaaacatcacacttagtgcttgcttcagcagcatatatactaaaattggaacgatacagagaagattagcatgacccctgcgcaaggatggcacgcaaatttgtgaagcattccatattttaattaaaaattatttaaaaaataaagaataaatatcgggggtagatatgcaggcaggacggggcaaagctctgaggggtagggtatgcaggtcagcattatctagttgcaatggttatgttgggtaatgggccacctggtggtctagctggaggcaacaaggctgtaaatcaattgttcattctttcctgagatgggacactctcaaccttggtttgatattctggatctcctaaggccagttcctggaattatttaaataaaaggcatggttaaacattaagagagcacagaagaacaatatagaatggctggactaggtgtggtggctcacacctgtaatcactttgggaggctaaggcaagaggatcacttgagcctaggagttcgagaccagccggggcaacgtagtgagaccctgtctctacaaaagaattaaaaattaggcaggtgtggtggcgtgcacctgtagtcctgtaggtctaaaactggcctgtttggagatttggtta

SEQ ID NO: 3478 - DNA, 1132 bp, Homo sapiens
ccaattttttttttttttttttttgagatggagtctcgctctgttgcccaggctagagtgcagtggtgccatctcggctgactgcaacctctgcctcccaggttcaagcaattctcctacctcagcctcctgactaggtgggattacaggcacataccacatagcctggctattttttgtatttttagtagagacggggtttcaccatgttgccaggctggactggaactcctgacctcaggtgatccgcccacctcggcctcccaaagtgctgggtttataggcgtgagccatcgagtccggcctgaccaaggaatttaaagcagcagcacacccctcaccccatcccaccactatctgtctcattactattatatatttctttctttctcatccttcattataatcaatagtgatcttcaattatttatttctgtgtttgatcagtcatctccacataaatgctgaccgtctgtcttattcattgctgtatccccaacacttagtacctggcacatagtaggtgcttaataagtccttgtgttggatttcagtaacttgaacttgttaataaaaaacagtgtatggggccggcttggtgccatgtgcctgtaatcccagctactggggaggctgaggcaggagaatcgcttgaacccgggaggtggagggtagaggttgcagtgagccgagatcgtcccactgtactccagcctgggagacagagcaagactccatctcaaaaaccaaaaaccaaaaccaaaacaaaaaaacactgtatgggcccaatgcagtggctcacacctgtaatcccagtactctggaggctgaggtgggaggactgcttgagcccaagagttcaagaccagcctaggcaacacagggagactctgtctctataaaaaattaaaaaataaaaataagccaggtgttgcagtatatgcctgtagtcccaactactccagaggctgaggcaggaggattgcttgagcccgggaggtcaaggctgcagtgagccatgatctcaccactgtactccggtctaggtgacagagcgagaccctgtctctaaagaaaaaaaaaaaattagctgggcgcagtggctcacgcctctaatcccagcactttggga

SEQ ID NO: 3479 - DNA, 1137 bp, Homo sapiens
ttgagttgaagcactcctaggccctggggactatgggggcgtggcttggagtgaggcactctgggactgggcctgtgggtgtctgggggcgtggcttagactggggcaccctgagtgggcctgtgttagtttgggggcgtggcttagagtggggtaccgtgggactgggcctgtgggagcctgggggcgtggcttagagtggggcaccctgggactggaccccgcaggtgcttgggggcgtagcctggagtgagggtttggctggtgtagcttggagtgaggccccctggcgtggagtcttgaggcctgctgagggcgtgagctggcatgaggcgaagagagggccatggcaccgactccgagatgggtcaaggacccgtacgggagtcgcaatcctcagaccctcccgcgctccagttccggataagcgagtataagccgctgaacatggcgggagtggagcagcccccgagccccgagctgcggcaggaaggcgtgaccgaatacgaagatggcggggccccggcgggagatggcgaggcgggcccccaacaggcgggtaggagccccgctccccaggccctgagctgggccctgtgcgggtggggcgaggcctgagccccagaaggttcgggggcggggcccggggtggtcctggggtggagaaggctggaggaggccatccgatgcggagatggaccgaggcggaggcagggcctgagggggcgtgggcggagcctgagtgtggctgcgatggggagggaggcctgaggcccatttggcccccgcagaggaccacccccagaatcctccagaagatcccaatcaggaccccccagaggatgatagcacctgtcagtgccaggcgtgcgggcctcaccaagccgcgggtccagatcttggttcctctaatgatggctgccctcagctgttccaggagcggtaaggggaggaggtcgcagccctacttgctctaccttcagcccccaaagcctcattcctgttcaggggttaggagaggggctgggtggtgcagggcgggtggttctttccctaaggctggcccttcctcaggtcagtcatagtggagaactcctcaggctctaccagcgcttctgagctcctcaaacccatgaa

SEQ ID NO: 3480 - DNA, 1150 bp, Homo sapiens
attcctgtaatcccagctacatgagaggctgaggcaggagaatcgcttgaacctgggaggcggagcttgctgtgtgccaagatcgcgccatctcactccagcctgggcaacaagagcaaaactccatctcaaaaaaaaaaaaagaaagaaaataggaattcatttaaaataaaagtgtttattattctagttcatggaatggataaagaatgataaatgtaaggcccagaatacaaatgacaagtattggtgagaatgggaagttattggaacccttccacactgatggtgggaatgtaaaatgatgcagtcaccatgaaaaacagtatggtagttcctcaaaaatttaagcataaaattgccatatgatggctctgtgtggtggcccacgcctgtaatcccagcactttgggaggctgagaagggtggatcacttgaggtcaggagttcgagactagcctggccaacatggtgaaacctcatctctactaaaaatacaaaaattagccgggcgtgatggtgtgcgcctgtaatcccaactacttgggaggctgaggcaggagaatcacttgaacctgggaggcggagttgcagcgagcagagatcgggccactgcactccagcgttggcaacagagtgagactctttcaaaaaaaaaaaaaaaaaaaaactgccatatgatctagcaattccacttctgggtatatgcccaaaagaatggaaaaccagatctcagagatagttgcacacctatcttcctagcagcgctattcacaatagccaaaaggtggaaatagcccaagtatccatcggcagatgagtagataagatatggtatatacatacaatggaatattattcaatcttaaataggaaggtaattctgatacatgctacacatggatgaatcttgaggacattatgccaaacgaaaataaggcagacacaaaaagacaaatactgtatgatttcacttatgcaagcatgaggtacgtagagtagtcgaattcgtagagacagaaaatagaagggtggtggttgccagggcctgggggaggtggggaatggagcgttgctgcttaataggtatagagtttcagttttgcaagatgaaaacagttctgcagattgattgcctaacagtgtgagt

SEQ ID NO: 3481 - DNA, 1235 bp, Homo sapiens
aaccacaacctctacctcctgggttcaagcgattctccttcctcagactcccaagtagctgggattacaggcatgtgccaccatgcctggctaattttgtatttttagtagagacagggtttctctgtgttggtcaggctggtctcgaactcccgatctcaggtgatctgctcgcctaggccgcccagagtgctgggatcacaggtgtggtgagccaccgcactcggcaatttttttttttttttaattaaaaaaaattttgttttttacctgaacctgacagtagctggtgccattttataatttttgccatagcctgaatgattcagttgcttatttcacagagcttcgtggaaatgctctgtaaattattagggctagagacttgtgagacttcatcttggaactgaaagagaccttagagttcatctagtggaagattcatttacaggagcaggaacttggcttagggaggttagtgatgtgcctgatggcaccccacccacagagctggggttcaaaggccccctgctgccccctgcaggacagacaatgctgtgaagaatcactggaactctaccatcaaaaggaaggtggacacaggaggcttcttgagcgagtccaaagactgcaagcccccagtgtacttgctgctggagctcgaggacaaggacggcctccagagtgcccagcccacggaaggccaggtgagacagctgctcagcctttggcttggtttgatttcacattcatctgacaccatctcattgaacaccttgtccacagctattggtcagtttctgccacagagtctaaaagtgggctctgtgcttctggggccttgtgagacttctgcacataactggcacttgtctgcctgcagatgaaggatagcagagcaagctgattatataaaactgtgaattagttaaggagatcctcagcctccatctctccttgctggtggccaccttcttacctgttgctcattttaattttttaaaactgaaagcatgtttgcaataaaaaaatcagaggtggctgggtgcgttggttcacacctgtaatcccagcaagttgagaggctgaagcgggcggattgctcaagcccaggagttggaggccagttcaggcaacatggtgaaaccttgtctctatctttttaattaaaaaaaattaaaaaatgtattgagttgtaatttacgtactctaataaacagttttgagttatgaca

SEQ ID NO: 3482 - DNA, 1199 bp, Homo sapiens
gccatggacctcccagccatcatggtgtccaacatgctagcacaggacagccacctgctgtcgggccagctgcccacggtgagtccctatcgcctgctgcagttcctgctgatgacagcagggagggggttgagagggaagcagaagaatgttgatgctttgataagaactctctgctcatgggcagggtctgggtttacctggttgcttggagttggtaatcccatgctgggattacctggtagcatgggagtctgtgggacacggtgggtgggcatggagagaaatctaatatcagcacactgcttccttctggagctctgcgtacagtatctcggtattggtttgcattatttgttaatagtataatctcatttttattttttaacagttttattgaggtataatttatattccatacaattcacccatttaaagtatactacttaatgacttttcatatattgacagagttgtgtgaccattaacacgattgattttagaacatttcatcaccccataaagaaacactagctaggcacagtgttgtgtacctataatctcagctacttgggaggctaaatgggaggatcgcttgagcccaggagtcctgggctgtagtgccctatgcaaatcagttggctgcactagctttggcatcagtatggtgacctcctgggagaggggaaccactaggttgcttaaggaggggtaaactggccacggtcggaaacagagcaggtcaaaactcccatgctaaccagtagtgggattgtgcctgtgaaaaggcactgcactccgggcatcatggcaagaccctatcacgaaaagaaaagaaaaatgctctgttgccgggcatggtggctcacgcctataaccccagcactttgggagactgaggcaggaggatcacttgagtctaggagttcaagaccagccttggcaacatagcaagaccccgtctctacaaaacaaattagccaggtgtggtggcatgtacctgtagtcctagctacttaggaggctgaggtgggaggatcactcaagcccgggaggtcaaggctgtggtgacagagtgagaccctttctcaaaaaaacaacaggaagaaacatcatatttttggccatcactcccaatccaccccctgaaatcttcagccctaggcaaccactaattgactttctgtctctataaattt

SEQ ID NO: 3483 - DNA, 1207 bp, Homo sapiens
cctcagcaagggtgcaaagggggaagaactaggggctccattgttcttcaggcgacaggagaccgttgctccagtgcatgtctgctgggacaaggattcctggcctcgaagccctgggctgcacagccctactgggctccacctctataaaccagtgacttctctgggcctgggtctgggggagagggttgccagggagactcagctctccttgggggctggcccagctgactgagggtacacaggattgggtctagaccttgatgcctgggtggagggcccttgtaaggggccatagcctcttcaggaccaactggagggagagttaggaaacaccagctcctgcctggggcagtgagggaatgggagcagctgtgggcgcctcatttcaggcaagtcctccccaaaccttcagatgcagtgagacctggccttcctgttgtgcttttcagactttgttttcagaatgcttttatctcgagtgtgcccttcggccctcacaagagcccctggggagtaggtggtggcctgtgccgtcatccccatttcaaagcagggagctgaggtcctgggaggggaaagtgcttgcctgaggtcccactgtgttagtgggtgggcaggactggaactcggttctccaacagcccagagctcactcttttacacccagaggtggagcaggtggcttagggggtggttatgtacttcacaagccaattcccttcagccaggagctcctgggtgcatttccgtgtcagaaacagtaccgagtcccaccccctctggaggcacagctgttgcgtcaggcaaggtcacctgcatttatttattgagcagcagtgctgtgtcaggcccagggaccgagcccctctccctgttcccctatggtgtctccgaggccctctgggagggccccacatctggagcagcacctcagagtggacagaaagcattagcgtccacgagctcacccgacgccgagcctgtgaggtgggctgatggtgcccgtctaacccagcgcttcagggaggtcagaatggagccgaacccagggctgtgagcatcacctctggagccctttcactttatgactgcttcctggacgggtggtgggaaggcaggagcctgggtccttaggctgggggcctctctccatccacccacctttccctcattccctctcttggagcagcagccgcccaggcct

SEQ ID NO: 3484 - DNA, 1094 bp, Homo sapiens
gaatcctgaaatggaaattctttgtggcagataactggcttatgacaccttgaaaagttcaagtgctcatataacacaccacactgaaccccctttcctacagcaatatgttcactatgttaccaatttgcaacttgtgcttcaatagtggaatctactttcattgttaacactgagctaaagaaaaaaagccgtgtgttttatgaatgaccttatctgtttcctggataatacctttaagaataatgtcctgagtcaggcgtggtggtgcgtgcatctagtcccaactatttgggaggctgaggcaggaggatcgcttgagcccaggagtttaaagctgcagtgccctgtggttgcacctgtgaataactgcactccagcctgggcaacatagcgagacctcatctccaaaaaagaaaacaaaaaacaaaaaaaggaatgatgttctgtagagatggcctttcacttgaggagtactcagttttcaggttcttcctagctcggggcttttaaattttgaaatctaaacattctttcccaccatcctttttgactgttgaccttggttttctcttctaagtttctgtccctctgcttccttactttttttcctttttgaattctatctttatctgtcttttgttcactttttaatgctatatatgggcaggggtgagagacattactgagcaccttggtgagcaagcctggctttaaagattggagaagagcttctggcaccagaaccctgtcttcctccagttctcaacacggtgttgctcttcagtcataccggaatctgaatcaaaaaagtatttttaaatatccatgatttctccctgtattgaggctagccctgatcatgctttttgtgcctgtcaccaggtctcccaagtgcactcatccaggtcagtgctcagatgtgtttaaggagaccctatattcagggaagttgcgtgaacactgcagtggggagaattgagaatagtcaggcctatcagtctcacagaatcacccctctacctttgatattccacttagctgtagagtccatctgtttgtccatctgctgaaatgagaaaagaaaaatttat

SEQ ID NO: 3485 - DNA, 1189 bp, Homo sapiens
ggcctcaagtcctctcttctgagtcctttcttccccttggtggtggtagtggggatatttttcatgaattaccacttggaggacctggcttgatttattatacagggagccgatagttttcctaacacaagtggtcagaggtacagcagttctgcttggccgaactgttgaaggagactgttctcagagctcctccctctgtgatctttttgaggaagcgaggagaggtgtgaaagtgcttttaaactgtcaactggggttcctgtgggaggagttacccctcaatgacggtccataataagctcatgaaggggcatttggagcagccacgacactcagtgcacccttgtgtggggcagccctgccctgggccagaccctttgcaagaagtccacttggaggttgggcatggtgatgtgcgcctgtaatcccagctgctcaggaggctgaggcgggaggatcccttgaacccaggcgcttgagaccagcctggcaacttagtgagactctgtttcaggaaaaaaaaaaaaagtgtatttggctgttctgaagcaggccatcatcacccttcacctcacccacaggtggctctcgggggctggtccatgggcggctgtggcgtcaggatggagtcctagctgtgacctgtgcccaggagggcgtgatccgagtgaagccccaggtctcagagagcaagctgtagccagaggtaccagcttcgcctggggcttcaagaacctcccatctatccccattcctgagacaggagttacagtcccttttggccctcacatccaataaagagactgataccactggagtggctggcttttaattcccctgggccagacctgcagccttgccttcatcccttaactccaggactccaggggcagagtccctggccttcagccaagaggccttgccagcttgggggcccaccaacaagggaacattgccccaacctgtgccacagccccccggctgtttataggctggagaggctgtgtcagacttccctgtactacacaagggcaaccccagccaaagctcaccctgagcctagctcaacagaagtttccttgatctgcttcacattctcttttggaacttctaggggctcccagcaccctctgcagcctcccagctattctgttctcatcaggtccttcccctgccttctggggca

SEQ ID NO: 3486 - DNA, 1193 bp, Homo sapiens
ctcacacctgtaatcccagtgctttgggaggctgaggtgggtggatcacgaggtcaggagttcaagaccagcctggccaacatgatgaaacccccatctctactaaaactacaaaaattaaccaggcgtggtggcgggcacctgtaatcccagctactcgggaggctaagccaggagaatcgctggaacccaggaggcggaggttacagtgagtcgagatcttgccactgcactccagactgggcaacagggcaaaactccgtctcaagaaaaaaaaaaaaaaaaagaaaaggccaagcgtggtggctgtaatcctagcactttgggaggctaaggcaggcagatcacgaggtcaggagtttgagaccagcctgaccaacatggtaaaaccctgtctctactaaaaatacaaaaattagccgggcacggtagcatgcctgtagtcccagctactcgggaggctgaggcaggagaatcgcttgaacccgggaggcggaggttgcagtgagccaagaccgtgccagtgcattccaacctgggtgacagagggagactccgtctcaaaaaaaaaaaagccttccttggtttcctgccaatttcctgtcatgtttctttgtcccgaattgggccaatatccatgcccattcctaatacaattaccttaattgacttagattagccctgaagcatgtagtgatgtgggggaggaatgacaactgaagaaaatagaaaagaagggacaaaggttgttgagttggcaaccaacaattcctgttatagctttttaaattaattcactttaagtggtactgattattcatattgttatttccatgtatagagagagaagaaattggaggcttagaggaagtgaagtgacttgtccaaggtcacatagctaagtggaatttattttttttttttttacttttctgagacaaagtctcactctgtcgcccaggctggagtgcagtggcgtgatcttgactcactgcaacctctgcctcctgggttcaagtgattcttctgcctcagccacccgagtagctgagattacaggtgtgcaccagcatgcccggctaattttttgtatttttagtagagatggagtttctccatgttggccaggctggtcatgaactcttggcctcaagtgatccacctaccttggcctcccaaaatgctaggattac

SEQ ID NO: 3487 - DNA, 1151 bp, Homo sapiens
caaggtcaggagtttgagaccagcctggccaacatagtgaaacatcgtctctactaaaaatacaaaaaaattagctgggtgtggtggtgcatgcctatagtcccagctactcagaaggctgaggcaggagaatcgcttgaacctgggaggcagaggttcgatgagccgagatcagaccactgcactccagcctgggcaacagagcgagactccgtctcaagaaaaaaaaaaaaaaaaagaatagcacacatggaaaagtgcacaaaacataaatgtaaaacctaatgatttatcaaaaagtgagcctgggttagcatcacccatgccatggtactgaacagtcaagcagaagacctctgcagggtaattggtgttccaactacttttgtgataatcgcttccttgcttttggagttgtaccacctgagaatgtgtccctaaacactgtagtttcgttttgtctgttccttgaactttatgtaaattgaattatacagtattattttgtgtctgccttcttttgcacaagaatacacttgcaaaactcctttatgttgtttcatatagctgtggtgagttcattttcattgctgtttttttgttttccactgtatgtttatctactctattgttaagggatataagtgaagcctcccacctgccatacctctcaatttcttttctaaaaattatttttatttttatttatttttttagacagagtctcgctctgtcgcccaggctggagtgcagtagcgcgatctcagcttgctgcaacctctgcctcctgggttcaagtgattcttctgcctcagcctcccaagtagctgggattacaggcacccgccacaacacctggctaatttttgtattttcagtagagacagggtttctgcatgttggccaggctggtctcgaactcctgacctcaagtgatctgcccgcctcggcctcccaaagtgctgggattacaggcatcagccaccgtgcctggctttatttatttgtttattgagtctggctctgtcacatgggctggagtgccatggcacaatatcagctcactgcagcctccgcctcccaagttccagcaattctcctgcctcagcctcccaggtagctgggattacaggcacacgccaccacgcctg

SEQ ID NO: 3488 - DNA, 1193 bp, Homo sapiens
ccccagtgaaggaatgtggcatgccacgtgctaggccaattctattaattcttgcagtaaaacagatttattgtgttaaaaacttaattataggctgggcacagtgactcatggctgtaatcccagcacttcgggaggctgaggcgggtggatcccttgaggccaggagttccagaccagcctggccaacatggtaaaaccctgtctctagtaaaaatataaaaaatagccgggtgtgatagcaggagcctgaagttctagctatttgggaggctgaggcaggagaatcgcttgaatccaggaggcagaggttgcagtgagccgagattgcacaactgcactccagcctgggtgacagagcgagactccatctcaaaaaaacaaaagcaaagaaaacttatttcttaaaacaatttctaatatttattgagcacttgctcggcgccaattgacatagatcgacgacattgatcctcactcccttatcattcccggatgaggaaaaggattcccagctgcatgcctactccatccctatgcggcgtgtcagtttcagcacttttgacgtttggggccagataactctttcttgtggggggccgctctgtgcatggcagcagatttagcagcgttttggtctctagctcctagatgccagtagcaaccccccactctcctaaaatgtctggatgcaatgcccagtgtgccctggagagaagaattgctcatagctgagaatcagtggttcagaggataaccccaaagccctagaggttaatggggaaatagaaaataaaaccactctaatagcaaacagtaacagagtacttactgcatgccaggcactgttcagatgattgatttaatcctcacggcagcctgatgagatgtagctactgttattgtccctttgtatcatattattagtgtctctctttgctgctgccaggaagagggaggcagaggtgccagtaactggcccagggttacacagcagggcaacagctgagccggggcttgaatccacagtgtctggcttctaatctgtgcttgaatccaggcctctttacttctggagtctttcccactatattacattaacagtaatgcaggcaggtcctggcaccagagctgcctagcttacttggattcaccagccgagtggtatgtgagtttcaacacactgaagcctt

SEQ ID NO: 3489 - DNA, 1565 bp, Homo sapiens
ccacttaaacatatttttggattccattcttcctgtgtgttggggcgcttaaatttccaagtggagggatgatttattgacatattttggaaagccaaatgtgtttttctgttgaactagccactcaaaccagtgcccgactacataactaatatttttgctagagtccaggagtgaggcgtttacaaagtctgggcttcatgggaacacatgtgaagcttattgttccagattgttcttttgtcaggtaacttgtggtaacttgtgttaaaatgcaatctcttggtacttgttcacttcccaactcagtaaatgccaactacttcctcaactcttccagccacactggcttctatcatgggcctgtactcagagtgtaagcactgaagacaggggtgtttggtttggctaccaagttattgccagctacaggatacaacacagaagtgctcaaacaccgaatgcaaatttgcaaatatgaagcataccaaccaaatcttactcctcatggctttcaaatcttactcctcactcaagaacttcctgctggcatatatgatgacttagcttttttccccgacagatcgactatgttgatctaacttttctaagccagtttctgtctgatatgccagcttgagcagctcctttgtcccagctcccctgggcatctagctgatgggagctcatttttctgttttttcatttcaggtttattgttggccaaaaccaggctttgattgaaccaggatgaatgcgggtgttggaagtagaatatatatatacatataaaattggtaagtggtgccaacacgtcttccctggctgagtagacacaggctctggagggggtagtagctgcttttcagtgtgggtttgtcaccctacttcttgtacgactcaaatgtggcctttgcagctgatgatacagcttctttccccatcagatcgaccctgttgatctctacactattggccagttttgtctgatgcattggccccagtaataactcctatctttgttttctgcttatctttatcagagactattgcttgttcatgggaactgggctttctctattttttccagcattcagatggcttcttttgacctgttaactttctataggttgggagccacgtgtaccagtgtgtgttgatcttggcttgattcagtctgccttgtaacaggtgaggtttctgctttctatctgccaaaccccaccgcaaaatttgtccaactgggcctaacctcaggacccatttccaagttgggtataaaactgggagaataagtcattaggactgacattggcctgttggtattactaggtctttgttggaaataagagcttggagttccaaagaaaacgagcacttgaacaaaagatttctcagcaaggcaaatttacttctgccgtagggtgctgctgctggcattcctggcaagagcacacctaacaaaagagagaaagggtttttattcctaacaagtagtccctgcttctgtgtcctatccccattggctggagtcgacagcgcaatctaaactagtcctgattggc

SEQ ID NO: 3490 - DNA, 1565 bp, Homo sapiens; identical to SEQ ID NO: 3489

SEQ ID NO: 3491 - DNA, 1565 bp, Homo sapiens; identical to SEQ ID NO: 3489

SEQ ID NO: 3492 - DNA, 1190 bp, Homo sapiens
aggggctagcggctgtcgccatgacaaccggacagcctacagcttcctgcgtcaccagggacgcaggtttgctcttggctgggaagcagtggggacaatggagtgggggctgggaaatggggggaccctaaacactcagtcttggggggaggcagttctcatttctggttttttttttttttttgagatggagtctcgctctgtcgcccaagctggagtgcagtggtgcgatctcgactcactgcaacctctgcctcccgggttcaagtgattctcctgcctcagcctcctgagtagctgggattacaggcgtgtgctaccatgcccggctaatttttgtagttgtagtagagatggggtttcaccatgttgcccaggctggtctggaactcttgacctcaagtgatctgactaactcagcctcccaaagtgctgggattacaggtattagccaccatgcccggctgggagttctcatttctgagagttgcttgaaggctgggagggcctggtgatgctacctaagtgtgtgtgtgtgtgtgtgtgtgtgtgtgtgtgtgtgtgtgtgtgtagtgtctgggctgtgtggagccaagctgcctgggtctgaatctcagctttgcctcttctgtgccgtggcattttgggcaagtgagttaatctctcggtgccttagttccctctaatgtaaaataaggtggacagtagtacctcataggactgttatgaggattaaatgagataatagtctcacggcacttacaatgcaccttgcattgtgccttaattcttgacatcaatctacatctgactctaggttgtcttcttgctggggtagtgggaaatttggtctcaatcatcctcagggatccctacttccctggcttttgtcattcattcaacaaatacttattgagcacctactgcatgccacgtattgttctagaggctgagaccacagcagtgaacaaagcaaacaaaaatccctggcagagtagagctaacattctagtagggatagatagacattaaatatgacaaaaaggaaaatagatattatatcagatgacaataagaagaaaaagaaagcagggctggaggattccaactgcaggggagctgttgcaattttagaaaaattgatgcatggggatgtgagtgtgtcagggaaggcctcactgagagagtaa

SEQ ID NO: 3493 - DNA, 1177 bp, Homo sapiens
ctctccattgtaaatgcacgtttccccctttgcagttatgtgatctgtgggaagaatttgtttttgattttctttccaaagtgtagccttacaagatttgttttttgtttgttttttttctggtttgttttcttttttaaatccaagcctttgcggaggtcgaggccaagccacccaccttggcttctcaaagggcttggattataggtgtgagccaccttgcctgactccttacaagtttccatcaatcatgctcttccaacgtgcctttgtagagtaggttggcccttctgtttctgtggacttgggtcttgaattgctttaaaatgtgaacattacttagctaaagaaagaaaagtttatgtctgatcaagtgacagagtctgtctgtcataatagatgacagaaaaataatccagcattctgcatggcccagagaacccgtttctaggactacaagttgatatatgcaaaagacaagccatctggaggagaggaagggtttcattacccacaaggtgttaaggaaagactttgttttgctaagtgtgtgtgccttagaagctagaaattttcaagtgctttctctggcatcttttgcctttttatggaaagcatggctctgatttcctatgtttgacagtttgggtgttaataccagttggaatgctgccttcttggaagcacttaaattcccaacgagtagataacccattagtctgttacaagcttccaggctaacaataatgtgattaaaatatattatccccataggacatgaagaataatctttccaaaagagaatcaggagggagaccaaagaacagtatgtggaagaatatgtttggatggtaggctagatagaggaaacttgcttgatgaagttaaagctagaagcaccaagagctttaggatcattatgaatcatttggggtaggataatttgggggtagaataacagtttgagattaggggaattattagggtctggagcaatgaagaggggaggaatctcttactaaggcagaaggttgtgtttttgtgcttcccccgaccccatacaaaaatttattgattattgttttaaaaaaaaatgaaaagaaaaagaccctgcccaaaggcagcattcctaaagggtgctcataaagtagatgctgtgtgaaaaggggttctcagt

SEQ ID NO: 3494 - DNA, 1124 bp, Homo sapiens
gccttcggtgaggaattcagggctttccccatatcttctctcccccacctttatcgaggggtgctgctttttctccctcctcctcaagttcctttttgcaccgtcaccacccaacaccttccatgacacttccttgctttggccagaagccatcaggtaaggttggaaagagcctctgacctcccttgtttagttttggaaccatactcactcactctccaccagcctgggaaatgaatattgggtcctcagccctgccaccctctgctgtcatcagctgatgcattgtttttagctcaggttttgataaggtgaaaagaatagtcaccagggttactcagacctgccagctctcggagtccttggtggttgaacttggagaaagaccgcatgaagatacttgtaagcacacatgatccctctgaattgttttactttcctgtaactgcttttgcttttaaaaattgaagaagttttaaacagggctttcatttggtcatccttgcaatccattggggtctagtttggaatctgacaactggaacaaaaagaaccttgaatccggtgcatgccttggttttggtgctgctgctgcttcccaagatcctcagcagggattaagaaggaacccggtgtgcacagcagatccccgaaattggtgggcttgacctcctggcaaattgctgcgtctttccacttgctgttcaggaccactaaatgctgaaatgtggatgcataccgaaataaaagcaattcattgtgtactaaaggttttttttttttttttaatttagtatttgtgtaaaaccaccttttgaagcagcaactatcaagtctgaaaagcaattgatgtttccattaatctttttctggggggaaaaccttagttctaaggatttaacatcctgtaagtgaagtttaacataacagtattccataagcagcctttttattgtcagaccattgcctgattttaatataataaaaaaaaagtgtgcgttaatatttaacaggctgtacttttcttcctcttggcatattagggacagaatttaatgttttagatgctttgggattcaaattgacatcctaaagcaggggtcggcaaactttctaaaagggcc

SEQ ID NO: 3495 - DNA, 1124 bp, Homo sapiens; identical to SEQ ID NO: 3494

SEQ ID NO: 3496 - DNA, 1158 bp, Homo sapiens
agagtgagactcttgtctcaaaaaaaattttttttccaacaatacagagtatatagaataagaggttaacttagtcccgctttaactctgtgtcagtcaggaaaagagaaatcataccagctaatttttttcccagctttattgagatgtaattgataaataaaagctgtatatatccaaggtatacagtgtgatgatttgatatacattgtgtaatgattaccacaaccaaattaatcaacgcatccatcaccacgtgtagctaccttgtgtgtctgtggtaaggacacttaagatctactcttttaccaaatttcaagtaaacaatccagtattattaactgtagtcaccatgctttacattagattcccagaacttactcataactgaaagtttgtgccctttgaccagtatctccccttacaccctggtccctgtcaaccactgttctgttctctgcttctgtgagttctacttttagattccatgtataattgagatcatacactttttgtctttctgtgtctggctgatttcacttagcataatgtccttcaggctcatctatgttgtcatgactagcaagatttctttttttttttttttttgagacagagtctcgcactgttgcccaggctggagtgcagtggcgccatctcggctcactgcagcccccgcctcccaggttcaagcaattctccgactggcaggatttcttatttatggctgaataatatttcattgtgtgatatatgccatattttctctaggacatttaagttgtttccatatattggctattgtgaataactgcaatgagtgtggaagtgcagatgatctctttgagatactgatttaatttcctttggattgatacccaatactaggcaacagagataatttaatataggaagttgatcaaatagatgttggactaaaaaatcaaagaaggcacaatatgagaacacagagatactgctgcagaaacagtaaccaccctctgggtttgggaggccagcagaggaagcttgggctgtcagaacctggcacttggggaaaaggtgccccctctgctgctgctggcacctgcggggcaggggcaagcctggttgggggagtgcaaaagacactgaagcccagaaccagctcttgctgcc

SEQ ID NO: 3497 - DNA, 1158 bp, Homo sapiens; identical to SEQ ID NO: 3496

SEQ ID NO: 3498 - DNA, 1144 bp, Homo sapiens
ctccccaggtgctgggattataggcgtgagccaccgctcccagcccctctcctagttttgtaagagcttgtgatagtaactggagtaaatgccgtattttgctgatgtacctcactgccagttaacaccttctatgttgttagtttggaaactcggtgtttgaaactagtataaaccaaagccccatgctaattaactgaattgatactttgaatgtaaaagctgtttcttgtttttactttggcactttccaccttgattgttgagatactttatttgataaaccgtccatgctttgcccattgtgggtggccattgtgatttcatggttttttgttgtttgtctgatcctgtttattagaaagtgaggagaggatgattatgttccttcatcctctcagtgtcttagtactccctacacctgcgttatgttatgacctacctttgcgatctgccagttttggggtcagcttaagtgagaattcatattctgcttcactggaatgagaaggctctcctcacatattatcatgcttctcaagttggtatatatgagccaacttgattatgtagtgtgtgtgtgtgtgtgtgtgtgtgtgtataggaagtcacagataaaaattgagccaactgtggaaagtgacagttttgattgcagggcacacgtttttttattctaatcaatgaaaaatgcaaaattcatattactgtttttagtcctgggtcctgtcatctctgtgtattaattcagtcctctgccttaaggagttccttgagatttcactcacaagctttggtattattgatccctaccttggttccaagacagcagctagagaaagcctggaacctctcaagaatttcagcagtgttctggaaataaagatttagaaaataagaggaaagcatagacaacgttggatggagtttacaaagggaagcctgctctgaatatatgccacagttttagatttaagttaaagatttaatttaaaagcatacacgtaatctaaaagagtcatgcattatttgaccagctgttagaattaaaaatgaatctgcatatcctaataccctcttcagtaagggtatagatttgtaattgagtcacttagctgtgggttgtgtttatatgtcacttctc

SEQ ID NO: 3499 - DNA, 1191 bp, Homo sapiens
tttccctttgatagttgtgacgcctgtttctggaccccatgcaccttccggaatattcctgcctgctcactgccgtcttcccctttccttgcagatgtgtacttcatcgccaccttgtcattcttgtggaaagtctccgtcatcactctggtcagctgcctccccctctatgtcctcaagtacctgcgaagacggttctctccccccagctactcaaagctcacatcataggccgtgcgttcgctggagggggccctggtcttggcgcttccctgatggacagagctcaagttccatttatattaaccgccacctgtggattttgcagtaattgctaacacatgcagttttaatgggaagtggctctgcgcctaaacggagtcctaacgctgcatcaacgggagggagggtcctgaaagagacccatctgggcctgtctgaacccctcgttcttcatgtttaggtgaatatgaatatgttaaagctggtggctcagctgggagatttatatgggtcactgtgcgagcttccttatgacttgaattttgttgtcacatgataaaagtttctgtgtagctgaaggttgtagaaggcttgtgtgtgtgtgtgtgtgtgtgtgtgtgtgtgtgtgtgtttttaaagagtcctaatgtgtatgtactctttatgtctttcttgctcttacaaagaggtgtcagaaaaatagaaagctcttggtgtcggtttgggaggaaaagacagtgacatttggtaaaaagttatccacacaataatctccattcggaaatgctcagtatcgtctccagccagccctgcttatccaggttacactggattcctgggatcgtaaccagtaaatgagaggagagggagagagagtgtcctaagtccaatctgttatccttgatctgattcagcatccatagtgtgtgagttaacttcacctgccacctcgtaaaagaatttcagaggtgtgatcccgctttattgggacctggtaacaatcacaaagccagtggctgtttgagaaggacctcagacattttcagcagagttgttttagcaggaaacgtgccactgaatggcccctaaatgtgtcgacagtgtgataagagactcaactaattctttaggcaacatggcagatgtgactcagatcctccaagaccaaagcggaaaggtcagggggct

SEQ ID NO: 3500 - DNA, 1193 bp, Homo sapiens
ggtctcgaactcctgacctcaggtcatccacccgcctcggcctcccaaagtgctgggattagaggcatgagccaccatgcctggccattctttttttttttttttttttttaaattagtccctcacttttccatgtggatatacaatataattaatcacttccctacggatggacattgagtttatttccaattttcacagttgcaagcaaagctgcaaaacacatcctcacgtagaaaaattggcttgcttatgacatgactctccagaatgaagtcccagaattgaaaatactcagtaaaaagctacaaactcagctgggcgcggtggctcacgcctgtaatcccagcactttgggaggccgaggcgggcggatcacgaggtcaggagatcaagaccatcctggctaacacggtgaaaccccgtctctactaaaaatacaaaaaattagccgggcgtggtggcaggcgcctgtagtcccagctactcgggaggctgaggcaggagaatggcgtgaacccgggaggcggagcttgcagtgagtgtggagatcgcgccactgcagtccagcctgggtgacagagcaagactccgtctcaaaaaaaaaaaaaaaactacaaaactcgattcaaattttcagttgttaaaatagaacctttgttcttcaggacctgagactgaaggaagatgttctcattggtcagtatgtctgattatatgtcaatatagggtaaaagaaaggaaaatagtttgtagctttgggtaattttaatatccataagttgtagcagtataatttttaaagttgcatttgaactggaggtttggttttgaaaccactggagaaagtaaaaaattagagctgggcgtagtggcacacacctgtaatctcagtcactagggatactgaggcaaagcctgggtgacagagcaagactctgtgtcaaaaaataaaaaataaagaatgaaatataaagaaagtaaaaaattacatataattaaaaaaattggcttcaaaacgaagtcccagctgggcatggtagcacattcctctagtcccggctactcaggaggctgagagaggaggattgcttgagtctaggagttcaaggccgtaatgcactatgtgaatagccactgcactccagcctaggcagcatagcaggaccctatctcaaaaaaaaaaaaaaaaa

SEQ ID NO: 3501 - DNA, 1357 bp, Homo sapiens
atgttgcatggaaataacagttatccagatgactgagtttttggcgccaccttaaacagcacgctcagggtaagtgaggaatcactgttcaggctgccctttcagactgattttattttcaccacatgcaagtgtggcctgttcaaatgtagaaaaaaaatcagtgcatgtagccacaactgatatttggaaccctttgcacttgtggtccttcatctttggggggttatagatcctactgagaatctgatgaaagctgcagccctttgcacgtacaaactacattctgcatttaatttccagagacttcacagaccctcttcaactccatccaagactttcaaagaatcgtactccaattagcgagattactacaaagccaaacttcctctttaaacttgtgttgatttcccctacaccctccctaccaaagaaggactaaatatcttcttcttttccatgctttgtaaagctatttcttaaatgatgggatgtatgttgcctattgtggagaccaaggatatgtttcttgccctccaaatgatcttggagaacagaaaaatgattgtttttgtggttattggggagtcctcctgggatctgaataattcccccccaaaaaattatgtgtcatgggctaggcgccagcctgaaaaggagttgtcggtctgaatttatgttacattgaattgcaagaaaagagtccctgccaatatcatccagcaaagcactagacctcggtttctcaaccttggcaccactggcatgttgtggagaattatttgttgtaggggcattctgtgtttagaatgtagagtgtgtgtgtgtgtgtgtgtgtgtgtgtgtctgtgtgtgttttgttttgtttttgagacggagtttcgctcttgttgcccaggctggagtacaatggcgcaatctcggctcactgcaacctccggctcccaggttcaagtgattctcctgcctcagcctcccgagtagctgggattacagacatggccggctaattttttgtgtttttagtagaaagagggtttctccatgttggtcaggctggtctcgaactcccaacctcaggtgatccgcctgcctcggcatcccaaagtgctgagattacaagcgtgagccaccacgcccagctaaatgtagagtgtttagcagtatttttagcctctacccctcagtcgcgcccccccagttacgagaacccaaaatgtctccagacagtgccaactgtcccctggaggacagactcgcccccacttagaaccgctgggctagaccatgcaagttacctcaagcttgatgactgttttccaagttttctttccaacttttgggtgagatgtgtgtg

SEQ ID NO: 3502 - DNA, 1125 bp, Homo sapiens
gtttctgaccaggtctaggaagaaaagaaaatggaagtgagaagaaaatagagtgaaaatagaaaatcaaatgagaaatgaagtccacaattctaaggggccaggagagtaaaagtgctcacaggattccaatcaggatggaagggagtggacaggggacatctatatctagaaatatgtctgggtagtattggcttctaggagacaatggaacagtgccctcaagagttgggaaatgattttgaacttagaattctatacccagccaaactatctcaagtatgagagcaaaatagaatgatgtgcaaggactcaagattttactcccagccaccatgctagtgggagttactagaagataaactctagcaaaggaagggaggaaacatctggcatgatatatttgatatgtgaatacctgaatatggctaactgggattgcagcaaagagaaatatcaggctgatacttgtatagaaagtcaagagaaactaaatcagaagttttaaaaatccattttaaaaattccttgtgaaagggccgggcgcggtggctcaagcctgtaatcccagcactttgggaggctgaggcaggcagatcacgaggtcaggagatcgaaaccatcctggctaacacggtgaaaccccgtctctactaaaaatacaaaaaaattagctgggcgtggtggcgggcacctgtagtcccagctactcgggaggctgaggcaggagaatggcatgaacctgggaggcggagcttgcagtgagctgagattgcgtcactgcactccagcctgggcgacagagtgagactctgtatcaaaaaaaaaaaaaaaaattccttgtgaaagttacaaaattatgagagtggatgacttctgaaattgagattccttctttcaagaaacacagtctaatcaagaagcaagttaaaatgtgcccccaaatgagcaacacgtaagaaaagaaaacaaaattatattgatgggtggttacgccatccactggcctgagtgtgacagcagacttataaggaagtgattgtaatcctggtgcagtgtttggctccgatgaatatcacattcccagtcaccatttaaattatttatagttggcttctgaacttg

SEQ ID NO: 3503 - DNA, 1171 bp, Homo sapiens
gatgccgtgctgcttgctgtttggaagaagtgagaggaaggggtccacctgaccattctccatgtggttcatgaagctgcccaagatccctacagctgccacttcttatcctgagtacttctataaccactgccatttttcccaaacagggtttggcctgtaattttctccatcaatcagatttttatgtcatctttcccttaggatttctgaactatcaatgaatgatacacattcttgtttcccaatatgctgatgtagacttcagtatctttctctctcagtatttggacaggaggaggcggcacacccatatgcccaggctatcatcttggtcaaatctttgtagccatcttgaccaaaaaacctttaactttgactccttatgtgtttgaaggagacaaaccgcacaagtgtgagttctgtgacaagtgcttcagccggaaggacaacctgaccatgcacatgcggtgccacaccagtgtgaagccacacaagtgtcacctgtgtgactacgctgccgtggacagcagtagcctcaagaagcacctgcggatccactctgatgagcggccgtacaaatgccagctctgcccctatgccagccgcaactccagccagctcaccgtccacctgcgatctcacacgggtgagtccctgaccaggaaacctcaatcccttactttttctctaatttcttaaccttcatttacttaacaacacaagcaacttaaatgacttggtgtggtagaagtacaagaatttggaacttctgtgataattgtgagatttgtcatttttctgttgccggaacaacaacttttggtaaaatatgactgacagctgggttttatatcttgactatatagaatccagctgggagtagatacccactataactgccaagaagccaatgatgtatctcaagtcagacctataaactagatgtttcagtaaatgtatacactgattgcatggctaaatttggaatgtagcaggatccattaagtataattaaaaatcacaaacttttaatcttaggaacttcctttatgggaccctactgaaatgataggaccaactcatcgtggcatggaaaaatggggtttgagatattcataaagatgctcataagttgaaaattttcaatgaattcctggaaaatggtgag

SEQ ID NO: 3504 - DNA, 1200 bp, Homo sapiens
tggtgaatcatggagttcaagagaggaatgagcctctgtgctcactgtcagctttctcccctctagttctttagatcagtccctgaagtatacagagacgggagcattgtcctgctttgtttcaaatgtcttagaaactagggcttaatgttcattaattagtgactatctttcaggagcttctaaacattgttgaaccagccatctgaactccgactgctaaattaaaattcacatttcatgagctgctagtgtccccaaaagataaagcaactacagctgccataattggcaacacactgacgttttaagttacccaaagagtcaaagcagtcatttttcttcctccttctttcctgttcatgggtctgatgaagataaaggattgcaaagtctctgtcctcttcttttctatttactatggcttaaaaagccaggccaattttgggggaagggtctatctcacggacctacgtgttcttgcttgtagttcttaaagctgtgggtcgggagaacccagagctgacttctgtgacccatcacaggtgacatgggttttattgcttatccaagatctttttcctctcccctgcatccagggacgtccgtgaagtcatgtcccctgaatacccctggagagtagtactgtgtgtatctgtctataaaaatctcttttgcttgttttattggagacactgagggctttggattgtcgttgtctcaaccaggaatgatcctgtactgccccagctccccaacccaggccggcattttgcaatttgcagagtcatttttggttgtcaaaacagatgggagcttttactgtcagcttgtggggtagagaccagagatgctgctaaacatcccgtaatgcacagggcagccccacagcagagaatcacctggccccaaatgtcagtcgcgcggaggctggggaaccccggtggaatattctgtgctatgctgtagtagctggggtttgttttcctaaccaacaaatccaaacagaaaagcatcggggatgctaagctgggttggagcagaagtagtttgggaaattcttttgtttctatgacattaaggactttttttaaagggatgcatcccatgtttttggcttctttaaggcaacatggtatacaaatacaagtgcaaagagtatcttcagggtataccacaaaatcataataatccagcaat

SEQ ID NO: 3505 - DNA, 1220 bp, Homo sapiens
catatgtgccgtatgtcagtagcttgacagttttcaaatcgtgcctatatttttttgcatacacaaatttttgtgtttgcaaactcagaatccatgccaaaatacaatgttatatgtcattttcagctccttctctaaaggaatggcccatttctcattgtagtttgagaaatacatgtatgaagagataggggtcttgggcttcccagtgtcactttgaacacctgaataacatttaactcctgagaccttctcggtgtagaggccactgcttccccctgctggagatggcatttcattgaagggcctctcgtggctttccctgcccccggctgtctggcctgaagaaggagaaagaaccaaactgaactatgaaaagttaccactctgaggagacctctcttaattaacacttggggccatgtttgctgttgttgagaaggagtgttctcaaagatgagctggaatggaattgtatttagaaaggcccctgcaaagtatatagatggatgactctagttcatgacatacaaatcccataaggccaacgaccactcttctggaacaccaagagcagctctgagatcatgctggccctacgcgaattgagtttctgtggcctaattggatttggagaacgccttccctggccccttttcctcagacagatctgctctgataggaaccttttcaagaaagttactgttgtttcaatgccactccttacctgtatagaacatttccaatacattcgctcattgaacttaatccttgcaactgtgactggggggtagatggctctgtttgcatacgaagaaataaaggctccaggaggttaaatcgggcaactttttagaactaaatcagtctctgtaaggcctacattgctaagataccatttcagctctgaaaatctgcttcagggaagtgagtggatgaggccttcctgcctcagctactctgcccgtctgtacatcttttgtgtctgcctccgtaccttattcagttattttcacactaaagtaagtagaattaagactgtagttcagatgctttttctttttctgttggaaactgaacacactacagacagtgaaaaaaggtacatattccattttctcattgcctgaagatctctgctgatgctcctggagaatgactttgggggctttagaaagaatattgccagtccgtctcggcaaggagatgatgggagcgct

SEQ ID NO: 3506 - DNA, 1210 bp, Homo sapiens
ttctagctaataataatacataccaagagatggtaagagtttttcttttattttgccacctgtgtctctctccgggaaagagtggtttctcagctctcttactaccagggatgaagccgtgtctgcgggatgtaatttgcagagaccttacatatgtggtcactcacatgttatctgaatacagctacagacaatttttgtgggtcatttattttttaattttgttgcatttgcaggtctgatttacatgttaaaatatacatttatttaacatgataaaattacattttagctctgctctcttattttattttcctgagggaaaatagaatgtggtattgtatgtgatatttggtgtttatgaaacagattaacagcatattttagtgaaaccaaagcaagtgtgttttatctgtttccagtgtattttaatatttacagtcattttttgcttgtttcctagctcattttcaaaacaaccacagtaaataaaaattaaagcatatattgatgtagcttaatttaaaaaaaaaaaaggagattttaaaatgccttgcttagtggatctttatatttagtcagcttaaaatctcagtgttttctcaactgaccatgccttgtctgtctgtctgtcccatgctgctttctttgtgctttccccaactggatgggactgatggggacaacatgtctcttcaggagctggacgaggtattgtgttttgaatatttttatatgttgggtaatttgagtttataaaatacctacttttcctgaagtctttgctcatatataaaatgctaacagcttatacatatttagcatttgttttgattactttataatttttttaacagtttaatatgtagaatttaatctattttcacaccatgtgaactgatgatttaaaaaaggctttgggaagatcgtttactagtcttgggaaagtgtcttaactttggaagcagtaaaggttgaacactttcttcaaggaagccagaatgttttgagaattaatgtctgtagcttcctgatttctgagaagtgagtcgtgcacttcctcaggtagacagtatagaaggccagcatgtctgtgaaggccctaaatgagaaggactgtagccacggcaactgtgggagggtcttccttgtcactcctgtctggaatgagatgacacccagtggatgcacctggagctattgtcacctg

SEQ ID NO: 3507 - DNA, 1210 bp, Homo sapiens; identical to SEQ ID NO: 3506

SEQ ID NO: 3508 - DNA, 1099 bp, Homo sapiens
gcgccgccgccgggggcacgagtagggcctgggctgactgggacacggactcgagcgacgaggacgacgcctactacgcggcgccgcgcgttgggggcatcgtgtggcggcccgggccgctcaaggctggcgcgctgagcgcccacctgcccctcgtggtgttcctggtcttctcggtgcgcagcccctcgtgggtgctcaacttcctgctgcagaagcgcacggagcagggccgcggctgcggcttcgtgttcggggcgacctgctgcttccgagtgttcctgggctgcgccttcttctcctacttgggcggccgcgccaagcgcagaggccgcgggcgctccggggccagaggcgccttcggctcgggccatggcgcccggcgccgggggcgcgaggagcggctcatctagtcagaccccccaccccgccaccgccaccagacaccaccatcgctgtgtagtgtgggtttttattcgtgttcgtgtgtgtgtgtggacacattttccttttcggttgctctgtcctttggttcgtgctcgcctcgctttttccacactcctgctctctggctctctgtgtctctcgctctttcgaaaattttcctaagtccgggcgcgcgctccctccccttccgcccaccccagcccctcggcggcgcccgcgggagggggaggaggcctcgggggcgccgggcgacgcggtccggggggtggagcgttggcgtcgtgcgaggggtcgtcactggcgcggagacgccccctctcccccctcggctcagccgggctgctgcccgagcccggggggtggggggcgtctccccggcccgtcccgtccccggccgggcgcgggcggagggaccccctccccgggctcccggggggccgcctccctccgccggctcccgccctcccagccgccgccgccgccgcggccgctcctcggccctcctcctcctcctcctccttccacccccctcgccgccgccgcctcctcctccccccgcctccccccgcccgccgcggcgcttttggctcggggcggcggcgggggcccggccgaggcaataagagcggcggcggcggcagcggcggcagca

SEQ ID NO: 3509 - DNA, 1050 bp, Homo sapiens
cttttatgttcctacctacaagtcccccatcatcattttttttggtaagattcacattttcccaggaggaaaatttagtcccagcacatcttacaaatgaagtttcttattttcacaacattgaaccatttattggcatattctaacacatttagtgtatattcttcctaaacaattctgtgaagaaactaaattactcagtagcttaccccattccccctacacacgagaaaagaaactacccaaaaccagtaattcacaataagacccagcagctaattgcgtgaacttttgaatatgtttaacgtgttgaattaaagttctttgtgagcattaattcattaattgggctcaaaattcaaaatcacaccaagtgtcggtcacatagggaactctggtctcagggtttgaatgacagtgttgttgattagttcaagctcttgcctttctctaaactttcttgtgttcactttcaggaattctatgagcatgccaaggctctgtgggaggatgaaggagtgcgtgcctgctacgaacgctccaacgagtaccagctgattgactgtgcccagtagtaagtaaccgccacccaacccatcagcacataaaacagacaaaaacaagaaaacatgaaaacctgtgatcctgctttgaaagttacttgttgatgattcctttcttagaagccaaccagttaccccactggcagaaagttctaatctgattcaattgtttatttataaagtccttaattgcattttttttcttttagtgcagcgacattattttacataaacatttaaagcctgttagagcaaaatgatgatgagtttcatagtattcctaattagtaggaagtaattaattgaattgaccctaagcatttagggaaatagggctgtgctcacattttgaataatgtaaaaatactatattttattgctgtaattttaaaacataacaaagaggaatggtgaagacatagctacgcctcctctctccttggtagttgttgattgatctatttctgctctcaggtaagcgactcta

SEQ ID NO: 3510 - DNA, 1878 bp, Homo sapiens
caagaatattgccagagagcaacaggaataaagaagctaagtaaagaataaaaaagaaaaatagaaaaaataaaaataaacacgaagaacaaagccccaccaccgtgctgtgctgtttgtgtggccccactgcgtcgaggccacaggctagctgctagacgcatctagagttccctgattcctaaaattatttatcttaaatcctgtttgccctaaccttcttaaggcatcagctttgagttacaaatgtaaccaacacacaagcaaatgtgccattgacttagtgctgcataactgtgggacggtcacttccgttgagcctgaccttgtagagagacacaaatagttggcaaattgatgtgagcgctgtgaacaccccacgtgtctttctttttctcccagcttcctggacaagatcgacgtgatcaagcaggctgactatgtgccgagcgatcaggtgtgcaaaacccctccccaccagaggactctgagccctctttccaaactactccagacctttgctttagattggcaattattactgtttcggttggctttggtgagatccattgacctcaattttgtttcaggacctgcttcgctgccgtgtcctgacttctggaatctttgagaccaagttccaggtggacaaagtcaacttccagtaagccaactgttacctttttatataacagagatcatggtttcttgacattcaccccagtccctctggaataaccagctgtcctcctccccaccagcatgtttgacgtgggtggccagcgcgatgaacgccgcaagtggatccagtgcttcaacggtaggatgctgtgggcttggctgttcgtaaagaacgctttgcttctgtgttgttagggatcagggtcgctgctcacgctcttggctttgctctctttggttaagatgtgactgccatcatcttcgtggtggccagcagcagctacaacatggtcatccgggaggacaaccagaccaaccgcctgcaggaggctctgaacctcttcaagagcatctggaacaacaggtttgtggagtgaccgcccaccccctgcgcttgcccaggaggccctggtctgcactgtttatagagaagaaccccgtgcaagcattccagacccctggccgaaagcgcgcttctcccaagcattcacacggcctcccttcttgtagatggctgcgcaccatctctgtgatcctgttcctcaacaagcaagatctgctcgctgagaaagtccttgctgggaaatcgaagattgaggactactttccagaatttgctcgctacactactcctgaggatggtgtgtatggcttccactcttgctggctgttcattgcggtggttctttttcaaacggtcaggctgaaaacccccatccccctcccaccaccaaaccataaaggatctataagagaagcaagaaaaacgcactcccactaattctcatatggaaaaatcagggttttgaagacttcaggagctacagagatgctagcaccccagctctgcttgaattttaaattacattaatatgtattccctttttatatagctactcccgagcccggagaggacccacgcgtgacccgggccaagtacttcattcgagatgagtttctggtgagtcgagcctgtctttagtttcctctcttgttcctcctctttttctcatggatgtaaatttacttaattccaaattcaggggttcagctacccagttccatggttttagttcacgcacatccagtgtggatttgagctctttgcgcccctctttttgcttttgttttcatatgacatcagaggctggctgacagccgtccctggtaggtgtccccatcagggatagggtggtt

SEQ ID NO: 3511 - DNA, 1130 bp, Homo sapiens
tgggtagtttttttttttttttttttgataagttggtgtaaggctatgtgacttgatcaaaacagatgcagggcctctaaataaaagggatcatctgaaattaatgttgtttgaaattactatctgattttgagggttccagtatttctgtgaaaattcaacaagaactccttggaaactggtattgatattcagtctccttaaggtagatttttcaagcttttcatacattggaactccacctgactttggaccaaccccagaacagagcagagccacctcctatagacgcccattgccctgctgctgtacacttcagcagcttgcacaagggagctcacttaaaaggagaaattgtgtagttttaaaatatattttgtgtaaaataccttactatgctataaaccaccattaaaaaccagtgttttgatttggtacttaaatatttttggagtgaaaattatcactaaagtaacatgactccaacaaaagtatggtttcattataaaagagtactgtattgatttgcccaagttttgtaacttagtaaaggtattaacttccttggatttgtactttgtgatttagtatgctgtatcgtgggctggttatgttaactgaaaaaaataaagtcattacctgagttttgcagtgctctaacttaaacagaagaacagctgttcacatcttttagcattttacatttgcctaacttaaaaattgccatgtgtcaaaatcatggttttgtaattgctaaggcatgatatgtcaggttatttgaatataattactttttgaagtaattgtgaccacaaaacatcttttttacatgaaggagctgtgtatcatttgaaattactcaaatgatgtcttgctctgaggcataaatcccaggtacttagtgtttttaataatatggtgccactgcaggatttgggggcggtggggaagaacaagcataatggtagggggaggcttggcctgaaactaaccactgagtgaattgcactgcaggttttacttaacgggaattccttatttgggatgtcaagagggcagctgcaaactgaaaaacaatccagtaaatgtactttgttttatgtattgtagcaggcaattaactactaaat

SEQ ID NO: 3512 - DNA, 1176 bp, Homo sapiens
ggaacccaaggaggcctcgaaatttcagagaaaggagttcatgctgccctggctcccgggccatagtcacacttcgaacaatccacgcatactccgaaggactgaagcatggacttccccaaacaacaacagagatttccagtccttccactacccgcccagctatacctccaacggccatgcccccccacacaggagcattcttgtttgcatagcacagctcagaactcggggaccccggtgcggcctggccagctgccccttgacctctgttggtccatctcctggactggctgtctgcagaggggggcacccagcacgtggcacagtgaaccccgccctccctgggcagccatgggagggtcagaaaggacaggttggagactgagaccccagctcaactctgaaggctgcacaggggcagctgtgagtttggtttggacaaggaccctgacatccaacgggaacatgccgtgagcctggcacagatgtgtgcactcaaggccaaagctgttcagaaaaggcatgaccttagccatggggaagggccataggctgaggtgggggccggggcccctggtggagctcatgctgcccccaaaggcaccccgagacactccctgaccccagtggcaggtgcagggtggggctccgggagggctccctgtccttccccagtgctggcaccgccctgcccgacaccaggtcctgcccagggtccctggtacctcacctccttcctcgggaagccagttgtcactggcctgggagagacagaaagctgaccaagcacgaggcttccccacgtggggcctgccccctgccgcagcccaaggcgcccagacacagccatgccagagggagaatgcaccctctgagttttctcatgcagtgagcacaggcagccgagcgctgtcccaggggtgccgggacacagaccctctcactgtcctgcagaaccaattccttccccctgtctggcttgagtcaacccagccctggagatagcagtgccagcctcgaggacagcagcaagtttggacccggccgctgcctgcccccgacgagggtccataggagaggagaggcaccgtctgcagcgtgcagaggcatctgtgcgacaggtaggcacggcaagacggggcctcctgccacccacacaggctcacaagcgtc

SEQ ID NO: 3513 - DNA, 1180 bp, Homo sapiens
cctctcggtggcagggctgtgcctgtctcagagacaccagctcccgcagcccactgcagggcgggccgagtggggtcaaagtgagcagtccagggttggccgctctggccccttcccttctctccctgtggcttcaccttcctgtgcctgtcccctcatctgcaaagtagagatggtgctaggactccactggcaggaccgccaccagcgccgcatggagacttttaaggcaccaagagtcctggagccgctgtgtgcgagtggggttggctgctgctgttagggggtgccagagggacacacacacacacacacatacacacacacacacacacacacacacccacacccccgcgtcagccttcagggccgaagctcccgactcctgagctgtggtagggagcacggattcacacacacacacacacacacacacacacacacacacacacacacccgcgtcagccttcagggccgaagctcccgacccctgagctgtggtagggagcacggattctgacttggagggcagagtgcccaggacttgcctctcccggcgtgtgtctgtgtctggccccatgactgtcacctgcacgtgcccgcacgctgcgtgttcctgccccgtctcctgccgtgtttccctggcactgtgatgctgctgctctgaatgacctggcaggtttgtgaagactggaatgacttgatcagcatccttctcctgctacgtgagctgcgtaccctctggagttgtgcctctgtcccatagacagggacgtggacggacgtgccggaggctgccagagaccacccagatctgaagtagcacagaacggtgtcctcaagtctgcagcatctgtctgctgagtgggacactgtggaagacactcgtggcttcacttgcactgtgggcatcccattgcagtctgccatctgctctttccatgtcagtctctctccgacaaacttcatgggctcaggacttgtggcgtccctctgtcctgggcagccaccttccttcccctctctggcactgactggccatctagcctaggggcggccacctccctacccctttgcgacactgactggccgtctgcctttgcatcctttttagtgattgttaacgaggtcacaagccagcagcacgaggattgatttctagatacctgcgttcttcaga

SEQ ID NO: 3514 - DNA, 1128 bp, Homo sapiens
gcgccgccgcgccccccgcgcccgccgcgccctcgccccccgccgcccccgcgcccgccgcccccgccgccgccccgcccccgccaccccccgcgcccgccactctggcccggccgcccggccaccccgccggacccccgaccgccgcgcccgccgtgccgccccccgccgccgcccagaacgggggcagcgccggggcagcccccgcccccgccccggccgccgggggccccgcgggggtcagcggccaacccgggcccggcgcggcggctgcggcgccggcgccgggggtcaaggccgagtcgcccaagagggtggtgcaggcggcgcccccggcggcgcagaccctggcggccagcggcccggccagcacggcggccagcatggtcatcgggccaactatgcaaggggcgctgcccagcccggccgccgtcccgccgcccgcccccgggacccccaccgggctgcccaaaggcgcggccggcgcagtgacccagagcctgtcccggacgcccacggccaccaccagcgggattcgggccaccctgacgcccaccgtgctggccccccgcttgccgcagccgcctcagaacccgaccaacatccagaacttccagctgcccccaggtgagtggccgcacggggcgggagggaagggcggctcccagcagcgccagctgccagttccaggaagttctccgctggtggaatgctaaggtcatctgtcccgtaggcccgtggctggagcaggccgaggggcagtctctacccaggtgcggggccagcccgggtggctgtctgcgagtgagccagagggagtcggcatagcctgcgtccctgtcgctgtccctgacgtccgcgctggctgcctgtgcctggggctggtctgtttcggagtggctcagccaggactcttagtggagtggtccttacctgctcccgccctatgcgtccctgcccgggttggtaggctcagcgcaggggctccctgggccaggcgatggggtctgcagagctgagggcagtacctggggctgtgagtggcagcagctgtcccctgctcagttctgcagttaggcgtgtggcctgtgtccccacttagcctttctgccccttggtgaccctggg

SEQ ID NO: 3515 - DNA, 1110 bp, Homo sapiens
gggaaaactgaaaacgcacacggaacaaatagtgacagaaaccaggtgcccaccgccctccacaagaggccatcttctccagcgcgtttcctaactgaagctgtgcctgtcccccccgtggattatttacagtctgtggctgcttttgctgtttcggctgtggcttcccagtgggagaggaccggcaaaccatttaatccactcttgggagaaacgtatgaattaatcaggtaaggggggaaaggcccatcataaatatcttgtaaatggaattccttggatgacagataagtttgattctttcactagcattgattcctctgctctgagaataaactgtttgaattaagagctcacgaaagcgtttggatgctgtaggcgagatgtttcacacacacggggtgttgtgctagcgtgccacggcgtctgagtgagtgtaaagcgctggcaatgagatattttagtgtgttcgactcaagcgtggagatagcgcgcactgtagacgcttccgtgtgtgtgtgcgacgtctgtgaaatgtgtaggattgttgtgagcttcaccgaaaatggaaataggtactaatgagcaaaactaggctgtttcactaaagcatttagtgaacgctattgaaaaagcaggtaaatccaaacacaggaatgattgcaaagaggagcttcactcccaaggccacgtttgccaccacagcctccccagagttttaggaagggtcagacggctctggccaagggagagttaaccagaccacgcctcatctccagacatccctgaaacttcttcctatggaactttcttctaggcagcgttgccatcccttcctagagtctccccagcttccctcctgtctctggtggccctcacctcacagacgtgagactgactccaagtcctagaactctgaccccagaggtccagccgggccccagatccgttgtttgtggctgggcctctggaaggactggttggggttctcttcacccacctggttgccctggggactgctgtggttattcacagaatcatcctgggattctgcccaggtgacagtgcccacccacaccaacaaatgaagtcaaaagcaggccagaccat

SEQ ID NO: 3516 - DNA, 1097 bp, Homo sapiens
gggccagggtgggactcggctgaagggcaggccctggggtcagggaggcgctggagtgggaggggagggaggtgggaagggcgaggggtggcgggcctcccgtcaccctgccttccctgcaggtggacgtccagcttcaagtggcagtgccacagccaggccgctatgccctagtggtggagtacgccaatgaggatgcccgccaggaggtgggcgtggccgtgcacaccccacagcgggccccccagcaggggctgctctccctgcacccctgcctgtacaggtgagtgggagccggtggggctggagtaagggcacgcccggggctgccccacctgctgaccaccctccccccacagcaccctgtgccggggcactgcccgggatacccaggaccacctggctgtcttccacctggactcggaggccagcgtgaggctcacagccgaacaggcacgcttcttcctggtaaggacccctcaggtccccaccccaaggggtcagcttctttcagaagatttgaaacatgcatgagaggggagaggacagttggggtcccaggtccccaaggcggccacactcgctcatgcccagcccagcatgtttcttctggaacccctcctgcaagcgttttgtggattcagtcccttttgacgtacccccgagctgttccatgtgctcaggaaagcacctgcagtcacagctccctggccccagggcagccacctcctggcacagacagcgttggttgcctgttctggaactttcttttctttttttttttttttgaaatggagtctcactctgtcgcccaggctggagcgcaatggcaagatcttggctcactgcaacctccacctcctgggttcaagcgattctcgtgcctcagtctcccaagtacctgagactataggcactcaccaccacgcctggctaattttcgtatttttaggagagacagggtttcaccatattggccaggctattctcaaactcctgacctcaggtgatccgccctcttgggcctcccaaaatgctgggattacagacaggagccaccatacctggcctggcactttctataaatgccacacaac

SEQ ID NO: 3517 - DNA, 1097 bp, Homo sapiens; identical to SEQ ID NO: 3516

SEQ ID NO: 3518 - DNA, 1177 bp, Homo sapiens
ggctctggggctctctcggcctcggtgcacatgtatgaactgggctggaaacttcaggcctgaagccagtttgcttttagattgttctgggccagaaatcaggttccgccatgtgagcgtcttgcctctcacagcctcagtttcaccaactgtaaaatgatacggagggaagaggaaccctttccactccacctgggaagtggtccctccacccacccacccatctatccctccacccacccacccacccatctatccctccacccacccatccacccacccacccacctacctatccttctacccacccatccacccatctatccctccacccacccaccacccatctatccctccacccacccacccacccatctatccctccacccacccaccacccatctatccctccacccacccaccacccatctatccctccacccacccactcacccatccctccacccacccacctatcctatcccatccctctgcctgctgacccacccacccacccacccccaacgtatccacccacccacccctacccatccatccacccacccacccccctacctatgcagcacccaccctttattccttgtttccatccatctgtccacctgtctgctcattcctccctccacacctgcaccgtcttccttccttctcacccactttcctgaccacgtggatgtatctaccaaggcccctgtctcggcctaggccagggggctgccagccttggtcagggtgggggcagggactccctggagtggggtggggaaatgtccttcctgggcttcagggctgatcctggggcggggctggggcctccatcaggaagccaggctgagcggcgggtgggtccgggcactccccctgcagcgggctgccagcagcctttgttctgggatctggagcggatgccctgggacgggggtgggggcggctggcactgggcatcgggaaggcttcctgctcctggaaggctgaggagggcggggtgggctgcatcacggttcggatctcatacccctggtgtgcggtggggcaggggctggcgcaggggaggggagactagtccctgtggtgtccacccagaagcagctgagcctgggcccccgggagtgccagctgggctcctggcctgggtcccgctgcgcccagccgtgga

SEQ ID NO: 3519 - DNA, 1177 bp, Homo sapiens
cccggagctacgacctgggctgggggcccggcggcgccgtcgtcccacggcctggcccgaggccagcaggtgccccttccgggaggcggccgggccggggtccgaagggttaaggccgcccggccgcccctccccctcctctctccttcccccccccaccccgcctccccggacctctccccggggctcggggctcgggcgctcgggcgggccggggcggggcctgacgtccgcgggcggagcgagccctgccggccgcctggcttcagacccgccgggctcccgccgcgcgcgctgtccctggagctcggggacgcggcccggagccgggaagatggcgaagcggctctgcgcggggagcgcactgtgtgttcgcggcccccggggccccgcgccgctgctgctggtcgggctggcgctgctgggcgcggcgcgggcgcgggaggaggcgggcggcggcttcagcctgcacccgccctacttcaacctggccgagggcgcccgcatcgccgcctccgcgacctgcggagaggaggccccggcgcgcggctccccgcgccccaccgaggacctttactgcaagctggtagggggccccgtggccggcggcgaccccaaccagaccatccgggtgagcgcaggggcgggccgtggggcttcctcccggggcactcggacccggaacaccggcccgaccccagggggagcgccgtggcccggggcgagtccaggtgcggactctctggttccgcattttgggggcccaagaaggcaccccgacccggccgctccgtctcggccgggaaacttcgcgtccctccgggaaggcggaattaaagtccccggcatggacccgggggcggctgggcgccggtccagttcgactgcggtgaccggggcgggaggggggccgggcccagtccctggcggccccaagtccgggatcccggggagggcgggacttggcctccgccgcctgctgccggtggggagggggcgcagctccgccctacccgggacaggctggaacctgttggcctctggatggggtgggaggggccagccacctgaggctcccactagcccctctcggaggagtctagggactcgaggagacctccaaagtaggggagggccagctgcgaagttttgactggggctgggaacacgtggctcc

SEQ ID NO: 3520 - DNA, 1720 bp, Homo sapiens
cacggcgccgcgcggtgactccccaggcgcagcccagcctcgaaatgcagaacgacgccggcgagttcgtggacctgtacgtgccgcggaaatggtaagcgccccccacatgcctctcttccgtccttacctaaccaccacgtcccctcgcctgcccttgttcccccacacccctcccgtccttacctcgtcacgtccctaacttgtcctgcccccgacgttactcttttccattcatatacccccaacctccctcgtcccctctttcattcttaccgcccaagtcccctctgctcactgcgccctttctccacagctccgctagcaatcgcatcatcggtgccaaggaccacgcatccatccagatgaacgtggccgaggtgagctgggagcccgggaggcgggaaggttgtgatatatgtgcgggaaaggcaggctgtcccattgtggaggagcccctggggtgaaggtacaggcagaggctggctttgaggattggtgtttcccaaacctgggggagtggtttgtgacccttcttctctttctaggttgacaaggtcacaggcaggtttaatggccagtttaaaacttatgctatctgcggggccattcgtaggatggtgagtgtttccctgggctttgctcatcacttcgggacatcgtggactttaccgtgcgcattggagtgtgtgatggtgcctgagtagatctgctggcagagtagtttgagccagctggactgggctggccgcctgccgcttcttgagggtggaagaggggtgctctgagaagacactcaggcagcagactctgcctctcactaggaggtgcccccccgaccccgctccaccatagtcaggctgcaggctgccccgggagaggtggctccccttctgcgcctgtctccattcgctcagcgggggagagacgtgggctggtggcacagctgaccttctgccatctcaggcagccggagtggaaatattcttagtgtgcttttttttttttcttaagggtgagtcagatgattccattctccgattggccaaggccgatggcatcgtctcaaagtaaggttgggggctcacatttgggcagagtgagtggactaggactgctccagaggcgtggtcttaacgttgtccttttcccctggttctaggaacttttgactggagagaatcacagatgtggaatatttgtcataaataaataatgaaaacctacctgtgcaggttcattctgtgtctgtaggcccagggttgaggttttgctgtcagtgggtgacgggtggggtagggtacccagttagttgaaaggagacaagctgtgaaacatattgcaaaactgaggtttaaaggacaaatacattatccatttaaaaacagatatctaagacaaaataactcaaacattctgaggtctgatacttgcttatgcacactgacatccacaactgctaccggtgcggaagcaacgccaggcctggttctgtatagtcacagccgagctgaacaccttagctccgacacctggatgtgttctagagaatgacaggctgagactgtagtttggtttaactactggctttgttgcaataatcctcgaataccacacagtggcagcttttggcatcataaaaatgggacataactgaagggaaggcttcacacatcacaaagaccgggttggttaatgactaaatctcactacatgaata

SEQ ID NO: 3521 - DNA, 1150 bp, Homo sapiens
tggctgcttggtgacatggattagcgctacgtgggctgcagcatttgggatccaggctacctagaggggcatcgggccagggaaaacctcggattagcaagcaataaaaacatgacctcactcttcctcaaaggagcccctggtcttccctgtgtgactcagttctttccatctgtttgtcccgctgcaagcctctttctgcgctgactgtgacattggaacgtggccttcctgtcaccccctccgtgccacgcactgaaggccacccccacccacctgggaaactaagaactggatattttgcctcattcacttgtactgtaacaatgtatataatttggttggtatttcactatttaatttttaagaagcctattttactagtgttttatatgaacaaagtactgcagaagttaaacctgtgttgtattttttctgagatgttttgctttaagagatactttttgctcagtttttatatgccagatacagagaatttgtagcggttatttttgtatgatctagtaacttgcaaacagaccaaatggatgagaggcggggaccgtgcagctgtcggctgatgaggaggcggccgccccagtgctgatggagatgccactttcgtgtgactgcgaacattaaagcacaaaaaaatccaacctggagttgtgtgattttgataccaaagtaagttcacttttcctccaaaaggaagtttttatttttccaagatttataactaaagcatacacttagatgacttattaacattcacttgatacaacatataaacaaaatagtaacagattctgagtggttattttgtggactgtgacaagcacttcaaatacaaaatgttaggagggcaaaacggtgcgggccctcgtaggtcaggcaggcaccagtgggctccttcctgctgaaagctgcggctgtgagatgagaccgctggctgggtcacagagtgaaatccagcgttccgtgtgcggacgaggagacaagctgtcctggccagccatcgcaccccaatgtcttcagcttgacgttgcttctctgccagtggagcctcctccaccacctgggaacatccctggccatctgtccctgaagtcctcctcaccatgacgcagatcacaaggcacccactaaa

SEQ ID NO: 3522 - DNA, 1175 bp, Homo sapiens
ggctggtctcgatcttacctcaggtgatcctcccgcctcggcctctgaaagtgctggcattacaggcttgagccactgtgcccggcccccgtgttgactttttaatatccacaacgatgaaaatcaggacatttaacattggtgcaagactgttattcacattttgcctgctgtctcaatagtgcccactacaactttttccccagtcgggatggcgtctggggcgctggttgtgtttagttgtgagatgcccctgcacgctgggggccctgaaggtgccagccactcctggggcctcccttgtggtgtctgtccctcccttcttcacaccagcaggtggttgagtcccgcttcgcatctccctgccatctgcatcaggccccggtgtcgctgtccctcacgtgctgtctgttgtcaggccctgctgcagactcggactggcctgtcccttctctcctcctttcctgcggacacgctgtgacttctcccgtgatccttctgtgagaactccctggacctcgtgtcctgtactggcaaccgcccatttctctgctctccttggctgcccggctgcccggcgcttgtctgtacctcctgagccacttcatcctctcttggatccattcccagcagcctgtgatcatggcctcccatgccgtttggtcacgccaccacgcccagctaatttttgtatttttagtagagatggagttttgccatattggccaggctggtctcgaactcctgacctcaggtgatccgcccgcctcggcctcccacagtgctgggattaccaacgtgagccaccgcgcctggcctacatacggattttcattctgtttttgaacatggccactggagggcctctcggctgcagagcaagcgtttgtagcttgttcgtggcagaatgagccgaacgctgtgttgtgacctgttttaaaaataaagcatcttgaaaaagaaaagccattctttttgtcctaatgagtttatgcctccttacctctggccacctgagctccttggtctgctgtacccctctggcctgggccgtgctggagtctttctggggctcagtcattcactttgttggttttttatgtggggtcagtggtagtgctttttccatcataatttgctcttatctttattatcccaaaaccttatttctatta

SEQ ID NO: 3523 - DNA, 1199 bp, Homo sapiens
gtggcgcgttcaatcctcagtgggtcagtgtgacctacggcatctggatctgcctggagtgctcggggagacaccgcgggcttggggttcacctcaggtcagtgtcctgccgctctggctctgcggagagcctgcggccaccccagcatctgttcctgacaccagaggtgctgacgccagggaagcttgggggccacctcccattgcattgccagtgtccactctagtgacgccatggcacagagttccagctgctggccactcagcctccctgcggctgctgcttgctgtgtctaattctcaggacgatgctgggtggagggtgtccctgggtgtccccggtgctggttgatctgctcgatcctctgctttccagctttgtgcgctctgttactatggacaagtggaaggacattgagcttgagaagatgaaagctggtgggaatgctaagttccgagagttcctggagtctcaggaggattacgatccttgctggtccttgcaggagaagtacaacagcagagccgcggccctctttagggataaggtagagatgggcccgattcactcttgcccatggtgtggggctgccctgccgtttgtggcagctggactgtggcctttagtggttctggagtcggttcttctgctggttctgacacacccactgggccacacacaacttgccgccctggagcagaggcttcctgcccagaggggaggcaaatggcttgcggggggagacagaccttccccgcctccaggggagaaagcagctgtgaccgtttattgcctctgtgacatgttgggcacagtgtttctaagaagtctggaggccaaataggtgggtccccctgtgttggaagttggagctgcaccaactaggagctccccagcactgttgttcattgtaaagtgagtcctggcctcgcatccacacctggtctgtgcacctgagcaggggccgtcgagggggccgggaggaggctgcgggtggtgggtgctccaggcgggccgtggggggtgcgctggagtcgacggtgcccgagggcatcgccaggcgcctttatgctctcgaatgccctgtgtctccttgtcaggtggtcgctctggccgaaggcagagagtggtctctggagtcatcacctgcccagaactggaccccacctcagcccaggacgctgccgtccatggtgca

SEQ ID NO: 3524 - DNA, 1146 bp, Homo sapiens
aagtggggggcggaagtgcagtgggctcagcgccgactgcgcgcctctgcccgcgaaaactctgagctggctgacagctggggacgggtggcggccctcgactggagtcggttgagttcctgagggaccccggttctggaaggttcgccgcggagacaagtgagcagtgagtcgcagtgaccctacaagtggttcttttacccgagcggctcgtaggcgcgttgcggtttttcgaaactacagctcccggcaggccccaagccgccctcggggccgcgggtcggcggattggccgcgctgcattttgggacctgtagtttcctgcgctcgtggcgctggcgccgcggcgttggctgagcccttgaccggggctggagggaagggccgacattcagtgtgtccgcgtctgttctgttagtcccagttcccgggcgggattgaggcttagagaagttgagtgatttgctgagggctgcacgggttggcatcccggcatgctctttcgctactttggctgcatctggttgcccacccgggcggatggggaatggactccagccagccaggagggcagagggctggagaggcagggccggaggttcagaccctccgctctgacgttgcgcctggtgaggccgggaggggtgccgcttgcctcttcagccctcacgctcttgtggaagtcgcggaattactgcaggcggaacttgcagcactgtgggcgtcttttccagagaaggacggagttgtggggcgggaggataaggcaaggcccagccacttcgcatcttcgccccgccagctcctcgagatgggatataccagggttgctctccaaccctctccgcaggagggactgatggaaacgcctgggaaagtagcccggtacccacaaaggctgtctacaaacagagtcttactgtctttcccaggtctgtgccatagggattctcgaagagaacagcgttgtgtcccagtgcacatgctcgcatcgcttaccaggagtgcccgagaccctaagatgttcggagtggttttttcgcacagacccgaatagcctgcccctcagccacgctctgtgcccttctgagaacaggctgatatgcccaagatagtcctgaatggtgtgaccgtagacttcccttt

SEQ ID NO: 3525 - DNA, 1146 bp, Homo sapiens; identical to SEQ ID NO: 3524

SEQ ID NO: 3526 - DNA, 1151 bp, Homo sapiens
gacgcgggtgtgacaggagccagctttggctgcttgtcggggagcctcagacctggcggcggcggcttggggcggacgtagccgggggccgcgacccaggttcttccttcgcagtcgttccctgccagccgcgcgccgcctccaggtgcactccaggagcagccgcgccgctgctcacccgccctgtagtccgctccccccagggccgtccccgttttaagaaatggggtgatggggcgtccctacccggcgcctgcaggggctcctggggagcgcgccggtggctcgctgctcccgggtggggcgcggggctggcgctcgagggtgccgtggcccaggcggggctgcagcgagtgtgttccccgttccgcgcgcgtgaagcgtgggagcgaagcctcgggggagggcgggagcgcggctgagctcactgtgaacacccggctgggtagtcccgcgagcaggggaggggccggaaccgatgtgtatgcggagaggtcgcagtcattgctgtgagcaggacacagtggcggctgacctgggagaagttacagagggacggggtgggagagggacgaggagtcgggaatggcccccaggctctcgtcctgagcggtcggctggacgtggggcgccactgaccaccgtggagaagcccgggggaggggaggtgctttctggctgcacactgacctatgttggggtgcccagggcaggatgtacacgctgctgtcgggcttgtacaagtacatgtttcagaaggacgagtactgcatcctgatcctgggcctggacaatgctgggaagacggtgagtgcccacgcccttgcgcgcacctttcccacggcctggcggcgcccccttcggttttgtgctgtcagctgcacgttcactacccagacggaagccaaatttcacctgagacggcaggatagtcaccaccagcctcctgaagagcagagtgttgctctgtttctgtttctgtcttttaaagaacagacctgagtaaggatatttggaagccagtatagcccctccttgatgtgtttcgcctctgcctctctcctcagaccttcctggagcagtcgaaaacccgatttaacaagaactacaaggggatgagtctatccaaaatcaccaccaccgtgggccta

SEQ ID NO: 3527 - DNA, 1168 bp, Homo sapiens
ggcttctcagacttgggacctgggtgcctgggatcctggcagacagaggttgtgtccagacagccagcatggaagtttcgggaatgggaactggtgggcagtgtccagctctccagaggggtgtgtgtatgcgtgtgcgtgtgtgtgtatatatgtgggaggtcacctgacccaagcatggcgggctgagtccaggaggggtctgcatgttggaggtgtacccagggatcagtgatggtggtttctgaagccccatgtccctggtgaaggaggactgaaccaaggactctgtgagggcaggtgaggcgctcacagcctcgcgaaggtggagaagggcaggggcaggagagggctgcggaggaggggccacggtgcagcaggccgtggggactgccatgcactctgcctggtgtcacatgcccacagcagcctcggtgacgagagcacggagcccaagaggtggggtgtcgtggctctgcccaggatctgagctcattggtcaaagcccgggtcaccatgcacaatcctctggcctggctgggccactgccctctgtccatctcttgcagtggtggggtcggacgccgtggactctgcacagtcctctgccctctgtccgtctcttgcagtggtggggtcagatgctgtggactctgggacctgcagctctgcctttgctggctgggaggtgcacacgcgaggtataggctccagactcctcaccaagatgggctatgagtttggcaagggtgagtacaagctgccctggagaagtgggcaggctgctgcagcatagcccaggtccagcagccatcaggttcccggggtcccgcagccatcgggttcccagggtcccgcagccacagcactgccatccccgtgctcctcagattcccggggtcccgcggccacagcactgccatccccgtgctcctcagattcccagggtcctacggccacagcactgccatctccgtgctcctcagattcccggggtcccgtggccacagcactgccatccccgtgctcctcagattcccggggtcccgcagccacagcactgccatccccgtgcctccgcaggtttgggccgacacgcggaaggccgggtggagcccatccatgctgtggtgttgcctcgagggaagtcgctggaccagtgtgtgga

SEQ ID NO: 3528 - DNA, 1124 bp, Homo sapiens
cagcagcaacagtggagactggggatgggacctggccagtgaccagtcctctccgtccaccccgtcacccccactgccccccgaggcagcccactttctgtttggggagcccaccctgagaaaaaggaaggtgagcttgggggcggcccccagggaggggcgggtgtggcggctgagcctgaccctggcccctgttgctgcagagcccggcccaggtcatgttccagtgtctgtggaagagctgcgggaaggtgctgagcacggcgtcggcgatgcagagacacatccgcctggtgcacctggggtgcggcggggcctggggtgcggcggggcctgcgggttggctggggttgtgaggcccggccaggccaccccttcagctcccactggctggctgtgtctcccgcaggaggcaggcagagcctgagcagagtgatggtgaggaggacttctactacacagagctggatgttggtgtggacacgctgaccgacgggctgtccagcctgactccagtgtcccccacggcctccatgccgcctgccttcccccgcctggagctgccagagctgctggagcccccagccctgcctagtcccctgcggccgcctgccccgcccctgcccccgccccctgtcctgagcaccgttgctaacccccagtcctgtcacagtgaccgtgtctaccaggtgggtgaggccacgggtggcagctggggcgggtctcagggctctctggaggggagtgaagccctggctgtgtctccctgtagggctgcctgacgcccgcccgcctggagccgcagcccacggaggtcggagcctgcccacccgccttgtcctccaggatcggagtcaccctgaggtgcgtgtgggctgagggcctgcggctggcaccaggtggggagggtcctggtctcacagcaccccatgtcctgtgaccccccgcacaggaagccccgcggcgacgcgaagaagtgccggaaggtgtatggcatggagcgccgggacctctggtgcacagcctgccgctggaagaaagcctgccagcggttcctggactaagtccggctcgttcaagaacataagctaccaccttctccctccccaccccctccaggcccg

SEQ ID NO: 3529 - DNA, 1208 bp, Homo sapiens
gtaaattccaaaaagcatttggtttgttagaaaaaacctgttttctccgctttataaaaacatttgaagccatgctttatattgaactcttaaggagagtattaggaactcgtccgttcaggttctaacttgttggtgttaagtgtctggattaaagactctctttttcgtgtgccgaagccatgatttctcaaattcattcagttgtgtcatacaggaaaaggaagcaaaaatttcagctttatttttgttttccggcttaggcttggttgggaagatttgatggtggttagacacgtctgcccttatttgcctgtttagaaaaacctattctaatgacaaaaacagttacattgctcccactattgtcatggttacctgaaggcaaaagtttactcaaagcttctgagattttatgttcgtttatttgcttctctttttaaaaaaatgtcagctgagtttcaggaatgagtagtctgtcaaacaagagatgaaattagaagcctggatctaagggctttggggaagtttcggttgagttcccctttcacttgtgtcggtgctgtaggactcggggtggctccagctggcgtctggcccagcagagagctgtaggggcccgctctggttgctggctgtgtggactctgagggacacccctggcgagggtgttaatgagcctgcagcgtctgagtccacccaccctcagactggcccctgactcactctgcacctgccatatcagcctccttgctagttctgaacagagccacatgctctgtccttggatcttcctggaatgcctggttccttaaccccctagcctggcgactgcctgcctgccttgccacccagttcccttcctcgcttaattttcccacagcgctgaatcctcctagtgtcctgcttaatgcatttatcatacttaatattttactgtgagttagtaaggtccgtggagagaatgttttgtgaaaaaaacagttgctggcacatgatcggggcccagtaaatatttgttcagtgaatgaacgtgaggagcttagcagcagctgtgcgtggtgctggccttgtcacccggaagtccttgtcggtgaggactgagcatgtagaggtaagggttcctggagtgttggccctcaggacagagagccaccatctctcacctgcccaatgaggaaagacagccaggtaaggggtggcttgga

SEQ ID NO: 3530 - DNA, 1197 bp, Homo sapiens
gaagccgggacgctcaccgttggccgagtaccttagagcagccctgacgcctgcttctgtctcttggtgaaagtggcgcccagacttcagtccttacagcccagaactcagaaccgtggaggtgctgtgacccacagggtttaccttgtaattgttgttaaaacccttctgggcttcataatggaatgcttatgttgaaatattattttaagtactattatctatgatgtggttagaaatgccaaagaatttttagcttttttgagacggagtcttgctctgttgcccaggctggagtgtagtggcgcgatctccgctcactgcaagctccccctcctgggttcacgcgattctcccgcctcagtcttccgagtcgctgggactacaggcgcctaccaccatacctggctaattttttttggtattttttgtagagacggggtttcacgacgttacccaggatggtctcgatctcctgacctcgtgatccacccgcctcggcctcccaaagtgctgggattacaggcatgaaccaccgtgcccggcctttttttttttttttggtagatggagtctcgctctgtcgcccaggctggagtgtggtggcgtgatcttggctcactgcagcctccacctccctagttcaaacgattcttctgcttcagcctgctgagtagctgggattacaggcacctgccaccacgccctgctaatttctgtatttttagcagagatggggtttcactgtgttgcccaggctggtctcaaactcctgacctcaggtgatctgccctcctcggcctaccaaaatgttgggattacaggtgtgaaccaccacgcccggccagagtgtgtagcttttgtaaaagttttggaaatggcctcagataatttcagaggtttttaaataaagaacgctcaaaatggagcaaaatggagagcccctgataggcctcctgcgtggaggtttgcagtaagccagaggcacctgtgggtcccagggagagacgggctgctccatggatgctcctgggacctggggcactgggtgggcctcaggcagataggagctggtccgtatctcttgccaagcccaggccaactcctgatgaagcagattcctgtgggtgacaagtgtcagaagatagaataggaccttagggtcaggaaggatttcttgaacaaaaaaggggaaaa

SEQ ID NO: 3531 - DNA, 1144 bp, Homo sapiens
ccagcactgccaggcctctggggcagtgactacagacatgtcccagcagccagggagcctgctgtacctcctgtgcccagcctcacggaccagtcagctttccctggttgcaggtggagggcctcgcgcctgtcctcccacccacccgggtcctgcttgccccagctctgtcctcgcagcccgcacagctctgccagcaggaactgggcaactgcagcaagaagcttgggctgggccggggccgcatcccactgtccctccccaagggcaggcatgcaggggggtcagccacaagggacctgcccttctccctgccttctgtgggttgggaggctcctgactgagccacctggagggagagccctcacattcagagccctccaaagagtttgccaaatgttggaaatgcctccagggcccgtccaccagccgtccagcttccggtgcctgcatgagtctccgcttggccctctcctcggcctaggaacccgcaggtcttgtcccgtcaggttcctcctgaagcttttgttctgagaggaaaaactttccagggtttcaaacttggaaaaacacctgaacgcagccagacacattttccgtcgtctggtcagccaaggaagtgttggcctgtggctgcactcacttccttcagccccaggaagccttggtcgggggcaggagggagggtcaggcagggctgggggcctgaccgcccacactcctcctcaggcctgcggggaacgccctgctccccaactaagcagccttctctttgttctcttccttctctctgtaaacccccgtttcctgccttgttccctccctgaacatgctcttcacctggcaagcagaggaagctacgttgggatatgtgagcagtgtgctccgtggtgctgctgtgtgacccgccttcccgtagccccttgccccgctgctcccgctaggccctctttcctgctcctgccccgcccctttccctgccgctgtcacgcctcttttctgccctgccacaccccatttccggccccgcccctttccctgccgctgtcacgcctcttttctgccctgccacaccccattcccggccccgcccctttccctgccgctgtcacgcctcttttctgccctgccacaccccattccc

SEQ ID NO: 3532 - DNA, 1185 bp, Homo sapiens
agtgctggcttccccaggcctgtagccttgcctcttggccggctagggcagccagggtgcatgcccatgccaggcaagaccagtctgcgtccactctgctgttcagacagcccagccagtggcatggcccccaggagcccggactctgcgcccctgctcaggacagcctccgcctccccgaccctgggctgtctcctgcccacttcccaagtgagggatgtagccgcctcctgggagcagaatgaggagaggaagcacctgtggacacagacagatgggccggtcctgcctctgaggcagctcccaggagtggcctactattgaggagtatgacctccatgtggagtcttcccttttccctgagcttctggcagcccctgcctcagtactagaagctccaagagaaacccatggtaggaggaagctgacacccatggctgacctgtctgcccctgggagagagcttagggctgccaggacttctctgtgcacatccttgactgactctgcggagggtggggccgaaaccctgtttctgtgggcggggaggtggctgtgtcccctgtgccctgctgagccctgggcggggaggtggctgtgtcccctgtgccctgctgagccctgggcggggaggtggctgtgtcccctgtgccctgctgagccctgggcggggaggtggctgtgtcccctgtgctctgctgagccctgggtggtgagccctgggtggctgcaggtccctgcaggatcccccgtgagtgggggtagggcaaggcagttattttcagatggtgccagagggtggagtttcagatttgtttatgcctgtcggaagcactctggggctagggatggggtgcccagctcagcactgacgttcaggacacctggccaagaggcgcctcagatatccttgtcctgctgcggggggttcactctgtagccccaggcaggccggggtactgtagctttttccaggggatccaggaggggtgcaggcacacggcgcacagtggtcctccgcaggcctgcggtcctaggctggccgaatgtgccagcccacacacaggagggggcagttcacaccgagggctggcccgaggattgtcagggccacaccaggcaaagccagcgctattaatatcaggcatacacaagcccccagctgggtgatcctcttatgcctgt

SEQ ID NO: 3533 - DNA, 1127 bp, Homo sapiens
ggccccagccttgggcagcagggcgttctctctggccagcatcctgggccttcactgctggtgcttccacgacttgtttggctgaagtggtagtggtgggtctgtaggcagaggactgagaggatccagagagaggtggggggcgggtcagcctgccaagcctggagacaagtctgcgaagagcatcaggtaggatagttcagccggcacagggacgggagcttggtgcagtgccagattgggccaggggtcctcagtgcccaccttggctgttttccatctgtgtctggagagaagattccaagggtacctgcctgggtaggctggcattgcatcaagtcagcatgggaaggtatgagggccccagtgagaagctgtgcccccactgctgggcctgggcagcttgtgagccagcagccatcatcagagacataattggcccctggaggaatgttgccagcctccttcctcctgcgcaaggcacctctcccaggggcacaccccctcccagcactgggtaggagtgcatcaccttcggcatcatcttcgcagctgtggggctacgcacactgtggagctgcgtacactgtagagctgcgtgttgggaagggggtctggaagttggtgagggtctcaggacaggactagatcctatcaaactgatgatgactcctgggttatctggggagaccttggctggcagcccctcccctaagtcagaagcccccatcacttgcttttcccacgtgaacaaaaccacaggaaggcaggcccctcttccctgaccagagaggacctgccaagggcagggctccagggcagcctcaccacgtgttccaagtggggcccgtcaggcttcacagattgtctacttgctctgcagagatgacggatcctttctgcgttggaggccgtcggctcccggggtccagcaagagtggtcccgggaaggatggcagccgaaaggaggtccgacttccaatgctgcatgacccaccgaagatgggtaagaggagtcagggccagagtcaattccagatggttctgggcagcaagtggtaggagtggaccattgccctgggcgtcctgtctccaggtacccagctaggcccctagagttcccaagg

SEQ ID NO: 3534 - DNA, 1150 bp, Homo sapiens
gtagggcagcagtgtgcgcacaggacgcacacagacaggtgtgcccataaccagtacacacaagctctacacaactggacagggtacagctctgctcggacagggcgcaccaggggcgagggcgggcagctgggctggttcagagggagggggccatgggttcagagggaggggaccatgggtcccactctcacagacaggtctccggactgcatcagagcactcgggaagcagcaatgccccaggctgtttttagcccccaggggccagttagggtcccagtgcaagctcgacctagcttcttccgcctctccacgaggaggcgctcccgcgcacgcgcctaccacgttcctgccccctagccgcggccggaagtcgtcgaaccaggacgtcgggacttccgcccagggaatcaaaagtgggcggggcgtgtgcggactgagcgctctgcttccggggcgcgggtgacgcgacgacggcgacactttgctacggagtgcatcggacgtcgaagcctagagtctctgcgtctttccctcttccgctgcctcattcctttccttcctagccttggtcgtcgccgccaccatgaacaagaagaagaaaccgttcctagggatgcccgcgcccctcggctacgtgccggggctgggccgggggtgaggcctggggcggcgcgcgaggggcggggacccggctacaggagcgcagtgctttggggcgtgtttgggggcgggggtctatggccgcgcagtctgaaagacgcttggtggatcggcttaatccctgcaggaagcaacgggctttggggtcaggacatacctgtgtgtgcaccctgcttgccgcctagatgtgacacattgactctcagcccagtgttttggtctgtaagatgggtaatgctgtatacggtctgcagtgaggagtagaggaatctgacgtgtagtggaaacacgcgaccaccttcctcaggtcgggctgacactccccccccccgcccgcccgcccgccccgccttaagcgtgcctgggtcctctatgcctgcaacacagatgaccaccgtgcgttgctggataagtgagcagtcgttattatcctatttggctattcatttgatgaggaacactactgggtttttcttggtggtggt

SEQ ID NO: 3535 - DNA, 1218 bp, Homo sapiens
aacacaaggactgcaactcctatgtgtgtctcagtgtgaactaagcccagagacagtagactgagggggcatgtaacacactgagacaccggttggggcagccaagggagtgcaggcatcaccctgcccctaaccctaggctgcatatcttgaggctccaaaagagaccccttccttctgcttgaggagagacggaagtgtagggaggcctttgtcttgcatcgagggtaccagctcagccatagcataatagggcactgataagagtcatgaggtaccccccttccgggccctagctcccagatgacatttctaggcaaccttgggccagaaggaaaccgctgccctgaaggaaagggttcagtcctggcagtattcattacctgctaaccgaagagcccttgggccctgaatagccagcagtgatacccaggtactacatcaagggccttgggaaagcctctgagacttagtggctttagatgagactcagcacattactagctgtggtggctacagaggaaaacttctgtttgagaaaagcagagggaaatgcaaaggggactttatcttgcactttaggtaccagcacagccacatgggggtagagcactgactgggctcttgtaatctcttattccaggactgtatgcttggatggcatttctggacatgccctgggccagaggggagtccagtgccctgcagggtaaatcccaggccaggtagcattcacaaaaagctgacttaagagaccttgggccttaagagagcatctgtggtagtctagcagtactccttgtacctagggtggtatggctacagagtgaggctcctctgtctttaaaaactggagagaagagtgggaaggctggtgtggtttgagtgccagctcagctgtaatacaataacaccaggtagacttctaatgttttagactctaatccctgactcctggactgcacttctggactcacccagggcctgggggccttcagtgccctgaagggaagcacagaggcatgacaggatttgccacctgctgactgtagagcctgagcgctttgagtgaacacaggcagtagccagggagtggttacagcaggccttgggcaagacccagtgttgtgctggcttcaggtctgacccagcacagtcacagcagtggtagccacaggggtgccagtgtcattccacttccagctttcagtaactcat

SEQ ID NO: 3536 - DNA, 1169 bp, Homo sapiens
ttccttgattaggtgctatttactcaaagaccaagaggaagtaagagagtgtgccaagcctgtacctagagagaaagtggtccaagcacagggaattgtgagtgcaaaagctttaaggtggagtcatgtgtggtatgttgaaagacaaggtaggaggccagggtggctagagtgcagtgagccagcagacagcagtagacactgaggccagagggttagaggacagggcctgggcaccatcaaataagctttggagttcctgttagggtcggagatctcactcagtgtgacatggggagcctctccggaggctttgggcagaagagtggtatcatcccactcaagtcacgtcggctgccatgtggtgatgaggctattaggtggctagtgtcaaagaagggagaagcagcgttatatcggaatgggctcctaccaactcagcagaagccatgtgtgcatctcttcctgaaccatgccctcatgtcacttgaaattagccacggcgaaggtaagtccatgtggaaatctgcaaatactatagaggatttcttctccctcccttgtcccttccccttctcgtctttcctgcatttcttcctttcttcttcttcttcttcctcctcctccagttccttcttttctctttttttttacaacattatatatacttatttattgtttataagcaaagttgttgataaacacttaccagcacatctcagaagagacttttagaagtgtattgcaaccatttatgtaaaagatggtggtggcttagactagcatggtaacaaaggaggtgataggaagtggtgagattctgcaaggaatcttcaaaggaagcacggacaggttttactgaatgactaagaaaacggtggagaaaacattcctcgacaaaatagtagagaaaataatgagtgaagcctggcttccaggttttcatcttagtatctaaaagaatagttatcgtggattaagatggaaatggcttcaataaatgagcagtttgtgaaatgagtgttaaaaacctgatttcagacatataaagattgacatcttaaggtgtagccaagtggagatattgagtagaaagttggatatatgagcttcgtactcaggaaaggagtctggattggagatatcaatttgggaagtatctgcaagga

SEQ ID NO: 3537 - DNA, 1227 bp, Homo sapiens
tccaccctggagtcaggatccctgagtttatagtgagtgtgagtcaacaccaactataaaagctgaccttttcatcagtgctttgtggtctttatctgtaatgtgaaaattataacaccaatgttgcaagattttcgagagaattaaaagattatatgcacatgacctttagcaaccatgatgcctagtaggtaataggagttgaataaaaggtaattactatcattaggcatattaactgaggcagtgtattgtttgcttataaaggttccgcatgctcagtgctgcagaatttatataggcagagccgtcgcaagaaatgttgggaggtggttttttttgtttttgtttttgttttttctgacggtcctcttatcttcaaaacatcatggcactgctgcctggatttgctggtttgaataggccacatttcagctattcttctcattgtcaggtcatggcaaataataagtctcaccttttctttctgaaattgcattcccgcttcattcatctgaagttaattcttttcttttttgtatcatgcttattttgcaaacatgaacaatcttgtcactaccgtgtatatgcaaataaagtgaaatgataaattgcttaagtgtctccgtttttctatctgtagaataggggtcataatcccttcctgttgcacttttccagacagttgagaaaataaaaacacgtaatgtagagaaaagagcatcagtattctcataaatagaaaattaagccatttagactatgtacaggaagtttgataagtagacttccagaaaagaagtggcaaagtattctttaattgttcattccctaagaaaaagctgtctctctcaatcttttgatacctctgtctttctttccctctctgtctacccgcctctgttctgtgtgcctagatcctgttaatattttctctcctctactattttcatgtctgcatgtaattttttttcatatctagccaagtgccaaaataacattatgtttgatatatcaattaattttttaattaaatcaattaatgagaacagctagagaaatgtagattttagttcacatgaaactggagggtactggctacgttgtaattaatatattaatagtttgtcagtcttggtcattgtcttggtcagaggatgccataggaagctagatcagtcctgtaatttcttcctattttttttttttaaataaagccaattattt

SEQ ID NO: 3538 - DNA, 1132 bp, Homo sapiens
cttttggtaatttaatttctattatgaatttctggtgcctatgagctagctatcacctacctgaaaggtgcttagaggtgaaggtactgtttctaaaaacacatcactgtgatacctttctatcctcacattttcaagcttgcctcttttctgttctttgtggatataacttaagcaattgtgttattcataaaggtttagaaatttcaatattcccaacactctatgtttctgattttataacagtagccatttttgaaagtcagatgtttggcctgttttatatgaataaagtttatttataaaatattataaaaaataagtaaataaacagaacattaataataaagttttggttcttcctattcctgactttcatataatgaaaattatcctattgatctaagtagaagttatcatagaaagtggacacgtataagactttccttcctttttttttttaataacatatgaggaacaagacttctcttcccatatacttcatattttagaggacattgttttaaaggcttatgtctcactgtaaaattctgtcagccaaatagtaccaatacgttttcaagtagttctcactgataatttagttgaaccagagatcaaatatttgctcccgaattactactggtaatcaagtagttgaacaaaaaattactaaagcatttccgttagatcagtcaaggacagtactgcatctttttttttttttttttttttaagacggagtctcggtctgtcacccaggctggagtgcagtggcgggatctcggctcactgcaagctccgcctcccaggttcacgccattctcctgcctcagcctcccgagcagctgggactacaggctcccatcaccacgctcggctaagtttttgtaattttagtagagacagggtttcaccgtgttagccaggatggtctcgatctcctgacctcgtgatctgcctgcctcggcctcccaaagtgctgggattacaggcgtgaaccactgcacccggcccagtactgcatcttaacagcaaagccattttattctactttataactgagagacttgataccatccatctctttaggttacagaggataatttgaagagaaatgttactgtagaat

SEQ ID NO: 3539 - DNA, 1239 bp, Homo sapiens
ttaatgtgttctcttccctacagatttcagaacttatatttccacctcttccaatgtggcaccctttgcccagaaaaaagccaggaatgtatcgagggaatggccatcagaatcactatcctcctcctgttccatttggttatccaaatcagggaagaaaaaataaaccatatcgcccaattccagtgacatgggtacctcctcctggaatgcattgtgaccggaatcactggattaatcctcacatgttagcacctcactaacttcgtttttgattgtgttggtgtcatgttgagaaaaaggtagaataaaccttactacacattaaaagttaaaagttcttactaatagtagtgaagttagatgggccaaaccatcaaacttatttttatagaagttattgagaataatctttcttaaaaaatatatgcactttagatattgatatagtttgagaaattttattaaagttagtcaagtgcctaagtttttaatattggacttgagtatttatatattgtgcatcaactctgttggatacgagaacactgtagaagtggacgatttgttctagcacctttgagaatttactttatggagcgtatgtaagttatttatatacaaggaaatctattttatgtcgttgtttaagagaattgtgtgaaatcatgtagttgcaaataaaaaatagtttgaggcatgacaacgcgtgtttctgttgtgtgcataaaaggggaaaagaacgggtatttcccttcaatgtatttaactaaatagcaaaaacattaaacagaacgtaagaattttaaaatttcctttgaaaaatcaactattaaccatacttttcctaaaagaccacatatcagaatatgcatatgaaaagttaaaaatttgttagtggtagttattgaaaatataataaaacatcttttaactatcagtgtcactatacatagggttttttaacaaagaatttggctcgtactaattttgacatgacatctgacttacatgtctaatgccattgcataaagtagatgtgttcttacagctgctctaatctctgtgccttgtgctttttttaaaaaacatttaagtctttactagaggcctaaaataaagtcaaataatacaatacttcagattcttcagtagtccatatttatacaactgtaattccatcagtcttgtaagggtacttgaactacaaaaagaaaaaaagagatatctctataagag

SEQ ID NO: 3540 - DNA, 1127 bp, Homo sapiens
tggccagtgatgatgagcattttttcatgtgtcttttggctgcataaatgtcttcttttgagaagtgtccgctcatatcctttgcccactttttgatggggttgtttgtttttttcttgtaaatttgtttgagttcattgtagattctggatattagccctttgtcagatgagtaagttgcgaaaattttctcccattttgtaggttgcctgttcactctgacggtagtttttttcgctgtgcagaagctctttagtttaattagatcccatttgtcaattttggcttttgttaccattgctttttgtgttttagacatgaagtccttgcccatgcctatgtcctgaatggtaatgcctaggttttcttctagggcttttatggttttaggtctaacgtttaagtctttaatccatcttgaattaatttttgtataagatgtaaggaagggatccagtttcagctttctacatatggctagccagttttcccagcaccatttattaaatagggaatcctttccccattgcttgtttttctcaggtttgtcaaagatcagatagttgtagatatgcggcgttatctctgagggctctgttctgttccattgatctatatctctgttttggtaccagtaccatgctgttttggttactgtagccttgtagtatagtttgaagtcaggtagcatgatgccttcagctttgttcttttggcttaggattgacttggcgatgcgggctcttttttggttccatatgaactttaaagtagttttttccaattctgtgaagaaagtcgttggtagcttgatggggatggcattgaatctataaattaccttgggcagtatggccattttcacgatattgattcttccgcagtatggccattttcacgatattgattcttcctacccatgagcatggaatgttcttccatttgtttgtatcctcttttatttcattgagcagtggtttgtagttctccttgaagaggtccttcacgtcccttgtaaggtggattcctaggtattttattctctttgaagcaattgtgaatgggagttcactcatgatttggctctctgtttgtctgttattggtgtgtaagaatgcttgtgattt

SEQ ID NO: 3541 - DNA, 1121 bp, Homo sapiens
aaatttttgacactgaagatgtcttgattgctttctttctcttcagatctgagtttgccaatttctgtttagcattccttttctactgagactcttatatcatttattgcccatattttgggccataaaacaagcttcaacacattttttagaaaaataaaatcatacagaatctgttctctgatgctgatggaatcaaattagagttaaataccagggaaatcatacaaaattttcacactcagaaattaagcaagatacttctaaaaatacagagattaaaaaagtcttacaaagaacaaaaaatatgttcgggtaaatgaaaataaaaagagaatataccaaaatttctgggattcaggtaaagcagtgctgagaaggaaatttatagcactaaacacttacatcacaaaggtggaaaaatcatgaatcaaccatctaagcttgcagtttaagaaactaaggaaaaaaatatatacttaacatggcagaggagatatcataatcacaaaggtagttttcccagggcaagccttatccactgcattccagatgtgctcacctctgtggtttccccaaatgtggaaaactggactgcataatttgtggtagcgggggactgcattaataccttcctctggctttttattttattttgttcatttttttaatttaaaaaatagtgagaaaagaagaaaataagcccaatgccagcagaatgaaggaaataataaagataataacagaaataaatgaaattgaaaaaagaaaaaaaaaacagaaaaatcaataaagaagtgaattttttaaaaagaccaacacagctgacaagattttagcacaagtgacacagaattttatatatatatatatatatatacacatataggtctatatatatgtctctctatatgtctatatgtctatatatatgtctatgtctatatgtctatagtctatgtctatatctctatatgtctatctgtctatatctatgtctatctatatctatgtctatgtctatatatatgtctatatgtctatatatgatgtctatgtctatatatgtctatatatgtctatatatatgtctatatatatgtctatatatatgtctatat

SEQ ID NO: 3542 - DNA, 1113 bp, Homo sapiens
gataagtgaagaatatttacacttacctggatttttagagaactgaatgacagtgttgacatgtgaatttattaggaccatgacgtgtgcctgagaagctgccggctaaatgtttgctgttagaataagagcagtataggagatcacataacatagtgattaaatggtggggatctgaaatcgaactgcccaatcttgaatccttataatcactttcagctgtgtaatcttgagtaattaactggtgcatgtctcctcatctgacatttggggagaattatagtatcttctgcatatgtagttaaatgacataatatatgcaaagtcaattaatggaatgcatggctcatagaaagtgttgcataaatgtttagctatatttctatgtaaatgtttacaaacagtgtttactaaaaaaatcagaaaattgatgagttaaatcttgagcattctacataatccattttattgcaatttggctaagcttgacccttttttccccctcttcttagatcccaaatttgaagtcatcgaaaaaccccaggcctgaagaaataaagtaaaattaatctggtaatttgtcacggattagttgtacaactagttagaagtttcagaataaacatgcatttcataactgtcaaatgttcttttaattctgagtccaaataaattatttggtgatgttgagtgtgttcttgatgaattgagttctgtgtgttagagttgtttttagatcctttcatttggttataataaagcagatggagaccttggatgaactggacacaacttgcacataaccctgcttgttgtggagggatgttacccttcctttagaacatgaagaaatggtttataaattcttggtcatagctttctcagaaatctgagtgtaattttttatatgtcttggaacatctattgtgtttaactttgatctcctcaaatgttaaataattttctcccagtaacccaggtccctcatctttgcttgcagatcacagagtctgttacagttctgttcagattgatgagggaaaggtagggatgacgggggttctataaaggaacttactttaaaagagtaaactttatggtgttgttttgtcc

SEQ ID NO: 3543 - DNA, 1173 bp, Homo sapiens
tgtcctttatggacccaacaggggaggaaaaaataccattgcactgggtttatccacttactgtggagttggggaaccagaaacaaccactggacacgttgcaagcgcgtcaaggtttccaccgccacctggtggctagatggagcacagcatctgtgtaactggtgggcaaaggcgttctgctccaagatgtcaaagtgggggagaaaattatgggtgttctgcaatcttggcaaaagaagagtactgtactccttatctttttactgcttctccatgttcacccttaaaagattgatttttattttttactcagctctcctcttgtttttcaggttgacgccgctgtcaccccagaggagcgccacctgtccaagatgcagcagaacggctacgaaaatccaacctacaagttctttgagcagatgcagaactagacccccgccacagcagcctctgaagttggacagcaaaaccattgcttcactacccatcggtgtccatttatagaataatgtgggaagaaacaaacccgttttatgatttactcattatcgccttttgacagctgtgctgtaacacaagtagatgcctgaacttgaattaatccacacatcagtaatgtattctatctctctttacattttggtctctatactacattattaatgggttttgtgtactgtaaagaatttagctgtatcaaactagtgcatgaatagattctctcctgattatttatcacatagccccttagccagttgtatattattcttgtggtttgtgacccaattaagtcctactttacatatgctttaagaatcgatgggggatgcttcatgtgaacgtgggagttcagctgcttctcttgcctaagtattcctttcctgatcactatgcattttaaagttaaacatttttaagtatttcagatgctttagagagattttttttccatgactgcattttactgtacagattgctgcttctgctatatttgtgatataggaattaagaggatacacacgtttgtttcttcgtgcctgttttatgtgcacacattaggcattgagacttcaagcttttctttttttgtccacgtatctttgggtctttgataaagaaaagaatccctgttcattgtaagcacttttacggggcgggtggggaggg

SEQ ID NO: 3544 - DNA, 1186 bp, Homo sapiens
caggattgttactctgaaagtgaaccaagagagtcagaatttctaggataaggcaggtccatgtgagataaacttccatctgtaagggaggtaggagtgagctggggatctacctggaatgcgcacaatttctggatacacgaattaagccagaaggcattaattctctggtatctgttcaccagtggagactgctacatcttatttcccaattagtttccattccagttgttcgtataaacctctattatataacatcgtggtcttattaaataaataataaacaagaataaaaagagtaccaaagtgtaacccatgctaaaaaaaatcctgttgtaaattcactcaaaaagcaaataatcttttcctttgtgaaattggttcctaatatattgggtctgcatgttgattattttatgtggagttttcttacaatgaaacacatctactctaccactcactgttttctccttacactttgtagacatgcagtgagaagagtaccaacttgcatgactacggcatgttgctgccctgcggaattgacaagttccgaggggtagagtttgtgtgttgcccactggctgaagaaagtgacaatgtggattctgctgatgcggaggaggatgactcggatgtctggtggggcggagcagacacagactatgcagatgggaggtaaggtggcctttgtgttcagcctcagagatgctgaaacatcttgtatggagtatttgtatcctgtaaattaatctttctgtttatcactgaaaaggtctctgcccactcccatcagagtctgctgttatgcaaaaatctgaactatgaatttttatggcatcctgttgaattaataatatcagtcacccatcacagagttaattttaactatttaatattaaacttgggatcaaaatcccactgataactatcataggttactggtagttctaacagggagttgaaataataatggcgttctgttttggtcattaatttaaaaatatttttaaatgctctctgggattgtcagtcattagtttaaggtgaattttcgttaaaggtttggtttgagattttgggcgttctctgtgtggatgtgtaagggtttttttttggccttttatcatttcttttccttcatagtggaagtcaaaggcattaataaatgcttgttaattttttt

SEQ ID NO: 3545 - DNA, 1135 bp, Homo sapiens
actaccaacgccatacttgctctcagtgctgagaggtggcacaaatattattttcagtcttggtcatcaggcagggcctggcaggcatcatgctctgtgtgagtcagtggagtttattataagaatgcggtagcctccacagtgattatatttattataggaaaacgtgtaattttgttgtcagaacctttcagcaggtaccacaaaatctcatatgggaaaacgtgtaaatttttcatgaataaattcctttcggtattggtaatttccttctctgttttagtataaaagaaagcattgccttataggtggctaagaacatctgtagcatacataacacttaatctaaaggagtgttgaagaccgggctgattcctaattgagaatgagcaagaatagaactctttttgatagttatccctgttcttcctccaagcctctgccttggagctatggatactataactaactgaagcttcttctttcaggtacccactgatggtaatgctggcctgctggctgaaccccagattgccatgttctgtggcagactgaacatgcacatgaatgtccagaatgggaagtgggattcagatccatcagggaccaaaacctgcattgataccaaggaaggcatcctgcagtattgccaagaagtaagtcctgtccggtggctagcaattcacgttggatcacatgcatttgttttcaaaaaatttaacttcttgtattttgcatcagtattttaaccctacagtaaaaatcttggttcctaatgattcaccataccattaatatatttatttgcattaccctatgatatacatataaatgtttttaaaattatgatgtcgtattatgaccatcactaaacagtagtttaagatgtcacagcacttttttttttcctcactctgtcacccaggttggagtgcagtggcaagattatggcttactgtagccttgacctactgggctcaagcaatcctcccacctcagcctcccaagtagctggactataggcacatgccaccaggcctgactgattttttttaatttttagtagagatggggtctccttgtgttggccaggctgtctgaaactcctgggctcaagcgatcctctggctggacc

SEQ ID NO: 3546 - DNA, 1116 bp, Homo sapiens
ggcggcgccaagggcgcgtgcacctgtgggcgcggggcgcgagggcccctcccggcgcgagcgggcgcagttccccggcggcgccgctaggggtctctctcgggtgccgagcggggtgggccggatcagctgactcgcctggctctgagccccgccgccgcgctcgggctccgtcagtttcctcggcagcggtaggcgagagcacgcggaggagcgtgcgcgggggccccgggagacggcggcggtggcggcgcgggcagagcaaggacgcggcggatcccactcgcacagcagcgcactcggtgccccgcgcagggtcgcgatgctgcccggtttggcactgctcctgctggccgcctggacggctcgggcgctggaggtgggtgccgcgcctcggaaggcggggggaggctgcacggtggggacgcgataccccccaagaccttaacccaagtctttaatgcagagaagccgggggtccgtcaatgggacccctctcctctccgcccccgcttgcggacgtccagcgcatccccgctttcggcccagccctgccccagggagtcgcgctccggcccgctgagagggagcgggcgaggcgctggtctccctggttccgcgccagcccggggcgagaagggtagggggcgaccctgagcccagaccccgacttagtccctgccttggaagcgggggtcgggggaggcgagagacattcagacaggggggaagggggaaggagcacgtggggaaaaccgaaaacgcagcgtccctaaagccagtccttcgctcttgaatcgttgccctttcctttctcttgggccctggggaggaggaggaggagtcgggacagcccaggaagctaggagcccctcgcttttccctgcgttctccgcctcgtttcaccttcctctctcacccccatcccccttccttgctccaacctcttttcgcggctgctggcggcggcagcctgggtgcgaccctagcccgagccggcgtcggggtcgcgcaccgccttccacaggcaaactttgtgcatgtccgcgtctcccttttgtgtaacttgcgagaaatgggaggggtcggagacccatagccaccccgcgccttccc

SEQ ID NO: 3547 - DNA, 1196 bp, Homo sapiens
ctaagcaatttcttataaagagatggtaaaatcagacacaaggcccagaactgaaaacatatgctgaagggaaagtgtggaactggtaacacaggtggtcaccatagcaaatttctcatcttggaccaaaagaagcaatgaatcaaatatgacttagagaagtattgcatgcacaaggagcttttctccccccagacatggccaatatacaaaaaaatcaaaccaaatttgtaaatgttctatgaattaatctcaagctggaaaaattattttcttcttgaatgtaaattctcagcttctggattcttgaccactggcattgaccaactggcatctcgttgagcctgaagccaatatctttttctcttttccactgacattctgtgcatttgttattgttggcaacgttaagtactcgataataggaagataattttggctaggatagtaactgaggaactagggatagcttcttttctaaatgttgcttgtgtggggttaatgctgggataatcttgtgtctcttattaaatctttaaatccttaataaatgaggctcatgggatatgtctggcattgaactaacccagactgtgaagctcttaaaaagtttgcacacattccactgagaaaggtatttcaccacctcacaggatacaaaaaacaacaacaacaacaacaaaactgctgtgcctgaaactgagaaagataagaaatttgagaagctaattattgatttttaaattgaaattttgaacactgaaatttaacttgtgtgactaagatttttcgattttggattttagcttctttagatcttaacatctttgtgctttaatttgcaagggaatttaaactttgaattttctattttggagcttgatgatgggagaacttttgtccagcatctctatagcgctttttaattatttttgttattttattctttattatttttgttattatagtaactttatgcatgctagtattgaatactgcaatgtcattcaatctcatttcagacagttgcttctgggtacaaaaattccatagacataagttcattgactgggtcctttttgctgtaaaaagaatgttgaccagaagcattgtgaggtgagctcagctatgtgataatgaatgaggcattcactaagttcacagatggtcttgatgaaagtagcacagagggtggg

SEQ ID NO: 3548 - DNA, 1474 bp, Homo sapiens
atggtgactacactttgtccaccttagagcaagacattatgtacaaaggtgttgtcttgaggtacagcggctcctctgcggcattggaaagaattcgcagctttagccctctcaaagagcccttgaccatccaggttcttactgtgggcaatgcccttcgacctaaaattaaatacacctacttcgtaaagaagaagaaggaatctttcaatgctatccccactttttcagcatgggtcattgaagagtggggcgaatgttctaagtcatgtgaattgggttggcagagaagactggtagaatgccgagacattaatggacagcctgcttccgagtgtgcaaaggaagtgaagccagccagcaccagaccttgtgcagaccatccctgcccccagtggcagctgggggagtggtcatcatgttctaagacctgtgggaagggttacaaaaaaagaagcttgaagtgtctgtcccatgatggaggggtgttatctcatgagagctgtgatcctttaaagaaacctaaacatttcatagacttttgcacaatggcagaatgcagttaagtggtttaagtggtgttagctttgagggcaaggcaaagtgaggaagggctggtgcagggaaagcaagaaggctggagggatccagcgtatcttgccagtaaccagtgaggtgtatcagtaaggtgggattatgggggtagatagaaaaggagttgaatcatcagagtaaactgccagttgcaaatttgataggatagttagtgaggattattaacctctgagcagtgatatagcataataaagccccgggcattattattattatttcttttgttacatctattacaagtttagaaaaaacaaagcaattgtcaaaaaaagttagaactattacaacccctgtttcctggtacttatcaaatacttagtatcatgggggttgggaaatgaaaagtaggagaaaagtgagattttactaagacctgttttactttacctcactaacaatggggggagaaaggagtacaaataggatctttgaccagcactgtttatggctgctatggtttcagagaatgtttatacattatttctaccgagaattaaaacttcagattgttcaacatgagagaaaggctcagcaacgtgaaataacgcaaatggcttcctctttccttttttggaccatctcagtctttatttgtgtaattcattttgaggaaaaaacaactccatgtatttattcaagtgcattaaagtctacaatggaaaaaaagcagtgaagcattagatgctggtaaaagctagaggagacacaatgagcttagtacctccaacttcctttctttcctaccatgtaaccctgctttgggaatatggatgtaaagaagtaacttgtgtctcatgaaaatcagtacaatcacacaaggaggatgaaacgccggaacaaaaatgaggtgtgtagaaca

SEQ ID NO: 3549 - DNA, 1125 bp, Homo sapiens
cggagcgggctccggggtctcggagctttgggccagtacccacgctgctgctgctcgccgcggcgctactggccgtgtcggacgcactcgggcgcccctccgaggaggacgaggagctagtggtgccggagctggagcgcgccccgggacacgggaccacgcgcctccgcctgcacgcctttgaccagcagctggatctggagctgcggcccgacagcagctttttggcgcccggcttcacgctccagaacgtggggcgcaaatccgggtccgagacgccgcttccggaaaccgacctggcgcactgcttctactccggcaccgtgaatggcgatcccagctcggctgccgccctcagcctctgcgagggcgtgcgcggcgccttctacctgctgggggaggcgtatttcatccagccgctgcccgccgccagcgagcgcctcgccaccgccgccccaggggagaagccgccggcaccactacagttccacctcctgcggcggaatcggcagggcgacgtcggcggcacgtgcggggtcgtggacgacgagccccggccgactgggaaagcggagaccgaagacgaggacgaagggactgagggcgaggacgaaggggctcagtggtcgccgcaggacccggcactgcaaggcgtaggacagcccacaggtagaagaattgctctcgtttgtctgtccattcatcctcctctcctcactttatctatcccacgcgacttcagggtagactcctgctggcaggcaggatcataagtccgcggacagaacggaggcctggagtggaggaatgtggtttgaggtttggattggtgaactcagctagaaaacatacttgcatttgcccgaataatgaataaccaagaaaaaaactgacaaacgattttctgcaaactaaagcaaagcatttaggccggggagggagagtttgtaacctgactccttccacctttagcgagttggagcttgtgcgagttctttccactctgtgtatttctttttaatgattttgtgtgcgccttttgtgcgggttgcaacgttgcgctgagttttgtaaccgctgcctgtgcgtgcatcctgcgctcacgggagggcggatgtggagagg

SEQ ID NO: 3550 - DNA, 1225 bp, Homo sapiens
ttgtttttttccttttcccgtatttgctgaatctccactatccgactttttttttttaatcttttctttccccccccccccaccccacctctttctggagcacgaatccaaacattttcccaagcaacaaagaaaagttcgcacgctggcaccgcagcccggacaggctggcgctgctgccgggcccccctccctccgacacttgactcaatcctgcaagcaagtgtgtgtgtgtccccatcccccgccccgttaacttcatagcaaataacaaatacccataaagtcccagtcgcgcagcccctccccgcgggcagcgcactatgctgctcgggtgggcgtccctgctgctgtgcgcgttccgcctgcccctggccgcggtcggccccgccgcgacacctgcccaggataaagccgggcagcctccgactgctgcagcagccgcccagccccgccggcggcagggggaggaggtgcaggagcgagccgagcctcccggccacccgcaccccctggcgcagcggcgcaggagcaaggggctggtgcagaacatcgaccaactctactccggcggcggcaaggtgggctacctcgtctacgcgggcggccggaggttcctcttggacctggagcgagatggttcggtgggcattgctggcttcgtgcccgcaggaggcgggacgagtgcgccctggcgccaccggagccactgcttctatcggggcacagtggacggtagtccccgctctctggctgtctttgacctctgtgggggtctcgacggcttcttcgcggtcaagcacgcgcgctacaccctaaagccactgctgcgcggaccctgggcggaggaagaaaaggggcgcgtgtacggggatgggtccgcacggatcctgcacgtctacacccgcgagggcttcagcttcgaggccctgccgccgcgcgccagctgcgaaacccccgcgtccacaccggaggcccacgagcatgctccggcgcacagcaacccgagcggacgcgcagcactggcctcgcagctcttggaccagtccgctctctcgcccgctgggggctcaggaccgcagacgtggtggcggcggcggcgccgctccatctcccgggcccgccaggtggagctgcttctggtggctgacgcgtccatggcgcggttgtatggccggggcctgcagcattacctgctgaccctggcctccatcgccaataggct

SEQ ID NO: 3551 - DNA, 1293 bp, Homo sapiens
ggaacaatggtgaatttataataaaaacagaagtgtctcaggctgagaagaggtatggagaaaagagtagactcatgaatgatttctgcactctcaaagtaatggttaaagaccctttgcatagtgtaaacttgtcttgcccatgacatctgtgtaaatggaactagaactaacttttggattctactcatttttaaagaatgttgcagaagaaaatacaagggtactctattccttatatggagttgttgaacacagtggtactatgaggtcggggcattacactgcctatgccaaggcaagaaccgcaaatagtcatctctctaatcttgttcttcacggtgatattccacaaggtaagatgtcttggaaaattcaggcactcagcagattacggcaaaaccaaaaagtaatcaacttgaatctttccatttatgtttgatttttcattttctcatgacagattttgaaatggaatcaaaagggcagtggtttcacatcagcgacacacatgtgcaagctgtgcctacaactaaagtactaaactcacaagcgtacctcctattttatgagagaatactgtaataatatcaaaagcactttttctggaaacacatttatggcttttataatggctgaaataacgataaaaaaagactaattaaaatcatgttcacttaacattaaatacatgccagaagaaatcatgtttatttaaatattgaagggaaaaatacctaaaaatgtacaaaggttttatattgtcatagtggtttttattcctgctttgtttctggaaaggaaatcctgaattacttaagtactttgtgtttaatatatctgggtgatggatcacaacacatcaataaactgacttaccctaaaatcttgttttattactgggaagattttaacttctattgacttatcctactaggtaacactttaaaaaatatttcatcagactggctaatgaagcttcattacaagtgtgttaattttttttttttttttttttttttttttttgagacggagtcttgctctgtcgcccaggctggagtgcagtggtgcgatctcagcttactgcaagctctgcctcctaggttcacgccattctcctgtctcagcctcccgagcagctgggactacaggcgcccgccaccacgcccagctaattatttgtatttttagtagagacagggtttcaccgtgttagccaggatggtctcgatctcctgacctcgtgatccacctgccttggcctcccaaagtgctgggattacaggcttga

SEQ ID NO: 3552 - DNA, 1197 bp, Homo sapiens
tattttgtgtatcaacaggtgacagttaaaggatttgaacctttaattcagtttgcctacactgctaaactgattttaagtaaagagaatgtggatgaagtgtgcaaatgtgtggagtttttaagtgtacataatattgaggaatcctgctttcagtttctgaaatttaagtttttggactccactgcagaccagcaagaatgcccaagaaaaaaatgcttttcatcacactgtcagaaaacagaccttaaactttcacttttggaccagagggatctagaaactgatgaagtggaggaatttctggaaaataaaaatgttcagactcctcagtgtaaactccgcaggtatcaaggaaatgcaaaagcctcacctcctctacaagacagtgccagtcagacatatgagtccatgtgcttagagaaggatgctgctctggccttgccttctttatgccccaaatacagaaaattccaaaaagcatttggaactgacagagtccgtactggggaatctagtgtcaaagacattcatgcttctgttcagccaaatgaaaggtctgaaaatgaatgcctgggaggagtcccggagtgtagagatttgcaggtgatgttaaaatgtgacgaaagtaaattagcaatggaacctgaagaaacgaagaaagatcctgcttctcagtgcccaactgaaaaatcagaagtgactcctttcccccacaattcttccatagaccctcatggactttattctttgtctcttttacacacatatgaccaatatggtgacttgaattttgctggtatgcaaaacacaacagtgttaacagaaaagcctttgtcaggtacagacgtccaagaaaaaacatttggtgaaagtcaggatttacctttgaaatccgacttgggcaccagggaagatagtagtgttgcatctagtgataggagtagtgtggagcgagaagtggcagaacacctagcaaaaggcttctggagtgacatttgcagcacggacactccttgccaaatgcagttatcacctgctgtggccaaagatggctcagaacagatctcacagaaacggtctgagtgtccgtggttaggtatcaggattagtgagagcccagaaccaggtcaaaggactttcacaacattaagttctgtcaactgcccttttataagtactctgagtactgaaggc

SEQ ID NO: 3553 - DNA, 1198 bp, Homo sapiens
agtgttggtatctggtagcgtcactgaacttctcagcatcacaatggaaaattcctgctagtccttctggacaaacttttgacactgaaatctgagcagactggttgatgatggcttcctctctcttaggggcatcatgccagcagaaccctgtggggaggaccataccaaatgggcaagcccaacagtgctcagaagggcccctgggctgtgagggagcatcacttgcctctttgatcaggttcataaatctgggtccgaggcgccatggcttatgtctatggcactgcagggagctgacggtcagctgggatgcccggtgcgaggcaatggccaccatgtacacagcatcgtacatcagagccgcttcagtctgtggaggaaaacacacaccgcatcttaaattccacttttgcttaccttcctttacttgcataatcactctccctgcttccatagctcttatctgtctgatctcaaaggccatttactcttcagctaggtagttttcactctccaatagctatttttctccaaaataatacctcacactttggagtaaattgaagttataactctgcttcgtttcaagttctttaaaaaaaaataaagcaacccagatcagccacaaaagacttgattcaaggaacaaatattttgcgaagtgtcctccatgttaagcatggtgttaagatcaactaccttgagctagaagctactaaagctcaaagttgcaatatcagatttgtttctcagcatttgtctatatctatttatctatctacttactggtttatatttggtagaaagaaactgctacaatcactaacaggtgatttccagataaggatactggtgttggtcactttcatttagcagagttaagaagttcatagtcatggaatgaaactcaacggcaagttttgggagaccctctgaagggcagacaagtgcagcttgctcagaacatgcctcctcttgccagcatgtgctttcttgagagagattgaaacaagtcggtcattccttttagggggttgggcatctcgttcttcccttcctcatgaaattcctctcacttgcacaattttacataatacagcattttataaaatatgcttccctgtggtttcctttagggataaaatcttataatacccttgcatttcacttgagggtttcattgcaacttcaaata

SEQ ID NO: 3554 - DNA, 1415 bp, Homo sapiens
tttttgaaatatgtgtatcatttcaaacagaaattactcccttggtgaacattttggtttgtactttcagagttttcaatgtatagataggagcagaacttcaaatgtttagtaaggaagacaaggtcagcagagtttctggctgtccaaaagcagcgctctcagctatggcctgtggccatcttctctctgggcagagacaagtctaactctctgatgctcatatttatgagctcatttcacatctcagggggcagtctcagtagatgatgttactgttcacctgctcccaggtaagagtccgagaacctaccaggtgcatataggaagttgtgctgttacttacctaacaacccctgtgagccaaggtgttctgccctccctgcaggctgagcgctttctctaagatgcctatacctgtactaatagtgactcaattctcccctttccccccgctttgctgcagaccataaaaccatgggaaacgcagaaagtcaacatgtagagcacgagttttatggagaaaagcatgccagcctggggcgcaagcacacttcccgctccctgcgcctctcgcacaagacgcggaggaccaggcacgcttcctcggggaaggtgatccacaggaactccgaagtgagcacccgatccagcagcacccccagcatcccccagtccctggctgaaaatggcctggagcccttctcccaagatggtaccctagaagacttcgggagccccatctgggtggaccgagtggacatgggcttgagacctgtgtcttacactgactcttctgtcactcccagcgtagacagcagcatcgtcctcacagcagcctctgtgcagagcatgccagacactgaggagagcaggctttacggggatgacgctacatatttggctgagggaggcaggaggcagcattcctatacatccaatgggcccactttcatggagacggcgagctttaagaagaaacgctccaaatctgcagacatctggcgggaggacagcctggaattctcactctctgatctgagccaagaacatttaacaagcaacgaagaaatcttgggttccgccgaagagaaggactgcgaggaggctcgggggatggaaacgcgggcgagtccgcggcagctcagcacctgtcagagagccaattccttgggtgacttgtatgctcagaaaaactctggagtgacagcaaacggggggccggggagcaaatttgcaggctactgtcggaatttggtgtctgatattcccaatcttgcaaaccataagatgccaccagctgctgctgaagagactcctccgtacagtaattataacacacttccctgtaggaaatctcactgtctctctgaaggtgccaccaacccacaaattagccatagcaacagcatgca

SEQ ID NO: 3555 - DNA, 1199 bp, Homo sapiens
ggactgactgaaggcctgcatggattccatgttcatgagtttggagataatacagcaggtgggtgttgtgctgtgctggtgacccatacttgttcaccctagttagataaacagtagagtagcccctaaacgttaaaacccctcaacttgtttttgtttttgagaaagggtcttgctctgtcgctcaggctggagtgcagtggcgctgtgcgatcatggctgaccttagccttgacctcccaggctccattgatcctcatgccttggcccgtagctgggactacaggtacacaccaccacgcctggctaatttttgtatttttttctagaggtggggtttcatcatgttgcccaggctggtcttgaactgctgggctcaagtggtctatcctcctcgacctcccaaagtgctgggattacatgtgtgagccactgtgcctgggaaaaccctcaacttttcttttaaaaaagaggtcaactttattgtatataagcactgtgctaaaattgcaggaactgggaccatatcctgatttttgtaataatgccagcagagtacacacaagaaaagtaactgcactagattgtgaagactggggtggacctgcttctgaaggtccagtgccctttgtcttaagatttggtgtagtgtgtctttagaaaccaaaaaaagagaagaagatcaaccttaagattagccacaaaactgggctttgatacctaggtgtggaaaagaaagggaaagagttgatgttttgtcttacagcatcattgtagaagagggtgtttttttgtttgtttgttttttgagacggagtcttactctgtggcccaggctggagtgcagtggcgcgatctcggctcactgcaagctccgcctcccgggttcatgccattctcctgcctcagccccctgagtagctgggactacaggtgcccgccaccccgcctggctaattttttgtatttttagtagagacggggtttcactgtgttagccaagatggtctctctcctgacctcgtgatccgcctgtctcagcctcccaaagtgctgggattacaggcatgagccaccgcacccagccagaagagggtgttttttaaagaaggcaaataggaaataaaaacttgggctcttaacttttgtaatgatcccaggtgtttgagctgggggttgagggtgggtgcctcgagcaa

SEQ ID NO: 3556 - DNA, 1205 bp, Homo sapiens
ttaagattttttaggattataccttacttataggcccgtcattcatttggcatgaaattttgagttttattcactttcactttcctttttttccaaagcaattaaaaaaactgccaaagtaagagtgactgcggaactaaggttactgtaacttaccatggaggattaagggtagcgtgtggtggtctacaacatagttatttgggttttagtatttcatttagacagcaacacttacctaatgtttaaaggtaatgtctttgcaacaccaagaaaaagctttgagtagtagtttctacttttaaactactaaatattagtatatctctctactaggattaatgttatttttctaatattatgaggttcttaaacatcttttgggtattgttgggaggaggtagtgattacttgacagcccaaagttatcttcttaaaattttttacaggtccatgaaaaagcagatgacttgggcaaaggtggaaatgaagaaagtacaaagacaggaaacgctggaagtcgtttggcttgtggtgtaattgggatcgcccaataaacattcccttggatgtagtctgaggccccttaactcatctgttatcctgctagctgtagaaatgtatcctgataaacattaaacactgtaatcttaaaagtgtaattgtgtgactttttcagagttgctttaaagtacctgtagtgagaaactgatttatgatcacttggaagatttgtatagttttataaaactcagttaaaatgtctgtttcaatgacctgtattttgccagacttaaatcacagatgggtattaaacttgtcagaatttctttgtcattcaagcctgtgaataaaaaccctgtatggcacttattatgaggctattaaaagaatccaaattcaaactaaattagctctgatacttatttatataaacagcttcagtggaacagatttagtaatactaacagtgatagcattttattttgaaagtgttttgagaccatcaaaatgcatactttaaaacagcaggtcttttagctaaaactaacacaactctgcttagacaaataggctgtcctttgaaagctttagggaaatgttcctgcttagtcattttagcattttgattcataaagtacctcctcattttaaaaagacattatgatgtaagagagccatttgataactttttagtgagcttt

SEQ ID NO: 3557 - DNA, 1227 bp, Homo sapiens
ctttgggaggccaaggtgggcagagcaactgaggtcaggagttcaagaccagcctgactaacatggagaaaccccatctctactaaaaatacaaaaaaattagccaggtgtggtggcacatgcctgtaatcccagctacttgggaggctgaggcaggagaatcacttgaacctgggaggcggaggttgtggtgagccgagatcgcgccattgcactccagcctgggcaatgagagtgaaactccatctcaaaaaaatatatatgtgtgtgtgtgtgtgtgtgtgtgtgtgtgtgtgtgtgtgtgtatatatgtgtatatatgtgtatatatgtgtatatgtgtgtgtgtgtgtgtgtgtgtgtgtgtatatatatatatatatggcagcagtttcccaaaaatttttttttttttgcacagtgtatgttgttcattttatccacagggcttcagttattgtaaggatttgtggggggaggggtgtttttaatttaattttttaatttaaaaatttactaattttgaaaggctttattaaagatttgcaagttactgatttaaacatagtaactgagcttcaaagacaagatttactctgtggacaagttatgtgataatggtgattctgtataaccatatttctttatcacttagttatatttataatcaaaagttgaacaaagatgtatctcagacagatacaaattaaagttcatttttaaatccatgaatttaattgttttcatttaaaaattaatgcaagttagataaatttgaattagtagataaaacaatcccatcaaacaccattagcattttagagtatttcctttgtctttttttctcctccacttgtgtttggaattttttatgtagttaccagatctttttaatagcatgaaattctctgtcattttctcaataattattgtggaaaatttgagaatatctaataattgccttagataaatttctagaagtagaattactggttcaaaaggtatggacattttttagttcttgttttatagttttaaatttctcttcggaattaaaactcgtccattagatctcaccagcccagtactctttttgctttatgctagtccacatgcatgtccgttggataatgtaagaattttatctccttgtattaatttgtactttgattattgattggtatggttgaacactttttcctgtgtttgttaattagatattgggat

SEQ ID NO: 3558 - DNA, 1241 bp, Homo sapiens
tggcagttgctcggtaagattccctggaatcctggcctgtctggaggtgaggagcagtcccatgtcctggccggaactctgggagttattgaggaggagtagcagggtgctgtactcagggtgtttgggtctccagcccttcttctccctcccaggatgggagatctggactgcccctggaacgtgactgccgggacgatttaggaggagagtgcaggtggcggtcaccctgtatgtggtcagcctggtctgtgtggggcgctctattgctgctgtggtggagcagcatgagagtggagatgtggtctctgcataatgcagcggacagatttttttttttcctacttgttaccaggcactaggttcaggatatcttgctgctgccagggccagtagtttcttcaaattcccgtgggccatttcagctgtctggccttttattcagtgacagttggtaccatttacactgttgaagggggctggaacatactacagtttaatgtttctgctgggaagtttggctgtacacatcaaaacttttaaggtgcttatgcatgggtttggatttatgatgggcccgtccccctggacctctcatagtaccccatgccagagcaaactgtagccctgaaccattgcctggcctctgttcccgtaggctgctggcactgaagtgggttgcacaatagataaagaaaaaagataaaaaaacttttaagatacttgatcctgcaattccatgtctagtcatttatcccagtgaaataattaaagatgtgagtagaggttttgttagggaataatatttatattagctggaaatgggtcttctaactatccaccagtaagggattggctgagcaaattggggactggtcataagatggaatgcagcgattaaaaatactctggaggctggccgtcgtggctcacacctgtaatcccagcattttgggagttggaggctggaggattgcttgagcccgggagttcttgagaccatcctggacaacatagtgagattctgtctctaccaaaacaaacaaacaaacaaacaaacaaaacaaaagttagctgggtgtgttggcgtgtacctgttgtctcagctacttgggaagctgaggtgggagaattgcttgagcctgggatgtcaaggctgcagtaagtggagattgcgccactgcactctagcctggaggacagagggaggccctgtctcaaaaagaaaaaaaacatgctgc

SEQ ID NO: 3559 - DNA, 1136 bp, Homo sapiens
ccgcgcaaacagcagcgaacagcaagactcagttctgggtcgctgccgccgaactttcccaggccggaaacagcgtggaaacgttgccggaagtggagactgaaagcggcggaagggacgctggaatgtggagcggttgtggggcggcagctgcggaactgcgcgattgtggttcccgccgtatttcccgttccccatctagtaactcccatctcagcccacgtatctccctgagtggaaatctcgggccccagaccagtcgattgggaggtccgccctccccttcagcgacttggtctgtgttttggcagttgccgcgacaacagtcacttccgggaaggggctctgcgaatctccttccgtcggtccgctcagaatcagctgtcctctcagactgtgtgggtggtttccccggccgcagctccgtacgggcttggattgctgggcctcggtgcaccccagcctcccccactcgggttctgagcttgagctggcggctctttaactctgcttcactgttgctcttggcaacatccacttccgggagcgagtgccgtttcccccgctcaccgcgggctagggagcgtgggattccggactgtgagcggctgttagtgcgtcgcagctgctggcgatccggcgaccctcggccggcaggacccgcgggccacgcagccggggccttctcaacgcctcagtacctcggcgggaccgccatggttctgctgcacgtgaagcggggcgacgagagccagttcctgctgcaggcgcctgggagtaccgagctggaggagctcacggtgcaggtggcccgggtctataatgggcggctcaaggtgcagcgcctctgctcaggtgcggctcgcgggtgggcccatcccggacagatcgagagaccggcgtgggatggagaaagaggggcagggtgggccgaggggtcaggtttgtgaagattattgaagagatttgcagcagccggggttgaaacgggacactagggttaaccggagatgaataaggaaccggagaagatccggcctgtctgacaccccgggctgggaggtgggcccaggtgcctctcggagccaggatttggggtgctgcgaataagtggaaatgggctggggagggaggag

SEQ ID NO: 3560 - DNA, 1149 bp, Homo sapiens
tggctcacttcttagaggccatcaggaagggagagtctgacctctagatccttttttttttttttttgagacggagtctcactctgtcacccagactggagtgcagtgacatgatctcagctcactgcaacctccgcgtcctgggttcaagtgattcttctgcctcagcctcccaagtagctgggactacaggtgtgcaccaccacacccagctaatttttgtagttttagtagaaacggggtttcaccgtattggccaggctggtctcgaactcctgacttcaggtgatccacccgcctcagcctcccaaagttctgggattataggcgtgaggcaccgcgctcagccattttttttgtatttttagtagagacggagtttctccatgtttgccaggctgttcgcaaactcctggccccaagtgatctgcccacctcagcctcccaaagtgctgggattagaggcatgagccaccatgcctggcctagatcctcttttaaggggttcatctgattaggtcaggcccacccagaatagtctctcatttgattcaactgatttgggaccttaattacatctgtgaaataccttctcttctgccacttaatgtaacctaattatgagaggagggcctccatcgtatttacaggtcctgcccatgctcaagaggaggggattatacaggatgtgtacaccagggggcaggaatcttgggggccatctcagaattttgccttctccagtggggaggatgtccttctagagtagcagaacatttggacaccaggtggcaatgggaagaaagctgaataagtagaatgggacaagattagggtcaacctcaggctgtcctgtaggcttttggggattttgtgttggggtgatagttaacctgagctctggatttgaggaaggtgcatgcggcgacatggtatgtgggagagtggactaaggagacactaaagagagataaggaaaccagtcaggaggctattagagttctgggcttgaactgagatgcttttagctgttggtttctgggcaagttacttaacctctttagtctcgtacttatacttgctcttataaccccgcagtgtgtctctattttagcacttaatcagtgtccattggtatgctggcgcatg

SEQ ID NO: 3561 - DNA, 1198 bp, Homo sapiens
gcatactttgtatgctatatgtatgatatattctattcttacaataaactagagaaaggaaaatagtattaagaaaattataaggaagataaaatatatttactattcattaagtggaagtgggtcatcataacattcttcatcctcattgtcttcacgttgagtaggctgaggaggaggaagaagggttggtcttactgtctcaggggtgacaaaggtagaagaaaatctgaatatgagtggacccacacagttaaaactcatgttattcaagggtcaactacttatacaaaccgaggtggtatagcctactatacacctaggttatatgtatagcctattttgctccttggttacaaacccctacagcctgttactatactgaatactgtaggcagctgtaacacaagtatttacagtggtatttgtgtatcgagacatatctaaacatagaaaaggcacggtaaaaatatgctgttacaatcttacgggaccacgattgtatgtgcagttcatcattgactcaaatgttactggctgcatgactgtacctactggatccattgggcgcttaaaacttcaatacatctagagcattgctcacctgccacctttcttctgaccaacctcttcctctgtctgtatatcccatcttggtgaatgatactattatctatccttttgttcattgtttcagcagttatttattgattacttactgtgtgtcagatagtctgtggtataattttatatcattttgttcctgattcctagcacatagcttccaaaatctttggaatttcctgagtggtgggagtgtcttcttattcataatgagtccttttggatcttatctgagttcatgctaatgaactggctcctggggatgaggggctggacaccctcagaattgggggtggtccggaggaagcagtcaggaaactgcaggattggagggttggaactttcagccctccgccaccaccagctccagggaagagagagggactggaaattgagttcagtcacgtggtcagtgatctacttaatcatgcctatgcaatgaaattgcaaacgaaagccctggaactgtgaggttcggagagctgggttggtgaacccatgatgtgcagaaaggtgagtgcctatattgcacagaggaggagagggcatggaagctctgtacttcctctccccc

SEQ ID NO: 3562 - DNA, 1168 bp, Homo sapiens
tagcattgctttttaaccaaaaaagaagtgttttagaaattagaatagcctggacattattgttttacctcagttacaagaggtttttcatacttttatagaacctttaaattattatatatacaacttgaaacagcctctcagtctattgtgtttatccatgattctggaaaaataattatctatttgagggaaatgtttatgatcttaaaaatgggaaatacccatggcaaaaaaaatcagaagtagtgataataaaatgaataaaatatgaaagttagagatgattatctagagaagttcttagtttactgtcattaaggaactttaccaggctgttccttatggataatcctctttctctcctttttcttttccccacagtgtcccaccagtggcagagtgggctgttcctcagtcatcaagactgaaatacaggcaattattcaatagtcatgacaaaactatgagtggacacttaacaggtatttacaaataaaaattagtgaaatatgatctttgttttcaatgtaaactgtttctagatattgggtcatagatattttccatgtctgtgtgcttatttcttggcagtgtttcctttgtctctgttatctcatgttcttatccactgataactctttacatagttatatcattctctcatgccccattgctttgtggtaaaatggaatatagaccagggatactcctgtacgctgaaagccactgatatgcaaatcaaggcactagcaaagaaacacttctttgaacaaaaactagcttcaacttctgaagtccagctttgaacttgatgaacttgaagctgtctgttcactaggttagagttggaggcagcaggcagggtaaaagcagggagttgagaacatggctctgtctcagataactgcctagatagggctcaccactttggatatttctttatctattaatataaaaggccagagttaacttaggtgatctcaatggatttttttaaaagaagaatgattctgttatctacgtcagaaggatagacaggaattttagcatactgttcaaaatttttctcacgaaggtttaaatacttgttagaaagttataaagaaggctgggtgcagtggctcacgcctgtaatcccaatcccagccctttgggaggctgaggc

SEQ ID NO: 3563 - DNA, 1099 bp, Homo sapiens
gatgcggggagatgaacagccagcagagctaggcaaacatgaagatgtaaaaccaggttaaaatggcaacttttcagccaaggacatgatagatgcatgtcgtgtccccagggctgcacccaggagaggcctgtgtcctcctgcattgatggggctgcatcttcaggcattagaaacttgaaggcctttccttgttagttccaagttgtactgctagcacacagagcagaggcagggagggagtggcatttacaggccgtccttgaacggctgagtgggagctgcccgggtgatgctgtgaggcagggccttcctgtgctccctgaacctccagcgtgaacaaggagtgaatgctgcagagcagctccatgatgggcccaggtagcaaagggaggagctcacaaggcctgtcttggtgatgtgggcctggggtattttaactctggaagtttctgttttgctttatctaaattgaaaggatggttttgcctttcagcctttagaagaagccacactctctgaattaaaaactgtcctcaagagcttcctaagtcaaggccaagtattgaaattggaggctaaggtaggttttaaattatttatggtacgttttctcgggttattttaagcttaaaatggctacagaaagtactagtgaaatattagatctaactctatactaatttttctgtagttaaaattttgtatttattttaaatttaaatgattatctgactgtgcagttttacttttgcctttttctaggtgtaattataacctcttacatttgtgcaacacatttagcctttcaaaacacttttttgtgtgtcccatttgattagcgcgttttcacatttccagtcttacttcttttgtagactgatccgtcaatcttgggtggaatgattgtgcgcattggcgagaaatatgttgacatgtctgtcaagaccaagattcagaagctgggcagggctatgcgggagattgtctaaaagtgttggttttctgccatcagtgaaaattcttaaacttggagcaacaataaaaagcttccagaacagatcatattatgttcactgtcttttaaactggaatgtag

SEQ ID NO: 3564 - DNA, 1374 bp, Homo sapiens
gatcttagtgcctgtcctaatctgagcataccacagtaagacaagaaagggcaatgctgtggtaggcagttagctgctgaagttaggccacttagttatgaggtagatgaatttctgtcctcagctcaaaatgataatattctcactgacaaaagtatcagctgtgatcatatagattgctctttcctgtggaactgaagtgtattaaaaaaattttttttcttccaataaagaatgtctcgttgcgccgggtttgctagactgaaagtttcctcatcacgtggcgagacctcctctacttcaatctttgtcttttgtctctgctgccttgcagggttggtacagtaggcttcactagacttagctgcaactcagaatttctcctccagcacctgagtaaatgctgatggtcttgtggagagtggattaagagtacgagctaagttctcaatcccaattaagaagcggaaaatttaaactgtcttcttcaaagtttatcacaaccaccaccatcaagacagcaaaccaaaggacaaagactttgaccctgctgtgttgctctgtgtagtccagttcacgtatggtttacagacttggctggggttactaaaaataaataaaaagttggacacttctgtcattggagcgctattattcacaagttaccagaatgagagctgtactggacacagcagacattgccatagtggccctgtattttatcctggtcatgtgcattggtttttttgccatgtggaaatctaatagaagcaccgtgagtggatacttcctggcggggcgctctatgacctgggtaacaattggtgcctctctgtttgtgagcaatattgggagtgagcacttcattgggctggcaggatctggagctgcaagtggatttgcagtgggcgcatgggaattcaatgccttactgcttttacaacttctgggatgggttttcatcccaatttacatccggtcaggggtatataccatgcctgaatacttgtccaagcgatttggtggccataggattcaggtctattttgcagccttgtctctgattctctatattttcaccaagctctcggtggatctgtattcgggtgccctttttatccaggagtctttgggttggaatctttatgtgtctgtcatcctgctcattggcatgactgctttgctgactgtcaccggaggccttgttgcagtgatctacacagacactctgcaggctctgctcatgatcattggggcacttacacttatgattattagcataatggagattggcgggtttgaggaagttaagagaaggtacatgttggcctcacccgatgtcacttccatcttattgacatacaacctttccaa

SEQ ID NO: 3565 - DNA, 1207 bp, Homo sapiens
acgccattttcctgtctcagcctcccgagtaactgggactacaggcgcccgccaccacgcccggctaattttttgtatttttagtagagatggggtttcaccgtgttagccaggatggtctcgatctcctgacctcgtgaaccgcccgcctcggcctcccaaagtgctgggattacaggcgtgagctaccgtgcccggccatgtttttggttttcaatgcagttttactatgatgtacttagatgtagttttcttagtacagtcatgcatcatataaccatgtttcagtcaatgacagaccacttacacatcagaggtcctataagattgtaatggagcataaatagaaacctgatgtacggcacttgatgttggcattacaaatcaaataggggaaatgattgatattcagtattggtgctgagacatttggtttttcatatgaagcatatatatatgtgtgtgtgtgtgtgtgtgtaactaaaaatatgtatacatccagttttatgtaagtacacactaacacactctgaggttcacacaatgacaaaattgcctaatgatatatttctcagagcctatcctgtcattaagtgacacatgactgtatttatcctgcttggtgtttttagcactttttaaactgtggcttgttacctttcagtagttgtggaaacttcttggctatcgtctctttgaacactgttcctacctattctcattctcctctcctggaattttgaatacatacatagtggacctttcatcatgtaaccttacatctcttatgtttctttttgtatgtttctgtatgtaccatttataaacaaaacaaaactatttcaatctggttatttcctctgactgatcttccagttcattaattcctttttcagctttctgtcacttactattatattcattcattaatttcttaatttcagttcaagcatttttcagttgtagaatgtccactttcttctttttacaggttcaagttctctgctgagggtttccacatagccatctaatttcttggatttattaatcacatatattttaaactaaatatctgataaatcctgtgaggctgttcctttctctgttgatttctctcagttttctgttatgtgttcatgtctcctggtgtatgaagtaatttgcaattaaacacaaagcattttgtataaaaattgttgagacaatt

SEQ ID NO: 3566 - DNA, 1154 bp, Homo sapiens
aaagttctgggattacaagcgtgtgccaccgcactcggccagttgttttgtatttttagtagagacgaggtttcaccgtgttgtccaggcttgtcccaaactcctgacctcaggtgatccacccgcctcggtctcccaaagtgctgggattacaggtgtgagccaccgcgcccggctttatttttattttttgagagactctacctggctggagtgcagtggcgcaattttggctcactgcagcctctgactcccaggttcaagtgatcctcgcaccttagcctcctgagtagctgtgactacaggtgcatgccagcaccttaatttcttttatttatttatttgtttgtttattttttgagatggagtctcactctgtcacccaggctggagtgcagtggtgtgatctcagctcactgcaacctccacctccctggttcaagcgattctcgggccttagcctcccaagtagctgggactactggcgtgtgccgctatgccaggccaaattttgtatttttagtagagacggctttaccatgttgaccaggctggcctcaaactcctgaactcaagtgatccacccacgtcggcttctcagcgtgctcagattacaggcctgaggcaatgcgctcggcctagtatattaattttgtatttgatcctgaacagccctgaggtggggacagaatatttcttttatccctattttatgcataaggaagttggggaccagacacagtggctcattcctgtaatcctagtgcttcgtgtggctgaggtaggaggattgcttgaggccagtgcttcaagaccagcttgggcaacataccaagtctctacctcagctgagtacggtgccttacacctgtaatcccagcatatttgagaggtctgggccgggggattgcttgagcccaggagttcaagaccagcctgggcaatggggcaaaaccctgtctgtacaaaaaaatacaaaaattagctgggcctggtggtgcatgcctgtggtcccagctaccaggaggctgaggtgggaggattgcttgagcccaagaagttgaggctgtagtgagccaaaattgtgcctctgcttttcagtctaggcaacagggtgaggtcctatctcaaacaaacaaacaaacaaaaatcgt

SEQ ID NO: 3567 - DNA, 1176 bp, Homo sapiens
tttgagaccaagtatcactctgtcacccgggctggagtgcagtggtgtgatctcgtttcactgcaacctccacctcccaggttcaagtgattttcatgcctcagcttcccaagtagctgggattacaggtgcgcaccactacgcctggctaattcttgtggttttagtagagatggggtttcgccctgttggccaggctggtatcaaactcctgggctcaacgatcctcctgccccagcctcccaaagtgctgggattacaggcgtgagccaccacgcccggccccaattttgttttttaaaggaatcaacattaaaaggaaagccgtttctagtttgccacaatacttgcttcttattttcacactggtgggttttgatggcattcagattgccttgtggggttaactggactttgataaactgaggggaggccttgtagactccctggccatttggggacttctgaggccctctgggaggaagcccttccctgcatgcccctgctgcccaggacagggaagtgccccaagctgggcctgtgtagaggatgtcactcagcactgtccttctgccaccttttggtccccaattcagcccccgtggcctgcttggcccagtgtgaggttttttttttgaaacagagtctcactgtcatccaggctggagtgcagtggaacgatcgtggctcactacaacctccgcctcctgggttcaagcaattctcctgcctcagcctcccgaatagctgggattacaggcgcccaccaccatggctggctaatttttttgtatttgtagtagagacagggtttcaccatgttggccaggctggtcttgaactcctgacctcaaatgatacacctgccttggcctcccaaagtgctgggattacaggcgtgagccaccgcacccggcctattcaagtgaaaattgctagtagcacagataggttgcagcgacttagcaaatcgcgatgaaactgcatgagtgagtcgctatcacacactcttttccagttgtatcttttccctggtttttgccttcaaacaagcttgtgattttgctcgaacttccctcttctaagtagatgtgagagtgttggtaaggtctgtaacttttccctgttttggggacgaaggtccagcgatggtgccttcctggccatttcttccac

SEQ ID NO: 3568 - DNA, 1074 bp, Homo sapiens
cccccagagctaaagcggcccagactcgatgaaaacaaaggaggcacggaaagtctggacccttgatgggacctcggcttctgctcgaagcctaccaggctcccggtgtgtgcagggagacggtaaagctggaggtgcctgagaccagggcttccatggagcgggacacactgtaaatggatttctataacagaagtgacatgtgtactgatttttctccagaaatatggatgctgttgtattcagtatccatttttaacttgggacatgaacgttttaacgtagtaaatcctctttttgatgagtttctgaaactggagcggttcaacgttatccagtgtgaaaatcagtgagtcctccctggcatcctcgtgaaagtgcacacacttcatggagggactccttttcaataagaattaggaagatgagaaagtaatttgagattttactctgtcgaattttagagtatttgaagtgattgttagatttcacttctaaggagttgattgattaaactttggaaggtagttgtgtttgttttctgattttaaaggtgacgatgcttattcttttagtaactaagtgaagtgaaaaagatgggtatcacccatcatcttcccaccagaagtaaccctcgttaatgttgtagtatatttccttagcatttttgtggatctatttattctaaaaagagaattgagattttatttcatatgcaatttggtatctaaataggttagttttttagattggtttttcaaagcaaaaaaagtatcttttttgttttttgagacagggtcttgctctgttgcccaggctggagtgcagtggcgctatctcagctcactgcagcctcgacctcctgggctcgagcgatccttccacctcagcttcccgagtagctgggactacaggcatgtgccaccatgccatgctaatttcacacacacatgcacccacacacacacatatatatgatacatatatatatatatacacacacacacaagtatgtgtgtatatatatattttttttcttttttttttgagatggagtctcactctgtcgcccag

SEQ ID NO: 3569 - DNA, 1145 bp, Homo sapiens
gcctgagagctgccaggagagctggcagggaagaggaggcggccccctgggatggagacagctctggggagtgtggtggccatgatgttccatctgtcagctacatggtttagctcagaaggggaaaagtgtaaccaggtagaggctgaaggagggccagtaggcaggcaaaatggtctcatcttacagagaaaatagtgacttatagagataattatttagaagtctgagccctcctactcttgttctaataactaacaagttattgtcaagaattcttttaaaacgaaaatatttaattcatggtattcaggtttcctgtgcacggagcctctgcgctgcgttactgtatttattcatcggcctttgtccttgggcgtttcatccttcaagggaagccctaagtgatccatggtgtggtgtgttcctcacaggttcatcccgagttactccctgagtcttcaggcgacgatggccaagggcttgtgacttctgcaagcgacgtgactggaaaccacgcagcacttcacagggatcctagtgtgttctctgctggtgattccccaggggaggctccttctgcgctgttgccagggccaccccctggtcagcctgaagccactcagctgacagggccaaaacgggctggccaggcagctctgtcagaacgaagccctgtggctgatcggaagcagcctgttcctccaggacgtgctgcgcgttcaagccagtctccaaaaaagccgttcaatagtattattgagcacctgtcagtggtattcccatgttacaacaggtatgaacagaaaatgtctgtgactgtgtttaatactttatcgaactgaggtttcctgattagataaaatcatggctagttaggtgttaacatgaaaagggttgcataattgttttgctcagaaagacagttgctacatttctttctttttgtaaatatagagataagtattttcaaataaattggtgggttttttctttctttttttttttttttttgagacagagtctcactctgttgcctaggctggagtgctgtggcacagtctcggctccctgcaacctctccctcccgagttcaagcgattctcctgcctcagcctcctgagaagctgggattataggcatgc

SEQ ID NO: 3570 - DNA, 1430 bp, Homo sapiens
aaatcgttaatatcgctgatattaagtaatttccccactctgagtgaatactttgatgattgccaacagtggctaataaaatgacggctaccacactcatgggtcactggggctgcgcagggctctttgaggtgggtggcttcttttggaaagtactatgaacgtctcgaagcagtattctagtgataagaattcttaacatagccaagcgccccacgtttgttccccacgtttgttccccttttctgtttgaaaaacctgttctggtagctccacaagagagatgatactgactttttaaattttttacaagagtctgtattcctgatatgcctatatttttcctcaaagattctgcattttaaggatgggcataagcaaactatattttaataatttatagttaatgttaaaatattggctgatttagaccaaaagattcaaatctcctctttgtgaaatcccatctgcatttgattttttattattttatgttcccccgttagattgttttaagtgtttgcttttcatcttttatagatgtaatctgattttcaaaaatcattaacactttttaattagtatcgactaagactttttccccctggaatcgaggctgtgtgtccgtcatcccagcccccggttggagcctgctctttgaactccgctgccttccttagcagcttctgtcctcttctgtgagtcagtcagcgagtgcttgggatccgcatccagccgtgctgagcacacaacaggctgtgtgtggaaatggccaccaccattctccttccccaccccaccacaaaaagagaagctgtgtctttagacaaccctgaggtatctgtgttacaatcgttctgtgtttgatatttgtgtaaagtatgcatgcagtcttgtactgtgacctaagaacaaaactgtaactgcattagaaaccatgaaaaaattagatattgttttgtgacttttagacagtggtaaatatagaaccatgaattctggtcacattccatttctctccaacatgaaggatcaaaaaatgtttttcaatgtgttctttgttccactggaaacttagagtcatgagtttatgagctgatttggtcaccttcctctgcctttgttcactgtgagttctgatgtcttagtgacttagttcttagaagctcacgccttagtttgaaacagattctccacggtggtccccaaaacactgtctgcatatccataagaattgagcgctatgggtgttaacgtgcatgaggatcagtttgcagcagcaagtacaaaaggagaagaggaacatccgttgaatgagtgtgttttgtacataacttcagatacttgtgaacatgccttatatttgtccaacaactgtcagaataaagaacattctaaaatgagaagttcactgtcactcttgtccattc

SEQ ID NO: 3571 - DNA, 1209 bp, Homo sapiens
gacagaggtagtcagacatcagcatagtcatctccactgaaagtttggctgaaaggtcagggtggcgctgaggggacagcaatgaaacccacccgcaccgggtgctccttcgccgttagagcttcctgcgactgcagtggtggcggcgtgtggtttcgctgcttggtaacagtgagcacaaacccaccctctcttctcttctcagaatttgaggttaacatcgtggtgctgcttcaccctgaccacctcatcacggagaacttcccgctgaagctctgcaggatatagcccggaggagggaagcatagagaacgggagtggccatctggaaatccagctggttatccaaatcctaaggggagctacagccagcggcatatacttgtttttgtgattattctgtatcagaaatgaaacagaccctcaaattaactttccttcctcatttcttgaggcttctgcttccaacaggcacctctaatcagaccttttctttgaaattcaacaagatttcttaatgctatttgccaagaccatttcacagaaaacattgactgtggctcttgccttatctgttcctttttaggtacagtaaaacaattgtgacagcagtttgagcttgctggagagtggcatcatggggacaaaaggaaacctctgacttgctaatggatgtagccagggactccccatagcaaagggtctgtggccagttgacatccaggatggctgcaagcgcacttgatggtcaggaagtttgcagatactcgccaaggcagagcgcaaagtgctagccactggaaatgcatgacttccctccacccctactctattctgtagttttttggttttgtttctgagacggagtctcagtctgtcacccaggctggagtgatctcagctcactgcaacctccacctcccaggttcaagcgactctcctgcctcagcctcccgagtagttgggattacaggtgactgccaccgtgcccggctaatgtttgtatttttagtagagacggggcttcaccatcttggccaggctggtcttgaactcctgacctcgtgacccacccgccttggcctcccaaagtgctgggattacaggtgtgagccaccacacccagcctctgtagttctttttacaacatttttcattataactttaaattttttaagcaactggaaaagtgttccttgctctcttggg

SEQ ID NO: 3572 - DNA, 1181 bp, Homo sapiens
aaagtgagattgtgatgggataacggaatgtcaagtctaattgtcaggaaaagacaaaataacatgggaatgacaatcaaaatggactaaggacttagaagatccgaaactatgaagctactaaaagaaacattggggaatgctccaggacattggtctgggcaaagatttcttgagcaataccttaaaaggacaggcaacccaagcaaaaatggacagatgggatcacatcaagctaaaaaacttctacacagcgaaggaaacaaagtgaacagaataacatgggaatgttttctgtaatttagtagtaactggcaatagtttacaaacacattttgtgtatactgctgtcattgcactgattaccttctgttgtagtgactttgttctattagtccactcaattaaaatatttggttttgtttatctttgtattcctgggcctggcagtactcaccacttaataggtgctcaaaaactttattaaatgatgagttgaagccctgaaacatttaaacaaaatgcagaagactgataattttataaatgcattgatcagaaaggggaaactatggtattgtaggcacattatggattttgcttcgtaattataaataatattctaggtatcaatttcagacagatgttgataagatttattcttattttgacatagccccagagctacacattgcacccaccattacttgtatttgctttaaaatagtcattcttaagatcatgattcaaataaattgggagtagagattccagaattcctataaatatggttttctctctgattcaggaatggaatataatagaaaattgtccaaggtttgattttccagggtcttcatcccagttcctgtggctcagcgtgaatatagaccctttctccaagcttgcagcattgctgttggggcaccttctccctaagcatccttccacttgggtagaaaacttctttttttaagtattttattaagatagagatgaaatcacgctatgttgcccaggtcggtctcaaactcctggcctcaagcaatcctcctgccttggcctgacaaaagtgttgggattacaggcatgagccaccacacctggcctaaaaacttgacttctgtttccaaagacccatgggtgatatgagataatcaggaattgtgttaaacattccc

SEQ ID NO: 3573 - DNA, 1172 bp, Homo sapiens
gtcccttcccatcatcgcatcagtaatggtagcttgagatggggcgtgatgagagtatttacaccatgggaatcagcagacactacaaatcagggccttctctcccccagagtgctgattgttaaacatttaccaacactctactggttatatctatcaataatttccatattagaaattaaagtaaattttaaaagaattcatttaaaaataattttacttattggcattaacagcatttttttcttgcaaaaagtaattattttttaaaaagttagcatggcattgtttcacatttgcaaatctctttaatgtctggtttagtattagagctggattcttctgtttctgcattcaatctgtttgcatatattttgatagagtatgtgaagaaaatccggcctaacagatatgtaacagaaacaaggaggagcatttaagactatttcagataattgtagatattctttctttactatgccaaaacttaacaaagtataattccttagttgcaattcaggtatgaaaccatattaataaactttcctaaggttacattaaattccattggcctacgttgcactttgaacagatcttttagccgtgtgtgattttgtaacatcctgcattggtcacttggaaaatattgcttcaaaatgttaacacatttcaaaatataatattcaacaattacattacttaatatcaccacaaatcacatcagaaaattactgggaaactatcaaactcacagtggtggatacacactttttaaaattcaaattttcacttgaaacctcaaattttataatcagcaacaaatacccctaagtatttgaggagagattctcggatgtttatactaactacattagaatttgaggtttaagtacttttggaactgaggccacaacactctgtcccctcagtggactctgacgttgttaaggtgatggtggtcttaggacacctgttttcaaatttgttctttttacatgcttcaaaattagtgagtacgccaaaaagcttatattcattggtgtgctagagccagctcactgcgttctcccaagagctacgtgtctcttcccaccattttgggggggaagcgacaggctcactttatttagtttttgaggaaggaccagccaaatacccaaatcagaataatt

SEQ ID NO: 3574 - DNA, 1189 bp, Homo sapiens
gtgacaagaatgtgggacaactggaaccctcaaacattgctgctaggaatgcaaaattgtcagaaaaacagttttgtagtttcttacatagttagacttatcatatgacccagcagttccacttctaggtatctatccaagagaaataaaaacatatattcataaaaagacttgtacataaatgcatatagtagcattccaaaaagcagaaacaatccaaatgtccattaactggtgcatgaacaaactaaatgtcacatgtccatatgatggaatactactcagcaatagaaggggaaaaagtgctgatacgcacaacaatatggatgaatctaaacagttattttgctgagtaaaagagccaggcataaaaactacatgctgtatcaatctattttattaaattctagaaaaggctgaattaggcagaaagcagacctttgtttgcctggggtcaggtagggatctggactgaatgcaaaagagcataaaggaaactttgagggtaattcaagttctaaaacttgattgtgttggtggttgcatgacagtatacatttatcaaaactcattgaactgtacacttaaagtggataagctttttttttttagcatgtagactatacctcaacaaagctgttaaaacataaatctaacctggcctacagggatctatgtaacagatcctatctactgttctcgccatcttatcccacttctttcactcaccatggtctggccatgctggtcttctgttgctctaactcagcagcaggctctttatatttcagggcctttgcctaagctatttcccttgcctcaaagcgtctctcactctactatttattcattggctccctactgccctcctttccttctccctccttcagctcttggcttaagtgttacttcctcagagataacttttctgatccccccttttatagtctttcctggctccttaaactttccttcacagttcgtatcaacatttgtaattaaatattgacttgtgcttatgaattcagcaacaacttattaaacccttattttgtgccttacattgagcagagggctgcagatgcaattgtatgcaaaatagatatggcttccttctcctcctggagcctgcagtgggattatttgtttagtgactgtcctcccctccttagcctgctactagactaca

SEQ ID NO: 3575 - DNA, 1145 bp, Homo sapiens
cctgtaaagctctacatgttcttcgcggggtgattaatttttatccaaaacttaggtgagagtttgctatttgaagtctcaaaaaaaatttttgttaatgccttcacctctttcctaaaagtgtaggtagaagtttagcactgcagtcatcagaagaggcaagattaatttccttgacattgaggagttgttggataattactaaatttgtccttgttaaataaaggtataaaacaaagatgttttttcttttttaatttaaattttttacagagctgagtgtaaaaatgttaactatgttttctttaacagaaagttctgtttttgtgatccttttaaaaataaagcttcacggaaggtatgagaatagtatttttcaactttaaatttctcattaccagaagaccatgtggtaattctctgtatacagttagaacagcacggaaacttgaaggcctaaaaaattagctgaccttgttaaaaatgttggcgtgagcagtatattattacctatctttttttattgtgtgtgtgtgtgtgtgtgtgttttaaactaattggctgaaatatctgcctgtttccctctttacatttttcttgtttctttccttatttatctttgtccatcttgagatctactgtaaagtgaattttttaatgaaaacagttccaagttttactctcagtgggtttgggacatcagatgtaattgagaggccaacaggtaagtcttcatgtcagtgtttgttgaggaacgagcctatgaggtcagttttcccaaaaggaaaaagggcagaagggatttgttcatttttacatctcgtttctgtaatacacctttgacttcatggttgatcagactttgaagtctaaacagaacgtaagcacttggtgtatcgattatcatactacacagtagacatgttttcaaggcatatcttgtcactgtgtgtgcttctgacttgtatctttccctagaactaaatattttgaaggtccaaacattatactttgggaaacttgattgatttttttttaatctagcttttcagctgataatggttacacgtggtattatttcaagtccaagatattatgtattctattttaactgtttcccagttttgtattttttgtattggaat

SEQ ID NO: 3576 - DNA, 1177 bp, Homo sapiens
ctggccctgccagccatcgccgtcatcggggaccagagctcgggcaagagctctgtgctggaggcactgtcaggagtcgcgcttcccagaggcagcggtaagttcaacggaccaccttccctccgcagcaagcagcgccacctgtaagccacaaagcttccccaggcaccaagaggttttagagacaggctgctgggtgagagagctgggaaagacaggacgctgggagagaggccgctgagagagacaggccactgggagagacaggccgctgggagacaggcctctgggagacaggctgctgggagagacacgttgctgggagagacaggtcactgggagagacagaccattgggagagacaggctgctgggagggacaggccattgggagacaggctgctgggagagacagatcactgggagagacaggccgctgggagagacaggccactgggagggccctaggagggcagcttctcaggcctggtggcagggggctggattccccatacatgtttaaatagctttcactgcccgtgtgtcagtcaggtgcagggaccttgccacctcttcctagtggtctttgtaagaatgtagaagcatttctttgataagttgataagttttaggtgacaggcgaagccttcttaaagaattgtctcaatgttttgaaaacctcttatttaggatcatgatatgagacaccttttccttgaacaaaaacttttaaaagtctgtttagagtgaagaagctgttgtacattcataatttaataaaataattataaaggaaaatgataaaggcggtaccctcagagtgggtactggagagtgtttagaaaggagtttttaggtaagcagggcatagggaagccagcaagaagggggtgggacaggaaggggagcagcttccagaacccaagaaggagcagcatgcaggggccctggcaggtgcagcggcagcagagagcgcccagctccttctcctccctggctcccctctcctgccactgctgcttacttctcaacccaaccagaatgctggggtggccgggaggcatctgatggtttctccaaggttgcccagagcaaggtggggctgctggagggctgcccggaccctgcacagccccctgcaacaaccgcaaagccacagtgagcctgggagagtgccc

SEQ ID NO: 3577 - DNA, 1191 bp, Homo sapiens
tcgcagggagctctgtctggcatcggtggcacagatggtgaacttgtttcaggaagtgtgagcacgggcctggctggcacccggtttacagggaggtgattgaggacgtcgttatgatttgatttgaccttggcacacactgcagagccacagggatgttgctgaatttcaatcaccgatcagcaaggatgaaccttctcaacttcctaggaatgtttagcagcaaccgaatataccaggcaaaactccttggtgcctgcgctgtgtgtgtgtgaggtgcgcggtgtgattgtgcgctgtgtgtgtgtgaggtgcacgctgcgtgatcgtgtgctgtgtgaggtgcgcgccgcgtgatcgtgcgctgtgtgtgtgtgtgaggtgcgtggtgtgatcgtgcgctgtgtgtgtggtgcacgccgcgtgatcgtgcgctgtgtgtgtgaggtgcgcggtgtgatcgtgcgctgtgtgtgaggtgcacgctgcgtgatcgtgtgctgtgagtgaggtgcgcgccgcgtgatcgtgtgctgtgtgaggtgcgcgccgcgtgatcgtgtgctgtgtgaggtgtgcgccgcgtgatcgtgcgctgtgtgtgtgaggtgcgcggtgtgatcgtgtgctgtgagtgaggtgcgcgccgcgtgatcgtgtgctgtgtgaggtgcgcgccgcgtgatcgtgtgctgtgtgaggtgcgcgccgcgtgatcgtgtgctgtgtgaggtgcgcgccgtgtgatcgtgcgctgtgtgagtgaggtgtgcgccgcgtgatcgtgcgctgtgtgagtgaggtgcgcgccgcgtgatcgtgcgctgtgtgtgtgaggtgcgcggtgtgatcgtgcgctgtgtgtgaggtgcacgctgcgtgatcgtgtgctgtgaggtgcgcgccgcgtgatcgtgtgctgtgtgaggtgcgcgccgcgtgatcgtgtgctgtgtgaggtgcgcgccgtgtgatcgtgcgctgtgtgagtgaggtgtgcgccgcgtgatcgtgcgctgtgtgaggtgcgcgccgcgtgattgtgcgctgtgtgagtgaggtgcgcgccgcgtgatcgtgtgctgtgtgagtgaggtgcaggccacgtgatcgtgcgctgtgtgtgtgtgaggtgcgcactgcgtgaccgtgcgctgcatgtgagtgaggtgtgcgccgcgtgatttggga

SEQ ID NO: 3578 - DNA, 1133 bp, Homo sapiens
tgtgtctgacatgctcccatgcgtgcacgtgcacaattcatgcatacgtgtgcacccacgcacgctcaccctggcgcgtctgactcgtggccctctctgcaggtggcagtgctggcagcacggtggcggtggccgtgaaggccgcgcaggagctgcaggagggccagcgctgcgtggtcattctgcccgactcagtgcggaactacatgtaagacacggcttccctcccaggtccctgctcctctccatcctgccacccttccctggatgcctctcacgcctcacctgagaaccggcagccagaactgggaggggaggaggccagcggggccctgtgagcaccgcctccactctcctgcccacgtgccctcacgctgtggggcttcccagcctcttaatgctgtgaaaatcaatgcacactcgcagtgacagccctgacaggaggggcatgaaagacggtggctccctctctgtccctcctgtcccttcctctctggtgtctgtccccctcactgctctggggtccgtgagctccaacgggtagccctggccacatggactgacgtcctcttgggccgggccctgtgccacctcctatccaccctgactccctctgctgcttcccccaaactccagattgggaccgagtgctgcccaggtggccccctaggacttgctgtgactgttttgcccagaggcccctcggacagtaacgccacagacctcgctggtcaccgggcagccaggctgagactggcgctgctctgcacctggtctccggaggcggtaccagggcgggtgtctacagacccccatgccctgtcccctgcacctgcagggtttcctccatggcctgcaagctgcagcggctacacagctcccgagagctcagctgcccttggagggccaggcctggctggtgggtgcccccagttgggttccccagtgtggggtgattcacatctggtgcccagggtcaagatgccctgtgcagggctcctgcccacccccgtcagtgcaagaacaccatctccccacatacttggccagcctgccatgtgtacctgtgcgtgtgagtgtgtgaggggcagagagcgagcatgagaggacgtgtttatctgagtgcctgagcg

SEQ ID NO: 3579 - DNA, 1420 bp, Homo sapiens
aaccccacatttcctttctgcactgccctagcagaggttctccatgagagccccatccctgcagtaaacttctgcctagacaaccaggcatttccatacatcctctaaactcttggcagaggttcccaaaacccaatttttgacttctgtgcactgacaggctcaataccacatggaagctcccaaggcttgaggcttgcaccttctgaagcaggacctgagcactatgttggcccctttcagccatggttggagtgacagggacacagggcaccaagtccctaggctgcacaaagcacagggaccctgggcctggcccatgaaaccactttttcctcctaggcctctaggcctatgatgggatgggctgccacaaaagtctgtgacatggctggagacattttctccactgtcttagggcttaacattcagctccttgttacttatgcaaatttctttagccagtctgaatttctcctcagaaaacaggattttcttttcaatcgcattgtcaggctgcaaattttccaaaccacttcccttataaaactgaatgccttgcattacttcccgttttcacgatctgctgctcgtctcaggctcgtagttcgccttcaacatgccggagccagcgaagtccgctcccgcgcccaagaagggctcgaagaaagccgtgactaaggcgcagaagaaggacggcaggaagcgcaagcgcagccgcaaggagagctactccgtatacgtgtacaaggtgctgaagcaggtccaccccgacaccggcatctcctctaaggccatgggaatcatgaactccttcgtcaacgacatcttcgaacgcatcgcaggtgaggcttcccgcctgccgcattacaacaagcgctcgaccatcacctccagggagatccagacggccgtgcgcctgctgctgcccggggagttggccaagcacgccgtgtccgagggcaccaaggccgtcaccaagtacaccagcgctaagtaaacttgccaaattgatgcctgcagctcctggggaaagtggaagtcagataactcctttatgaaaaggcagcattcaaaaactataaaaaatataaatccaacattattaaaattttgcacatccaaagatatcacgaacagttaaaaacaaacccacaaggtgacagaatatatttgtcacatactgacaaaaagttaaaactcaaatatataaagaatatttacaaatcaaatctcataaaataaaaactgtagagaatctgaatagaccattccaaggaaagtgggaaaatctccaaatagccaaaaatctcatttagaaaaactccgatttcacattaggaaatgctgataaacaataactctcaagcactgctggtggaatatgggagtataaatttaaaatactaccctggaaagc

SEQ ID NO: 3580 - DNA, 1099 bp, Homo sapiens
tttttaaaagctttgttctgacccatgaaagtagatccgatctgcctctgtagagggagagcaggcttgtccaacccacagccacatgtggcccaggatggctttgaatgcagcccaacacaaattcggaaactttcttaggaccttatgagatttttttttttaagctcttcactattactagtgttagtgtatactgtgtgtggcccaagacagttcttccagtgtgacccagggaaggcaaaagactggacacccctgaggtagaggaaccagccttgagaagtgcttgcaagtctctgatgcagatgacaggtcctcagggcaagattttacttttctgggttttaatgtgcagccttgccacttctcccgtgctgcgtaataacttgttttaatttatttttattttactgaacatattttgagtaggagcagggcaaaatatttttatattacattcaaaagtaacaaccaacagctttagtggaggaagaaaaccaatggacagaaatctcattttcccacgaaggaaaacagaccgggtgtggtgtgagtcagactgatgaggagtgtgcttttctcacggaacctcagaagagagggcgtctccccagagtgagcctgctgcacctcagcagggcatgctctctcagggaccccttcacccaggacagagcccagaaggctgagtttaccttcacattccaccttgtctctgagcaagctgtagggaggactttcccatggcgtgcagtgagcatccccagcatctcacctctgtgaggtctgccctgctgtctttgtgtttcacatcatttctgggattatgatgaagttttctttttttttttttttttttacagagtttcactctgttgcccaggctgaagtgcaggggtgccatcatggctcactacagccccaacctccctattgctcagctgatcctcctgcctcagccacccgagtagctgggactacaggtgcacgcctccatgcctggctaatttttgtattttttgtagggactgggtctcattgtgttgcctaggctggcgttgaactcctggactcgagcgatccacccgcctcggcc

SEQ ID NO: 3581 - DNA, 1176 bp, Homo sapiens
tgtgagtgagcagagcaggttatgtgcagacagggaaacgagaactttggacctggctttctgagtccaggtgagagctgtgtggccccccgatgccactctgcccgccggagggatgtgcctgctgagccttttccttccacgccgcctctcactgccaggccagcggcttccgctgagactcgctggagaggcggctcccgtgtccgtccaccgagcactcagatggatgctgatcaccagggccgagggggctcccagaaggaccccaggccctggggagggtggctgtgggaggccaagtccactgcccggaagtcttgtcagccctaagccagggaagcctggagcgtggcctggcgggtctgggtggacaccgtccccactccggactcccagcacaggggaggatacctgagcctgtatggccctgtagccctgggcagagctgggcctgtcgtgtgttcctgcctggcaggtgcaggtgctggccatctgcaggtggaaggaggtgggaatcttggattttttgtttttttttgtttttttttttttgaggtgaagtctcgctctgacacccaggctggcgtgcagtggtgtgatctcggctcactgcaaactccgcttcctgggttcaagtggttctcctgccccagcctcccaagtagctgggattacaggcatgcgccaccacgctcagctgatttttgtatttttagtagagatggggtttcaccatgttggccaagctggtctcaaactcctgacctcaagtgatctgcccgcctcggcctcccagagtgctgggattacaggcatgagccagtgcacccggcggaatcttggaatttttatagacagcacctcagtttctgactccagccgcacacctcctgcctctgccagcaggggttgccgccagaccagagccagggccaggtccctgcgtccatcccccccggtaggatggacgtgagccatccttctaggggacttttttcagtgtgcgactcgtctctgttaggtggtaggagccagtttgtgtggcctgtgccacgctccacagtgcgtggctgggctctgtgtgtggcctgtgtcccctgtccctgcaggacccagcaggcatcgtggcgtgacagctgtgtccaagccactgcccgggcatcccatcaccca

SEQ ID NO: 3582 - DNA, 1197 bp, Homo sapiens
gcagctcactgcagcctcgatctcctggtctcaagcgatcctcccgcctcagcctcccagtcgctgggaccacaggcgcacgccaccacgccggctaattgttgtattttttgtagagacagggtttcgctgtgttgcccggctggtcgtctggggttttcgggacagcgcgcgtcagtgaggtgcgtgaggatcgtgtgcatctggcaggttttgatgcagaaagttgccttgggccgccagcatgagcattgtaggctgtagactttggtgtacaggttgagcgtctctaatctgaaaccccaaatccaaaatgccaccaagtccaaagctgagtgctgacaggaagctccagggaaatgctcgtcgcagtgttttctgtttggggttttcaggtgagggctgttgaactggtgaatatgatgcagacgttccaaaacaacctgacattcaaagcactgctggtcccaggcatttggggtcgtggacgctctatgctgtacctgtgtcctggatgctccaggaactggcttttccagatgggcttgggtctcagctggttcgtttcagctgtggcgggtactgaacacgctgctcctgggcattagaacagggcgctttctcacacacattgtcaggaggtggtgctggctggggcctgctggaagcagcgagcctcaaaccataagtccccagcccccgagagccccctgacttctgccctggttctcaggcattttccctgaagatgagatcccagagaaggcctgcaggcgcctgcttgaagggaggcggcagaagaagacgaagaagcagaagcgtctgctcaggttgcagcaggagagaggtaggactagggggtgtgttagtcatggagccggcgtcctcacctgcttgcttctcccctggatgggggtcacctgcagtgtctccccctgaagcatgagtgccgagtcccccatcctgggtgcctgctatccacgcatcccggaaatgccctgtcctcggcatccctcctgtaggcctctccctgcctcccccacccaccttccttgtctgcagctcccccgagctgtgtgcgctgccctccctcccggtctggagacatcctcctggctgggctgcctccttccgtgcctccgtcttagatccaagccccgtccgctcctctcccgcaccctccagagattcctgagt

SEQ ID NO: 3583 - DNA, 1149 bp, Homo sapiens
ggttgtgggtgttgtggatgttggtgttgtaggggttgttggtgttgtgggggttgtgggtgttggggttgtgggtgttgtgggtgttgtgggtgttgtgttgtgggtgttgtgttatgggtgttgtgggggttgtgggtgttggagttgtgggtgttgtgggagttgtgggtgttgtgggagttgtgggtgttgggttgtggaggttgtgggtgttgcggcggttgtgggtgttgtgggtgttgtaggtggccagaactttccaggtggagagagttagttcataacagcactttgggtgtggatcaattgttgtctctagaggtagccacctggtggctgagggttcccctggagctcctgagcacatggttaggtgagcttgccccatcggcagtgtccagtgaatggaagggaaaagggtataattgcatttctaaagggctatgtaggaagtggggaacagggggaaatggagacaagagaagagaagagataaaaataatttagaaacagaaaaatgggggacacttggttacattttagctttgtgtgtctctgtaaatctagcaatctggcagactgctggcttttttttttttttttgagactgactcttgctctgccacccaggctgaagtgcagtggtacgatcttggctcaccgcaatctccgtctcccgggttccagtgattctcctcctgagtagctggaattacaggcgtgcgccaccacgcccagctaatttttctatttttagtagagatggggtttcaccatgttagccaggctggtcttgaactcctggcctcaagccatctgcatggctcagcctcccaaagtgctgggattacaggtgtgagctacccctgccggctgacagctaaatttttaaatgctgtttatacttgtgattacttatgtgtttaacttttttttctttttttgtcttaactttctactttaccatcaccatcgttattacttaacattcttttccttcactttcctgcctgctctgagactgggtgaagtttgtttttatttcctgtttctcctactgcagaagtcacacatctgtccatcatttatattcttggagtgtcgtccttaaatgttaggatgcatgcttgatgtcacaaaagttta

SEQ ID NO: 3584 - DNA, 1308 bp, Homo sapiens
tggggctggccctctttcctcctgctttggtggcgatgcccagggccatggggaagcagggccaatgtgtgcaggacggctgcagggctctcctgtccccagggctggcccctgggccgagggccttcaagtggcttgagtcagctccaggaggcagatgctcagggtgacaccctggggtgcagaaaaaaaatagaatttttatttatatttactttttatcttatttttaattcttatgtttatatgtttcataatgtatgtaacagacatacgataaaacctgtatgtggggcatgtgtgggtgtgtgtgtgttcatgtgggatgtgtatgtgtggtgtgtattatgtatgtagtatatgtgatgtgtgcatgtgtggtgtacgtatgtgcattgt[450 bp omitted]gtgtgtataaattatgtgtttgatatgtgtggtgtggtgtgtataaattataaatgtgtgtgtggtgtgtgtatatgaatcagggttggtgtgtgtggtgtgtataaattgtatgtgtttgatgtgtgtggtgtgtacgacatggggctgtgtgtgtcagggaccacagccagccagtgtgggcctctgggcaggcccctcccctcactgtagacaaagaagcctctgcgcctcggttgttcctcacatggcgtctgtggcaaatcctccccatgccagttgaacctggggccaatgtgaagctgcttttatttactgggacgtgatgttgtcttcatagccatctgctcaccagcatgcggcagaggcttgtgaacactgcatgtgtgctggtgtgtgctgtgtgctgttgtgtactggcgtttgctgatgtgtgtgttgtgcactcgcatgtgatgt

SEQ ID NO: 3585 - DNA, 1220 bp, Homo sapiens
tctggaactgaccaattggcttcaagttggggttcccacaaccccgtttgctggcgtggctcacagtgctcagggaaacatgacgtcagcattctcccccggggagtgggggaccctctcaggagagggtcctgagacccacagtcagaaaggcggggaacattagagtcctgctttggggcaggtaaagggcaggcgggaaggtcagaggctgcccgaggcccgacacagccaacgtcgtaacagaaagctaacaagcagcacgggagttaggagccggaaaccagcgtctgagtctcagcaccgcagcccgggttctgccagctgctccggaaggttccagggcgtgggccctctcgccctggtggcctcctgctgcaccacttcctgatcctcctgcttcctatgcttatttctgtttaaaaaacaggaaaatatgttcacatcaaacgcgcatatgtgcagccatgcccatgtcccttgctgcagctgactgagggtctggagctgtgcctaggaagccccccaggaatagaccctggttgtgaggctgtctgaggaggccttttgtctcccggtaggagcacgtttgccgtggacgggaaagattgcaaggtgaataaagaagtggagcgtgtcctgaaggagttccaccaggccgggaagcccatcgggtgtgtacagccgtgcaggcctcggggagggagggaggagggtgcgtgggcccgcggcctctgttctcagccaggagctgccgctgatcctgaaaactcacagctgcttttcttgttttaactgaggggatttcacacgatgtcactggtgacttaacaggaaggagaggcacagtgcacttccctagaggaggcctggaattctcttggctcccagaggtgtccctaggcagtccctcaggacccctatcctttaccagaccccttctcccaagccccttagccacagtacccccaaccccgctgacttctggccagtcactgcagcacgtgctccatccctgacgccatccactcccagcggcctccctcctggggagccacagccaaccacgcccctttgtccctgctcagacaaagcctgggtcctgaggttggcggcacgagtagggcgcccactccttcatccacgtaagcgccttggcttacgtggcgggtcgcagccccgcagggagtgtgtgctcttcagcgtctgctgccgggaag

SEQ ID NO: 3586 - DNA, 1144 bp, Homo sapiens
taagcaataacagatctgccacatgcagaagcaaatatcaggcctgtcgcacacgggcggcatttaaataggaatttctatttttgaaataagggatggtctatgaggcatacagtagatttgatgtgatccttttctccctcccttccataatggatcgtggtctgtgtgactgaacccacacagagtgtcatgggtgacagtttctggttgaagtagctccacgcctggcttctgtggacagcagattcttttccttctcacaaggggctcatttaaaatttggaggctgggtgctgtggctcacgcctgcaatcccagcactttgggagactgaggcgggcggatcatgaggtcaggagatcgcgaccatcctggctaacagtgaaaccctgtctccactaaaaatacaaaaaattagccgggcgtggtggcgggcgcctgtagtcccagctactctgaagactgaggcaggagaatggcgtgaacccaggaggcggagcttgcagtgagctgagatcacgccactgcactccagcctgggcaacagagtgagactctgtctcaaaaaaaaaaaaaaaaaaaatggaacgcagggcaagaactcgtatttggaaggagatgggggaaaggagcggtattatacctatgttgtatttgcaggcaaatgagatggagccctctctgtaaagaagagtcatttgtgcaagtagacggggtctgtgggtgcaggccctggaggggcacacaattgcctggaggcttctgtgagatcgggagagggaggagaggcagtctcttgacaaaataaagtatttttattcatttgtatttattaaatgaaaaaacaatcccatggtgtccctgttgtgtggtggaacctaatgactgttgaaataaagttctgtgttttccctgccctgcagtgtgtgtccctttgtcgtattgtcagaggagcctgtggccactgcccccagggagcacaccagatcatcccagctgggattcctcacggtgggggcttttctgcagacttgggttagctctggcatgttttcttctgtttctgatctcccttctgtcattctgtggtcttcctctggaattctcaggttagttggggtctgtgagacggatgtgttca

SEQ ID NO: 3587 - DNA, 1123 bp, Homo sapiens
catcgacgtgttccagcagcagacgggaggtgtgccggagagcagcctggcagggcacagtttctagagggcccgtccccagcccgggccgtccatcctcgcattgctgttgaatggtgagcacgtgaccatgccgaccacaaaggtgtctgcggaaactcgaggacattcaccacgatgattttcctctctttgatgtacttcaagtgcaactcaaaactatatctgcagggatgaatctgtaacttaaattgggccaatcagaattgttatctttgttcaggtaaaatgagttgcaagatattgtgggtacttttgtgtgctcatttgtgttttccccccctcctacaacatttttttaaccccaaaattatagcctgaatgttcgcttttagtctggccagggatctgactcctgagttggttgcctctcccctgctcactccagtcacatagagaattggtgtttcccgcagtggggatgcagctgttggacaggtattgggggcaaggttggtagggaggacagactgtcacttgctgttacaggcacaggtgattaaaatgctaaatattgcaaatttaagctttgtcagtatatggaaaagttgaagggaaaatactggaatgcttcttcaaaggttaaaaaataaccgagtcttttggtaatttgaccccacgtgctctctggccctcaagcatgtaacctcggggtctgaggcccaggacccacccccctgccacccctcccaccccactccctgctcagtacctggcgttggtacacaggcaaggattggcacaaccaaaattggcctttttctccctcttaatattgaagaaattcccacatttctcatttggtaatggtgttgtggcctcagatttcttctagtatttgcttctgatgaatgattatggtctatacataaaaaagtaagactaagtattgctgaatttgcagttatgttgtcgtgtataagagctacttccaagtgtggttacaaatgaacccatggaatgatgacttcatgttcttctcgtgggtttgtgccgtgctgctttccaaataggtattgaatttatgcattagtctggtgatttcagttctgtgaaatatttt

SEQ ID NO: 3588 - DNA, 1208 bp, Homo sapiens
gagccgcgcatgagagcctgggtttctagtcggggggcgccgtcgagctccacacctgcggcctcctgggtgcccccaaccctggagccccggcgagggggcacccgggctgaggcctggccctccaaggagccctggagggactgtgctgctagggcgcggggctcgatggggtgatctggagacctggggggatccggggctgccgcccctgcgctgccaacctcccaccccgccccttctgcgaggcgttattaaaggtctggtttcgggagccaggtgcgtgcccgccgccgccgctccccgcagcctccaggcagctcccgctgttccccgagggcaccagcactggccgaccgacctggcttggggcgcggcgctggcaaacccggccttctgaggggacgccacgctgactctagtgcaggcagcccccaaaacggtataattggacgaatttcttgaaggatgccagttaccaaaaaagaaaatactaatgcttattatctgttaaatttgagatcaatttgttatcaaattttctcacacagaaaattccaggcccagagggccaagctggtgaatcctacttagagaagaaataataggaatccagccactcagacgatggacgaggaggggcacttccctgctcgatgtatgggccagcattgccttgatagcaaagtcagacatcaccagacagtagaaccacagaccaatgtctttcatgaaccaagacacagcatttaaaaaaattagcaaatggaatttatatctgcctattgtttacaaaaaaagccaaactttgtaaaatacttgaagagatttattctgagccaaatatgacccatgacacagcctcaggacgtcctgagaacttggcccaaggcggttgttttactgcttggttttattcatttcagggagacataagacatcagtcagtacatgtgaggtgtgcattggattgatccagaaagtcaggacgactccaagtggaaaggcctccaggtaataggtggattcaaagatgtttctgattggcagttggttgaaagaagttactatctgaaggcttggaatcaatagaaaggagtgtctgggttaagagaaggggctgtggagaccgaggtccttattatgtggatgaaatctcataggtgtccgccctcagaggcaatacatggcaaatgtttcctattcag

SEQ ID NO: 3589 - DNA, 1327 bp, Homo sapiens
catgaaagcgcccaggacgcccctgggtctcaccacttcttcctaccatgaggcataccgcacccccagggaggctgcccgagaccccttccctctccgagactctcctgccctttgtgggccccccgaaatctggagctcaagcagcaccggggttgccactgccacctcaggaccgctggtgacccctttctctgtctgcatttagggggtgatcgctgagctgaaggtgcgcagggacccccaggtgagccccatgcactgcctggacgaggaaggcgatgactcagatggggtgagtgacatctggggcacgggtggggtctcccctcaatccctggcacgcggagttcagggccaaggtctatgacaggaaaagtcccaaaatataccacttggggcactgggaagctgcgataccatttctgtgctctcctgtagcacctcagagcccttccttgccctgaactttcccataaaaacaaatacaaagcatgatataaacaccagaaaccaccctccatggcagctggtgagacagaggatgtgaggcagctcagcaaagtgtgtgtgtgtgtctgtgtctgtgtggtgtgtctctgtgtcttgtgtggtgtgtctctgtggtgtgtctgtcttgtgtgttgtgtgtggatgtgtgtgtgtctgtgtggtgtgtctgtcttgtgtgttgtgtgtgttgtatgtgtgtctctggtgtgtctgtcttgtgtgtcgtgtgtgtctgtggtgtgtctctgtgtgtagtgtgtctctgtgtgtggtgtgtctctgtgtgtgtggtgtgtctctgtggtgtgtctgtcttgtgtgttgtgtctgcatgtctgcatggtgcgtgtgtctctgtgtctgtgtctgtgtgttgtgtggcgtgtgtgttggtggggtgtgtggaatcacgtggtacccaaggggagaatcccccagccccaggtgtgaggaacagcagggaattctcactcaggggcccagatcacaacatgccccacgtgaacatggacccacagcctcgctcctgggggcgtgggcaggagacgccgtggacgtggacccacagcctcgctcctgggggcgtgggcaggagacaccgtggctggactgtgggcagtgtgtgaacatccatgttactttcatgctttttctttattttgcccaataagcccgttgtttttgcctggaacatgccagaagacgccagatcgttcacatggcggccatgacaaggctgcgccctgggacagcttgctgggtgcggggggtcgccgaggcgccgcacccctcccctggcctgtcttgccctcag

SEQ ID NO: 3590 - DNA, 1139 bp, Homo sapiens
cagccttgccctgctcccaaccccaccctctaggccccgggctgctgagaccccatccaggcaggagcgggagcttgcacctgtgtgagttcatcctcagcttacactcacaccaggcactcacaccacacacacaccacacgctcacacatggacacacacacactcatgaacacaccacatgcgcacagatggacactcaccacacactcatgaacacataccacacgtgcacacatggacaaacacaccacactcacacatggatatatcgcacatgaacacaccacacacacggacacacaccatgttcacacatggatatatcacacatggacacccactacacatggacgcaccacacacacacggacacacaatgcacactcacatgaacacaccacacgctcacagatggatacaccacacagacacaccacacacgaacacacaccacatgctcacagatggacacccactacactcacatgaatgcatcacatacttacacatggacacacaccacacacacggacacccaccacactcacatgaacacactacatgcttacccatggacacacactacacacggacacacacacactcacagggacacaccacatgttcacagacacccaccacactcacatgaatgcaccatatgcttacacatggacacacaccacacagacacaccacacactcacatggacacaccacacactcacagatggatacaccacactcacatgaacacaccacatgcttacacatggacacagcacacatggacatgctacacgctcagatggacacacaccacacggacacacaacacatgctcacacatggacacacaccacacgttcacacatggacacaccacacgtttacacatggacacgttcacacatggacacacgctcacacatggagacacccacacattgacacactcccaccacatactcagaccacacacactgacacactcagacactgaccctgtgtgctcacagggtcctgctccctggacctgccccctctttcctgcccgctgggaggactttggccccagctcagtaccccttcctgggcttcccctccagggtggcctccgagccctatctccctcc

SEQ ID NO: 3591 - DNA, 1088 bp, Homo sapiens
gggtggggcctcttcctctggactgtgcccaggtgtgcccaggtgtgcccacagcagccctggcccctgccaagacagctgaggacgtttggtgcctgcctgtagtagtctggggcagtgtcctctgaccttgtcctgtaggaggtagcacccccagccccgtgcccagctccacgttcccatggaaggtggatgtgtgttgaggccacaggcatggaagccaggcctggagtgtccaccagcagctcagtggccaaggctgtggagctgggttcccacataacatgtgatggaggaggtgggggtgggcaggctgacagcctgtgctccccctcctgggagggtgcagggcggctacaggggcgtttgcccccctccctgctcctgggttggagtctggccttaaagaccttgctctggggacaagtgtgagatgggagtgcacagcccagggccctctgccctaccccacttcctctctttccccttcttccccttcctgtctttcttcccctgccgggttcccccacgaacagtccctcccacgaacctgctgtccctgatcctgcccttcctttctgtgtcttctgtttttgtctctctccaggaaggatggaagaagcttgtgctggtgtgaatgtgtatgggttacagctgtgttttccatattgtttaaaatgaaataaaaccatgttttgattctattaaaaatagagaagctggctgggtgtggtggctggtgcctgtaatcctagcactttgggaggctaaggtgggcagatcacctgaggtcaggagttcgagaccagcctgcccaacatggtgaaacccccatctctactaaaaatacaaaaattagccagacatggtggtacgcacctgtaatctcagctactcgggaggctgaggcaggagaactgcttgaacctgggaggtggaggttgcaatgagctaagatcgtgccactgcactccagcctgggcgacagagcaagactctgtcccaagaaagagataaaaatagagaagcttagatgaacaggcttgttaataacgattccttctgtggccactgccagctttccgcag

SEQ ID NO: 3592 - DNA, 1087 bp, Homo sapiens
attgtgaaactgatgtgcagctgaggagtgtgctattgggacagtggaggtgctgcccttcccgcgtgcccagctcagagcaccgtgcggtgtgattgtgtctcgtcccacggccagcactgctaaccgccaggctgggtcactttctaggcgaggacagggtcttgccctggctccggctgtcggtggcggggctggggctggagcggcggagccatctccttgacccctcatgaaatgccttctgctcctggccagtccgtccctctccctgccacccactgaccagatggcatctctgctcttagtggagggccactgtccaccgccaaggttatttataggggtgagcattatgtgtggcgtttcccttaaaataacaaaataagaaaagtctctagagcaaaaatgtttaaatcccatctgcctgccctctcatgttgtacattaacggattaaaaagtagattccagaaattaagccattccaccaggccttggatatcatcagagggacgatgggtgcaggtgctctgcgcacctgccacttggtggggcccccgatctcagcccctctggctgcaggagaggcccggggagagcttcatcacgccctccctcctggggcccgacaagaacttcacgcgggagcaggcacgtgggcgccggggtgcaggggcagccaccagtaggtgggcggggagcagcttcgggggcaagggaggcccagcctgccaggactcgccagcccctgttgttgccaggcttgtgtctaggaagttcacgtaagtggtgtcttgtgacccagctttcgcaagttgctctcctgcccaatctgacttgagagacgttccacgtgggttcgaggctgttcttaagctgcgcctcctgggttgaactacaaggtgcttatctgctgctttgctggaggtgattaggggattccggcttctcccactgcaggtgatggctgcaggtagagcacgagctggcagcctcaggcagtgggccttgacccagctggcccgggctggcacttccagttcactcctggggcgaatgctgcttcctctgcagcctgccacggg

SEQ ID NO: 3593 - DNA, 1185 bp, Homo sapiens
tccttccctaggcacctctgtgctgcatcccaccagcctgagcaagacgccctctcggggcctgtgccgcactagcctccctctcctctgtccccatagctggtttttcccaccaatcctcacctaacagttactttacaattaaactcaaagcaagctcttctcctcagcttggggcagccattggcctctgtctcgttttgggaaaccaaggtcaggaggccgttgcagacataaatctcggcgactcggccccgtctcctgagggtcctgctggtgaccggcctggaccttggccctacagccctggaggccgctgctgaccagcactgaccccgacctcagagagtactcgcaggggcgctggctgcactcaagaccctcgagattaacggtgctaaccccgtctgctcctccctcccgcagagactggggcctggactggacatgagagccccttggtgccacagagggctgtgtcttactagaaacaacgcaaacctctccttcctcagaatagtgatgtgttcgacgttttatcaaaggccccctttctatgttcatgttagttttgctccttctgtgtttttttctgaaccatatccatgttgctgacttttccaaataaaggttttcactcctctccctgtggttatcttccccacaaagtaaaatcctgccgtgtgccccaaaggagcagtcacaggaggttggggggcgtgtgcgtgcgtgctcactcccaacccccatcaccaccagtcccaggccagaaccagggctgcccttggctacagctgtccatccatgccccttatctgcgtctgcgtcggtgacatggagaccatgctgcacctgtggacagagaggagctgagaaggcaacaccctgggctttggggtcgggagcagatcaggcctcagtgggctggggccggccacatccaccgaggtcaaccacagaggccggccacaggttctaggcttggtactgaaatacccctgggagctcggaaggggagttgagatactgcagggcccataggaagaagtcttgggaggctccacctttggggcagaggaagaagtcttgggaggctccacctttggggcagagcaagaagagggcggagggcagaggcagcgagggctcatcctcaaaagaaagaagttagtggcccctgaatcc

SEQ ID NO: 3594 - DNA, 1198 bp, Homo sapiens
cgatggtcactgtgggtgctttgctatcaggtggggggccttcctctccactctgggtccagtgtgagtggccgctatggcttcccctccactccaggttctatcgtgagtgggtgggtgctgcgtctgtggatgtcacgtgacctttcctctttagcctatcattgtagttgggagttagttagcccgttgagcgtcattgaatttccagtgttgagccagccctgcgtgcccgggataaacccacctggccgtggtgtgtggccctgtttatgcacgtgggccctgattcgctgatgcctgcctgagggtttgcgcttatcggcgacatcagcctgcacttttcttttctcgtgatctctctggttctggcctcagggtgacgtgggcctcgtagggtcctgtggtggctcctccccagacggtgacatggagtgagcccattctccctcctgggagtgggtcactcaggccaccagagcaccacagggaaagcagccagggaggacacggaggcccttgaagctctggcctcttctgaggcctccaggacctgacagtgagtgggagcagccctggcagaacccctcccctcctctcggccgccctgacacctcatccccgacactcagagctcatcctccttcccagctgtttccaatttcaaagtgaactcgaccttgtggctccaggagatgcagcagggacagtgttaaatcggctttcaccagcccacacggccaggcatcctcctcggccctcctgggcactgggtggacaccactggctgtggcctggccctggccttctccagacagccctgtccaccccaaagcccagccaccctgggcctgcagcaggcctgtggagttctcagttgcgtggggaccagagggtgctggagaaacaaaccagacgcagctgaaggcagtcagggcagggcgcaatcagcgataagagctgcataggggccacagcgtaacctgagctccagtcggtggaaagaaaaggcagagacgttgcagaggccaggtctgctcaggggaagacagttctgggtgtagaggactcacatcccagagaggctgaggaagggtttaccaccgcaagctttctcaggcgggctcttgaggggtggctggggtcttcctggcgacgggcctgcggcactggaagccctactggagtttggcctgtc

SEQ ID NO: 3595 - DNA, 1264 bp, Homo sapiens
aaatgcacaggggaggccgagcataaccaggggtgaggggcaggcagcagttgtagttactgccgcggggcactgctatgtgcagggacagccagcacccagcccatcaccactccctgggctggctggcaggtatggcaccctgggagcccggcatatacccagggcacccctacggctgccgccagtctcatgcccaggtgggtgctctgggctggagcgagggccaggttttgggccgaggcttccccaggcaatcctgtgagctcccttctagcctctgacccagtctggtctggcttgcatggatgtagggcttggggtgggaagttcaggtcctggctttgcctttgcctgatgtggatgagcagctcacatgctcagggccacctgagactgtcactgctctcccctggctactgggaggagtcactgagagcttcgttacccctgctgccttgcccagggcacaccctatacctccttatctgctcttcccctccctgccgccttctgggcaggtagcagtccctggcctctccccctggctgatcactctccctcaggcagtggagatctgcgtctggacaccctcagatcctgtcattgcctgcccagagtccttcaggggcacccctctgccttggtgtgcagtccagggctctcacccaggtgccgcaccctctggggtcttctgtccagctcccttgccccatgtgctgtcactgactctccttgggactcgcctgcctgctcagagccctgcagggcttggtcagctgcctgttcagtgtcaacacttccctgcacatcttaaaactgggctttattttcgctgaaggaactgtgttgggacccttgacatctgtcaggtttgcacatgctgtttttttttctcagcccacgtgttctcccccacgtggggtagcagcaggacagacagtgaatcacagagtctgccctgagcagaggctgctgtccctgggactcctagccatggtcagactgtacaaaacggttttccagaaatgaaatgtaaatccatttttatactgaaaatgttactgaaagtcacttttatgagcatctgccttaataaacagacattgattcccttatcagaagcctgtcacactgtgtttcgtttcatcctggggagaactgcagatttggggtttctggctgtcatacgtcacctgcctgtggggcgagtgggaggcccagcctggtttagggaacaagagtgacgtgaggagtagcaggg

SEQ ID NO: 3596 - DNA, 1151 bp, Homo sapiens
gagttgaactctacgtcaggagtaatccagcccctccagggccagcaggagtaaggtgcgcccctccaaggatctccatgagctgcctctgtgagcctgacctcctacgggctagccagccttcacccaatcactcactggtccagcttcagggtccctacatggatgtgggttggaagacaggacaggcacacaaccatagatactgatggacatgggccatttacagaactgagggcaagagagcaattttggccactgaggcaagttcctgggttagctgcaccgaggagggtgctgacctctgcccctcgggtccacaggtctgggcccctgctgctgacatcccccacatgtcagtctgcctgctagtgggattgactaactcatcaacgtggagtttaatgcccaaccaagtgcagaccacgctcctgttttgcgtcaccctctgcgaagcttcctgcaaacttgactccctgcccagtgcccccagccccaaggtgggacatatcccctgggcaccccctctggtcctgctaaagcccagcccctctgcaggtcacaacccctcctctgtcctaccccttctgctgcctgcaatttcctgaactccttggtaggcagtctcctcaccctgtcctcccagtgtctccccaccctgtcttccctgcttgctctgagggtccctaggagggaggtattaacaccctggaggcagtacacaggtggggcgccctcccctgacacacaggttcttctggactgggtcctgaggctggtggtgcatagggggtcacgactgcccttcccccaggtctgagggttctgcccctctgcctcagctgctgcccacttttttgccttcccatgaagcccagctggccacacctggggatgagtgtttaccggtagcctgaggacgcacagtggaaacctggcaacctggggcctccctgtgtctggcagcctggcaactgtcacgcggcgcccagcgctggcttctggggcactgcagtccagggagggtgtggctatcttcccacagggctcttctcttccctcaggctggtctccaggaggtaaggcccgccctgcaggcaacaccggtgcttgggctcctgctgagcagttctttcctgcgagtaacagaa

SEQ ID NO: 3597 - DNA, 1130 bp, Homo sapiens
tggggctgtggcttgagtttgagcggctgcagtcaggaacttccatgggctccgtgaggagctgctctcccagttctgcacactcccctccacaggcagaggctgggccagacccacaggcagccttcggtggtcccctccctaccccatccacctgaggagaagtgcgtgaggtctgtgagcaggaggcattcttccctttgtccccttagtcgggcttgggtaggtggcttctcatgcccaggtaccctgtcctgctgatgccgctctctcctccctcctgtctctctccgcctgctcagcagctgctttgcctgacatgcattgtttctgatggtggcccttccccttccccttctcagtttttcttcattccctcactctggctatgtggttatttcctcacagtagttccgagtctgagatggaggaggagggagaggaggaggaggaggagcctcgcctgcccccatctgacctgggtggtgttccgtggaaggaggccgtgcggatccatgcccttctgaaagggaaaagtgaagaggagctagaggcctcaaagagctttgggcctgggaatgaagaggaggaggaggaggaggaagaatatgaagaggaggaggaggaggactatgacgaggaggaggaagagtccagtgaaggtcagaacaaaatctctgctccgaactctgccctgccccccaaagtgatctgtttcatgcgtgagtgtaagaggtttctggggctgacgtcacacggacgtgcctcctgcacagcccagggaccacccctcctgacataagacatggggggcagaggggaggacaccgtagcgttgagcaggcggttggcagtggaagtaatgtcccttgtgcacattggtttagaaactggaagtggaaggcagagagccagtccaagtactcatccaagttaggccactcctacttgtctccacctcgttttctctttttgccctgtagtttcagttgaaaaaattaataaggaaagggaatttagctttctagaggattccctgatcctagtctagggtttcggaggtggctatgagcttagtgcccactggatggggctcagttgatggcacgcagggcagcgttttggggaca

SEQ ID NO: 3598 - DNA, 1092 bp, Homo sapiens
tgtccatgaaacattccatcttcttggtgaaggcaaggggttggttcttcaggtcaggatgttaatggagctggaagttcagaaaaagcctggtgaagtgacccttggcctttcacttcttgagaaacatacttctttgctgggcatggtgactcacgcctgtaatcccagcactttggaagggtgaggtgggtggatcacttgtggccaggagttcaaaacctgcctggccaacatggtgaaaccccatctctactaaaaatacaaaaattagctagatgtggtgcacgcctatagtcctagctacttgggaggctgaggcaggagaatcacttgagccagggaggcaaaagttgcagtgagctgagattgtgctaccgcactctctcaaaacaaacaaaaaaacatgccccacaggacagtaccttaattagctagagtagatctgagagggcctcttcttgcctgcactgtgctccccagagctgatctaattctgtatcaataggctgttcccatggtcttgccatgcgcttgaagctgcaggagccttctcactgttcaggctggggtgtggttttcagaaccaccgggttgactactgaaaaccaagtgagccttacagctcttatcgctgggtaaagtgatcttgcctggtgcctcttggtcttcagctcaattttccaggttgtcctggccaagtcttgctctgttacgctcagtgcctctgcccactctttccccgccagcccttccctcccgccctgcaaacttgtcccttggctgtttcaccaggttctgcctgtatccttgcctccttggtacacaccatttcaggttcttccctttctgtgtcccattgtcctagttatgttctgttgtttgtgtaatgcccaaatttttctgctcgtgtggccttgaaaagtaggccagcctcagaggctgctgagctgaaaatggaactgagtaatcaggtgagctggaagggatgtggggggcggggcagacgggagacatgggttttgaaggcagtgaacaataaaaccttagggaggtggcaccgaggccttagcatttgaggagctgaaatgt

SEQ ID NO: 3599 - DNA, 1195 bp, Homo sapiens
aggctgtgggcaaagagagggctgagagaggctgccaagacgtgggtccacctaagctccccagacctccttctctggtctggaaaatgggtggtggtagtagtgtctacactgcaggactgaatgggatgactcactcagcaggcctggcacagagtcctctcgggccttgggcatgcagccaccctctgtggtgagagcagatggcaggctgacgccccccagctccctggcaccgggaccacatccctagccgcccactcagagtgcagggaagggttggtcacattgacacgcttgggcagcaggcatgtgcttgccgcatgaccttctagcttccttcctggtctctccttgcattggcctggagtggcccagaatgtgtggagcaaagacccaatttccttgctgcccatccctccccaggagacaccgagggcctggatgtccgtgagaaccgcacaggcatgccaaggaaagccatggcacgcctatctctccaggcgggagatgagcctcccgaagccctgggaagaagggaccttccaaggaggctgaaccgtgtccctgtcagcccaagacgggccactgcgaaaggtcccctcatctcaagctggcttctatgggcaggcatggagttttgagtgaaaaccctgcatgatcctctcaggggacaggaggggtgaacaaaggagggacagtgaccagctgaccaggccctgaggcattagcgtctgcctcgtccacatgctgtgcaagctcagcgaggccaaggggctgggccgaggtcacacagctgggcagggccctcatgaccggcatgctggtcgtggaggccgagccccaggttgggggtgggggtgggaggtgaggcagcccctggcctcactggaggggggtggtgggctggggaagctggcaaaggatgtgccctacatggtgggtgtgaggtggggaacgattcgggcagatgcccgtgtggccctgctgacccagtccaggcagggtgtgacaggtctgcccagccctgaggtcacagctgtctgcagtctccagctcactcctgatccccagggccacgtgtccagaaagcctgggagcttgcatcagctgggcacagatggcctgtcctcccagcacccctgctggggcttcctaggaactgactggtgtagactccgggcagcagacggcc

SEQ ID NO: 3600 - DNA, 1171 bp, Homo sapiens
ctgaagaaggaggggctcaaggcgtgagtgggggaggggcagggctattgtccccacctcaaacctttcccggcctacctggcctgcccactctgtccccttcaggcctctgtgcctctcacttcagtatctggggattgccctgtgcagggacactgtgctgacctgccttcctctccccgcccctcctcccacccagattctacaagggcactgtcccccgcctgggccgggtctgcctggatgtggccatagtgtttgtcatctatgatgaagtggtgaagctgctcaacaaagtgtggaagacggactaagcctagagaggccgcaaggggaccgccccaggcaccgccagagtgtcctgctacctttgtctcacgattccagtgcagtagtgccaaaaggccccttcccacgtccctcgagctctgtagcctggtctgtgcattgtggctgtcaaatccatgtgtcccccctgtggtctgtgtgtgacaccaccactgtgtcccagtgtctggcccagccatggctggatgtgcatctggcctatgaccctgtgcctgtgtttcatgttctgtgtcacgtgaccctgtgccccgcctcccggggtgcccgtgtggcctgggtcctcggccctgtagccctggcccggtcccagtccggtgccttccaccctgccctggcctaccacagctgcctccgggcctcggcctggcttcaccgcattccaggggctgcagccccctgcttctcccgccattggccttaactggccctcgggccctctctccgccccggacagggtggcacccaccactctcaggaccaccctgccaaggcagaataaaccggatcctgttgcagcctcctgtcctgtgttcgtccctgtatggacccatctatgcatgggcattggtggctgtgcctctgcaggggaccaggccacccccatctgaggacactgcagtagggggacagggaaagcctagtgtccacccagggcagagcagctgtggccacagtgttggctccctgagaagcccagcgccaggccaagaaggatctgggtgcaccctggccttccctgtggcctctgggcaagatcccgtggcatgggtaaaagggtgtgttgacaaggcctaggggtggcctggcagagtgttcagagcag

SEQ ID NO: 3601 - DNA, 1227 bp, Homo sapiens
agaggtctaacatacaggtaactgaagtcctagaagtatagagaaagagacagaagcaatatctaaagagataatggcttagggtttgaaaattaatgaaggatatcaatcttcagtttccagaaacattacagattttaattggaatgtgtaaattaaggcaaaatacacttaggcatatcataatgaaatagctcaaaactagggaaaaaaaacttaaaagaagccagagggaaaacaatggattactttctagggagagataattaagcttaactactgacttctcaaacaatgaagcagaataatcgtatcttcaaagtggtcaaataaaataatgaggttgaaactggaaaagttcccttgtcccccttgcagggcatgcgatgggggtgtagcgcgcttcttcagtgccccactgctcaaacctcgaggggagcgtatggacggacaggctgtagggctccaaccccacaacagtgtctaggagtgaatatttacagctcctgaagccccagtgggcgtgtgttacagggtgatcttttagttttgccgtctataggcgacttgtgttaaccagctcaattagtgcctctacttgtcgcatggacagagggctttctgtatcccgggttctcgccttggtgtaccagaagaatcagatcacatctgagcttggagaatgggtgcaaggttttattgagtggaagtagctcttagcagaagctgaaagggaagtcagaaggggatggagtgggaaggattttccctggaattgcactgctcaccagccctgggctctcctccaactgccccagccaaactccacgttgttcagcttcaccagcatgctggttcctgtcagtgccttcctctggatgtccagctacctgtgtgtcgctcccctcccctcaacgtccagccacctgtgtgtctgccagctagggtctctggggtttttataggcacaggatgggggcacggcaggccagggtggtcttgagaaatacaacatttgggcagaaaatgcctgtcctcacctaggtccgtggggggtggagccctagccaggggccacgccctcctctacccagcgcttcccttccccttttccatagcatttaaagggaccacatccttctctacccagcacttccatgtcaacattaggctgggcgtggtgactaacgcctataatcccagcactctgggaggccaaggtgggca

SEQ ID NO: 3602 - DNA, 1136 bp, Homo sapiens
tgccttttttagtaggctccaaataatgcaaatactagacctccagatcctttcaggattgcgcttgacatgcctcccctcttcttcaccccagtatgaatgctacctctactcctgctgcattgtcaccttctgtgttaacgaccccgtccaagatcgaacccatgaaagcgtttgactcccggttcacagagcggtccaaagccacaccaggtgctcctgccctgaccagcatgactccgacagctgtggaaaggtaggtggtagctgcaggaccctgaaggaccaggcagggtgcaggcatgggtcaacagcacagtggcagtgttcccaccaagcaacctgccttcctgttggggaaaagactctagccactcaatacatgggagcaagactgcagagcccttagtgagccaccaggagaaagaggtggttccttgaagtgggaaggtggctggaaggagtcatgggggaggacgcggcaaaagaaccacaaggtcaaaggcacaaggattggtcagtgcagaggctgaactgagaataatggtgtttggatggagcccagagtttgcacggaagagagcatgagattagttggagaggtggaagactctgatattgatacatcatggaagtgacggccttccactcagaaactgaccagaggtagagagctgcaataaaaatgatgtaagtgaggtctttgtcaagtcagattggcttctgagctcttgtggacactatgctgcttatccattctctgggtctcccctcaaacacagctgtgacatcacgcaggttgtagttctttatttcttggagttttgcagtagtgcatcctcctgaggtggccagagcgaatgtctgcagcctctgccattggcactgaagttctctgcctcctgagagggcccctccctccaagcctagcttgacaaggagctaagttcacatcccagtgagtcagagcctaggagaggagaggcagatgtgggctggactttgggggcttaagagctgtcccttaagagttgcaccccactgcgaggtttatagggctcagcagccctgggcagacacaccctagcctgtgccaccatcagccaagtacaaggacactggtcagaaacttgcag

SEQ ID NO: 3603 - DNA, 1206 bp, Homo sapiens
gatattattttgtttgaggatttgtatgtctatattcatgaaatatgtttgtttgtggttttcttctctttctactaactttgtctggttttggtattgggttagtgctagcctcatcaaattagttgggaaatgttctctctttttctgttttctgggaaaataatttgtagaatagtgttatttcttctttaaatgtttggtagaatttgccagtaaagtcatgtgggctggaattttgatttttttttttccccaaggatttaaactaaaaatgtgattcctttaattgatacaggactattcaggtcttctctttcttcacatagtctgtgtcttccaactttcatttcagctaggtttatttagcttgaatttatttgagttgttcatagtatctccttatccttttaatgtttctggtgtctgtagtgataacccttctttaattattataatttgtctcttctctttttattgttgtcagttcagctagagatttatcagttttattgatctttttaaagaaccgacctcttgctttattttctcatttgttttactattctttaaaaatatttatttctgctctaatcttatttccttccttgtgcttgttttgggcttactttgtcctctttttctgttatcttaaggcataaaccaggtcattgatttggagacctttcttcttgtcgatgtaagtatttaatgctgtaaatttccctctaagcactgttttagctgcatcctacacgttttgatatgtggtgttttcatttgtatttagtttagatattttctaatttcccttgggacttcctcttgaacccattgattatataaaacagtgttgtttaatttccaaatagttggagattttcattatcttgctgttattgatttccagtttaattccatatgatcagagagcatactttgtatactttgtttttttacatttttttttttatcgagacagagtctcgctctgtcgcccaggctggagtgcagtggcgcgatcttgactcactgcaacctccgccagctgggttcaagcaattcttctgcctcagcctcctggatagctgggactacaggcgtgcgctactatgcctggctaattttttgtatttttaggtggggtttcaccatgctggccaggctggtcttgaacccctgacctcgtgatctgcctgcctcgac

SEQ ID NO: 3604 - DNA, 1225 bp, Homo sapiens
accaaactgttttccacggcattcacaccagcaatgcaagagggttcccatttcatcacatccttgctaacacttgttattttccttaaaaaaaaaaaaaaaaaaaagccagctgggcacggtggctcatgcatgtaatcccagcactttggaaggccaagggggtggagcacttgagctcaggagactagcctgggcaaaatatcgagaccccacctccactccatctctaccaaaaaaaaaaaaaaaaaaaagctgggtgtgcggtggtgcacatctgtcgtcccagctacttgggggggctgaggcaggaggatcccttgagcccaggaggtcgagactgcagtgagctgcgaccgcgccactgcactccaggctgagcgacagagtgagaccctgtttcaaaaaaacaaaaaaaaagcacatttcaaacatacacaaaagcagagagaattcccctcggtcctccggcctgcaccccaccgccccccaccacaggggcattcaaaactgtctttttgcctctctgtaaggtaaggggggactcttgacgctccccagaccacacagccaaagtagggcgatcggatcatagggggtcccgagtcggacactgagctggcgtgcccactctcgagtcctgggaccccaaactaaaggagctgttccttttccccatggagggctgacggggcaaaatcccagggctgggaacatccgagcagctttgagtagcacaggtgggtttctacgtggctttctttaaagggaggcctgattctcggcttttcaggacccgccctccattttctcacttgcctgctctttcgtcctgcgaaactgggcagtggccggtgacagcgcagggtcagccctcggatggccaggtgggcgtgatcccaccctcctccgtggctgggtgggcgtggtcccaaagtcaattggatgtggtcccgcgtccctcccggcccagtgggcggggcctccccttctggggcctcccatcccacaccagcgagcagagaggagggtgggcggggaggccctacggggctggggcggggcggagcggaggtggttagctgtcgggaggtggggtgggcaggggccagggctctgttggtggcccggggcagccagtccctctgctcagggcttcagttcacactcacaagggaatcccagcgctcttctcctctggcggttgctggagggccttgtgagg

SEQ ID NO: 3605 - DNA, 1199 bp, Homo sapiens
tgaaaaggccacatgaatccctggggcgtccagagcatgggtgaccagcacgggctcaccacatgaggccaaggggctgcaccatacagcctctcctttggccacccgtgactacccccaactccgggccatggggcttccctacccctgggtgtcctctaagccagctgggagacaacagcctgagtccgtgtctgcttctgtattttgtgtggttttagaggatccctgggctgcctggggaagcacccagggccagggagtgtgaccctgcaggctccacacaggactgccagaggcacacacctgctctgtctacccgagggcaccagagggcacgagaaggctggctccctggcgctgacacgtcaggcaactgaggcacaaggctggcatttctgaaccttgcccctctgcaaacacaagggggcgatggtggcactccaagcaaaggggcgtgtgggtgctgcaggaggagcacagagcactggcgcccctcccctcccgccctgcagatgccggaggccccgcctctgctgttggcagctgtgttgctgggcctggtgctgctggtggtgctgctgctgcttctgaggcactggggctggggcctgtgccttatcggctggaacgagttcatcctgcagcccatccacaacctgctcatgggtgacaccaaggagcagcgcatcctgaaccacgtgctgcagcatgcggagcccgggaacgcacagagcgtgctggaggccattgacacctactgcgagcagaaggagtgggccatgaacgtgggcgacaagaaaggtggggtccgggccagcaggtgctcagctctgggacagggacccaggaccaggcatcaaagcccttacaggagaagctgttatcaccccatttccagggggctgggaaccctgggatatgcccagatagggctggggggctcctctggagtcccagggtgccagggtccctgatgacccctgcaggccctgctgcctgctgccccaggacaacaggcccccacactcacagggtctgacggtggtgcagttccccttgaactctgttctggccaccatgggacctgcctggggaccagtcagacaggttctcctgggcccgcctcccgcttgaacttcagcctggggcacaggatgtgttaccgggctcacggagtgactcagggaactagtgcc

SEQ ID NO: 3606 - DNA, 1318 bp, Homo sapiens
aggcccagggcccaggaaagctgggaagagtgccggccactggccttgctccagccacactctgggtaaccagaacccagagccctggcccttgtcacagcccctggttctgtccccattgccctcagtttctgcatctctggagtggggatgtgaccacagcccgggtcaggattttgttgtgtgaccctggccaagtcacctgaccgtcactcctagcctcagggcaggcggtttgatgacagcaacccacagggctactgagagctaaggagatcttgtgccccaaggggctggtggcctgaatactcctcaggtggtcctactgggatggcttcatgcggagagggccatttactccccctacatcctggcacagccagagatgggcctcatggaagatggggtggttttgtggaagggaggtgagacggtctctccagcagccatagcagatgtctcacagaaacttgttttgctcgggattgggaaactgcccggtgacagcagtgagtgagtttgctgtcctgggagggttgcctgggtcctggtagccgctggctggggtttggcatttggctctgaattggttctcactgggctggtgcatgactctctgtgtccccaccatgctccgggccaagatacaggtgctctcagcccagcgctgctgggtgagtttgcagtcctgaagaaggtgtgatggggcagctcagaggcagggctggcggctgctgtgacgatgtccacgcgccccacttgcctgtgcagggcctacgaggacacagcagatgatggcggcgagctggcggacgagcggcctgcgttcccaatggtgacggcgcccctggcccagcctgaacggggcagcatgggcagcctggaccggctggtgcggcgctcgccctcagtggatagcgcccgcaaggagccgcgctggcgggaccctgagctgcctgaggtgctggccatgctgcggcaccccgtggaccccgtgaaggccaatgcggccgcctacctgcagcatctgtgctttgagaacgagggtgtcaagcggcgtgtacggcagttgcgggggctgccgctgcttgtggcactgctggaccacccgcgggctgaggtgcggcgccgggcctgtggggcactgcgcaacctctcctatggccgcgacactgacaacaaggccgccatccgggactgcggtggtgtgcctgccctggtgcgcctgctgagggctgcccgggacaacgaggtccgtgagcttgtcactggtgagtgggacctggccatgctcacatcccctgggaagagaagagtg

SEQ ID NO: 3607 - DNA, 1139 bp, Homo sapiens
gtaagggatcttgtggctgtcaggatggcagaggagcaggagttcacccagctctgcaagttgcctgcacagccctcacacccacactgcgtgaacaacacctaccgcagcgcacagcactcccaggctctgctccgagggctgctggctctccgggacagcggaatcctcttcgatgttgtgctggtggtggagggcagacacatcgaggcccatcgcatcctgctggctgcgtcctgcgattacttcaggtgagttcactagagctgtttgtaagaagaataacaaaggtaatcctggctctgctagtaaaggtactggcggtgacagtggctggtctcctgctcacctcagagcctcccctactccttgtggctatgacttagtcaacaagtgtgagagacagaagggggtcttagagttcatttttcattcagtgatcctgtttcttgggctttgcctcctcttctcttccctctcttctcttccttttcttttccttttctctctcttttcttttctcttttctttcctcctttctctcctcccctcccttaccattcctcccctccgtcagtaattattgctgtgtatgcatcaccttctggctcacacctctcatccctcaggtgttagcctctggccctcccagtgagctctgtggcccctctggggtttcttatggcctccttcgtgaccccatcccagcacttggcacagtgtgaggaaccactggcttatctgtcttttccactgggttggaatctgtctcttatccctagcacctgacatggttttcacatattcaaacaatacccatggcttaaatgaataaatttatgtacacagatagcagatcaatacaccatttgccctgttgtctgcactgctctgcactcaaggaggtgggtgtcaccacccttatttcacataggtggcatgagcctgagaaggactgagggccactcgtggtccccagcaaggttgtcatgggactccaagcctgaggtgttccattctagctctgattctgttcaatcattttgtcttcaaggcttagttgtagttctctctctctctctttctctttatctctctctatttttttaattaggaactatcaagcaaaatatgtatgg

SEQ ID NO: 3608 - DNA, 1503 bp, Homo sapiens
gctgaggcaggagaattgcttgaacttgggatgcagaggttgcagtgagctgagatcctgccactgcactccagcctgggcaacagaacaagactccatctccaaaaaaaatgtagaggccgggcatggtggctcatgcttgtaatcccagcacgttgggaggccgaggtgcgtggatcgcccgaggtcaggagttcaagaccagcctggccaacatggtgaaaccccttctctactaaaaataaaaaaagttacctgggcgtggtagtgggcgcctgtaatcccagctactcaggaggctgaggcaggagcatcacttgaacctgggaggcagagtttgcagtgagctaagatcacgctattgcactccagcctgggcgacaagagcaaaacttgtctcataaaaaaggaaaataatttattatagaggagagtggtatattaagaagtttgacaggcactggcttagagtaagatttttctcttagagtaattttctttctctcttaaggtatccaagcccaccaatgggatctgtctcagcacccaacctgcctacagcagaagataacctggaatatgtacggactctgtatgattttcctgggaatgatgccgaagacctgccctttaaaaagggtgagatcctagtgataatagagaagcctgaagaacagtggtggagtgcccggaacaaggatggccgggttgggatgattcctgtcccttatgtcgaaaagcttgtgagatcctcaccacacggaaagcatggaaataggaattccaacagttatgggatcccagaacctgctcatgcatacgctcaacctcagaccacaactcctctacctgcagtttccggttctcctggggcagcaatcacccctttgccatccacacagaatggacctgtctttgcgaaagcaatccagaaaagagtaccctgtgcttatgacaagactgccttggcattagaggtaaaatctgttcagattagctttttgggtcctttgacatttggttttaatttttagttttagtttagtttctgctcatttaagcttatattcatggaattagagcactggatgattttggaagatacgcactgttagcgtttcattttaaaatttttttatagagacgaggtctctaattttaaaagagttgtttgcccaggctgatttcgaggtcctggcctcaagcaatcctcctacctcgacctcccaaagtactgggattacagatgtgagccaccatgcctggcccattattagtgtttcacagcttgttttgttctgtcctattccttgtttgccccaaattctcagccttcttgctctttcttgttcccaaagcctaacagatttagttttgcagttgttggtttttcttccagtaaggaaagataatgattaaggaagacccatgacctagaggcaaaatcaacatatatggttctgtatttctaacattggaatcagttgagaaatatgaaaatgt

SEQ ID NO: 3609 - DNA, 1099 bp, Homo sapiens
ttggatgttaaattaactcactatggtttttcacctgggaaggaaacaaattacgtactagagggcattgactggttaaaaacttgtgtatcccgggaaggacctgcggtacaggagtcagccatgtctgtgctgtgtggaaccacctgatgacatggttaacgaggaagacgatgtgttgaccggctgccgtttgaggactttggtcacccagactagacaccttctgtgctcatgtttggaaagctgaaagggaaggacagctgtgccctcctgggagctcatgtgtccctggcgctgtgctagctttcctttacagctgtttacagacaaggcaggcctgaggcagatggccactgctcttgtgatgtttgctcagaggaatatgaacattttatttttgaaaagggatgatgtggttttttgccaggtgtttataattaatcctttaatattatggttattaacctcttaaacatgaatgaattcttgattgttttaacacagtacctaagactaatgctttctgtggacaccactgagctctgcctcaactccaccctctgcgaccggaggactatgcccctagtaactgctgtcggtgtggacgctgtgctggttctgttttctaaaggagcagaaggacaggtctctgagacaggatcgttgtccctacaggaggaacagtggccttgcttcttagacggtcttcactgtgtgttttaaaacaacaacaacaacaacaacaacaacataaaactcttttgacctgtaacttaaagatcataaacttcaggcaataatattttctgtgtaagcttttaaaattatttttggggatcatagcttgttttattttgtgctataaaattaacagtattaaatgacttatattcttagaatacatcgagtgtcttttcttaacagattagtgcctttttatttttgtattccgttttacgttactggtcccagcatcaaaacccttgtttccatggcctgtttgtatattgtctcaataaaacttgcatcagccggtggtggcggcagcttcggtgtttcagtgtctcctcagtccgcccccactagcctcctggca

SEQ ID NO: 3610 - DNA, 1372 bp, Homo sapiens
tgagggcaggagacgtggtcatggtttacgggcccatggatgaccaaggattctattatggagagttgggcggccacaggggcctggttcctgcccacctgctggatcacatgtccctccatggacactgagcaagcatccttgcccaggtagtggcctctggctgctcacaccctgccagaggagaagcaagcgttcagaccctcacaccagcacccctcctcaccaccataagtagcatgtgctccaagtgccactgtgttaaactgatggtagtccttaagcgtcccctaggctctgaaagtagcaggacttaagcctgagttatttgcaaaagcaaacacaacaagccaacccctgagagtctgagaagccatttcaaagttgctgataactatggcaggtatacggagaagcgcctttttctgtggccaatgtgtgttttctctgggaggttaaggttatctgtccattgccttgtacgaaagtctcaagaaaagtctacatcttaaaaaagaaaaagcaatctgagtgttatttttgggatgtgagggtgatctggctgcgacatgtgtcaccccattgatcatcagggttgattcggctgatctggctgactaggcgggtatccccttcctccctcaccactccatgtgcgtccctccagaagctgtgtgctcaatggaagaggatgaccatccccgatagaggacgatcggtcttcagtcaagagtataagagtagctgcgctcccctgctagaacctccaaacgagctctcagaatgttatttttctgtcttatgtccaacccctcattaaaatgttcatagaaaaaacatattttagaagttgaagcacaaccaaggaaacatgagcctggctttcctccctctcacttctgcgcactgggtccgcaagggctacagaaatgttttcctggctgaggaagggagggtgcacccttctgctttttttttcctggctgcagtctattcccagaacacattccatcacatggttcccagaactcagattgtgcggtggccacgtcatcattggctggggctcacagtcacagcagcagaggcctccctaaacctccctctcctctagccccacccgctgtcccctgctcctcatgcccccatgctgtgtcccctggcctcacttccgttgccatgttttcataatcctctcaggctctgggcagcagcgctgcccacagtaggaccagatcatgtaaggaaaatactgcaggctcatcttggggctgcactggggacctgagaacaccttatcctactgtacgtgcggcacctcatctgacaccagcttctctgctttgcccaaggtccctaggccctgaatgct

SEQ ID NO: 3611 - DNA, 1372 bp, Homo sapiens; identical to SEQ ID NO: 3610

SEQ ID NO: 3612 - DNA, 1171 bp, Homo sapiens
aggagtttgagaccaatctaggcaacatagtgaggccttttctgtactaaaggtactaaaaattaaaaaaaaaaaaaattagccaggtgtggtggtacgtgcctatagtcccagctacttgggagcctggggctgaggatcgcttgaacctgagtggtcaaggctacagtgagccgtcgtcgtgtcaccgcattcccgcctggcaacagagcaagaaactttcccaaaaaaaacaagcatttcaccttatgaggttttccatttatgaagggtttattgggatgtaagtccatagtaagtcaaggagcatctttatatagttagaatagggacagtcaagtgtttcatgcataatccaaatcttcaggaggcaacatcaaggtaacccgagtttagggatattctgcaaaataactggcctgtaaacctcaaaattaagtcaagatcatggaaccaagaaaacactgaggaattgttccacactaaagaagtgtgcagaaacatggcaactccatgtggttcatgattctgaatcggcatgattggcaaaactagaatgtctgaaaattagattgtagtcgtgtatctgtgttaatgattttatttttatcttcttttttttttaactcttcttttttttggtattttcttttttgttttggtttgtccttccttttttttgttgttttttgttttttgttacaaacccttgtgtcgatagctgactgctctgctgtatacgaaaccctgacccagaaacaggttgtctgtgaatggtttagcacaggtcccccgtgaatgtgcattgtgtgacgggcaaaagtgtggccgcctttctactgtgccaagttttccagcatgagaggctttccatatctggtcctcagatatgtggtgtgaatgaaggggggaccagctatccgaggccaaccgaggctccacagttggctgccatgtcattttgcctgggcgggattctgacttagaggcctttggtcataatctgacaggtgagcgttgacgattttgatggtagcattttgtttgtatgggagaatagtctagttttgtttgttggaaatagtcactaaagtattgggggataatgagaaagaaatactggcaaacttactctcacatgcttcagagactaaaagtttgataagctaga

SEQ ID NO: 3613 - DNA, 1197 bp, Homo sapiens
cacacatctaaacaatcagatcttgcaagaactcactcactgtcatgaggacagcaccaagcctcgcggaatccgcttcaatgacccaaccacctcccaccaggtgccacatgcaacattggggattacgtttcaacaggagattgagagaggacacacatccacactatatcaggaggtgtgtgccttgcaaccatcaggggatgctgcaggactgccctatggtccctacacagctgcttagtaagaaccattcactccaaggaacctgtgccctgtgctcaatgatggggactcaggagctgtgtcctctctggcctggcagagtcccctaagcagagacctgtgtatggtctcggcaggtgcttcctcccagggccctcccgagggggaaaccaaaccttcctcctcctcagtctggagtgtgagctaagcttcagctccagggctcagggaggggctgggcagtccttggatggaaacatatttgcatgagcagcccctcctctggcagaggatggagaagaagaggagacctggggcagctcaggcccactgttagggctcaggggctgtgtccaccatggcctggactcttctccttctcgtgctcctctctcactgcacaggtagggaaagtccttataaactgagtctcagtgtccaacctacaccatcccctgtggctcagacctacaagaagctttaccctgggaactgccttatcacccatgatgtctgtgttttcaggttccctctcccagcctgtgctgactcagccatcttcccattctgcatcttctggagcatcagtcagactcacctgcatgctgagcagtggcttcagtgttggggacttctggataaggtggtaccaacaaaagccagggaaccctccccggtatctcctgtactaccactcagactccaataagggccaaggctctggagttcccagccgcttctctggatccaacgatgcatcagccaatgcagggattctgcgtatctctgggctccagcctgaggatgaggctgactattactgtggtacatggcacagcaactctaagactcacacagtgctccagacccatgaggaagtaagacaaaaccctcccctctactctcctggtctagtgaaatcacccctgctggtggctctgaccaaatctagctcagggggtgacatctgtt

SEQ ID NO: 3614 - DNA, 1201 bp, Homo sapiens
ggcgtggtaggggcagaggggggaggttgcttctgtcggaggactgctgcgagttctgccagagagagcagctcttgtcccggaacatgaggtaggtggtggggcttggggacacgcggctggactggccggagaagtcctcctggccggaggggagccaagtgttcctgttccaggactgcagaactggcccagacctctgtattggaaaggtctttatggaccagggagtccggtgtcttttttacgggggacccctgggctgcgagttgcacagtccaattcgctgttgttagggcctcagtttcccaaaaggcacagggacggggggagggtggcggctcgatgggggagccgcctccagggggcccccccgccctgtgcccacggcgcggcccctttaagaggcccgcctggctccgtcatccgcgccgcggccacctccccccggccctccccttcctgcggcgcagagtgcgggccgggcgggagtgcggcgagagccggctggctgagcttagcgtccgaggaggcggcggcggcggcggcggcacggcggcggcggggctgtggggcggtgcggaagcgagaggcgaggagcgcgcgggccgtggccagagtctggcggcggcctggcggagcggagagcagcgcccgcgcctcgccgtgcggaggagccccgcacacaatagcggcgcgcgcagcccgcgcccttccccccggcgcgccccgccccgcgcgccgagcgccccgctccgcctcacctgccaccagggagtgggcgggcattgttcgccgccgccgccgccgcgcgggccatgggggccgcccggcgcccggggccgggctggcgaggcgccgcgccgccgctgagacgggccccgcgcgcagcccggcggcgcaggtaaggccggccgcgccatggtggacccggtgggcttcgcggaggcgtggaaggcgcagttcccggactcagagcccccgcgcatggagctgcgctcagtgggcgacatcgagcaggagctggagcgctgcaaggcctccattcggcgcctggagcaggaggtgaaccaggagcgcttccgcatgatctacctgcagacgttgctggccaaggaaaagaagagctatgaccggcagcgatggggcttccggcgcgcggcgcaggcccccgacggcgcctccgagccccgagcgtccg

SEQ ID NO: 3615 - DNA, 1179 bp, Homo sapiens
gtctgttagcagccccaagaacccagccgatgtgaagggtcctgtggttgggctggtggggacaggggcgatggcagagccccagggtgtgtctgggtggagcccacgcttcaccaggagagctgagtgggccaggctggggcatagcctggtgccccaggggacgggaagctccaggccatgccaggcttgggcctccccacaccctgccaggtcagttttgtgtgctgtgagggagacccctagattccaaactcagactccagaaaccaggaaggagggagcacagcctgccctgggtacacacggggaaactgaggctgcagaggaaagggctgggccaggacacctgggaaaggtgacttgggaagggctcctaggaaggcacagggctgtctgctctgcagagggctccagtggaaaggagggaatgaggagggaaggagaggccctgggtggaccagacggccacaccatgaaccctcccagagactttagacagagagaggcgctccacaacaccccacactccctctgccatctctcaccccctcctctgtccacacaggtcagcccaagactaccccgtcggtcattctgttcctgccgtcctgtgaggagccccaagccaacaaggccacactggtgtgtctcatgaataactttatccgggaatcttgatggtgacctggaaggcagatggtaccctcatcacccagagcgtggagaagaccacgccctccaaacagagcaacaacaagtacgtggccagcagctacctgagcctgacgcccgagcagtggaggtcccgcagaagctacagctgccaggttatgcaagaagggagcaccgtggagaagtcagtggcccctgcagaatgttcataggttccagcccccaccccacccacaggggcctggagctgcaggatcccaggggaggggtctctctctgcatcccaagccattcagcccttctcgctgtacccagtaaaccctcaataaatatctttgtcagccagaaatcctgctccctctcttcatttcttatctctcatataatctaatgcttctcctgggttctcagtgtggcactgggggaatcctggcaccagtgggaaagtagcctggaggagaggatcacagtctcccaggggtgtcccctggggaaataggccag

SEQ ID NO: 3616 - DNA, 1567 bp, Homo sapiens
aggggttcagggaagttccctggatggtgattcgcaggggcagctcccctctcacctgccgcgatgactaccccgccccatctcaaacacacaagctcacgcatgcgggactggagcccttgaggacatgtggcccaaagacaggaggtacaggggctcagtgcgtgcagtggaatgaactgggcttcatctctggaagggtaaggggccatcttccgggttcaccgccgcatccccacccccggcacagcgcctcctggcgactaacatcggtgacttagtgaaaggactaagaaagacccgaggcgaggccggaacaggccgatttctagccgccaagtggagaacaggttggagcggtgcgccgggcttagcggcggttgctggaggaacgggcggagtcgcccagggtcctgccctgcgggggtcgagccgaggcaggcggtgacttccccactcggggcggagccgcagcctcgcgggggcggggcctggcgccggcggtggcgtcacaaaaggcgggaccacagtggtgtccgagaagtcaggcacgtagctcagcggcggccgcggcgcgtgcgtctgtgcctctgcgcgggtctcctggtccttctgccatcatgccgatgttcatcgtaaacaccaacgtgccccgcgcctccgtgccggacgggttcctctccgagctcacccagcagctggcgcaggccaccggcaagcccccccaggtttgccgggaggggacaggaagaggggggtgcccaccggacgaggggttccgcgctgggagctggggaggcgactcctgaacggagctggggggcggggcggggggaggacggtggctcgggcccgaagtggacgttcggggcccgacgaggtcgctggggcgggctgaccgcgccctttcctcgcagtacatcgcggtgcacgtggtcccggaccagctcatggccttcggcggctccagcgagccgtgcgcgctctgcagcctgcacagcatcggcaagatcggcggcgcgcagaaccgctcctacagcaagctgctgtgcggcctgctggccgagcgcctgcgcatcagcccggacaggtacgcggagtcgcggaggggcgggggaggggcggcggcgcgcggccaggcccgggactgagccacccgctgagtccggcctcctccccccgcagggtctacatcaactattacgacatgaacgcggccaatgtgggctggaacaactccaccttcgcctaagagccgcagggacccacgctgtctgcgctggctccacccgggaacccgccgcacgctgtgttctaggcccgcccaccccaaccttctggtggggagaaataaacggtttagagactaggagtgcctcggggttccttggcttgcgggaggaattggtgcagagccgggatattggggagcgaggtcgggaacggtgttgggggcgggggtcagggccgggttgctctcctccgaacctgctgttcgggagcccttttgtccagcctgtccctcctacgctcctaacagaggagccccagtgtctttccattctat

SEQ ID NO: 3617 - DNA, 1154 bp, Homo sapiens
tttcttttctttcttctccttttacttattaaatatgtaaggaatacagatattcagattgacaaaatatatcaagacaatggggaaactgaggcaggaggatcacttgaggctaggagtttgagacaagcctggataacatactaagaccgtgtctctacaaaaaaattgaaaattagctaggtgtggtgatgtgcctctgtagcctcagctactcatggagctgaggtgagaggattgcttgagcccagaagtttgaggatgcagtgagctatgatcacaccactgcactcttgcctgggcagtagagtgagacccagtctcaaaaaagaaaaattttttaaaaaaattctaagttaaataacttggtccctgtaactttttatatgccattatcactctagatcttggaaacgtgcgactccaggaaagatgagctggcattacttgtcagttataagatagtcatggcacttttgccatttccctgggaagttcaagtggctgtgccagtgccgtgctcctcccgtccccggggtgcatattcaaggagagatctgactgtgtgtgtgtgtgtgtgtgtgtgtgtgtgtgtgtgtgtgtgtgtgtgtgtgtgtgtgtgtgtgtgtgtgtgtttgccctctgcttgtgtcgcttccaggcagtgatgctggactccacagatgtcaacctctggtataagattggacatgtggccctgaggctcatccggatccccctggctcgccatgcttttgaggaagggctgcggtgcaatcctgaccactggccctgtttggataacctaatcactgtcctgtacaccctcagtgattacacaagtgagtcatgctttgatgctttcttccatgtgccagtggtttttggaacagcagaggaaaggcagtttgggtaaactgaaagccaaagttaacactgaaggggtttgccagactgtcagggagaatggcaatgttcttagatttctgctttattctgcatctctttcttgatttgttaaatgccttgtagtaataaagtagcatgttttctgaatgattttactttttttttttttttttttttttgctttgcaaggttttgtttgcttgacagaagtggctatcttatttcctccctgcactgtcccattt

SEQ ID NO: 3618 - DNA, 1125 bp, Homo sapiens
actctgttgcccaggttggagtgcagtggcacgatctcggttcactgcaagctctgcctcctgggttcacgccattctcctgcctcagcctccggagtagctgggactacaggcgcccgccaccatgcctggctaatttttttttgtatttttagtagagacggggtttcaccgtgttagccaggatggtcttgatctcctgacctcgtgatccgccacctcggcctcccaaagtgctgggattataggcgtgagccaccgcacctggcctgaattatatcttaataaaactgttatcagaaaacccatgaggtgacgaatggtcatttatccttattttcacctctaacacaataactcttttcatttctttgtattctctttcaggttttatacatatacttaggggcttttggggcagagctataatcatggtgactttatcaatactcagttgtgattccaaacatcgatgttctcaggctgtaggggaaaaaaaaaaatctctcattcaccaggttgttgatttcttgctatggaaaaaagaggaaggagactggttaggggacttttgcagatgataagtctgagccagggctggaggaagagtgtgaaagagagctggtgccagagacactccgcctccacagggacctgaggctgcccttagcatggctcctagtgttgccttctgagcatgcctctcccctatcctgttgttaaggccagagatcatgacagctaattagagtagaggacaaatgacccgctgggctgctcatcctgtggtcaccagggactgatgttcttacttgagacaaaaggaatttgatgccaaagaaatttatttttggcatagataagtcgtttgattattatttttattcttttttcaagtggtaaaatatacatataaaatgtactattttaaccacttttaagtgcacagttcagtagtgtaaagtatattcacactgtgcggatctccagaatttttgcatcttgcaaatctgactctgtcccattaaacaatagctccccattcccccagcccctggcaaccaccgttctattaatattatagtttccatttctgtgagtttgactactctagataccttacac

SEQ ID NO: 3619 - DNA, 1184 bp, Homo sapiens
tactttggaaccactaacacctctgcacagggcagttagccagctcaagttctttttcagagaaagggacttggccagtggtttaagtacctgccccttcacctctcagacgaggcagctgacgaggcagctggcccagtcttgggagtctgctcaggacagtggtggagctgggtcttgaaccccagtctgcacctaaaaaactaaaggaaatggatttttttttttttttttgagacggagactcactctgttgcccagactggagtgcagtggcacgatcttggcttactacaacctccgcctcctgggttcaagcgatcctcctgcctcagccccccactagctgggactacaggcacatgccaccatgcccggctaatttttttgtatttttagtagagaccaggcttcgccatgttggccaggctggtctcgaacccctgagctcaggtgatccacctgcctcggcctcccaaagtgggaaatgggtcattttcaaaggggcaacagtgataccatccctgcactcctgggtcctgctcttccaatgcccaaggcatggcatggtggcagctgtgcccccgcccattgctttggagcacagatgactctgggggcagaggtgggctctgtttaggagggcagtgagaccacccagccaaattgcttctcaaccctagacaaagcctttggccaagagggaggtgctgttagttgggcagcccttctgggtttcagagaccggtgttggctctagactggtctcatctccattgccttaatgccaggtggcccaggagtacccatgcacagcagctgtggggtgtgggcatcttcaggtggtgttctggtaaaattgttagaatagctgtatgaaggaaaccagtgggaggaaatgaagttttcaggatggtgggatgtgatttagacagtgcacatgctgttagggctgtcactagggagtggccttcatggagggtggtaacagcacctcagtccagccaaaatgtttagaaacactcagtctctggtcccagaggatggcttctcagggcatgccacaagttaaaggtcaccttcctgaaagatgaatgagaaagctgcccattctcaagactcatctgcctagggagggtcacagaggcaggatgtaagacacactgtgttgcattcttgcacaa

SEQ ID NO: 3620 - DNA, 1150 bp, Homo sapiens
tcccccctgttaaatgcagtggctgtcagctggacgtgttggcttatgcttgtaatcctgacactttgggaggccgaggtgggtggatcacctgaggtcaggagtttaagaccagcctggccaacatggtgaaaccctgtctctactaaaaatacaggaaattagccgggcgttgtggttcacggctgtagtcccagctactcaagtaggaggctgagacatgagaatcgcctaatcccaggaggtggagattgcagtgagccgagatcatgccactgcactccagcctgggtgacagagtgggactccgtctcaaaaaataaaaaaaaaaaaaggcgggaggtggaaatgcaatggccagggtggtgttggaccaggtaacccttcagaacccttctaactggtgtcctagggccctggctactctgtgctatgagcattcaccgaccacactgacctggcctcatattttctcttccctttcagtggccgcaagaggaagaggacgtggaatgggacgtggaaacatctttcaaaagcgaagataattttctaagttgaacagaactttgtccttttttctttcaggttatctgagttcattggagtgggtgcttgtgcatatatgctaggtatcttttgccatctttctctttagatcaggggaaatgtttaagctaaataaatctggggggttttttgttctgttttgttttgttttctttgagaaaataaggactttgtgttcatttgaagtttgctttggctaaattttgacaccctgggggatgtcctgggagaatgccagtactttgaaatagcacagctattgatgagattttaagctgctgttcctggccagttgcaggttaagccccagaaaagttcaccttggagaagctccgagaacacacagattgtgtctcattcatcttcagacacaggcacatagtgtggcactttgttcagttaacatttgtggagctgtcatcagctcagctttaacaacacaggtgactctttcccttgataaagtcataggtaattcaggggctgggtgcggcggctcacgcatgtaatcccagcactttgggaggccaaggcgggcggatcacgaggtcaggagttcgagaccagcctggccaatatg

SEQ ID NO: 3621 - DNA, 1131 bp, Homo sapiens
cagagacaatatatttaagaatcacttggttaaacaatgtttttaatgcaggacttttcagagccttttattatgcaaatatacattaggaacctccagacgtggtccttggcaccctgctgtatttctgagatctcagatgagagaattgttgcagatttgctcactgacttgattggggaaatctcactacactgaacgtacacaccaatggtaagatttccactttcagaaatgctaagtctgggggagaaatgtgcctctaactggaaggtttcagtagcatgtgttgaccacagaattcacaaagcatttcactaggttgtatcttgcataacacacttcaaatgggcctggtcattttgttttccttttagaagtagatagattagcttccatcaaaagactctgttcttcgaattgtctttatatagtcaatgttagttccttcttcctgtatttttatttttttgtttgtttttagagacagtctcgctgtgttgtggaggctggagtgcagtggtgcaatcatagttcactgcagcctcgaactcctgggcttgggcgaccctcctgcctcagcttcccgagtagctgggactacaggcacccaccatggtgcctggctaattaaaaaattttttttcttgtagagatggggtcttgctatgttgcccaagctgatcttgaactcctgggttcttgcgatcctcccaccatggcctcccaaagtgctgggattacaggtgcgagccaccgcatcctgcccctccttgatttttattgggcggagaggaaggtacatgcatagatgtatacatcaccctcagtctagacattggtgtcccttccagatgcaaagatactggcctgagagggccttgagattccacaaggggaactttccatctggtacaggaccccctttatttagagaagagagcctcagcccagacaaagaaacaacttggccaaggtgacaccgcctctttggagcaagcctgaaggcagagctttgccgcagagttgggtttccttttgctgccctcccctgtgactgagtaccttgcatgctgttttttcagcctgagcctggttggcctccagttattattgaaatgagtggatgtt

SEQ ID NO: 3622 - DNA, 1136 bp, Homo sapiens
gatccgcccgcctcggccccccagagtgctgggataacaggcgtgtgccaccccacccagccaataggtcatttctttttagcactaaataatactctatcctgcatgttttgaattgccttttagaggttcatttacagcattttcatggtagcaaaaaaatcagaaataacccgaagttatttaaagaacttacagcacagtgcactatgcagtcatcaaaagaacagggaatctttctattcacgagaagggaaggtgcccagaatttactgttaactgagaacaagttggaaatagtatattttgattgcccaatttaaggcaggaatacctgaaaccttacctgttggttacttctgatgggtgagattttagggcaagttcactgtctattgtttcatgtctgcatctgtgtggacaaaaacaaaaaaacagatctgtgttagctgcttctcctcttgccctgcccccgtcacaggtacatgtactgggcagattggggtgagacgccctggatcgagcaggtggggatggacgacagcacccagaagatcattgtggacttggacatttactggcccaatagactgaccatcgacctgggggagaagaagctctactgggctgacactaagctcggcttcatccaccgtgccaacctggacggctcgttccggtaggtacccgcccagtcccggggcacccccttcccctttgcccccaggtgtccccagtgcttttgaaggcgttccttcttaactcaggccaacagactcttctctgaaactctggggacctgagaaatgcatgacttctcagaacttgaaacagtgtcaggggctgggtgacacttgccccagcacctgtatatttctatagcaaatgtggcatgttcattctaagtagggcagaaaagactgtctgtagcccatacctatgcacagttgttgttttctttttcattattttgtttttttgaggcagagtctcactgtttcactcaggctggagtgcaatggcatcgtctcagctcactgcagccttcacctcccaggctcaagcgattctcccacctcagcctcccaagtagctggaactacaggagtgcaccaccacacccagctaatgttcgt

SEQ ID NO: 3623 - DNA, 1222 bp, Homo sapiens
cagcctgaccaacatggtgaaaccccatctctactaaatatacaataataataataataattagccgggtgtggtggcacgcacctgtattcccagctactcagaggctgaggcaggagaatcgcttgaacccaggaggcggaggttgcagtgagccgagatggcgccactgcactccagcctgggtgacaaaaaaaaagaaacaccacccctaagcgagagtctcgtgaggatgggaggtggtaggaagtagtcaggtctgggtctggccaaggggtggctgtgaagcctgagggaagacaggcatccaggaccatcctggctgggcctgtgcaggagcagtgcggagagggctgtgttagccctgcctgcatcctctgagtgggctggggagtaggagtgtcctggaacacagggcacaggttggtgcttgggctacagatttaggagtcctataagggcactcaagctctgggctgggcgagatgccccagggactgactacaggaggaccccaagaagcagccctgagctgtgtgacaggatgtggagagatagaaagtcagtggcatgtgctgggagtgctcctcccccatgcgggcttttccttggagtgtgcaattttttttttttttttcctggcaacagattctcactctgtcactcaggctggagtgcaatggcacaatctcggctcactgcaacctccacctcccgggttcaagcaaatctcctgcctcagcctcccgagtagctgagactacaggcgcctgccaccatgcccagctaattttttgtattttagtcgagacagggtttcattgtgttgcccagactggtctcgatctcctgaactcagacaatccacccaccttggcctcccaaagtgctaagattacaggtatgagccaccatgcctgaccaacttttgctctgggtactccaagttttaatcatgaccttcaagaaaacttgtttcttcaatttattttttatttttatttttattttttttttgagatggagtctcgctctgtcgcccaggctggagtccagtggcgcaatctcggttcactgcaagctccacctcccgggttcacgccgttctcctgcttcagccttccgagtagctgggattacaggcgcccgtcaccatgcccggctaattttttgtattttcggtagagaaggggtttcaccgtgttagccaggatggtcttga

SEQ ID NO: 3624 - DNA, 1197 bp, Homo sapiens
tgattaactctctgttttgaacaggatataaactccatgaagttagagactgtgtctctttttgttcactctttatcccccacatctggcacatagtaaagcattccacaaatgcggcattggaatgcatgaataattgctgacctctccctggagggctcaaaatagaaaccttctgatgtgagaggacatttcaatgtggtctagaagaataagtaaagaattagactccggtctggcggcagccatcagataagccaagatgggtgcatacaagtacatcctggagctatggagaaagaagcagtctgatgtcatgcgctttcttctgagggtccgctgctggcagtaccgccagctatctgctctccacagggctccccgccccacccggcctgataaagtgcaccgactgggctacaaacaaggccaagcaaggttacgttatatataggattcgtgttcgccgttatatataggattcatgttcgccgtggtggctgaaaacgcccagttcctaagggtgcaacttacagcaagcctgtccatcatggtgttaaccagctaaagtttgctcgaagccttcagtccgttgcagaggagcgagctggacgccaccatggggctctgagcgtcctgaattcttacagggttggtgaagattccacataaaaattttctgaggttgtcctcattgatccattccataaagctatcagaagaaatcctgacacccaatggatcatcaaaccactccacaagcacagggagatgcgtgggctgacatctgaaggctgaaagagccctgggcttggaaagggccataagttccaccacactgttggtggttctcgccgggcagcttagagaaggcgcaatactctccagctccaccgttaccgctaatataattaaagtttgtaaaattcatacctaataaacaatttaggacagtcaaaaaaaaaagaacgggactccatggagaagcggatgaacagctttcaaagtggagggaattgcagtgcgcaaaaggaaatgttgggccacagcaaaagcagtcatagaatggcctggagttgaataactggagcaccaaagtgtgggagtgagctggagggggcaggtcaggttggaaagccttgagtgcccagtgaaggcctgactctcaaaaagcaacagggagccacggaggacact

SEQ ID NO: 3625 - DNA, 1155 bp, Homo sapiens
ccaaagtactgtacctatcttcagcaagaatgcaaaagaaaatattttcaatatatatacctggaacagattttaataattatcagagtaataccattaatggacaaattgactgcaatgtaatactagctggtatgtttcataaatgtcaagctgtggaccaacatatatagccttttattatttttctcttcttttaagtcagtctgttataaatttttttttagtcccataagcagtagactcccacagaaaatttcttcaaaattttttggtgttccaatgaatctgggatgtaaactctgaatgtatttataactatttatttctggatggtcattatcttgtagccaaatttgacaatataaagtaaggagcaaagttacaggccagtttttacttgtttgccctgagggaaaaatccttttaaaaaaaatttctggtttttattggatttttgtattttaaatttcaaatatttttctacatcaaacctagcaaaaatggagatgacggtttctgatttataataaatactagacagttttcaggctcctgttagacaaacacattgatgaagaaattagtcttaataggattgtaggctgtgtagaaaagttggaaatatagcacttcatggagtcttgttttgaagatgacagttttctgtaactacagcttggaaactatgcaaatggtctagattcctcagagctcacatgataggatatagttagtgatgacattttgctcttcttgtgggaacacacacttcaaggaggagatagtgactttgagataggaacagtttaagatgcagtgtgagtctggcctgcgtgcggtgaggaggccccgccaagagactggtggacatctgactgtgggatgtgctctcaagtaggacgtcatcaggacagattctgaataggcatcatgagagtgctggtcagaaacggctgccactttttttaatttaattttattttttatttaaaggaaggaacaatagctaggtaagatttttatcagctttctctgtctgaatccagtttttcctctgtcagtcctggaagcttgaatagaattatattgttgaagccttcaggtcacaaactgtcttttgtaacctcctgtccctcctaaaacacgccaacc

SEQ ID NO: 3626 - DNA, 1143 bp, Homo sapiens
atcacaactcaagttggaggtaatcattagctggttgtctatcagtgagtatattttaggagcttattgtgtataagctcacattcccactggaacaatttagcatcacaattctagtttagaagtaaattctatttgtggggcatagtggaggccaattacctagtatgcctctgaggattcaggaattttactcacacccttatttcactatatatagataaacactccaagggatctcagcttctccctaattctgtatagtgtttaaattagaagatgaggccgggcgttagtggctcatgcctgtaatcccagcactttgggagccggaggtgggtggatcacttgaggtcaggagttcgagaccagcctggctaacatggtgaaaccctatctctactaaaaatacataaattagctgggtgtggtggtgcacacctataatcccagctactcaggaggctgaggcaggagaatcacgtgaacccaggaggctgaggttgcagtgagctgagatcgtgccactgtactgtagcctgggtgacagagggagactccttctcaaaacaaacaaaaaaaattagaagatgaggctaatgtagaattttaggtcctggtaagtggtggctcacgcctgtaatcctagcactttgggaggcccaggcaggcggattgcctgagctcaggagttcgagaccagcctgggcaacacagtgaaaccccatctctactaaaatacaaaaaatttggccaggtgcggtggctcatgcctgtaatcccagcattttgggaggccgaggccggcggatcacgaggtcaggagatcgagaccatcctggctaacatggtgaaacctgtctctactaaaaaatccaaaaaattagccgggcgtagtggcaggcacctatagtcccagctactcgggaggctgaggcaggagaacagcgtgaacccgggaggcggagattgcagtgagccaagattgtgccgctgcactctagcctgggcgacagcaagactctgtctcaaaaaaaaaaaaaaaaactaatttgctaggtgtggtggtgggtgcctgtagtcccagctactcaggaggctggagaatcgcttgaacccaggaggcagaagttgcagtgagct

SEQ ID NO: 3627 - DNA, 1270 bp, Homo sapiens
aatgagattactttttttgatttctttttcagattgcttgttgttggcatatagaaatgctactgatttgtgtatgttgactttctatcctgtactttactgaatttgtttatcagttctaatagttctttggtggagtctttaggtttttccaaacataagatcatatcatctgcaaacaaggctaatttgtctttttctgttttagtatggatgccctttatttctctctcttgtttgattgctctggctaggacttctagtactatgttgaataacagtggtaaaagtaggcaaccttgtcatgttctacatcttagaggaaaggctttcagtttttctccattcattatgatactagttgtgggtctgtcatatatggcttttattatgttgaggcatgttccttctatactcagttttttgaaggtttttatcatgaagggacgttgaactttatcaaatgcttttccagcatcaattgaaatgatcatatgtattttggccttcattccattaatatgatgtatcacattgacttctgggttaaatcccacttggtcatggtgatcttgttaatgtattgttgaatccaatatgtaatgtcttgttgaatccaatatgctagtattttgttgaggctttttgcatcaatatttatcagagatattggcctgtagttttccttttttgatgtgtctttggttttggaatcagggtaatactggcttcataaaatgagtttggatgtattctctccttctctatttttaggaacagtttgatttggtattagttcttttttaaatgttcgttagaattaagcagtgaagccatcgagtctcgggcctttctttaatgggaggctttttattacagctttaatctcattacttgttattggtctgttcaggttttgaatttcttcagtggctcaattttggtaggctgtaggggtctaggaatttccatttcttctggattttcctatttattggcatatagttgttcatagcagcctctaatgatcctttgaatttctgtgatattggttgtagtatctgctttttcatttcagattttatttaattgagtcttctctcttttttcttagtctggctaaaggtttgtcaatttagtttatcttttcaaaaacccaactttttgtttcattgattgtatttttttcatttcaaattcatttatttctgctctgatcttcattatttctctattaattttgggttcagtttgcacttgcttttttaat

SEQ ID NO: 3628 - DNA, 1140 bp, Homo sapiens
ttcagagagttatacaggattcttagttatgattccttatgtaataggggttctttggctcttaggttcttcagagtgacagtagattcaacaaaatgttaattcttaaactgtctggtcattataataatctaggcctagggatctttaaaaaatacacatttccagactctgctcctacagagtctgtctcagtaaatcttgagtagggctccagattctgattttaagctctttgattttgttcagccaggtttggaagataaccttctgcatgagttttcattgtttacacaaaaatacctttcttcttctgattttcccacttccaaattcaaagcaaatggacatgtttcagtctatgtttagttatttgatccttgaaatttcagtgttcaagtggtattgatgtttgttgttagctaataataggcacataggtgctcaatatttaataaatatttgttaaatagataaaaatatactaaaaaaatctcaaggttatattggagagtactacacaataaattcctttaagagactctttctctctgtgtgcctctttttttgtctgttctatgtttgactccagtcagtatatgaagctcttttagaaaagccctgcaggttctttgtgacccacactttgagcatcactgattgctaagttcctataccattattaagggcagttagataaagcaagtcatattgctgagaatttatgtaagtttaagcgttttttgtagcatgtatttttgcttcttcaaaaaatctaatttctagagattctgaaaagggaatgcatgctgattgagtattttgaagttctaagcagttcaactgccgtcattgggggttgaactgtgcagtatatttgatttgttatagcttttttattctacttgctcagcattttcctggcagttaattacacagtggctttagggtacattccataagatgctgaagacacagctttgctgaagtctgacacactttcctccttggttacatagctaatggccactctgggataattagtgagaagaaactccaatggcccaattactgtcttctcaaggttttccctcttaattcttctttgcttaaatcttgagagattgcctccattgtagg

SEQ ID NO: 3629 - DNA, 1152 bp, Homo sapiens
taaagctaatgatagaggggattaatcctaccacacaataaaggataattttaaaaaccaataattaaaacagtatggtactatttgatttgattattatgtgagactttaaatttcatatacataaaaataactatgataagctagaaattgctatataaacaacatgggtttgggattttcagatacagtctaaaagttgtgactgttacttgtcgatgagctatgaccgtgcttcataaagcagaggttttctttttaggtttcttgtaggttggaacggattttaacacataggattgtcattgtattttaagattagactttaaaaattttatctttgtagtggtggtgctaaaatcgttgaggattatatgaaacaacctttgcacctacttttttggcctgggttgaggatattgagaaaagggttatgcactggttgttgatgttttttaaacagttcatggtcatagctgagatatattaggttagtgtaatacatactgttattaagaaaaagattagtttcatcttactcggcctaattagctttgttccatttcattggctcaaatgtatccaaacaagacactgcaagggccgtggtgttctgaatagagtgctgtgagatactgacatattttattttgtcttacaaatgagctacagacaatgataattatagaaatgtattctgtggtcttacttataataaattcatagcatcagtacatgcccataaataaaataaaccattcaactaagactgttttctcaactttttatgccgacattagtttgctagttgtttatttttgttgtctagtatggaagacaagtggtagctcgtgacacatattttaaaaatttatgggccgggtgcggtggcacatgcctgtaatcccagcactttgtgaggccgaggtgggcggatcacgaggtcaagagattgagaccatcctggccaacatcgtgaaaccccgtctctactaaaaatacaaaaattagctgggcatggtggcatgcgcctgtaatcccagctactcaggaggctgaggcaggagaatcgcttgaatcctgggggtggaggttgcagtgagccgagatcatgccactgcactccaaaccggagtcagagtgagacttcgt

SEQ ID NO: 3630 - DNA, 1204 bp, Homo sapiens
tagatcctaaaattaatttgggtttacaaaatgaagatattctaattatttcattccatctgcatttattagatggaaaacatctacaaaacaatgtcaccagctgtttggttacttgtgatgtgattcctgtagaaagacagaatgaatgtttttttcccttattttcctgttttcacagtaatgaattggtttctttacatccttcaaaggggagcagtgatttttaaaatttaattaaaaaaattttttttttgagactcagtctcgctctgtcgcccaggctggaatgcagtggcgttatctctgctcactgcaacctctgtctcccgggttcaagcaattctcttacctcagcctaccgagtagctgagattacaggcacccaccaccatgcccagctaatttttgtatatttagtagaggcagggtctcaccatgttggccaagctggccttgaactcctgacctcaaatgatccacctgccttcgcctccaaagtgttgagattacaggcgtgagcctctgcacccagccaaaacttttttttttttttttttttttagtatcgtgaacccttggacttaaatggatttggtgtgtcaatctgttgtccttttcagtgctcaatctctgggccattaagcctctttaagctgacttctgagtcattttgatgtgactcccctggtctttggaaactgtcttactttttggaatgacaagatgttttgggaacatttcgtgtattttctgcttcagacctggaatcaactattcattagaggaattttgttcatttttggagaaaggaaatttagagaccacagactgtatgctaagggctaattgattcttaaacagactttaaaccaatcctagttttagccctatctcctcatcattttttagaggcacttgctattgctacttcccaaaactttaggagattcttaaatgtgaattggttgtttcatagctttctcctttttgacttaactttcttgaatctgcatggtatcttatcacttgttcattgactttacagcttcaaaaattgcccctttttcccttcctgtttttgtttgtttgtttgttttttggtccttgtgggtttatgactttaaataaaatatctcattttatttttagagtttgtgctaaatacttatgtttaatttgttagctttaattgttatcttta

SEQ ID NO: 3631 - DNA, 1196 bp, Homo sapiens
ccaacccctgtcaagatagagaacaacatgaccatcagcccagaaagttccctggtgtcccttcccaatcagtccccactggggatcttcagtggcatcccagagctgtttgctatggtggcagtagctggagagctactgttaattaatttgagcaacagtgcagctgataaatttgatctagcagggaggtctgggactgccatcctgaactcaaggttctcaaatcctgtagctcttgggtcatattgataggggctatatttttaaaaagggatagttgggcagctggttggaaggaaatggcaatgagttcatctttgggcctgtttactgcccccttttgaaactgggtcgtttccagttccgagtggggaggctgcattgttgttctgagtctcagattggagcccattacctgccaggctcctgctcattcttacttcctcttggagggatccccagcaattccaattccactagtagggtttcccagccgatcactcttccctggctgttctcagtcattctaagtgtagaagctacatcatccttggcttctgcctagtggctcacttaaccacatcatctcaatttatcatgttgctgtttatctttttaacataaagttttattatgtgacatactatctcagtctgttccttttgctctaacaaaatacctgaaactgggtgattcataaaagaaatttatttctcacagttgaggaggctggaaagtccaagatcaaggtgccagcagatttggtttctgctgaaggctcactttctccttccaagatggcacaaaagggtcaactcttcttcaagaccttttataagggcactaatctgttcatgagggaagagcccacactgtctaatcacctcccaaggccccccacctcttaataccatcaccttgggggttaagttccaaagtgcattttggagggccatatacattcaaaccatagcacatgcattatctcatttaatccagagctattggttgacatcccatcccattgggacaagaacacacatgtgatagttgagcttaaagtgtcaaaatatggacagtattcagaggaaacagtgatagtgagctggagggttctagaaagatcatgtggaggcaatggggcaagagctggaccatgaagaatggatggggcagaagatgggcaggcagga

SEQ ID NO: 3632 - DNA, 1105 bp, Homo sapiens
tagctcatggagctgcagggaaagctttaagagctttggtcatataaaacatccattcagctgggcgcgatggctcatgcctgtaatcccagcactgtgggaggctgaggcgggcagatcacctgaggtcaggagttcgagaccagcctggccaacatggtgaaaccccgtctctactaaaaatataaaaattagtcaggcgtggtggcaggcgcctgtaatcccagctactcagaaggctgagacagaagaacagcttgaacccaggaggctgagattgcagtgagccgagatcgcaccactgcactccagcctgggtgacaagagtgagactctgtctcaaaaaaacaaaacacaaataaacaaaaaaaatccattcatttactcatgcaataaattctcctgcaagcttttatgggcactcagtaagtactcaggattggctttatcagccttgccactgagcagctcatggtcctatggaacctgagccaggcctcagtctctccatgattggctcagctaactctcagttcagagtggagagtatcaatcttgtgtttttgcccttaggcagcactatatgagacatggggcctgtggtccttccttctggtgtcccccgtgttaaaagataaaaaacaccccaagggccgggcgcggtggctcatgcctgtaatcccagcactttgggaggctgaggcgggtggatcacgaggtcaggtgatcgaaaccatcctggctaagatggtgaaaccccgtctctactaaaaatacaaaaaattagctgggtgtggtggtgggcgcctgtagtcccagctgctcgggaggctgaggcaggagaatggcgtgaacccgggaggcggagcttgcagtgagcagagatcacgccactgcactccagcctgggtgacagtgcaagactctgtctcaaaaaaaaaaaaaacactccaagggccatccgtgctctctgcccctcctgtggggaccaagtggggttaggaatggctcagtggggaaggagagcactcttgtccccagtcccttgccaccctgtcccttagatagggaggtgggctgcagagattggtgccagaagagggtg

SEQ ID NO: 3633 - DNA, 1149 bp, Homo sapiens
ccgcagcctggctatggactcagttagaaccaggtagaaagtcagcgacaccccacagaaggccactgcggctaggtaaacacctgagaaagaaactgctccagaagagatgacgtgggcttccaggagcatggaggaggtggcacttgaacttttaggaaactccttagatgagataaagtgggggttggaggtggcgaaaagagggtaaccctgggaaagtcagtcagaacccatggcagaagactgcaggagaggcaggggaggggcttcggggaccactgtggacagagctctgaaagcaccctggccaaagcccctcctgaggtgacagagcgtgggaggaggctgcactgggcctgcgtgccatcctcacccctgttccccgctggcgccaggccctgccttcttggtacctgtgccaacaggagagccctcaccagccgatcttgtcactctccgtggtgacagtgtcttggccagctgtggcccctagtttctagcagcgtttctcagtgtccttggcccttctgagaaggcaggcgggaggcacacggtgccctgttcttccccgtttgtccagttgcttgcaaagcagagaatgagtaggagtgaacccgagtgacttcacccgccctgtcccccacgtcaggacaggcttgaggcctctctgggcgtgagcgaggaaaccaggctgctctaacttctgaagagtgggctctggctcaagactccaatcggccagaagcccacagagatcaaagcactagcaagttcagctgtcctggccctcgggtagaacccacgggcgtgcctgggtgcggctccacccacatgccccactgtcagcccaggcaggagccttcctggccgggctcaggatctgcctgcagcccagccaggccatcacccagccccgatgcatcctggcactgcacgcttactcttcacaagcacttatacgcggatggcctccgagaccctgcctccctggtctgctgaggtcaggccaggtctcccacggagccgggcagctccacaccccaccacctggcaccgttaggtttcagatctcccgtgtggtgtttgatgtcggcttttgttcctaccttgggagtttggattgtttcctctggtgtctttgtttac

SEQ ID NO: 3634 - DNA, 1168 bp, Homo sapiens
gtgttgatcacagcacacagacggcctgcaccctgcccctggctgcgtggagcccttggcccatgtcatctcttgcttgccacagaaggcctgcatgggaggctgtgactaacgagcaggctgctcaccgaggaggaggaaggcgtgtgggggtggggaggggagatccaaggcctggaggcaggaagccagggtcatttggaagcggcactggggcctccctcacagagcggagggtgtgcttagggaagcaggagggctgtgcggcagctagtgcctgttgtcagctttcacgtggcacagtaaaggccagacccatttcctgctgagctacagagggcccacaggtttatgaggggctcgcctctcatccccaccctgctcaccccgcagaccggcagatgttcctggccacatggaaggatattcccaatgagaatgaggcccagttccagatcagagactgccccctcaatgcaggtgaggactccgagcccccgaccccagcccctcgcctgtacccaggcccccgcgctgactggggcctctcacggccatgtgaccccacagaggctgcgagcagcaagctgcagagcagcaacatcttcactgtcgccaagaggaacgtggagggccaggacatgctctaccagtccctgaagctgaccaacggcatctgggtgctggcggagctgcggatccagccgggcaaccccagctgcacggtgagagccccggcacccgccctgcagccttggagcctccccttcgtcccatgccagggggtggccctggtggaggacgcggtccaagcgtcccttcaagcctggcttgaactagaatcagtttggtccctgagaaggacctttctagaaagcttccaaatcaaccccgtcaggttacccagataagacaccaattgggtctcggaacagtgagttggactagaagattgtgtaaaattgggccctgtaaggtggtgcagttggtttggcacccctgactgggaagtgacattgctgggcacaggccctggccctgtcctgtgagtgcctgcatgtccagctgggaggacagtggttcccaggagcctgaacctcccagcctttgaggtagacctgttagagaatggcttccctggggcacacagttgtcctggaggcctgca

SEQ ID NO: 3635 - DNA, 2787 bp, Homo sapiens
cctgcaggagagagagagaaaaagcaccctcaggtgggctgttgagtttgggctgcaggaagaggcacctacccgccccctccgcaccctcttccctgcaggtctggctcccagccatgaaggctaaggggctggagatctcaggcaccttcacccgccaggtgggctccatctccatggacctgcagctgaccaacaaggccttgcaggtcatgaccgactttgccatccagttcaaccgcaacaggtgagagctccctgaggccagcgcacctctcaagaggaggcctgtgagagaacccactcggagtctgttctggggactgcaggcaggggtgggggctgtagaggggagggcagtgccccttttctgaaggatgttccccaccaccgctcaggccaaaactctctgaagcactgggttttgtttgtttgttttttcttttggagacagagtctcactctgtcacacaggctggagtgcagcagcgccatctcggctcactgcggcctccacctcctgggttcaagcaattcttccgcctcagcctcccgagtaactgggactacaggtgcacaccaccacgcctggctaattttttgtatttttagtagagatggggtttcaccatcttgcccaggctggtctcgaactcctgagctcaggcaatccgcccacctcggcctcccaaagtgctgggattataggtgtgagtgaccgtgctcagccaagcagtgggatttttacccccaagtggcctcttcatatggactccaaagtaccaggcagagtgggaaaggacgtctttctttttagtttttattttttttgagatggcctcagtgtattgcccaggttggtcttgaacccttgggctcaagcaatcctcctgcctcagcctcctgggtctctgggactacaggtgcacgccaccacacctggccccccttatttttgcctccacagtccaaaggagtgttttacagacagaaacgccctgctccagctgagaagcccacctctggcaaacaccccacataggaggggcccatcttagggaccagctctcagaaggctggtggggagtgggcctgcctaccagcctccccattgtggcagaggattaaagtgtcagatggggcctctgggagcggtagctgcttcaggcccctccccaccgggtccgctacactgggtgtcagtgggaaggttgcgtcatggacccagccagtgaggctaggactccctggggacccctggcagcccctcctgatgattcttcttcctgagcacgctcatgatgagcaaactgagcctctaagaagttgactgaaggggctgcttccccaaggaagcctgggggccagtaggtcctgacccttgggcagaccggggctaggggtggctctaccacttaccctcatgtgaccctggaggccacagaagtgcaccaggctccgagaggtggttccaatggttgcctctagcaaacttactgtgtgctgaatgcttcctgggcacccaggccctgtggcaccggctttgggagtattgtctcacttgagccacttgatggcccagcaaagtcactgccatcacccctttttagtaggtaatgacacctgggctccttggacagctcacatagcgagcagtagtggagctcccaggaaagcctagtgtgctgagccaccaagcggacctggggttccccaaatggtctccctctgtgtcccaggcaggctgatggcttcttgggcagagcacaggctggggtcagacagcccaaactctgattctcagcagcgccctcaccctatggggtctgacacaggcctgctcctccctgagacggtgtcctcatctagaggataggaagaggtgtacctggctctgtttttatgaggctaggagcaggtataatattgaatccgcagcccaggtataccgagccctcggtttgtgcccccagtcccatgccctgtgacttaccttccaagagcctgctgctggcgtgtctcacacccatgaggatcttcctaatttgtcactgtgctgctttgcagagaagcagagctttcctgaatctctctgtggccactgtgtgacctggcaagttctggccaagagagtaaaatctagcgtcttgcttgggatggtcagatcccttctgggagttgaggattggcagcagagacttgggtggtcccagagttttcaaggtagaagcagcttatactccaggcccctggcattagacagagctccttgagggcaggacagggcaaggcctgcctacctgggcccaccagtgcctggcccagaggagaggaacagagctgggcttcaggcctgcagccaggctggggcagagcagagcaattggcctggggctctttctttctgtccagatggccatctgggggaggggacccacagcccatccttctgtccagggtccagaacatgggaaggctggcacggtgagaggctccctgccaaccacagccccagctcccgagtcggaggagctcacctgtcccgcatcagcacctactccccctgccatccctgtggggcttctctctccccagctttggcctggcccccgccacccccctccaggtccacgcgccactcagccccaaccagacagtggagatctccctgcctctcagcacggtgggctcggtcatgaagatggagcctctgaacaacctccaggtgggttccgggcagggcaggcaccccagtccttactcacctaccagccgggccccactggg

SEQ ID NO: 3636 - DNA, 2787 bp, Homo sapiens; identical to SEQ ID NO: 3635

SEQ ID NO: 3637 - DNA, 2787 bp, Homo sapiens; identical to SEQ ID NO: 3635

SEQ ID NO: 3638 - DNA, 1047 bp, Homo sapiens
ttccaatcttttctgtacctccactcagcacagttcatgttcagtagatgctgaacattcttagaaatactgtgtgtgaacttagaaaagtgcaagaagacaggcatgtctttgaccccaggaatgatcatttgctgaagatggtgtcaagtgaacctagattaacagccctccactccagatggatatccagtgattcctagaatgggatatagccagagaacaattctatgcaccctacactgacagactcccttaagcaacaccagatgctctactggtacttgaagtacatgactttgaagtcttgaccctccatgaatacctgaattatcagcaagcgggttttgaagctggtgcctcattgaggccatattagagcaacttgtacatttgacctcttgttatcagccatggtactctacttcgtgtgcaagagataactatgaaagccaaattcaaatactggcaacatttcctaaaggggctcaatatctatcattcgtcttcttttccaaactacacatcactgtatgactcaaccagtagcagttatattgccccttggtttttattcagtttaactactgtttccaagataaatgagctaataagctttaaaaaaaaaaaaaaaaaaggctgaattcttttttcttcatcactggcatatctgcctattctccagaattattatgactattcagctcactttaacagttgaacttcaagcgacaatctttgaacaccccttctcatgtgatttaaaatgaaaccatttggaaaagtttcttctagccagtaatagattttttttttaattgctctgccttgtgccgagagatgttcttttaagatgaatcttttgatgtctgataccaccaaatataggtggtagggagagttggaggctggccctttgagcaggccattagcttacttgctgggcatttccgatagcttattgcctacctttttgctggaaacaaactgatttgaaaaacaaaatctatgaagactgcagctaaggattttatcggtagacttaag

SEQ ID NO: 3639 - DNA, 1198 bp, Homo sapiens
aagggctcccacaagctctcctttcgaggcatgggcactgattcccattctatcccccgtgcgagaccgcctctatcatctgggagtgcatttcacgagtttgccctgagtggagaagcagaggccggggagcgcggtgaacagagttgggctgaaagtaagagacctggattcgagacttcgccaccgacagacaattgtgcgttctgggccaaatctcttccctgtgctgggcctcagttttctcgtctctaaaacggggcagtgtttttcaaaatatggttcttacaccatctgctttgtaattctctgagatgccggctttacagcgcgggactcaattcagacttctggtttagaatctgaacttatgcgtaggggggtcctgtatatactaatgtttgaagctcattgattttaagtgctttcctgctgtgagcactagatatccattcttcgctttgaggcagctggtgccagttcaggaactttgaaagaactggaatggttagctcagtaaagagagcactggaagggaattaactttttaaaaattgaaaatactgttacggcaaagagggcttccacttcatctttaggctaaaagaggcagaactaggactaacaggtgaattctacaggaaggcaagatttttgcttaatagaagaacttaaatggaagaatcgtcagaggtgaccaccgatggagtgaatggattgcctccgtgcctcctttcgagggaggtatataggtattagatgaaggtcctttccaacttgaaagtctgtgattccaaggagttgttctgcatctttctggtgctgactctgctctcaaggcaaatgtgacttttttcttctcttttgacacttccatcactttagcctacatctcctgtaaataaggccaatgcatctgaccttacataatctcttcctggttgtcctgtgcaccatccttcttttcaaggactttggaatgacccaatatctgatagaggcaccttaaatgtttattgaatgaataagtaaactgggtcccaccccatgggttagtagcttttttctaagaacaagttggaaatgcctctgaagattttatgtttgaccaggagaagccagtgaactctgaatcacaaaattgaggactctcagttgaaagcaccccttgaggttgttcagaccagccttctcttcc

SEQ ID NO: 3640 - DNA, 1180 bp, Homo sapiens
tttatgggtaagtgctgcctctgtagcccagagaagagaaaccacttgccccaggcacaggcttctagatatgggcttggaactagccctagaggctccacactgagtaacctttttgaccttgaggttttcagccagagaacacattcacaattctgaacagatgtcaaaagagacagagctgagatgactcttaccagcattggcttccgaagtctatgtctggctttgaactttgagtgtgagacttcattcccaaatgttgggttggagcagagctggctgaccatgaggtttcacctccatcattgcaggctggtgggactcttcatatgccaacagcaagtctttatgactgaaaataagacctcagagagccagtgggaaaggcagtgtgttgggcttgaattacaaggaaactgtgtgtgagtagcttcctggaagtccttaaaatatttgcttaaaagcataatagcttcctggaagtcctgaaaatatttgctttttcggggtatgcgtgtacgtgtgtgtgtgtgtgtgtgtgtgtgtgtgtgtgtgtgtgtaggtaggtgtgtccactagagatggcacagatctacttttggcctaggattcaaagctgctctgttaagttgaactatttcttttctttttttttttctttttttgaactctttattagtgtaagaatttgagttgtcttgcagaccaagtctagaacaggttttctttaaaaacaaaaacaggtgatcaaatgagcaaacttggcagccaaacctgggaggtgatatggtaacaattctgttattgctcagagtgttttgcaaatgccagtttgccttcataccagttctcaagctaaataagaaaatccacctcgttgcttctttataatcatgctttatatttgtatgaaaatgaaagttgtcagccaaggtttttttttttttttccagaaaatttagctccaagtggcttttggctattgacaaagaacagataacatttcaacagctaaaaattggtgccccagatggatagtcaagaaatagagcatctgtaaagttgagcagaaagaatctaaattcaggttcctcctacttactgtgagatcttcagtaagttgcttaacttctctgagcctcagtttctttatctgtggaaaaggatcatacctacc

SEQ ID NO: 3641 - DNA, 1142 bp, Homo sapiens
acaggaagaggcacatacaaagaaaagaatccccgaaagggcggtttgtgatgctcctgccatcgtcaactcacaccattccattctatcccaaccccttgcaccctaggccatttcctagctcccgccttcctccaggaattatcgggggtgaatatgaccaaagaccaacacttccctatgttggagacccaatcagttcactcattcctggtcctggggagacgcccagccagtttcctccactgagaccacgctttgatccagttggcccacttccaggacctaaccccatcttgccagggcgaggcggccccaatgacagatttccctttagacccagcaggggtcggccaactgatggccggctgtcattcatgtgattgatttgtaatttcatttctggagctccatttgtttttgtttctaaactacagatgtcaactccttggggtgctgatctcgagtgttattttctgattgtggtgttgagagttgcactcccagaaaccttttaagagatacatttatagccctaggggtggtatgacccaaaggttcctctgtgacaaggttggccttgggaatagttggctgccaatctccctgctcttggttctcctctagattgaagtttgttttctgatgctgttcttaccagattaaaaaaaagtgtaaattacatggtggtcttgacttttattacagaaagatatgtagtaaatattcagaacagatacacaatgttacttggacatttcagaattatcagagaacatagcataggcagataatttttgtaagggttttctgtttgtttgttttttttttttttagcagcgctctgtcttctaataaaggcctgatttatgaaatgaatgaaaacagagctagtttggttgaactggacttggggtgggtgctttggctacacacctactcaaatccacctcttctctcgacttctctctctctgcagctctttcttgggttctgtggtggaactttctgggctgtgaagcaatgctgttgaaaggccatttggtattagggactcctgtttgtggctcctgggatgaggtggttatgattttgttttccttgtgttttgaacacttagcccctaatttgtaacttaagta

SEQ ID NO: 3642 - DNA, 1173 bp, Homo sapiens
ccatcactgagtccaccgcaggccccaggaagcactgctgaaagggaggatctgtaatttgtctcagtccctgaatgagtggggctacttgtcatcatgcagtttcctctccaggaggctcaggatgggtaacacagggctcctgcctaggaggccagaggggaaggagacttcgtttttcatatgccagtgagggtagggaagacaccccatgtctgcacatgtgagctcactggatagggccttatgagaccagcaggactctggagcttccagtcagcctgggacattcccccgtctctatccaaacattattgcttggttcctagagataacaggcaagagagatgcctcacagtgcgagccagcctgtgttcagagcaggaggttcaagagaagccctatcacaggggatgcagtgccttgagagccaaaatgggcagctggaccatccgactgtcttgactgtgtctttggctttcatcccccaggatattttcaatgccgtcatcaaacaaaaccccttccttgtgtaccagctcccctgcttctggaatgtgcagctgtcagaccacacccgctccgagcagtgctacagagacgtgtctgatctaaaggtagggtcaacacagggacatccctggaggtagggtgaggtgggccgagaggacctcccaggggcatggatggctgggagatttatgtgcaatgtggtgagagagataagggcacaggagagcagaatgagtatgcttttcatctttgtggggtgttggtttttttccacccttatttgggctttctggaaagcctaaagcctcctggcgtaagaaccagcttgtgtggttattattcttgccatctgctgctggctcttttggttcatgccagctccccaaatctattcattcaactcaagcaaaaacatttattgagggcctactctgtgccaggtgctatagatgtggatgtgaataattaacctgcttccaagtcatgtatgacttggaggaggagagaaatgtgcaaagaagtaagtatttaaaaaaggacaaagtgctatgacaggtgtgggtgggtcagtcggggagatgcaagcataaatgtctcattcttcctcacagagggcggacaatgacagaaaaagctttcatcaccactctgtaggtacca

SEQ ID NO: 3643 - DNA, 1134 bp, Homo sapiens
ggttgtggatttgcgaaaaatgcttggggttggatagtgagaatctggacctttcacctccctaggctcagtgctgccgtgttggaattgtagcattgtccttgcaattgacagcttctctgcgatactctgagggtggacttgggttgtgaaatgagttttatgactttttggggaatgggatgggtggctgccctaaggcaggactctgtctttgagaccaacagctcatcctattcttcccactggagcagtggattggccaagagctctgctgggcacgccagcactcccgtgtgtgagagagtcttgtcgtcttgtttttttgtgtgtcttacggaccaaagttttcaagtgtggggttttatgagtccatttggcccacgtcgtaaaagtgccactgttgtgttggaatgatttctgttcattctcagagctaatctttaaggttctgcctgtgacaaacctgttcatcgttccactttatcaagaagttgtcattgttctcgctcttgcactaattactgttttaatgtggcttgtgtgttcattgtctggtctgtctctgtttagaatgaaacatcacagccaaaaagatgtggggagtaggtagcagctttcaaattgtagtcttttcacattagaacccaaaaatccgcttcccaaattttgcttgcctgcaaaccagaaatttcagtacaattttagaaagccatttgctatacgatgtggttaaagtatgcatatgttcaggttgagggcctgaataagtcatccatgtatcatcacccctttatctgccaacatcgattgtgttaactgattggaagattgtcatttcaacattttaatttaattttttatagagatgctatctcactctgttgcccaggctggagtgcagtggtgtgatcctagctcactgcagccttgaactcctgggcttaagcgattctcccacctcagcctctccagtagctaggactgcaggcatgtgccacctcacccaactaattaggggattgtctttatggaagacatttcacagtgtctgagagagtaggacataggatcaagaagttttggcagaacatggtttattgttatttccatgctaatatttcctggctcccc

SEQ ID NO: 3644 - DNA, 1177 bp, Homo sapiens
gctgcccgcggcggctgcagcggccgcccagctccgagcgccgggcgctccgggaagccggcgcatctcggaggcggcggcggcggccaaggccggcgagcgctcccggcggcgggggccgcccgcctcggctccccgcacccaccgcgccgcgatccactcgccgcgcctccgctcccgtgaccttcccggggcgcctcccctagccccgcgcccccggccccgcgccccaggccggggcgaggccttttccggcgcttctttcccgcggagccgcgggcgggcggcgcaggccctgggggagagcgcgccgcggccggttgcagccccccccgcgccgccgcgttcggcgcccggcccggccagtctgctcctgccccgccgccgcgccggagcccgggcgcccgaagctgggggcgcggccgcgctcgtctcgccgggctgttcgcgggcaggccctgccctgaagggacgaatcggcttggagcgcgggaggtggagtcggccccggcggtcgctccctggacccaacccgaggctgacccaggcccctgcccatgcggggcgcccctggctcggaagagtcccccgggccgggagcagctccaggcagcggccccggaggaagaggaagaagggacagtgctcagcttgggggacccggaccctcgccgcggcatttggagccgggggcagtcccgaactctgtgcttggcaccgccgctccgagtagggcagcgcctgccgggaccctgacccggaccccctgcgcctcgtaggcggcggcgccgccgcgccaccctgttcttccgtgtctccctctgcctggcggcagtcacggccaaggtaagagccccggagcgcgagagtcgccgcgggggcgccgtggtgtgtagcgccggacaagttctccgaacctgtggctggtaccccctgtactcgggatgccggcggggaggccgggcacaccctctgctgccccggccgggagccctggagaggctggaggtggaagcccccagtctccgaagtccccaggaccccctcagggcctgctcggcttctgggcacacaggctgctggcagggagcgagccaggaggagtttctggttaacaccacgagggcatgtgaccgatacccgcacccccggccctcttgttagcggtgagcacctg

SEQ ID NO: 3645 - DNA, 1235 bp, Homo sapiens
ggctgaagcaggagaattgctggagcccaggagtttgagagcagcttgggcaacataacgagacctcatctctacaaataataattttaaaaaatagctgggcgtggtggctcacgcctgtaatcccaacactttgggaggccgaggtgggtggatcacctgaggtcaggagttcgagaccagcctggccaacatggtgaaaccccgtctctactaaaaatacaaaaattagccaagcattgtggtgcacgcctgtgatcccagctactccggaggctgaggcaggagaatcacttgaacctaggaggcagaggttgcagtgagttgagatcacgccacttcactccagcctgggcgacagagcgagactccgtctcaaaaaaaagaaaaaagaaaaaaattttaaaaaattagctaggcatggtagcccacgcctgtggtcccgctacttgggaggcagaggtgagagggtggtttgagcccaggtggttgaggctgctgtgagccatgatcacaccactgcaatccagcctgagcaacagagccagactcagtctcaaaaaaagacaccagaaagatgcttaaggaataaatccctagggagtagatgggttacgagttgagactgtctcctgaccatcaaaacatccccttccctatagaaaaaaatcaaagaagagtgatgggattggggttggttttctgaaagcatcttgcaacatttaaatatgagcttcaaaacccttttccagtttttgctttcaccaatcttctattttgttaatagctaaccctttactgtattgagtgttttactcttttatgccagattttggggaacttagtaaaaaactggctgaggtgtggaagcaattaccagaaaaagacaaactggtaagtacattttcttacaaacatatttttcagtgcttctcgccttccaaaatatgtaattcttccatagactagccagccagacagcactgaaaatagtgaagaaaattacaaatcaacagaaaatggtttagcagaggacattaacactgttagtgccagttcactgtacatgaggatttagctatagcaaggctgtcttttctaacctggtctgttttttccagcagtgttacatttgagccaaaagatgacctaagttgaggagtaattaaagtgttaaaagaaagtctaaaatcagagccctttactgcaaacacctagtaatcagtcatggtctg

SEQ ID NO: 3646 - DNA, 1184 bp, Homo sapiens
ctcaacagaggccaaggagttctgtgagccctggcagcaaaaaacaccttggggggtgaagctgtcaatgccaccagttggacctccatacattctgagctaacccagaatctttagtcggcagaattaagtgctggtgtctttcactggcagcatgaagttagccaccaagtcctcacaagccgtgctgcttagttgctcggtggttatggataaactttgcccagcatgatttttgggttcatcttatcagttcccctggtgggcagatacacagtgttctgcattccacatgtaagtgaattgcaaaaacaaaacaaaactcactctcttgtaggtttatttatgtgtgtgtgaatgtgtattttaattatgtgtatttaactctttaaaatctcttagattttaatttatcctgtaaatttctgtatatataatttaataacagaagcctccaccagcaacagcatgtggaagatacagatttgtcatttctcccttccgccctcccttctttccttccttccttccctgtttccttccctctttccttccttcctcctggtctgttccaaaaactctgaatcatctacattttaaggtattttacctcaaaaatgaatcattgtgttaggattctaattctttataaagaacttcatgggcttcaataatgtctagaaagtaaaataaagaggaatgttaccatccccagctgcccttatttccagagaaccagacgtttgtttcccagttggaaagaagacagttgagcacttcaggatggtttttaaatttggtatgagattctctgccaacaccaagctctgagttaactgtgctttcttctcctggccctgacagagcactacagcatcaaagtaaatctttggggacagtgtagcccatctgcatcctatttaatttcttcccttctccccaccagtgttgtcacagggctatgttgcttaaaggtagtctggctgctgaatccctttctcagctcagagcagttttaagatttaattgggaatacagagaaacaggattgtttgagaaccaaaatcaagaggaacagaaatcttaacttgatttcatgtgttagaacattgtaccatgcctcttctgtatctgtggaagtttcctgtttgacacagggtatctaggaggggcggggaagacat

SEQ ID NO: 3647 - DNA, 1191 bp, Homo sapiens
cacacccttgggctgtgccttctgcctggacttctccctcacctttccacctttccaaatgcagcctgcttggaccaccttctggtaacagttcctccacttccagccctgcagcctcctgcacagtgggggcccagaggggatgctcttgtgtattccagtctgccaggtgcttgcacttgtttgtggctctgcctcccgcactgcatgtgaattcctccttcaggatggtgccccttgagcccagtgcaggcctcggagggggccgtgggccgtagacttggagggtaaggagccagaacacatggtttgaatccctgccctgctgttactgggtctgtgatcttgggcaatttacttggcctctctatgcctcagtttccttatctgtaaaatgggagcagggatagttcctgccttttgtcatggctttgatgattaagtgagatgatgctacaaaggaagagccttgtgcctggcagacagtaaaggctcaatccatgttagcattggtgctgtggtcatatgagggactcaggaaaggttgactgaatttattagaactgacaggcaggagagagagagagagagaagagaacagagaaaagagagaggaaaggggaggagggagagagggagaggagaggaagtggggaggaattaatgggtgagagaggtggagagaggggggcttgaggctgaggagtgaaggctgccaggtaattcaagggggaagcagagagagagcagagggcgttaggcagggtctgtggacttgagtgagagctgttccatcaccaggtgctgtctgcagccagctgctctcaaaatagctgccctgctggggctggggctgatggaggagcagggcagggaaccccatctgggcacatcctggatccctcctgggctgtcgcggcccagagcttggcgaggagcccctgtggcctgtgactcgtggttgagatggggatttggaggtccctcctgtggggtctgtgtgcgtggtgggcaggggtaggggaagctgccctgctggcctgggtctgggagtatgctgaagacaggcaggtaatggccgtgataataatgatgacgtttatggcagtgataagcatcatcatccaaaatgaggcagaggccaggcacaggggctcatgcctataattccactgctttgggaggcggagg

SEQ ID NO: 3648 - DNA, 1212 bp, Homo sapiens
catcaagcattctttgtaagcagagtgatatatctgagagggcgttgacctgttgtgtagaatacatatcctttcccccttcagaatcctgtctcgcctcgtaactgggagagaggctgtgcctgaaactaggggcgatgtcaaggaagctagaggcctcgatgcaattattactgactctggggaggaagacagagaataaggggacaccaactgcccagtccactggccatttttaagggtccccccaccccaagccaaagtttggtttgttgctgttaagacaatttttgttgtatgtatataaatattttagttagaggagcggggaatgggatgcgggctttcacagttctagggaatgggggcagggaggattttgcttttgcttttgctttgagggagaactttagctgactaaaaaaacagaagtttggggtcatgatcacaaaggggccattcccaaaagatggcaagccacgtattcagtggagactaggccaaattctaaatggttttatccatagcaggggagaataggagaatgagtttaagagtttttctcttcttttttcctagaaagaggtaaggataatgggaaaggtagagaaggcggctcccacagaccttttaagagaggcagaatcttgagcttgaggcaccttgagtgcatctcagttcagctggttctggctgaggcctccaaaggcaagctctgtgctttccagtggtttctgctgcatttccagggatggtgtttaacaccgcttcctccagctcccttttctaagaaagaataaatggagttctgctttttatgaaagggtctttggttttcagtgtcaacactgagaattggggctcttgcaagcatctggatttcacagtatcaacctccccgtcaccttttgaactttgagactccgtacggtcaacttcaccagaggcaggttgctcgaagcagcactgcttgtctgttcctgactctggttctcactgtattaaaaaagagagtcagaggagtctggcatttcgtgagtttgttagaggatgctggctgataattccagaaaacttactgatgctaaatcacagtacatgcatgattctttttcagctttactatagttcatgacctggactttctgtactcttggaagctgggctccttaaaggaggcctctagtgaacacctttatctccatgtccctc

SEQ ID NO: 3649 - DNA, 1558 bp, Homo sapiens
cagcaataaatgtgttgggctctggtctgagcaccttagaagcagaagttggtttcctgacttcactgcacaaggcaatgcttgatcagttgctttgaggcttcgaagcaggctgtttctagatccctctctggacatttttcttcactgttaatgcttctctcatcaaccttttaattatttttatctctttaattactgcaggcgagtttataccgaggtggctacagccgatttgccccctactgaagtgacgtgagacccctgcaaatgggacagccccccagttcatgaggcctggctattgcaatatttactagtagaggaactctatagcaagatgaagaggaaaaacaaacaaacaaacaaaaaaaaacacaaaaaaagaaagaatacttttttatacctcactatgttctttgaatatgtatttttcctttaaatttctgcctttaattcttttgttccaaagattgtgcatttttttctttttttttttaaactgtggtaaaaaaaaaaaaaataatgcatttccatgtctgtatgtccgtgcttagcttattctatcaatcacggaagaggcagtcaaggaggaaggagagacattaggagccgataaatgcatctgatcagaaatcagcagacagaattaccaaagtgtatctggtgctgaatgactgggggacaagcagaagtggaagagatctttctgcaacaggatattcttctagtcttctgagtttctggtctttgacaggcaattctggttggctgtggctggaatccacatgctgatagataggaatttgtgcttacaaagcaggagaattaaaaagacgctttcctctcctcttccctcctgtcttctccgttctttttacaatcatcttacacgcacagcctgagacagctggcatagtttttggaattatagtattgatatttccaaacgtgctctcagacagtggataataaacacctcattaggaaaccgatctcagaatgaactctggagtatgaaaaagatcatttctttttgttcctgtaacctagcattccttctaggcttcttctcctttaattgaaccacagcttagctcatgtattcttttattaacaccctgctctcatgtccataagattcaggaatttaggacccagggacagaaaagtgaataagccagtgaccagatttcccccagatgtcttgaggattagaagtacaaattgttgacagccattaaagagggtgaggaagggaaaaggaatattagaagatctggtatttcttacttttttcttgcctcagaaagtacaaagtttaaaaaatagaataaagaatctgctggggaaagatagagtaccaggtcctaggtcagtagtccctggaagttttggtgatgaggacatggaagggcaggcagaggcactttgtacttgctccaaagccataggaattttcatcttccagagcctttatgagtcacttctctatccacagtcttgagcctgtggctatcccgctgagcttctcactgtcctccaaaaacaccccgct

SEQ ID NO: 3650 - DNA, 1158 bp, Homo sapiens
gtgggactttgcatttgtgttccctttgtctggagtcttcttccatccagatacacgtatagcttgttgccttagtttctaaaaaattatgatcagtgttaccttgctagaccagccttagaaaatagaaattctctgtctctccagcccaataccccgataccctcctcttattttttctctgtagcataccatctgtttattgttttacttgccaatttattatttgtctcttcctactagaatgtaaactccataagggcagggactttgtctttttaatcatcgttgtttcatcagcagctagaacagaatatctgatgaatgatagatactcaataaatatttgatggcaagagttgaagctgaatagatgaagtgtgcaaggggcatgacttccatgcaaaggtatttggacttgagactgtaaacattggcagtctaggattttaagaagaagataaattaactatcagatttaggttttattttagaaagatcattctggcaggtgcttggagagttcattaggttgaggttaagttaaaataaagcagaactctttaaaaaccaaaaaaaatgttatttagatagcctaggtgagagcaatggctcatttttcttttaatttcccatagtacataatgtggactcccacatatagccttatatgtatcttaatagaatgattatttatattgtggtaaggtccctggcagagttggtaaagctattgagagaatggttcctatcttttttttatagacttatactgcagaagcaggtattcaattacctggttaattcaattaccaggcattttctaaagggcacttcctatatgctcatcatcacttcatttggtgaggaagctatgatgaagacgtttatgattcagtccctggttgacttagggactttacttgttaaatgattaaagaatatataagccaccatgtaaccatggttgtagacaaaatgtgttttgttctgggaaagggatagggaaaatttttctctgttactatatgtatatcatgtgaattttctattttaaagaggtagactacaacagaatacccaacaaaatttataaagcataattaaatattttgtaattcagaagacactctactactttgccagtgttttatttgg

SEQ ID NO: 3651 - DNA, 1141 bp, Homo sapiens
tacagtgtgtgttggaattgctattgatctattgtctagcaatccctctgagctctgaaactttatgtttaaacatagtgtgttttagcattgttataagaaatacaacttttgggccaggcacggtggctcatgcttgtaattccagcactttaggaggccgaggttggtggatcacctgagatcaggagtttgagaccagcctggccaacatggcgaaaccctgtctctactgaaaatacaaaaattagccaggtgtagtggcgggtgtccgtaatcctagctattcgggaggctgaggcaggagaatcacttgaacctgggaggcggaggtaacagtgagctgagatcgtgccactgtactccagccagggcaacaagagtgagactccatctcaaaaaaaaaaaatatatatatatatatatatataacttttatatttcttgatttggatgttaaatatgtaaagctaatgatgcattcctgtatgttttatatttcatgtctaagacaaaagttccccctgtaaattatgccttcaagaaatctagtttctgtctttggatacatgtcgtctgtgaaacctcgagctaggatttgtaacttcttccctgtctgcctctgtctgctaagcatggacagtagtacctatgcaacagtgtgtgtgcttaaccaaaatcctcttttttcccccatgaacatgggctatctttctgtttatgttttcaatttctttgatcaacgttttgtagcttttagtctacatatctttcatctcctaaccaaaattcttatatgagaagtccctctaaagtataatggtcaattattttcatcacttatttttatgtttttttagagacagagtcttgctctgttgccaggctgtattgcagtggtgttatcacagttcattttaacctccaactcttgggccccagcgatcctcccacttcagcctcctgagtagctatgacaacaggtatgccactatgcctggctagttctaaatttttttttttttttttttttgtagagacagggacttgccatgttacccaggctggtcttgaactctcggcctcaagcagtcctcctgccttggcctcccaaagtgctgggattacaggtcatcactta

SEQ ID NO: 3652 - DNA, 1188 bp, Homo sapiens
cccatggctctgggcggtccagaaggagcaggccctgggcctccacctctgtgcagggcacagaaggctggggtggggggaggagtggattcctccccaccctgtcccaggcagcgccactgtccgctgtctccctcctgattctaaaatgtctcaagtgcaatgccccctcccctcctttaccgaggacagcctgcctctgccacagcaaggctgtcggggtcaagctggaaaggccagcagccttccagtggcttctcccaacactcttggggaccaaatatatttaatggttaagggacttgtcccaagtctgacagccagagcgttagaggggccagcggccctcccaggcgatcttgtgtctactctaggactgggcccgagggtggtttacctgcaccgttgactcagtatagtttaaaaatctgccacctgcacaggtatttttgaaagcaaaataaggttttcttttttcccctttcttgtaataaatgataaaattccgagtctttctcactgcctttgtttagaagagagtagctcgtcctcactggtctacactggttgccgaatttacttgtattcctaactgttttgtatatgctgcattgagacttacggcaagaaggcattttttttttttaaaggaaacaaactctcaaatcatgaagtgatataaaagctgcatatgcctacaaagctctgaattcaggtcccagttgctgtcacaaaggagtgagtgaaactcccaccctacccccttttttatataataaaagtgccttagcatgtgttgcagctgtcaccactacagtaagctggtttacagatgttttccactgagcatcacaataaagagaaccatgtgctacgagccgtgtctgtagcatttgtctgcggccagggggccctggacaggactaggcctggcttctgcagccaatgccggctctgcatcgtcgggaaccagattggctgaggcgtaggctgagctagctgtgggcggttgtgcagaaaagctaagatggaaaggtgggctaggccagatccaaggaggctaagagcatcttagaaaccttggttcaaggccgagcacggtggctcacgcctgtaatcccagcactttgggaggctgaggcagggggatcacctgaggtcaggagttcaagaccagcctggccaaca

SEQ ID NO: 3653 - DNA, 1226 bp, Homo sapiens
agagttgggggggaccaggtgtgtccccagggtaggcccctcacttctcccgcccaccccgcagagccctggcgttagaggagaagcggcgtctggaggcccgcatcgcccagctggaggaggagctggaggaggagcagggcaacacggagctgatcaacgaccggctgaagaaggccaacctgcaggtgggtgccaggacttctcccactctgggctctggctggagccaccacggcagagctggccttggacccagccggcagaagcacaggccaagtgccagctgctccccaggcgcttaggggaaaatgtccaggcacctggacctgaaaggtccccctctggcttctgtgttgggtgttcagaagtttctaatcttcccttttctgggagacccaagactctggaccccaagggtttggtgggatcctgctgccaccttcctctggccctgctcatgccctccagccagggccccagccctccccaaggtcactggcccttcttctgcagatcgaccagatcaacaccgacctgaacctggagcgcagccacgcccagaagaacgagaatgctcggcagcagctggaacgccagaacaaggagcttaaggtcaagctgcaggagatggagggcactgtcaagtccaagtacaaggcctccatcaccgccctcgaggccaagattgcacagctggaggagcagctggacaacgagaccaagtacgtgcccctggccccgcccaaccccagctgtcctggaaaaaactctggcccccctgcagtcctgcccaaatctgggccacaaccagctctctgtctcctgagcctggggctgtttccctccctcctgatggggccctcatcccttccacaggttgggtggttgggggagcttgtggggtttgaacaggattctctgttccacctctaaagccaggagttttggtggctgtgtctgagagtgaatcagagcaggaggtacaggggggtcctgcccactaggacagttgtcctatgggctcagcaggactgagacttccttggagggaatggggtttacagtaggcccccagacctcttttccagttacatagatgctctttgaggtgtgtcgcttcccttacctgagcccatttcctcatctgtaaatggggctatttgcagtgcccgtcgtaagaagccgggtacacataggtgtctagcaaaggcctccctacgtga

SEQ ID NO: 3654 - DNA, 1178 bp, Homo sapiens
aggaatctatttctgggagtctctctgaaccctctagtttaggaggctgcccaattaaaaaaatatatttaaaaacagaatatatttccaaaaagatgaaactgacacatactcagagaaaatgtgaacattctaaaaagacaaagaaaaaacaaaaattacttgtcttatgactaaaaagaaatagtaacattttgttgtccttccaggattgtttttctttgttcatattacctaaaaattttaaaaaagctgaaacccagcacggtactgtgtggccaccatgccatgtctagagccaggctcccgttgttggccatgccttgctttgaggctttggctctgcacgagacgccgcagagaacgtcttgatgcctcgctccccttatcctcaccacttccttcttaggggtggaaatgctggatcaaagggtcttcacgttttctgacttttccatgcatggggttagcctgtgctccggagaccctgtgagcacacatgtccccagcgcagcttgtgactcctgcctctctgaccccgccaggtggattacaaagctgacgagtggctgatgaagaacatggatcccctgaatgacaacatcgccacactgctccaccagtcctctgacaagtttgtctcggagctgtggaaggatggtacgccctttgcccttcgccccctgcctcctcttggctgcggctggtcatcttcccacctccacagtgggccgagctgccaaacaaggggtacacatgtgccccctgacataggccaggtggtctctgccctctgtagctcccatgagagagggctcctcggaccgaaacaggaggccactgccttgcgcacacaccgtggccgggtcctcctgggcggagcgctttccgtgtgtgggaaagtcaagggcagccccgagcctcgaagcccagggtcccagccccgcgccatgttgcattcccgcctctactccttggtaggctggttgctttgagtggttctttttaattctttctgttggtttctccttttcctttgcctgggttttgctttaacctctctgttgcagagatgcagagcactcagagagcctatttctatcatcgctttcctattctccacctagaaccaggtgactggccgcccgagtggtgtctcttgtgtgtgtggtgcgtcc

SEQ ID NO: 3655 - DNA, 1187 bp, Homo sapiens
ctgtgttgggcgcccttggcaatccctggaaggccagttattgggcagagctggttcaggcgggtgccctggtttgagccttgagagtggtccaggaagaaggtcctggcatatggtaggggtggcagtttgggatcaggcccgatttgagtgcctagctgattatttactgagcaagtgacttcacctagcggagcctcaatttccccatctgtaaaacagggttaacagcacttccttggcagggctgttgtgagaattccgtgcagtgaggctcaggcgctcagcacatggtgggccgctgccaaggccccatgaccaggtgggagggaggcagttcaagggacgcctgtgccagcagagctgagtgtatcccctggagtgcgggccgcagatcccgtgattgggagctgatgggccctggggtatgtgatgccccacccctctcatcatcaggcacatacctgtctatctggtacatccattgtgcagccgggcccaggactggggacatggtggtcatctgtctgtgtatgtataaatgtgtgggctagaccgcagcccctggggggatcatgcagacattctcatgcacacacccggcctggagaaactcgtgagaactcctgcttgtgggactgaatcagccttggacagcatctcatccagctcccgcgctgtgtgcatgaaacagaggtccagagaagggagaggggttgctctgaggtcctccatgagttgggattatctgcagtttaattgctgggtggggccttttctcgctttctttttttttttgagacggagtcttgctctgtcccccaggctggagtgtagtggcgcgatctcggcttactgcaagctccgcctcccggattcatgccattttcctgcctcagcctcccgagtagctgggactacaggcgcttgccaccatgcccagctaattttttttttttagtagagatggggtttcaccatgttagccaggatggtctcaatctcctgacctcgtgatccgcccacctcagcctcccaaagtattgggattacaggcatgagccactgcgcctggccgccgggtggggcgttttctaaaaaatgctgccataagccctacctgtggtggccccatcgcttgtccacatcctatgggtggactctctacagagcacgttcctctatct

SEQ ID NO: 3656 - DNA, 1236 bp, Homo sapiens
agctcctgggacagagatctagatccagagagaacattcgtccttccgatctcagctcagctctgagagccctcccagagagcagctcccgagggctccagagccctccgaaagccctcccagagagcagcccccacctcccaggctgtctgcacttctccttgctatgctttgctctgtaacattttgcaacagtctgcagtacacggggtttgttaatctgagtattcattgtttctcttgctgggcagtgaacttgaggagggcagggattttgtctgttcactgctggagccccagcacccagaatacttaaatctgagttggatgaatggcggccagccactgggattccagggctttgggccccctgccataacatatggcccagggcaggcgccacatgctgggtcagtccccagcctcctgtccacagatccttctctgttctacctcctgggctgtgtccttccacaccctcagctcggtgctcaggcgtgggcagaactggctgggaaggggtggtccttagaggtgggctgtggagaaatgaagatcgagctctggctgccgccatggccttcccatgcaaaaagtattttgtcatccaaaatcaatattttggtcaggcacagtggctcatgcctgtaatcccagcactttgggtggccgaggtgggtggatcatttgaggtcaggagtttgagaccagcctgaccaacatggtgaaattccatctctaccaaaaatacaaaaaaattagctgggcatggtggtggacgcctgtgatcccagctactctcaggaggctgaagcaggagaatcgtttgaacccaggaagctgagattgcagtgagccgagatctcgccactgcactccagcctgggcaacaaagcaagactctttctcaaaaaaaaataaaaataaaaaaatacaggccggacgcagtggctcacacctgtaattccagtactttgggaggccgaggcaggtggatcacgaggttaggagatcaagaccatcctggctaacacagtgaaaccccgtctctactaaaaatacaaaaaaaaaaaaaattagccgggcgtggtggcgggcacctgtagtcccagctactcgggaggctgaggcaggagaatggcgtgaacctgggaggcagagtttgcagtcagccgagatcacaccactgcactccagcctgggcgatagagcgagactccgtctcaaaaaaaaaaa

SEQ ID NO: 3657 - DNA, 1087 bp, Homo sapiens
ccgcgtgtgttagttggggccgctttccggcagctccaccgggctaggggaccccgcagcgggccgggagcagagcccccggtagcctcaggggagagctttgctacggggggtttcccgcaccgaggctccctagccccgcagagccagccccccgcaaaggggaaatgtgccggcacaccagcggtcctcggcgccgtttggggtgcgtggcgggcgcggggggcggcggccgggccagcgggccgcccggcggggaagcccagggagccaggcagcggcccagggcggcggcggggagcaggaaggcccgggccggggggaaaggtcggatttgctcggcggaagaaacacagatggcggcggcgcagcgccattccgggccgggagcaggcagccagcagccctgtcctcaccgcggtccgcccgccgccgctaaatacccggatgcgccgcccaagcgccagacgcggagctgggaaaagggaggcagaggaggcggaggcagaggcagaggcagaggcagagcccgagcccggtgccgagaccaagcgacagaccggcggggctgggcctcgcaaagccggctcggcgagctctcccgacacccgagccggggaggaaaagcagcgactcctcgctcgcatccccgggagccgcactccagactggcccggtagtcaggggctcaggagcagatcccgaggcaggctttgctcagcctccgacgagggctggccctttggaaggcgccttcaacagccggaccagacaggccaccatgaccgagaattccacgtccgcccctgcggccaagcccaagcgggccaaggcctccaagaagtccacagaccaccccaagtattcagacatgatcgtggctgccatccaggccgagaagaaccgcgctggctcctcgcgccagtccattcagaagtatatcaagagccactacaaggtgggtgagaacgctgactcgcagatcaagttgtccatcaagcgcctggtcaccaccggtgtcctcaagcagaccaaaggggtgggggcctcggggtccttccggctagccaagagcgacgaacccaag

SEQ ID NO: 3658 - DNA, 1221 bp, Homo sapiens
agcctcccaaagtgctgggattatagacgtgagccactgtgcccggcctgaggagctgagtcttagaggaacccagggtgggtgggtttgttctggtgagggggtgtgcaggccgggttctggcccccaatacccacttggggataggcaggacagctccttgtcaaccccaaggaggcagcgcctttcctgagctgtcagggcagcaccatatggttcctttcttttcctttccttcacctcctctaccctggtggcagggaagctgctggtgtagccacacgcgggtgctgtgttctgtgatcgtactgttgcgccattgttcggattggctctgtgcagtaggagtcactctccccatttgatggaggttcagtgaggttcatggcttgccctcagcacttggcttaaaactggaagcgtccccgggcccgtgtgaagcgggagccagctcctgtcccactgcattaggtggtctgcctttaggtgatggctacaggtctcaaatcttcagccaggttgggacctcctgggactccaggatctccacctgcttcaggacccctttctcatctcttggcagctggtgtctcgccacccagaaagggccttgcaccctgttccccgccgtctgtagcacccactccagtggaaccagaagatgtggctcaggtaggcagatacctggagaggtgggagggccaggggtggagggggcgagttatgtggacgactatcattgcagtgactgggtcatgtgaggaagttagccctgacagtgttcagagggtgcttgttctctgtccctgccctattggctttgggaacaggtgtccctgactggggcagtgaggcatgggtcaggaggccagtcccgttctatgggcagggagccctacctccttctccaggactcaggtggggtcaggagatgccagctctggcaaggggagagagggcagtccacaatgctgacttcaccatcatgggactgtcaggagttacacacgtagtaaagcaaagattccccttgattcctgtggagacagctgtaaacttcccggcttgatttcctttaatcctctcaacaacccagggaggtcagcattatgggccctggtatacagatgaggaaactgaggctcagtgaggtttagtcatttgtccaaggttacttagtaaggaagtgggggccaactgccagtcacctgtttgaagggc

SEQ ID NO: 3659 - DNA, 1180 bp, Homo sapiens
acaacttctcacctgcctaccagcagtacacgcagcagtccaccctggagcctgggcccacctggcgtggtggcgcccacggcctctcccgctcccacagcctcagtggcgcccgcgacaacgagaagactctcctgctcagctctgatgatgaattctaggtgcgggctgcagtggcggaagtgctggcgccatagccacggtcaggctgtgccccacctccagcctcaccaccaggccaggaggcagctggcacagtgctcacgccgcctttatttattggaccagaaacactcacatgtcacttccagaggaacgggggacagccaggctcgcccatgggccttcaggaatatttatacatggcccagcctgcactgcccgggcgagggcagaggacactgggagcaaggcttatgcccctgctgcccgtcctgtgctgggggcatgctgggaccagccgcacccaggccccaatgcttgtgtgtggaccagcggctgcagccttctagcccctcctccccgcgagactctcaggctgaggtcggcaagccgtggctcccccacacaccgtgcaataccctgtctgacctgggctcttcccgcctgcatccctcccctgtccacctttgtccagtgctagattcacctcaccccgggcaggagtggggatgtgggcgctctgtggtcctcccctcctgacccaggcctctgtggcatgctgcaaggatcagagccagacaccaggagtcacaggccccacccaggaagggcattcagggcccctgggcaccgcttctgttgaagcaggggcttctgggcccctgggtatccccacctgtcgtggccacacctctgcctgcctcatgccccttccccctggcctaccaaggacagcccacagcccgcactgccggctcacttgggtccttcctcgatagctttgggcagagcccttgcttcctggctgcttcagggctcaggggctcccagccctccttcccaggctgatgctgggtcctctctctctttggggcttctccctcccgtttcaggggaaaggtctgagtctccacgtttcagaccagcttctgggggaaggcagtccggcagggagaccgggaggggtggccacacagtggggagctgggaggtggggggaatggtcccagactcctct

SEQ ID NO: 3660 - DNA, 1207 bp, Homo sapiens
agcagggcacctgggggcttagggtaccccttctgctccagctttgcctgctgggcctcttcttcctccgtggggaacgtggccccattttcttctccagctccccttgagcttctgtcccaaggcaggcggtgtctgtgggttccctgggcctcctggctgtggcctccactgcacctgccagaagccattgccaggtcccggcagggggaaggacagctccctgatgagaagagcccctggctaggtaccgggagagctggtctgagtcctagcccagccttccactagttttgtgactctgggcctgttcttttccccctctggacacccctagccagtctgctagaggcctctaaacagctttcctgctcggtttagcaaccttgagtagttaagggctcttggtacacagaggggggccagggcaggcccagccccaggtcaggagggccaagaggtgctcttgatcatcctgggcgcattagttgtcctttctctggctccatcccaggagagcagggcagactgacctccctctgcccccagactcctgctttctccttcctctggtggttgtgtggcttcgtgtctctgtgctgtgtgattgtgggtcttggcttcccgcgcttgtcagggaggctggagcagaaggtttctgagatatccacctggcctccctccccttctgtgccctgcagggctgctgggcccagagcaccctggcctctggggctgactggtgtcttttcttgcatccctgcagggtgcagcccggaatcccgaggatgtggaccgggagcggcgagaacacgaacgcgaggagaggatggggcagctacgggggtccgcgacccgagccctgccccctggcccacccacgggggccactgccaaccggctccgcagtgccgccgagcccgtggcttccacgccagcctcccgcatccagccggctggtgagcagggactcaggcagtgggctgggttcagggtgggtggggggctctgtttgtgcctactctgagggtggcttcccactctccctccaggcaatacttctcccagagcgatctcgcgggtcgaccgggagaggaaggtgagtatgaggctgcacaggggtgcgcccgccaacgtctcctcctcagacctcactgggcggcaagaggtctcccggatcccagcctcacaggtgagctgcccccct

SEQ ID NO: 3661 - DNA, 1203 bp, Homo sapiens
atcatgccactgccctccagtggccaccacatccggcaaggcagatgggaccatttccttcatccagaacgttctgtggacatcactgctctaggttcctcccttatggagtctcacaagactgtctagccagcaagatctcttttccaaccaggccaggagcacctctccacccactgctgctggtctgaccgccttcctggaagtccctcttgaggcaggccctggagttagaagctgggcagaggcacccacagccttatcctttgccaatctctgactcaatgccacggccactgtagtgagctgaaccacctccagcagtcccctggcagaagcacctggaaaacatgcaatgggaaccttcaccctgaggccaggcccttcccatgctacccaacagtagacaggacaccctgtgttgttggctgcaccggggtgctgggatctgtggatccctggggcctggaagccactctcagcacatacagccactgtgttccgaggtccagtcagctggccgggaaggaattcaacacagccaaggacagaggtccatatgatgacgggtggatgctcgtgtgactttgctgaccttttatgttttctatgggcaataaaggccaagagagctccctgctgtgtgtttcttgcgtcctatgggttggatgggaccatggagagtcgcccacttcttgcctcggggctggcaatggcctgagcctgctgggctcacaaagggcaggggctccagccctctgcttggctgctggctgcagggctccacaccttggagtgagtcactcagcctctgtatcccaagcatggaaatgagattgacctgcctcacagggttgatgtgactctgcccgcagaaggttcggcacggaggtgccacagctcgtgttcctccccaggctttgctgtggctctggctgagtcactgttggccagcctgcaaccgagtgggagcccagggtgaggaccggaggtcaggagttagagccccggtggtcccaggcctgcctgagaggcttctgggtgggaggatgggaagatgcatcttctagagtgttctaaggcaagactctgaacagtgacctcttggggtgcagagagcagagtgggactaggtggcagaggcctgggttcagaccctagctctgccctgagctgtgcaaccccgggcaggtcacaaggcct

SEQ ID NO: 3662 - DNA, 1207 bp, Homo sapiens
cgccccctgcccgcgaactcggccggccggcccgcgctcccctccccggctgccgctcggtctgcgcgtgggtcttggggtctccgcgcgtcccggccgtcccgcgccgctccccgcgggccgcccaactttcagcgctgccccgcgccgcgccctcggcgccgcctcggcgtcagcatcgtcgggcccggccgggctcacagcgcgggggtccgggggcccggggcgccccgccgcccgcgccccccacccccgctgcaggcgccctccccgccgccgtcccccgctgcgcccagctccctcgctgtcacccgctcctgctcgcgcgctctgcccccggccctgcgctccactcccggccccgctgcgctcggccccggccccgcgacccctcggcctcccggcctggggtcgccctccccgcccccgccggccgggctctgtcgccacctccccgaccgctctcgcgtctctctcctgccgccggggtctccgccgcgctcgcgtcccggtccctctcccggcctccctgcctcctgcggccccgctcgccctctgcccgcggggtctccgtctccgtcgcggtcgcccgccggcctccccccgcctccctctgcccgcgctgcctctctcccctgcgcgtctctgtccgtctccctcgcggcccctgtccttctctgtctctccccctcccactctccgtgcggccccctctgtctcggaccccggcccccgccttggccgcgtccccggctcgcccgggagcccgagctcccgccgcccgcggcgcgccgagaactcccaactcgcggcacgccgccccgctttgcgagactttcgcccctcctcacacgtgacccgcgccccactgcggaggccgcgcgccccccagcccgggagccccggctgcccgcgggaccccgccctgcccgcccctcggcctaacccggcctcaagccccctcccgcggggcccgcggcgcggagcaggggctggggcggggggctgctggccccgctcctgccctggatcctgcccgggttttcctcctcgccccaggagcgctcctcccagaacccgttcctggatccgctcccgggttttgtgccccccccccaaaagggggcaggtggagagggttcctccgagccgggaaggggggtgggtgggagctggtccctctggggtcccacggagtccgcccctc

SEQ ID NO: 3663 - DNA, 2696 bp, Homo sapiens
gattagttagaattcactgccaggtttcttctgcccaccaaaatgatccagtctggaataacattttgtaaaaaaaaaaaaaatatatatatatatatatagctgactggaagagattaatttcttcccccaacttcttgcatgttgaagatatttgagctatttttcatctaaaagagtaaggtattaggcccttttgtgggagccccatgttttgtttttctgagttggtggggagggagggagggggagggctgaattgttttgcagaggaagatggcatctgtgctttaaatttctcattactgggttagaaaacaaagagggattgccctgcacattttcttttgtgcttttaaatgtttcttaagttggaacaggtttcctcgggcctgttttgactgattgctggagtgcatttgatagttaaaaattactaattggttttatttcccttcacactctgcctccccacttctccccccgttactgaaaaataaccattttagtgtcaggctagaaattgaattgctgagttttgtgtatcctttaaattaaaaaccacaagtgtttattgtagtggttaaactgtagcatctcagcatctgggtggaagctgcctatatttcttcccagtttaactggggaccatctgtgaaattaattttccatccagacagctgctgtgagcaaatgaacataaatgctcgctggaaatttactaaccagtttttatattgacctgcagtgtaaaaagcacatttaattataaacaatatattcaaaatgggcaaattttattttcaaatgcagtgtagagctagattaaaagcaactctttgccacctactctgcccttttggcaaagttaccttgaacaaagaatcttaagggtttattaagaactctttattttcttcataccctgttctctgcagtgctttctaacagcttctgggtgcagattttcttcggcatccttttgcactcagcttattacaggtaggtagtgcttaagaaaagtcatggaggactaaagcctaagtccttttcacttttcctccatctgaaggtaggtgagttcatcctcttcatggtaatgctgttttaccaagactttatagcagatggacccagaaagaattttctgctattgtgttcactacaacaggatagggacatcagacagccccagaaaccccttccagatctgatatgggactattaatttttatgctgttaattggtattcattcacaatgcagttgaagggggaaggctccactgcattctttggctaaggcctgaatgcttgctcatctgtaagatctatactcgaggttttgttttccttttaaaattctttagggagagagggatggtttctgaggggttctgaaagtatgattcaatgtgcaacatacaggtaggtcttcagcataagctgaaatatatgcatgtaaaaactttgacatctttttttttaattttccactttcttcttaactttacttctctttttgtcccccccccatcttacagaagttgaggccaagggagaatggtaggcacagaagaaacatggcaaactgctctgtgctttcaaaccaaagtgttccccccaaccccaaatttgtctaagcactggccagtctgttgtgggcattgttttctacaaccaaattctgggtttttttcttctttctttaaacatagaggtaccaccacaagggatgccctactctctcgcagctcttgaaagcatctgtttgagggaaaggtctctgggcaagcaagtggttatttggattgcttgcttccctttttccacctgggacattgtaatcataaaataacagtaaattccaaacctcaaaaactattatggcctgagcacagctgaaatctagcagagtttaactcttctgcctccatgtctgtcacttataattcaggttctgctgttggcttcagaacatgagcagaagaatcgttttatgctagttattgcattcatggttgaaactcaacttagggaaagggttccaatgtattaagcaatgggctgcttctccccaatcctccctaacaattcgttgtgtggacttctcatctaaaaggttagtggcttttgcttgggatcagtgctctctattgatgttcttgctggtctccagacacattcctgttgcattaagacttgaaagacttgtagatgtgtgatgttcaggcacaggatgctgaaagctatgttactattcttagtttgtaaattgtccttttgataccatcatcttgttttctttttgtaggtataaataaaaacactgttgacaataaggtgtgagcttttattgcttaattctctgaataattcaacgtagacgtcttaaaacagtttttgtttcaagacaaagatgggggatattggattgactgattactttcgcacctaaaactgaaaggaaaaaacttaatacaagaattggaattgaaaaccctagcaggatacctagtaggtaagggtttggatatatctgtatctgctcataagtaaaacagtgattgtgcaaatggtactcgcctaagtaccattaggttattggtattaaggtactaagtacaaggcaggtatcagccactggtttgaaaaaattcaaaccagtaaaagatgagtcacaaaactcctccagcca

SEQ ID NO: 3664 - DNA, 1118 bp, Homo sapiens
gtactgagtgctggctatgccagatacttttatagtacattacacattattaggtcattttctcagcagcctctgaaataagtggtattatttctactttgcataggaaactaaggtgtgtggaagttaaataattctcttcaaattatacagtaagtggcagaataaaaactcaaaccatgtctggatccagaatctgtgattgtaatccctaggatgtatttctctcaataaagggatttttaattttttgcctattgtagctatattcataaacagtatttattgttgggtagtaagggaggttttacacatttctccatacctttaaatcacagcaaataaaatggtctttttggaggtaggctggtagtatccctagaactccatcctttttgaatattcttatggcatgtacgatacgttgctttaaaaatactgatgaactaactaaaaattctgttcctagatttggagcaagaggtggtggtggccttcccccgaagaaatttggtaatcctggggagcgtttgcgtaaaaaaaagtgggatttgagtgagctccccaagtttgagaaaaatttttatgtggaacatccggaagtagcaaggctgacaccagtaagtttacatgtgtgttttaatgtacagattattgaaccaagtagatatattggttagagtttattcatacgctactgttgccgttttacattttattctagtgtggtgatatttttcttaaaaaattttttggttaatttttttttttttttcctttttgtagagaccgggtttcgccatattccccaggctggtcttgaactccctagctcaagcaaactacctgcctcagcttttcaaagtgctaggattacaggcgtgagccactgcacccagctgatttttttttttttttttttttttttttttgagacggagttttgctcttgttgcccaggctagagtgcaatggtgtgatcttggctcactgcaacctccgcctcctgggttcaagcgattctactgcctcagcctcccaggtagctgggatcacaggcacccgccaccatgcccggctaattttttgtatttttagcagagatggagtttcactat

SEQ ID NO: 3665 - DNA, 1175 bp, Homo sapiens
gaatgagtgggagccctgagcttgttttcctgcaactagacagtcctgtctgggggtgatgggagacagtgacagatcatcaggcattagattttcataaggagcttgcaacctagatccctcgcatgcactgttcacaagggtttgtgttcctatgagaatctaacactgctgctgatctgacaggaggtggagctcaggcagtaatgtgagcgatggtgaacagcagtaaacacagatgaagcttctctcacttgcctgctgctgatctactgctgtgtggctcagctcctaacaggccatgggccagtgccagtccacagcccaggggttgagggctcctgttgtagcacctgagttgaccaacagttaatgtgtgggtggggattgggatcgggcccatgctcttttagttgtctgactgtgctttcagtattatttttgtagacgttggccccatcaggtatggtgagaataagctctctaggcctgtatgatgccttacacccctccttttcttttccagatacttctaggacctaacacagggctctcaggaggaatgccaggggctctaccctcacttcctggaaagatctagattgttattgctgtttgagctgtctcagtgggataagtttgaaattcaagtgtttgaactgctgataatttggatttttttttttttttaactttggcacattgatctatctaaacctggtggggagaattatccccacattgtctcatggaaagactcaacttgcaactgtgccctccacactatccttacttctgtctccactctgataccagagtgcagccatgcagatggttattccagctctggtcacccgactcctttcaccaaattgctcctaactggaagatctcactttccccttgtggggtaggaaccgatgccagtgggagggatgtgcccctgaccattaacgactgttttttttttttttttttaaagaatggagttgttggggcaggacatgcacacaatgtgaaacagacaaaatgcattacacctgtagtgtaaagtggccactatgaatccctatgtatgagaggagggaggcaggctgcagcttcagccacagaatggggactatggaagacagcaggagctcatttcctctgcacattttggctgttagacctgt

SEQ ID NO: 3666 - DNA, 1191 bp, Homo sapiens
gagacagaggggaggtgctgcatgcagagtgacccagtaaattcctggtcaggctagggtgaggaccacgcagcctgctcacgcatcttccgtccctgtctccccgctgctcagcacctctgctctctggccctgctcctgatgggccagtgcttctcaagctccttctctctctttcagcctaagcccagcagtggaggccggcgacgagggggccagcgccacaaggtgaagtcccagggggcctgtgtgactcctgccagcggctgctgaaccttcccctggcccaccctcaccacccaaggggtcatcatctctggccaccactccaccagatgggcagagcagctatgaccgccacccagccctcccgctcaggccacagccggagcctccgcattgcccccacccccattttccaggggggttgtaatttataagctgacgaaggtagccagacttccggaggactgaccatctctcactgtcctccccaccttcttcctcactcacacattttttgtacatctgggcccttagtttttattctgtttattatatgtctctgtctctctctattgtgtgtgtgtgtgtgtgtgtgtgtgtgtgtgtgtgtgtggtgcaggagtgccacccccagggccctgtcaacctctcttttctcctccatggctgtctgcctgcgtatctgtctctgagaatcctcggggcggtcaggggatgtcaggaggggaaggagccgccctccctatcttgctgctcctcttggcactcaggggcaccttccatggagccagaccgggtggaggggcttctgggatttggtgtctgctgctgccagagcaggaacccccagtctaggacttgggcattttaacagggagaaagtagtggcttcccttttctctctctcctcctttttccctttaagcccacagattcaggtcatgccaaaagctctctggttgtaacctggagacatgtggaggggaatggcgatgggattataggactctccccatctcgggccctgaccctgacccttgccaccaacccaaagacagctggtgggtttccccttggagacaatcctgcgtttgcctgggccggccctggctgccctcagctttcgctgatctgcccggcctggagcctcccatcaccccgcttcttgttgggcctcaggcactg

SEQ ID NO: 3667 - DNA, 1729 bp, Homo sapiens
aacctctctgagcctccctggcctgaaaggggatgcaggcttcaggaggcaagaagctgggcccctgggggtggctggggagagggaatgcatttcccttgccacaggtggtctgcttctgctggcctgagctccaagtggagcagcccgggccagccttggtgcatgaagaggcaccaggcacaccgccttgaggtgggcagtgcccatgggggcccgagtggatgggaccgagggtgagtggagcctccttcctcccctctctagtacccccgcctcccacacacttgcacggatcggcctcccttgggagatcagcctccatgggcccctcgtccacccttgctgctttccatttgcctaattaccaagcagaagttgcaatctggtttgctttatttttgtatgtgaaataacccccaaagcccaatctcctcctacgttcaatattggttggggcatccgtcatctccccttaagtgcgccccctccccacccaagtatcataggaaaccggtgaggtctggtgtctctggtttgagacggtaagttgggacccatccctgtctgggtgcccactctgacctttagtttgcccttctgtgaaatgggtgtattgggtagcaagccctcttcagaaagcgctgctggtgtcagagcagctgcccagtaccaggtggggggtcaaggttgctggtactggggcccccagctgcccacaacccctctttgttctcaccctgcaaaggggtcaaggtcaaaatgagcctcatccttcctatgatctgggaagaggtgatgatcaagtccccaacttcagtgtgaggtggacagagttggggggatggcccctttttgaagaggtgaaaatggttttggagaagcgcagctgcttcactgggggaatgcggcagggactggggcccaggatgctttggcctatggggaaaagccctttaaaaggcagggcccaggccctggagccagcacaagactggcctcgagcccctgagccaggaggtcctggaggagagccaggccggtgggcccgcccaaggctggagggtcagccccaacagggagctgggttggccagggggctggactgctaccagcctctctggcctatggggacccaagaggacacatcccccttttgcccactcttctgtgtcattttgttgttttggtttgtggtggtttttcttttttcttttgtttttcttttttctttctttctttttttttttttttttttttttttttgcacttcgcccacacaggacagtggagccccacctggtcagttccacttccgggctcccatgcacttgcccaaggcggcctctttgggacggggatggtttgaggaaacacttttaaagaaaaaaggaagacattgaaaggttttagtttcttccctatctgcatgtcctctcatatagaaagcccagaattaggggctagaactccaggagagggtctccccgactcatctcttgctgacggtcaccaggatgcagaaatagggagatggttagtgggggccaaagatgccccctcccaggccttcgtggttccctcctccgccccctgcaatctttggaggagtcagtgcctcactccagcagtgagtgcctactgtatgcaggtagtcagccaggcaaagagagactaacggtctcatgggggaaccctcttgcgggaggccgggtagctggagcgaagc

SEQ ID NO: 3668 - DNA, 1238 bp, Homo sapiens
actggtgtggctggggatactagtcttattggtccctgatgccaccaccaggggggtgacaggcctgtgttgtacagcaggatctttagttttagcccagccgccttacagaaaggaacctggagggccagccagctttttgctctgaccttgggatacgctgtgactgggactgaggcctcagctgccttctagcgtgctttgcaggtcagcacactggcatgtctgggttatttgtccctaatgccccagccttacacccttcttgttcattcagatttataagattggccagggctaccttatcaaggacggcaagctgatcaagaacaatgcctccactgactatgacctatctgacaagagcatcaaccctctggtaagtaatgggtgttctgctctgtgaggccatcccaggcctcgtgcttttggggataggctgcttcctaggggctgctagcaggatcgttaactgaagccaacacaacacctagctgtgtcccttgtaagtggcatgttgtcatctgagtccactcgtcggggttggctggtgagaagtggggtctcaggctcagctgttcagtgatgaggcctggaatgtgcgctgggcacagcgcccgagacagactgcggaaccgttccttgttgccttccttctgagaacagccctgtggtcagggagggcctgaacctggaggggtcatctgcacgacaatcccctcctgggcctgtgctgatccgatgctcgttttccagggtggctttgtccactatggtgaagtgaccaatgactttgtcatgctgaaaggctgtgtggtgggaaccaagaagcgggtgctcaccctccgcaaggtgaggcaggtcctgacttgtcatgggggggctcttgtagagggaggatccaaggccacagacgctggtggccctgtggtgggagaggaaaggaaggagagggtgttggcagtcctttcacactggctttgaagtcctgagatgaggaaattcccagtctggccttgctgggctgtttgctgctttgagtgtgtcctcatctgccggatggtgggggaggctgaattgatcgtgtggcttcccagatgcaggggcgctgtgaacagtgctgaggaaagcctggctcctcgtaatcctaaatcccttcccctcttggcccatagtccttgctggtgcagacgaagcggcgggctctggagaagattgaccttaagttcattgacacc

SEQ ID NO: 3669 - DNA, 1238 bp, Homo sapiens; identical to SEQ ID NO: 3668

SEQ ID NO: 3670 - DNA, 1227 bp, Homo sapiens
ggctgaggtaaaaccactgcagtaccccaaaaggaactgacccaaaggacagccacaggaacattgggctggtaggggctgggatctggttgtttgcctgtggtgtgggtcttgtccgctcatcctgacagtaactcaggcaccagtatccaaagttaagttgttgctgttggcaaaaatgaaagttccttcctcttggtgaggttcagtgacttgttcagagttactggctttttgccgtgtgcttgacatcaatcaggccgcatggagctgcagttcctctgctgtgggaggagcgctggcagctggagctgagctgtgtctaccttctcctagatgcgcctgcttcctctgcgccagaagaaggcccacctgatggagatccaggtgaacggaggcactgtggccgagaagctggactgggcccgcgagaggcttgagcagcaggtacctgtgaaccaagtgtttgggcaggatgagatgatcgacgtcatcggggtgaccaagggcaaaggctacaaaggtgagctttgcggtggcttgagttgctgtgcaaacctgggggagaagtggtttcaggcccagctgttcgttgatgaggctcagagtgagcgctgggtacagcgcccgaatcggacagtgtagaaccattctctactgccttccttctgagaacagccttgtggtcagaagtggctgggatagcggagggccaggggacaacttcttaacacgttcctggaccctttgctctttgtagcctactgataactgcaaaggggagcttggaattatgttagtcagtccctgtgaatgggggagcttaaactaatggatgccttaaaaagcacccattcagaattgagttcagggtgacacccccagagcctatccagcttgacaggggagacctgtgggtaatgcacatgaaataatcttatcactccctcagatgacccagccatggttggtaattgctgagtagcaggaaggggtcagtgggaggtgctgggcgctgaggtgaagtaatgtgtatccattccaggggtcaccagtcgttggcacaccaagaagctgccccgcaagacccaccgaggcctgcgcaaggtggcctgtattggggcatggcatcctgctcgtgtagccttctctgtggcacgcgctgggcagaaaggctaccatcaccgcactgagatcaacaagaaggtgaggttctgagagtggctc

SEQ ID NO: 3671 - DNA, 1227 bp, Homo sapiens; identical to SEQ ID NO: 3670

SEQ ID NO: 3672 - DNA, 1083 bp, Homo sapiens
ctgaggctggcataagaactgcctcattcatgtttttttcacctgaaagcttgaataatggccacttacctgtgtgtgttctacttagagatgtctaacagcactggttgctgagccatggagacattaatgttaggcagttgatactgactaatctctgagctcagagctattgttagggcactgaattttccagataaatagcaatcttgtctgcctccagaggtttctgtagaagagaattgaagctggacaggtatttggctgtctagggtcctgatattttttgtttgaataacataaatgtgctttgaatgagagataggcagtaaggacagccctgtgagtccgtactgcaggtgtggggcccagttgcccttccggcctaaatgggcactttgcattttcctagaaaacattacaccccttgcttgggctcctgccaagtctgactactgctttttttttgcagaggtgaacaagaaggaggtggtggaggctgtgaccattgtagagacaccacccatggtggttgtgggcattgtgggctacgtggaaacccctcgaggcctccggaccttcaagactgtctttgctgagcacatcagtgatgaatgcaagaggcgtttctataagaattggtaagggaggaggccatgcagtccctagcttgggagcttgggagctggagagcagggagcagcgtgtgcatggtttctcagctctgtagcaggcagggagctgctgtcttgggtttagtttgcctctcgaacagaaaaatacctgggatcagacttggccagccatctggtttcagccggaagctaacaccctcattctgagtccaggctagtgggtggtggctgaggacccagttggttgaggagtccaactagaaaccaggagaggtagcagaataattaaacccctataggggtggcaagggcctctggccctgggtggaatgtcccatttccttcatcactgagtgggcttccccagggcagaaaggtttgtcccggagcaagaattttgtttgaatgcgtgtaacttaaattaaccttgtggacctctgctcagctc

SEQ ID NO: 3673 - DNA, 1154 bp, Homo sapiens
ggggcggggccagatttggctttatatagcggacccgtaaggccgaccggcctctaccggcgggatttgatggcgtgatggtatgtgttgtaatggcggccgtttcattgtcaccggcgtcggcacggctgaatccgcgacgcatcgccgccatcccgtcttggccggcgccgggggtttgctttaggggcacgggcgacccagcggggacttcagtctggcctattttctggaaagtcgagaggcttgtgaagagcgcttggaggactggctttgggcctgcaggtcggccagagagaggccgtaagggtgggagcaggcttggaggcccggcgtttttaaagccatgagtcatttctaagtttcgacctcaccaattctatcattagttgggattagggcccataacctgcttgtctgggtagaaggaccttgggtggaggttctcggcgccgttctcattgggaggtaaagaagcttgggggaggggagtgttgtggagtcctcctgaatatctggggccgctggtgcactccgaaggcctctggagctcgcagaaaccacagatgatgaacttattgacgggcggacagaaactgtgtgctgattgtcacgttctgatttggctctgcggagttctttggcctgtgtgtatcagtgtaattagtgtccgggcaccggaggcagcctatagcttaacattgctagctgctacccagcgtttgtcccgggagtccctttctttagcggtcaaaaccttgctaattggcatataaagctgcctgttaagcagtttttagtgccactacttagtgtatttttgtgtggttagataaaaaaaatgggtcgttttcttacaggttgagaggatttgaaataagattcagcttaaattttgtcgaatacaaaagcattcttgacacgtgcgagcctggaagagataatgacctttttattcggcttgctgggtgtctggtcaggattcttcagtattgctgagatttggaacttaagcagctgggaactagagaagggggcactgctttggtttgggtgctgacggtgatttttttcccacctagtctcacagaaagttctccgctcccagacatgggtccctcggcttcctgcctcggaagcgcagcagcaggcat

SEQ ID NO: 3674 - DNA, 1154 bp, Homo sapiens; identical to SEQ ID NO: 3673

SEQ ID NO: 3675 - DNA, 1117 bp, Homo sapiens
gggaggtctccctagaaactgaggcaggtgcgatttttggtcaggtggctgatggtcccagcctacttctcgtattttcttgtgggcccatctgctggtttcattcagtggaaggtttcctttcattcctcacctcggtgtgatgtggggtggcttcctgtggtgtccttgcttgaggacattgtctggcctgtactggcttgtcagagcccatgctttctggctaatgtgcttgattttagctttgaagtgagttctctggttttggggcagggggcgaggtagaggcaacagcctgagggggatgcggccaggccccctccagccgcagacctgcctgacaggtctggagtacaccccacccccttcacttccttagaatgtgcactccccacaccaggggacccagatctggtttccacattccagccctgcatggaatgatagagatgccacacccagcccactctgaggatggagtgcgcaggatgtggccaattagaaaggccctggaggggggtgggcggcctgcatgcctctgccccatcagggggccttcctttccctctgcctctgggttgtggatgctgcgactgctgccacggggctagaaaggcctgccaggccgagcaagctccttgggcatcctgagtgcagtaggggtggcctctccagcacccctgccgggctgcctggaggagtcctccagctgtgtccacaaagcagagtgtgagcgctgtggccctagacaaggcaggacaacccactctcctcccctgcctgtgttcctcactcctttcagcgtctgagccatagttggtcccaccatgggctggccctgtgctggtgctgggcagcgctaacaggcagttccagctgtgatagaaggtgggtgcccgtccccacccagctgatgagaagagattgaaggggaggggggcgaaggaaggttttctagaagaagacaccttgcccgccctgctgagtaggtcctgggttgggacgggtttagagagatggtaatggacagtcggtggttcagcttcacccgaggaacttcctgtgatgacgggagtgctcgcgtgggtgctgtcctgtcacggcgtctctagccact

SEQ ID NO: 3676 - DNA, 1158 bp, Homo sapiens
agcagtagctcacacctgtaatcccagcactttgggaggctgaggtgggcagatcacgaggtcaggagatagagaccatcctggctaacacggtgaaaccccatctctactagaaaaatacaaaaaattagccgggcatggtggcgggcgcctgtagtcccagctactcgggaggctgaggcaggagaatggcgggaacccgggaggcggagcttgcagtgagctgagatgcgcccgtctctccagcctgggcaatagagtgggactccatctcaaaaaaaaaaaaaaaaaaaaacaaaaaaacaagaaaaaaacaagttttggtgtggttatggaatagcaggagcttttacttttctggtgggagtgtaaattgttgaaaccactttggaaaagagtgtagcaatgtctagtaaagttggaaaacatggacactctatgagccagcagtttcagttgtgggctggtaacctaccccacagaagagctgtatgcatgtacaggaggcatgccctaagatgtctgcagcaatgtggcttgtcctggcaaaaattggaaaccttaatgcccatcagtaggcaaatgtataaatacagcgtggtactctttacatttacatgaattttagggacatagcattgtgtgagaaaaacaagttgcagaagaataaagtaataaaattccacttaagaaactcagaaatacaactgaaatgttgtttaggttaccaagcatggtgtggtcaatcaagggagtgctaagttaaggggaagttaacgcttgtggagtagggaaaggtgggattatacagggggcttctgagtaccggaaaggttattccttaagctgagtggagggtatataaaagttattttgtatgtattaaatatgtaataaaaatttttctccagaagttttattattttttaagagtggaaaaataacacaaatgtcatctccatccaaaaagtaattcaggcactgagtacttatttttaaatgcgttttgaattctttgccaatgagagatgcctgaaacacggaaaggaaagacctagtgatccttgtttgtcccatgacattggcattgagaggcgtctgcctctgtagacatgacagtgtatctcaagagcagcctgaaggaggttttagtggcat

SEQ ID NO: 3677 - DNA, 1185 bp, Homo sapiens
tgggaccgtcgctctcgccgccgcggccaccacagacactgccgccgccggctcctctcagccacggaagctgcgggcccgcccaccacgcccgcctcccgtcctgaagactgtccgctggagaagtgacggcggcgctagccaatcagaggcctgatcggggtcgtgatcggcggactaaagggcgggcggagaaggaagcggcatgaagaaggcgaaaacggcggcctgacttcctgtgactgacggcacggcgcagccaatgggcaacggggagatgacctcatctctgaggaaagtctggaactggctgagctgcggcgagggggttggcgacgagccgggggcggagctctgggccttaaagaggccgcagccctgtggtcaccctgtgaagggaagggcggtggaccctgccggatcttgcgaagttgccaaggggtcaatgcccaggcgcgagtaattactgcattaatcccagaccccatcccgattcttgtcggggactgaagggtctccgcctggggctccgaagtcgatcatttcacattcacgcttcccaaaacgagacacaataaattccgctctggcctggagccttgaattcccgttacggtcccgccccgccgaggcccgtcgccttgtttctctgagtcagtttccccaacggtgaaagggaggacgctgacacctgcctgcccctccctatctgccgaggccgtggagatcagcagcagcgaaagcgctctgggcttagaagaggaaaagggctgcgtgagcccaagagcttgcatcggaaggctccaggaagagcatctgcaaaaaagaggattccacgggatgacccccgacaactcttggaattctaaaatcctatacccttgcccgcacccattcgtgtagtgaaggggcgcgcgttaggcgcagaggccacacgctccgcaagtgaacccgggcacctctctgaacctattccgggctgagggcggggagcgggtggctgcccgatttaaaaacatgtatatgtatgtgtatgtgtatgtgtatgtgtatgtgtatgtgtatgtgtatatgtatatgtatatgtatatgtatatgtatatgtatatgtattatgagtgaagtccatgactgcaacagggagaaaggagaaaggcgaaaggggagagagcaacaaggtaagcc

SEQ ID NO: 3678 - DNA, 1128 bp, Homo sapiens
ttagcttgtagtccaatataaagataaccacaataataattttagtaatgataccaacatgtgttgaccattatatgccagccactttgacatgtattatctcatttaatcctcacagctttactaggtaggtaccataaagatccagtattacagaggaaggaattttaacccagaggttaacttacttgccccaaaccacccagttactatcattcctgaacagcatgttcttctttctacttcacaggcatttatattccagaggatgacaaagatgccccagagaagtttcggggtcttggtgtacgaattgaggatgatgtagtggtgactcaggactcacctctcatcctttctgcagactgtcccaaagagatgaatgacattgaacagatatgcagccaggcttcttgaccttcactgcggcccacatgcacctcaggttcaaaatgggtgtcttctggcagccctgcacgtgtgctttctgagtgtctctgtgtgtgcattaatatatgcattccatttgggagcatagcagctgtgtgaatgtatgtaattgtgtgtggggggttttttgttttaagtagttagaagtctgggaaaatgaatttttgaatagtatgttactgcagctttggtaacattaattctatagaattaatgatcagagcaagtttaatttttaaacataaaggtcttggttacacatgtccatgcattccagttaacacatttaaacatatagaaaattcacttcttctttcaagtccttccctttctatacttttgctgagatcaacccaatatcataagaagtttgtgtgatgcctgtatttttagctaattaccaaggtctctgcctatgcaaaaattcatctttcggtgattgtgggcggccaatacataccttctgtaactcctccctacctattctagatcctgcatatctactggagccatatgagccctcaggggcactggtgtcctgcagtcttactagtcagccacagtccaggttccagcaacactagctacctaccaaacaaaacacttctgagcttttcttgccatttggttgcctgggacctggaaagtgtttagattcttgataaagatggaaatgga

SEQ ID NO: 3679 - DNA, 1232 bp, Homo sapiens
caagtttgtgccctttttttttttttttttttttttttgagatggagtctcactctgtcgcccaggctggagtgcagtggcacgatcttggctcactgcaacctccgtcccccagattcaagcgattctcctgcctcagcttcccaaacagctggtattatagacacccgccaccaggcctggctaatttttgtatttttagtaaagataggattttgccatgttggccaggctggtcttgaactcctgacctcagtgatcggcccgcctcggcctcccaaaatgctaggactataggcgtgagccactgcacccggccagactaaattattttaaactataggaaacaaattaaaagatgacattaatttctgtgttcatatactcagccttttggagaatagaacatacgtgtagtctactgttgtctttggtataataagattaacgtaatatccaaaaacttttgtttggtggttccctgtggccaaagagatgataactgcagctgcagcctgaggtcctaaagagtatgtgtgtgtgttacaagcagaatgcactgttccctctttttgtctttgcagtggaatgcagtagccctctgggcctgggatattgtggttgataactgtgccatctgcaggaaccacattatggatctttgtaagtaattggaggaggatgggaggaagttgagaaggttgcagagattgtggctatcttgatgtgactgattttcttcttcacacgaggagatagcaagcctactctgagcactcggtcttctgtatctagtctgttggtgtgtttgaaatagagtagtttttttatgatgtcctggaggcatacccagctctcagaataaatctactcaatctaaagatggcagggacacatttagaattaattgtggacgacaggcactgttgatttttcctgcatatcttccatcttgtacctagactcaaaggtagaaatagtgaaaggaggaaaataaactttgagctaaaatattctgaggccaagcgcagtggctcatgcttgtaatcccagcactttgggaggccaaggcgggcagatcatttgaggccaggagttgaccaacctggccaacatggtgaaaccctgtctctactaaaaatacaaaaattagctgggcgtactggtgcatgtctgtaatcccagctacttggcaggctgaggcaggagaattgcttgaacctgggaggcag

SEQ ID NO: 3680 - DNA, 1241 bp, Homo sapiens
gacagattttgaaattgaaggctgatcaattgctattctcattattagctttaccctaaacatgcctgagtactggagttcaggtgaaaataggccgccatgatcagggcagcccgaaagttcaaactgtctgagcccctgttgggagtgagcaggcggagctccctttcacaaccaccaatgacttttccctctcacctccctaataccaccaggcagctactggcacctgtcaggtgggcatggttgagtcagagggagagcctgtccctaagagggggcagtaggcaagaagtcctgtaagatggggaggggaaaggggaatcacagcgacagccaagctagtgtcagtgtcgtcacctaatcctggagcacactgtgatcacttaggttctaactaaagttgcttatgtgtttaagcaggttttatgtctcaaacaggaaattatcttggaattaatcagagtaatttactttgtctttcaggtatgggcactaggaaaagacttcttccatcaagcttaattgttttgttattcatttaatgactttccctgctgttacctaattacaaattggatggaactgtgtttttttctgctttgttttttcagtttgctgtttctgtagccatattgtattctgtgtcaaataaagtccagttggattctggaacggatgctctctcttgtgtatgtgaacaaagtgaacataaatgaagagtctccccttccaaggctgaaaactcagcttttgaaagtgaaatgtttgttcatcggggccagagcagggttgtcctctgagcgcatcacttagtgacgaggaatccaacagctcaaggcagagtgtggatcaccggctcccgaaaacagcagtcagcccttctttctcctgtgtgacagcagtgggcagctgaaagagggaagaatgtgggattcagtcatcaaacccagttctgagtcctggttccacagcttgggtactgatggcaatcttggccaagttgtctctctactctgaactttcctcctctgtactgtgggcttctgaggactaagtggcatcatgtgggcacagagagaagctttgtaaaatgtaaaaccgctatacaaatgtgacctttggttgtgtatgacagcagtccccaacctttttgccaccagggattggtttcatggaagacgatttttccatggaccgggggtggggcgggggtgtgcttggggatggttttggaactg

SEQ ID NO: 3681 - DNA, 1172 bp, Homo sapiens
gagcaggcaacaccctgggagaagaaggctgtgaacagcttcaggaggtgctggagggcttcaacatggccaaggtgctggcgtccctcaggtagggaactcggggtggccccagaggtcggggtcaggccattcctttctttctttcttttgttcttgagatggagtcttgctctgttccccaggctaaagtacagtggcgtgatctcggctcactgcagcttccacctcctgggttcaagtgattcccctgcctcagcctcccaagtagctgggattacaggcacccaccaccacacctggcccctttatttgtttctacttgtatttattcagaaacgttgggtgcactcctgttacgtactaggtcatacactaggcatcagggctataaggatgggacagtcagggcttctgtctcgtggggtggagacagaatgagttgtccgttcaacagaggagctcgtacgggctgagcggggccaccctgtagagtggtggagttggggaggcctctgaaggggtgaggccagatctcatcctgatgtggtggggcctggggagtgatgggggtgggaggtgggggcagccagaaggggctgcactcgggattgttcttaagacgctgactctagaaaggaagagaccatggggcctggggagtctacctggaggtgaaggtgggtggccggggagtggccatctcctggatccaagtccggttgggccatcagcatcgggctccctgtgcccctcgcatctccaagtcggcctcattcgtgtgtcagatactcagtcgtgtctcctcggtgctaggccctgagctgaggctaggaactggggactccgaggtgggctgaacctcacaggtcccactgtccctgggaaatggtccagccttcctatggggcaaggacacccctactcttcttcctcccccacacctgtagcttcctgaggtcatgtggatgtgggcgcccctgccctggcatctcaacctgggcagtgttcctgccaagccctgggctctaggtgtgacaaagctgtcttcgttttctgtctctccatgaaacctggggctccttgaggacagggacaagatctgatttttttttgttttttttttttgtttttttgtgggggatggagtctcgctctgttgcccaggctag

SEQ ID NO: 3682 - DNA, 1153 bp, Homo sapiens
tacccatctctatctcttccctcccacatgtcaccctactccatcctgtaccagccagactcaactttttgtttcatgtaagttttggttttgttcagattatacaattaatgcaggtttattatagaatacagaaacattcaaagaacagggaaaaaatatatcctcactttcggccgggcgcggtggctcacgcctgtaatcccagcagtttgggaggccgaggcgggcggatcacgaggtcaggagatcgagaccatcctggctaaaacggtgaaaccccgtctctactaaaaactacaaaaaattagccgggcgtagtggcgggcgcctgtagtcccagctacttgggaggctgaggcaggagaatggcgtgaacccgggaggcggagcttgcagtgagccgagatcccgccactgcactccagcctgggcaacagagcgagactccgtctcaaaaaaaaaaaaaaaaaaaaaaaatcctcactttcatataaccccagggatataactactattactttcagggcattttatttctaacacagtctttttttttttttttctgagaaacagtctcgctctgtagcccaggctggagtgcagtggcaagatctcgctcactgctacctccgcctcctgggtcccagttcaagcaattatgcctcagccttccgagcagctgggattacaggcatgcgctaccatgcccaactaatttttgtatttttagtagagacggggtttaccatgttggccaggctgttcttgaactcctgaactcctgacctcacgatccgcccgccttggcctcccaaagtgctgggattacaggcgtgagccaccgcgcccagcctagtctttttttttttcctgaacatagctgagttcattttgttttgtttgttttttgaaacggagtttcgctcttgttgcccagggattagtgcaatgccacgatctcggctcactgcaacctctgcctcccaggttcaagcaattctcctgtctcagcctccctaatagctgggattacaggcatccaccaccacacccggctaatttttgtatttttagttagagacagggtttcatcatattggacaggctggtctcaaactcttgacctcaggtgatcctcaggcctcagcct

SEQ ID NO: 3683 - DNA, 1193 bp, Homo sapiens
atcatggccctggccattgatgtgtatgggctttctttccctcatgcagccccttcttccccaggctggatgttgtgggtagggaggggtgtgtgtgtgtgtatttggtttgctgtccttttttaaaggattccaagccatgtgaaacttcccttctggatgtgattctgggtcgcaagtccttatttatatgtgaggctggggaatgggctgggggtattggcagtccttttgcagggcagtgtgtgtggtggggtgacaccgctgtggcttagcccaagacactcccagaggaaaacactgcagaaggaactggtttgcagactgtggaaggatctgcagttttgtttttgaccaaaaaaataataataagttagctctgaagggcagagggaatacccaagcccctgatgcctatgagaagtccctggacttcaaccctcctgttgtttggccttagcccagagggagctgctcacctgagcacccttgggggtgggcagagaggcagggtgggattttagagttagtgtctgtgcgggggcagccctgagcctggagttgagactttggggtctcttagtttggaggtgttgagtgcatttgtgcccctgcctggttgagagcttcttggtacctcttgccaccccttctcactgccctgacccaaccccactggaccttgatgctgcgaggagtggtgtcctgacggactcagcactcccgcctgatgtattggatcataggagagcacttgctctcctgcctctgccaggagagggcttgttcctccaactctaggaggccaggcaagcatggacaggagccaagggagcagggtcattaactttttcttctttgcaaagtgggcacttggcatcagggtcccaatcaccagaaagcaccaaagcccctggcaccccacccactccatcctacccagggaccccaagtaggcaactgttatggcagtgggtccagcccaggccagcactgccagcctcctctccctgcagtaggcaccagctctacctcccccggcaggcaatgtcctggcttctcagcccagcaccatctgttcccctagacttctcaggggccagcccagtctgggccaccctttgtttccctcatcctcggctcccacacaggtgacagacccagcagatagcttctctctgggaaaggttgga

SEQ ID NO: 3684 - DNA, 1177 bp, Homo sapiens
tgaccactggcattgcccctatcaactctgacccaccttgtagtagcgggcagtgtcagggacggggccaaactcctgagtgacggcattgcgcacggagttggccttgccgttttcaatgttgatggcaccaatgagcaggttgttggagatgttatccaagtgcccacggaacttgagccaggggccagcagctgagatgtggtcagtggtacacttccctttgaccttgggtggtaagtagagaggacagaggtcagggcatggccctggaggggtggatgacaagccctccagaggcaggcagcaggccccggggcccaggaggggtgacagaggggtgagaggcaggcaagtcttcagacacgtgttctgtggtcctggtgcttccaccctaaggccacatgggctcaggccaggccttcatcccctcaaaggcctctggctgctcagtctcccttatggggcagaggccgcccaaagttgggacaggtcaatgttcgctcacccttcaggcctcagctgcaagatcagccacagacctcatgctggacacaggagcccaggacatgcctgggtcctggctgatgactgattagtctcttctgtcacaggggtgcctggagaccccttaataagcagcataaataaatatctgacacagattggaggcctctggccacaccaaaaaggcttgtttttggtcggtgccaaacacaagccatcccatatccacgggtgcccaactgtgggggcaggagttgtccatggcttccagagcctgtgtggacgtgccaggtgtggagcctgctgtgcaatcacacacactgtcccagcccagcctgagctgtactcacctgcccacacccactggaggtggctctgatcagctgctgctggatggctgagggccccagacggaggctggccagatctagctctgcccagttcggggccacagagaagggggacgctggactgcgttgcgataccctctctgctctgcagccaaacctcccttccatctcccacctgcgtcttgactgtgctcacttcctccaggttcatggcccttcccgatgctcaggggacggggggccctggcagggtggggctgtcctgccgtccccatgctgctgaccttgatgaggatctgcaggtcctccaggtccttgcc

SEQ ID NO: 3685 - DNA, 1188 bp, Homo sapiens
tggagtctcgctctgtcgcccaggctggagtgcagtggcgtgatctcggctcactgcaagctccgccgcccgggttcacgccattctcctgcctcagcctcccgagtagctgggactacaggtgcccgccaccacgcccggctaatttttttttgtatctttagttgagacggggtttcatcatgttagccaggatggtctcgatctcctgacctcgtgatccgcccgccttgggctcccaaagtgctgggattacaggcgtgagccaccgcgcccggcccacctccagaactttttcacggggcagatatggtggctcatgcctgtagtcccagcactttgggagtctgaggcgggcggatcacgaggtcaggagttcgagaccagcctgggcaacatgctaaaaccctgtctctaaaaaatgcaagagttttactctgtcgcccacgctgcagtgcagtggtgcagtctcggctcactgcaacctctgcctcccgggttcaagcaattctgcctcagcctcccgagtagctgggattacaggcatgcaccaccatgctcggctaattttgtatttttagtagagatggggtttctccatgttgatcaggcttgtcctgaactcccgacctcaggggatcatcctgccttggcctcccaaagtgctgggattacaggcgtgagccacagcgcccggcctgctcagctaataatttttgtatttttagtagagactgggttttgccatgttggccaggctggtctcaaactcctggcttcaagtgatccgcccgcctcggcctcccaaagttctgggattacaggcgtgagccactgcgcccagcttccttcctcttcttgatggtcctttagactcatcctttctgactttccaggcatcccctctgcaggctacacatccctagacctccaggtggggctcttgtgagatgaactgcagatccagcactctcctggctgaccagcctgttgctctgtgtccttctgttttttcactgagatataattcacataccacaaaattcaccctttcaaagcatacaatttagtggctttgtatattaagagttgtgcaaccatcaccactatcttttttttttaattacattatcaccattttgcaactccttatgaagacagatctcatcaatgatcattaacttttta

SEQ ID NO: 3686 - DNA, 1180 bp, Homo sapiens
acaaaagttctccacgtcccaactagattagctagttacagagtgtggacacaaaggttctccaagtccccaccagagtagctagacacagagtgtcgactggtgcattcacaaaccctgagctagacaggctgctgattggtgtgtttacaaaccttgagctagatacagagtgccgattggtgtatttacaatcccttagctagacataaaggttctccaagtccccaccagactcaggagcccagttggcttcacccagtgcatcttgtaccggggctgcaggtggagctgcctgccagtcccgcgccgtgcgcccgtactcctcaacccttgggtggtcgatgggactgggcgccatggagcagggggcggcgctcgccggggaggctctgtctgcgcaggagcccacggcagagggtaggctcaggcatggcgggctgcaggtccgatccctgcccagcggggaggcagctaaggccctgtgagaaatcgagcgcagcgccggtgggccggcactgctgggggacccggcgcaccctccacagctgctggcccggctgctaagcccttcactgctcgggccggcacggcctgccgctctgagtgcggggcccgccaagcccacgcccacccagaactctagctggcccgcaagcgccgcttgcagccccggttcccgcccgtgcctctccctccacacctccccgcaagccgagggagccggcgccggcctcggccagcccagagaagggctcccacagtgcagcggcgggctgaagggctcctcaagcacggccagaatgggcgccgaggctgaggaggcaccaagagtgagcgagggctgctagtacgctgtcacctctcatcacctttcatagttctatcacgtggggtttatatcctcattacatataaagaaactgaagcccagtgaggaaaggtgacctgtccaagtccttgtagttagccaggaccaaactgcagttctcctgattccaactccaatgatctctccaggacaccatagctacccagtcagaaaaacaagaattgtgcctggggatctggtgcggtgggtcaggcctgtaatcccaacactttggtcacgcctgtaatcccaacactttgggaggctgagtcgtgaggaccatttgaggccaggagtttgagagcagcc

SEQ ID NO: 3687 - DNA, 1174 bp, Homo sapiens
tagccttaagtgtgcgaatccgaggagcagcgacagactcgagaccacgctccttcctcgggaaggaggcggcacctcgcgtttgaggcccgcctgcgtttgaggcccgcctgcgcttgcggcccgcctgcgcttgaggcctgtctgcgtttgagatctcattgggcgtgattgaggaatttggggaggtttttgggcggtattgaggacgagggggtccgttagtcagcatagaatcctggagcgggaatccctcaccgtctaaatggcgtcgggggcgggacctccgggatctggcttccgcgggccgccgccggccctgaaacgtgagggatagctgagatgaggcagctactgggatggcccccatgcgcatttacatgcagtccgactgccgagctttcgaggcagcaggatttaccgtccacattcctcactactaaccaagcttttagaacagatctcacaagaacctagaggtcggtattttttcgatttaaatttgcctgttactgacgttaacgtctttcgcctagtgagcagtagccaacatgtcagggtgggagtcatattacaaaaccgagggcgatgaagaagcagaggaagaacaagaagagaaccttgaagcaagtggtaagtgacttcagcatgtagtgccattcggtgtgtggaagaaagaccttccctgcctatctctgctggatggactttgctgtttgatggcctgcccttctcctcccagataattctgaaattcttttcttcctttgaacttcgcagagctaccctaggctcttatatgcagatcttactctagtgtgccctaagttttttttggacactggtagtttgacatcttttggtccctgataaatggccatgaccataggtattttttgtcatcttaagtggttcaggtgagacccttctcatccaggaaagtagtgttaccattccaggacctcagtgtaaaaatgcccccaccctgcaataactacaccaaccaaagaataaacgcaagcaacacagttacaggaaagtgattgattccctcactatagcctccacgtttgggagtgtatgtgcaggcaacacagtaacacataaaacaaaggaagagaaataggggtacatgtaatcttcatactggttaatttaactcctgagcagaaaa

SEQ ID NO: 3688 - DNA, 1216 bp, Homo sapiens
caggctggactgtagtggtgcagtctctgctcactgcagccttcacctcctggggtcaagcgatctttcacctctgcttcccaagtaactgggaccctgtgctgccatgcccagctaatttttttgtttttttttgtttggtagagatggagtctcactatgttgcccaggctggtctcgatctcctagggtcaagtgattctcccacctcagcctcccaaagtgctgggattgctacagatgtgagccactgtgcctggcctgaatatacgtattgttaattctctgatttcaatggcagggactgcttatacttctaatgtatacttactgcattctggtttttgttaaaatttgatatttatgcccattactttcactgattcattacccctgaaggtagggatcttgccttattttagtgccatatacaaattcagtgcacatattttgagcaactaataggtactgagcacttatggagcttccatttagtggtaagtaaatattaattgaattttttttttcagtgtatccaaagtgtgtacatcagtaagatcataagcagtgatcgagatctcttggctgtggtgttctatggtaccgagaaagacaaaaattcagtgaattttaaaaatatttacgtcttacaggagctggataatccaggtcagtaatattttaagatcagcttttcccttatatatgagaatatcagtactctgatcaaagaggactgtggagaaggaagcaagttacatcttgtctaggagtatgctttcctccataaggggaccttgctcgatgtggactttgttaaatgggttaaacagctctggggtgaaaaagggtccttctgttagtcttgtggtaaaggcagccactgacattcttctgatttttctttccatttgactccctgcctctgatcaggtgcaaaacgaattctagagcttgaccagtttaaggggcagcagggacaaaaacgtttccaagacatgatgggccacggatctgactactcactcagtgaagtgctgtgggtctgtgccaacctctttagtgatgtccaattcaagatgagtcataagaggatcatgctgttcaccaatgaagacaacccccatggcaatgacagtgccaaagccagccgggccaggaccaaagccggtgatctccgagatacaggtgggcatatttccccgttctcttaaat

SEQ ID NO: 3689 - DNA, 1204 bp, Homo sapiens
ttgaggataagtggtggatttaatgtagggcttgagaaaatgccattgtgtatgactgactggtgtttgaatcctttatcatatcccagggccggtctaggacacataattgtgtgtgcctaggcattcttcccagtttgttgtggctgccctgcccaagcccacatcacctattagcttcacgtccttctctccgcagccaccaaaaccctcaacaggggcatctctgagttcatcgtgatggctgcagacgccgagccactggagatcattctgcacctgccgctgctgtgtgaagacaagaatgtgccctacgtgtttgtgcgctccaagcaggccctggggagagcctgtggggtctccaggcctgtcatcgcctgttctgtcaccatcaaagaaggctcgcagctgaaacagcagatccaatccattcagcagtccattgaaaggctcttagtctaaacctgtggcctctgccacgtgctccctgccagcttcccccctgaggttgtgtatcatattatctgtgttagcatgtagtattttcagctactctctattgttataaaatgtagtactaaatctggtttctggatttttgtgttgtttttgttctgttttacagggttgctatcccccttcctttcctccctccctctgccatccttcatccttttatcctccctttttggaacaagtgttcagagcagacagaagcagggtggtggcaccgttgaaaggcagaaagagccaggagaaagctgatggagccaggacagagatctggttccagctttcagccactagcttcctgttgtgtgcggggtgtggtggaattaaacagcattcattgtgtgtccctgtgcctggcacacagaatcattcatacgtgttcaagtgatcaaggggtttcatttgctcttgggggattaggtatcatttggggaggaagcatgtgttctgtgaggttgttcggctatgtccaagtgtcgtttactaatgtacccctgctgtttgcttttggtaatgtgatgttgatgttctccccctacccacaaccatgcccttgagggtagcagggcagcagcataccaaagagatgtgctgcaggactccggaggcagcctgggtgggtgagccatggggcagttgacctgggtcttgaaagagtcgggagtgacaagctcagagagcatgaactgat

SEQ ID NO: 3690 - DNA, 1208 bp, Homo sapiens
caggccaggcctcaaggacacgaagatgaattacaacaagtcccctggctttgaggtgtccataagcccagggggagaaagtatccaaacaaatgatcatgttactctgtgaccagtgctctgatgggcacaggaggggtcagggagaaacactgtgtgatggtttttgagccaggccttgaaaggaaagaaactcctagaggagggtgaggggcatcctgggcagagagggtgcagcgcgagcagagaggtggaggctctggaacagtagaatgcttgtggagacggcaggaagaccacagcaaagggaaggcaggagccaggtctggaggcttggtttcaggcttctgggtgtggagcgccatgggaactggatgaatagtgcgttgcaggtccatgcacttgtcagtttgttcatttcctggaggcttctagccctgggtgtccatggcccttgcagatacttgctggtcaggaatgagccttctgaggcaagactgctggattgtccaggcagggctattgatgccagccccttaacttaattctgcccagacaagaagatgtttgaggtgaagcggcgggagcagctgttggcactgaagaacctggcacagctgaacgacatccaccagcagtacaagatccttgatgtcatgctcaaggggctctttaaggtgtgtgcaggcagggggcagctcatggcaggtccagtctttgatctaggcactgatgggtaaacaggagttccctaacgggttggtgttcagggacaggggaactgcgcacacgtaagacttgaagtggggtttaaataaatggggatgggagcagtctgtgatgggcactgcgaagccactcagccctggcgggattccctcaggtgctggaggactcccggacagtgctcaccgctgctgatgtgctcccagatgggcccttcccccaggacgagaagctgaaggatggtatggtctgccctgccccgccctgtcctccgcaccacccgatcttctctagctgctccttctctcctgttcttgtcactctttttttctccccggaagtgccctcttgtggcaccttctaagtggtccccttgggcagatgggcgtttcgtgagtggcctccctaattaactggctactttttagcaatagcatttctttttttttttttttttttttttttgagacagagtctcactc

SEQ ID NO: 3691 - DNA, 1160 bp, Homo sapiens
tcttggggtggcagggaggctaaagcatacctcaggacagtcagtggtgggtccagcttcggctggaggttctttctactgaataacttctacgggctctgtcattagcaggatttgtataatttgaagcagagctgggcaactgcagagcaatggggaagccagcccagtgtggtggcaagacctgggcaacttgggaccagcctgggctgtctcttgccagctgttgttatcagaaccaggctcttcacactcagatccttgggccccccatctcagaatgcccagtggttgaaaggatgaaacctggaatttaagtgacttctcagtgatgtgtgcccttctctgacggttccttgttcatcccatgtatttactgactgcctgctatatatgcagagccaaagagtggggcctggtcttgaactatctcctcatctgccccttctggcacctccttcctcctgggctctttcctctaataccgtcatcctctctccaacctggttaatcctgtcctttctgccctcaaatgggcaccttcaaagaaacaaatagaactactccactcgctccctctctccctccctttactgccactattgattgttatagtcacttgctccaggaagtccacttgctgagtcttactgcagacagagcccaccccctgagctgtaaaggccctagggcacatgtttgtccagctgcctcttgcagctgggattgttaggtcactatagcgctaccaactgcatataccactgtgggagtcgtgctggtggcggtagtggtcacaggtaccaggggcagcagtgaaggggtggctctaatgccaagtccagtgaccagtgccagggtgcccagtggtggcaacagtggtgttttcagtgtgatcttggacattgctcctgtctactcagctgctagtctgtgagctccctgatatcctttaagacagcgttttccagcagcggcactattaacgtttggggctaggtaatcgttgggtgtgtgagtgtgaagagggctgtcctgtgtgttgtaggctattttagcagcatcccggcctctccctgccaggtgcctgtagcagtcccccagttacgacaaccaaaaatgtgtccagacattgccagatgtccactgggagggaaaac

SEQ ID NO: 3692 - DNA, 1100 bp, Homo sapiens
gcgggggtaggcagctgggaagatgacgtaatgtgctcccagccaggcctggaggcggccagcggtcgcaggtggagggtggcctgttaacccttcactcccaggccagtggacggacttgcgtgtggcgcagatccaacggagaaggcagcggctcctttaaacaaggcggagaaggttaagatgatgaccggacggctactccaggcattcgctccgaggccgcggggggagggacctcactatgcaaatctgagctgctgatcgatgacgcgccatcaccccacgcaccgcttcgctcgcccattggctgagatgagcctggtcccattgacaacaaacaggggggcgcgcggcctggaggcggggccgcagggggcgcgggctggggcgggggaatcccgccccgccctttctgtgcggcgcccgggcgcaacgcaaacatggcggcgggtggcacccgtcggtgaggcggtgccgggcgggggttgtcgggtgtcatgggcggtggcgacggcaccgcccccgcgtctccctgagcgggacggcagggggggcttctgcgctgagccgggcgatggacgacagcggcgagctgggtggtctggagaccatggagaccctcacggagctgggcgacgagctgaccctgggagacatcgacggtgagtggtgggtgggtgggagtgcgggggccgcgcggggaggaaggggttacggcggcgcgcccgggtgcgcgtgcgcccaccccccgacagccccggttcgcgcgggaagaaccccgtgcgcacggtgcccccggcggtcctcaacccttccggcgctgcgagcgtgagcccgacccagctgcgccgctccgggaggccgtgggatctggggcgccgcggggccgaaagcggcgcgagggtcgcgggttccagagcgcggggctagggacgtcgcgggggcgtctcagggagcggcctaaggagagcgcgtggccgccgcctccctcgcgcgcccacacgcggtttccgtggtccgctctcccgccgcccgcgaccgcgcgtcgcacctgtcactcccttcctggccgcggggacgtctttgggattcccggg

SEQ ID NO: 3693 - DNA, 1209 bp, Homo sapiens
tattatactttgagttttagggtacatgtgcacaatgtgcaggttagttacatatgtatacatgtgcagtgctggtgcgctgtacccactaactcgtcatctagcattaggtatatctcccaatgctatccctccctcctccccctgtatttttttagtagagacggagtttcaccgtgttagccaggatgatctcaatctcctgacctcatgatccgcccaccgtggcctcccaaagtgctgggattacaggcgtgagccaccgcgcctggccttcaaagtctgtttttaatagagcagtcatttaaaaataataagtgggataagagagacagcctttcaaacatgggatgacaagaatctgatgtctgtgttttagcattaggcaaggattggagtccctggctgcagcaagggtggggctcttgcatgggtcgggactctggttgattgcagcatcgtagagcctaactgctgggaggtggggcaaccccagcgagaaactcctaggaggaagcacctccctgtggtggttggggcaacttgtggagcagggtgcttgagaaaagagcacagggcttagaggaaggagtaaggctcctatctctgtctgctactcgctccccacctgcctgagatggtgtgcaggtcaccccctctttggacttggacttttcttcctgtgtaaaaaccaccaccaagaccgcttttcaagcacttactgccaggcactcactatcccaggtgatttacatatattaactcacttaaaacagtgcttgaaatggctacctcacagggtgattttgaagattatataacacagtgtgtgaaagtagaagtgttaaaaggaaaaataagggagccacagtgttaatgaagttattttccagtaaaaaaaatcatgtttaaactttgtatatgaatatatacatacgtatatatacactgaagtaaatagtactgaaaacagcaacaacagctttttaagcaacattccagcaggttcctcttgtaccatgtatccctttttatcctaacactttgcatgcagtcctggcagatttattatttatttatttatttatttattttttggagatggggtctcactgtgttgcccaggctggagtgcaatggcgcgatctcagctactgcaaactctgccttccagattcaagcgattctcctgcctcagcctcccaagta

SEQ ID NO: 3694 - DNA, 2104 bp, Homo sapiens
gggcgaccggcgctcctgcaacgactgccagcagatgattgttaagctgggtggtggcactgccattgccgcctcctgaccaccaggctcagcccacccctccacctctctctcgatttctctctctccccctcagcatcttcccgctgagagtggtggggaagagccttgtcttcttagctgtcacctgccgaggcttctgggccactcaggccagtgcacccctgggcagagccccttaaagctgctgtcactagatgcccatggtccagggcctggtgggcgtgagaggataggtggcagggcagaaactgggcagccctgacttgatagcagcagggggagctcccaagctgccaagcccctgcctccagccttcctgagtttctctctcctgaaccctactctctcctttttgcttcctcagtttttatcaggctttctctgggggacagcagtctctgagcaccagggagcagttgccctcaggcctgtgcccagcatgccctcccctttttatacgaatgttttctaccagtgtgcttgggtttgccatgatgcgaggctgagttgctgtagcgtcttgattctctccctgggtctgcgttccctcccctgggcctgactgagcctgctcattgtttttccctttattacacaggacagccaggggaggaggggggcccagccctgggaggctggtgggaggcagggggcaggcctgcggatgcatgaaataatgttggcattattttttaattttttaaaaaataaatggtatcttatttaattgtcctgttccttcccactccccgcctcctaggatgttagcccaagctcagggtaggcccagggggctgggagaaatgaagccacccatggggactggggaccaggggccttcagcatggcttctaggttccctcctccccctaccccatctcctacctccacagtacagactgtccccaacttaacagtggttcaacttaaaccatgtttcaactttacaattggtctgttggggtattaaatgaatttgtgacttaggatattttcatttatgatgggtttatcaggaagtaaccccatggtaagttgaggcatatctgtatatatttaaacctaattaattcttgagctgaaaataaataaaccaggatggcagggaccaacccctaatccctccccagcggcaagcccctcttttcagagtgggcagagggttgcctatggtgggcactaggaatgaggtcccctgcctcgatgcgggtcctaggagaaaaagtcctacttttctgggtccccaggtgcagcacctcccggagactgtttctcccatggcctcctgagtgatgggccctgcctccctgtgcctcatcctcaggctggttggagcagagggtgggcaggagccccagcacagactggggggtgctcacagcagggccaccttgatgcaggctggaatgttatccctggggtgtgcttggaccccacctgctttctttctctcctgcccctcccctactctcactgtaatttatggaccctgcccgcctgcgtgttgtgtgtatgtcctgtgccttttctcactattgtttgggtgtgggagggggtggtttttcactgaaaaggggggtacacctatagctttcttgatgttcaatcaatcagtcactgtgtcccagacatattcaataaacacagattggtaccacccagcacgaggtgtgtgagggtctgtagtgcgactgctgtggtgcccagccaaggggctgcgtgacttggcaggcaatgggccagggactgagggcagccccccaactgctgagagggcccctggcttcagtctaatgggcctcccttgtccaccttccttccggtgcctggcgcaccctccagcctgggataaaagggctgtgggtggcactttgggggtcagaggtcactgtatccaggttccagcttgttccctggatgtaatgcaggctggctgacagatttggggtgctgaccctctcccccactgggtaaactgctccttagtttctccctccctgaagtcagtgatcctctgagccaggaggctcactggcccaca

SEQ ID NO: 3695 - DNA, 1349 bp, Homo sapiens
ctgtgtcctctaggacccacctccaggacctcaaggaagtgacacacaacatccactatgagacttacagggccaagcggctcaatgacaatggaggcctccctccggtgagcgtggacacagaggaaagccacgacagtaacccatgacgaccacttctctgtgtcatcacacatacccacttcacacacacacatcccaaataccaccaccaaccaccttcttcctctcaactctgtcccacaggcctgtctggtatttgtggagcatcttgtctgtgtgtgtgtgtgtgtgtgtgtgtgtgtgtgtgtgtgtgacagagagagagcgagagagcctgtgtgtgtgcatgcaggggtgaggtattttcactgccctccctggagagtcccttgtaagtttggctcctccatgcctgtccattatctgtctcctttccttgtgtcccaaaacaaagctgtttgcctcactcaggagatctgggggaggtttcatttaaaagtgctgggagcaggtgagccacaggcaactcttctctcggaacctgcacacaaactggggctatagagattctccaaggacagatggcagtggagctagacctgagtagggggcagggagttcaggacaaccctcctgtaagttgggggtggtctgggggtaaggctggggcttcctgggaaaaggaaggccatgagaaggcagagaagtaggccagagctgggttcttgcagaaagcatcagtgcctacaaatggagctccacccttcagtctgtgtcgtgttcagtgtcacaaagctaccacctgtcaccagagcctactgctgctctccactcaactggcctctgctgccaggccactgcctgtctctgcttccgactttgtcttctttctccctttccctccttccctcatacattgctttctctccctctcctgcgtgtctctgacatctctcacttccttttagatgaatctactttaggttcattcctatatttagcatttatgcccagtctacttccagaaatgactttagactgcctttcacataaaatcacaaaactacaggacagtacaaacagattgccagagaaatctgggtcaaagaaaggaataggaaagaaagtttctgtagtcaagcacctgaacaggccctgagctcacaggcagccaatgtaaagagggaaacacagtgagttatgcagttcccagtgtccagttaaaggaagcacacatgctagtcatgtgagacaaccttttattgggacatcaggttctagaactaattctaaagaagtatcagaaacaatatacataatttgtctttcttagtaatttggcttca

SEQ ID NO: 3696 - DNA, 1154 bp, Homo sapiens
ccagccactggataaaactgatgccaagaacaagtctttttacccttacatccatgtagtaaataagtgtgaacttggagccgtttgtacaatcatcaatgctgaggaagaagaacagaccaaattagtgaggggcaggaagggtcagaggtcactgacccctccacctagcagcactgaaagcaaggcgctcccggcctcgtcctttatgctgcagggacctgttgtgacagagtcttcggttatggggcacctggtttgctgtctgtgtggcaagtgggccagttaccggaacatgggtgacctctttggacctttttatccccaagattatgcagccactctcccgaagaatccacctcctaagagggccacagaaatgcagagcaaagttaaggtacggcacaaaagtgcttctaatggctccaagacggacactgaggaggaggaagagcagcagcagcagcagaaggagcagagaagcctggccgcacaccccaggtttaagcggcgccaccgctcggaagactgtggtggaggccctcggtccctgtccagggggctcccttgtaaaaaagcagccactgagggcagcagtgaaaagactgttttggactcgaagccctccgtgcccaccacttcagaaggtggccctgagctggagttacaaatccctgaactacctcttgacagcaatgaattttgggtccatgagggttgtattctctgggccaatggaatctacctggtttgtggcaggctctatggcctgcaggaagcgctggaaatagccagagagatggtgagtatgagaaatctcttaccagcttgggatttttatttcatttggttccttttcttgcatgtttttgttcttacatgtcacatgattattcctccaaattaaagtgcctatgcccatgtgatggacagaaaatgaaataggtaatttggaagatttgtatagacttctaaaatcgtttttcattttttgaaatgtataatgcttatgaagcatattattatatttcaagtttcttgggccacatcttttctaacgcacactttccagttaggatatttattctttggatctgtttcataacttatcctggggcagatcatcaacatcatcatcttcatttctttctctc

SEQ ID NO: 3697 - DNA, 1128 bp, Homo sapiens
taacagcaagaatgtccccacctgtctccagtgagagagcaggaatatgccgggcacagtggctcacgcctgtaatcccagcattttgggaggccgaggcgggcggatcacctgaggtcaggagttcaagaccagcctggccaacgtggcagaaccctgtctcttctcaaaatacaaaaattagccacgtgtggtggtggtgggcgcttgtaatcccagctgctcgggagactgaggcatgagaatcacttgcaacccgaaggtggaggttgcaggactccagcctgggctacagagcaatactccaactcaaaaaaaaaaaagagcaggaatatcaacctccatattgtccctggggaacaggtcggaggccatggtgcccacagtctcccggcttgggcagatgtggctgtggctgagtccttcagcggcgctggacccctggcagcgccacccatggtgcagggaggctttgggatggccctgcggatgctcacacttggcttccctctccctgcggcaggagagcctgtcccgcctcctgtccacctgtggcctcgtccagtctgtagagttgcaggagaagccggacctggctgagagcccaaaggagtcaaggtcgaagttttttcatcccaagccagttccggtgagccgccaagcccggggttccactagagtgaggggggtggggcactgtccccagtgtgttgggggagctggcagtgggacatcagagcattctctggtcctgagcccatcctcaccgtgtgtggtgtaagagactgtctgggtgacaaagcctgcgattctttgccagatttgccacatccttgcacttcctgcctggctttttctgtcccgtgttaaagctcacggaccgtctctgctggccacctgcagggccttccccggctcccctcctgcttccccactgagggagctccttccccaggcttgggggccgggtctccaggagcactgttgttcacagctttcccagtggccctggagcccacacctcctccccacacagtggcatctggcatggtgtgtgcgcccaggcctggcttccaaaaacctgccctggcccagggcgacccctgtgtttcaccgcatccctcccgt

SEQ ID NO: 3698 - DNA, 1137 bp, Homo sapiens
aaaaatcaaacaaaaaccactaaaaaaccatacatatatgatataccaacaagattttcttggtggggggcctaaaccacctgattctcaagttcacgtggaaaaattacacaggtaagaatagcaggaggtcaggcacctgtaattccagcactttgggaggccgaagtgggaggatcacttgagaccagcgtgggcaatggagcaggaccccatctctacacaaaaaaactaaaaaattagccaaggccaggcatggtggctcaagcctgtaatcccagcactttgggaggccgaggcaggcgaatcacgaggtcaggagttcaagaccagcctgggcaatatggttaaacctggtctctactaaaaatacaaaaattagctgggcgtagtggcaggtgcctgtaatcccagttactcgggaggctgaggcaggagaatcgcttaaacccgggaggcagaggttgcagtgagccgagatcgagccactgcattccagcccaggtgacagagtgagactccgtctcaaaaaaaaaaaaaagatgtgagggtgatctggctgcgacatctgtcaccccattgatcgccagggttgattcagctgatctggcggctaggcgggtgtcccctcccttccttaccgctccatgtgcgtccctcccgaaactgtgcactcggtcgaagaggacgaccatccccgatagaggaggaccggtcttcggtcaagggtatacgagtagctgcgctcccctgctagaacctccaaacaagctctcaaggtccatttgtaggagaacgtagcgtagtcatcccatcaccctttgctctcttttcggactcggcccgcctgcacccaggtgaaataaatggccttgttgcgtgtacacacacacacacacacacgcgcgcgccgagcatggtggcacactcctgtagtcccagctactgggaagactcaagtggaagggttctttgagcccaggaggcagaggctgcagtgagccgagatcctgccactgcaatccagtctggccaacacagcaagaccctgtctcaaaaaggaaaagaaaaaagactagtagaaaaactctgtaaaagagccatgaagggagacggtcccgtcagatgcgaaaatcc

SEQ ID NO: 3699 - DNA, 1282 bp, Homo sapiens
cgcggctgtggtcgggggcgggcgcacccggtcctccgcgtcgctcccggatcgctacctcccccgcctcgagctccactaggccgaggaccctaaaccccgaagaaaggaaaggcctctcaccgtcctttcgccgccgccccgcgcttcctgatgagttcgtccagggagatgtccgccatcttgctccgccgagcaagccgaaagcagtcgagaccccgcgagcccgccccttcggccgctagggagcgacgaactacttccggcgtccgcggaccaactctcgcgacagccagctcaaagcaggcaagaaccggaaggggcggggacgttccccgtgagccttcgcggtgctggctgctcatctgcatacggaagttcggcacattatgaattatttattttcctcgagggaaaaaattaaatgaaaagcaacaaaatacattattaacaagtgagacaaacttcaatggaactggatcatgacctcaacagtcaactacgatagtcatcatacgcctaatgagaatagaattcattacctaggaaataaactaaaaacgtccttatgccttaaacttatgagtaaggaaaataacgattcggggtgacgcccgaatcctcactgctaatgtgagacgaatttttgagcgggtaaaggtcgccctcaaggtgacccgcctactttgcgggatgcctgggagttgcgatctgcccgaccttattcacgcctaaaaagtagactgactgtggggtggtcgtgttttttgtttcttgttggtaggtggtgaatgcgtttttttcgttgttttctccgttactcaggctgccagttgcttggcagtcttgtcgctggctgtggacgctctgcacttcatcaccgtccccagctgcgctttgagccggtctaaggttgcccacagtattgacgttgggacccacgaaactggcaatttccatgtgtgcggccttacccagttctcccaaacttctgcgtataaccgcttctctgtgcttcagaaagataagtccggccccggcctcacacagcagctcagttcgtgacagcgtttaatatgtaaaatggagcaaataatttatagggcgttgggagagttaaagagactaattcatttacgtgttaaatacagggaatggcttttgcattgatataaccccagcctccagcatgcgccagacctgacgtaggtgttcggcacatattttgtccaatcactctaaaaatacactccatgcccttagaacaggtggggttatgtcc

SEQ ID NO: 3700 - DNA, 1473 bp, Homo sapiens
ttccacccccagaggaggagccgctggtgctgatgtgtggccccccacccatgatccagtacgcctgccttcccaacctggaccacgtgggccaccccacggagcgctgcttcgtcttctgagggccgggcacggtcacacggccacccgccccgcgcaccccacgccctgttcacgctcacccagtcacctccccacatcgcacactggggccccgggttcagcctggcctgcccgtgccctggtgaatcacctggctgagcagttcccctggagccccttcgggagcagggctgtgtcccagatgggccacggctgagccttcagagtacgtcctgcctggcacttactggtccttaccagagacgcccagccccatccctgtcctcatgacccctcgtccaccccccacacacactataaggctgagggctgccagcagccccgtctgcccaccattcccggccgtggaccatagtcgggatgtcagcagacacacatgggcagcccaaagctgcaggtgccagggcccaccccagcctcgcctgtcacccccactcccgcctcagggccaggcccaggcctcaccacctgacgctgcatgagacattgacaccagaaagccctcttgggggcactgctccctaccccagggccctggccagccgggagcttggctctcctctggctagagtgggaagagggggctggccatggggccctcccagaacctcagcatttccttccagcccatccaaacactgaggcagccttggggaaccccgagctggggggttggcagcccactgcaccgcctcagggttttggggtcctgggctggggccaccatccctgatggcagaactcccacaaccacatgtatttattcctctgtcctaaaccgtcccctccttccctcacccccagcacagggggattctgagcagtgcctcttgtctgagggacatatcagtgacctcgacgttgcctttagactacagttgtgttagcctcttgcgtattggctttttcagagtcatttatgagcagaaaaaaaaaaagtaaaactttgctaatattaacccttctctagctcctcgagggtctgtgacctgcaacacaaggggtggggtcaggaaagggctggggaagacctagcattttttttttcttttttttttttttttgagacggagtctccctttgtcacccaggctggagtggcatgatctcagctcactacaacctccacctctcgggttcaagcgattctcctgcctcagcctcccgagtagctgggactaaaagtgcccaccaccacacccagctagtttttgtatttttttttttttttttttgagacggagtctcgctctgtcgcccaggctggagtgcagtggcgggatctcggctcactgcaagctccgcctcccgggttcacgccattctcctgcctcagcctcccaagtagct

SEQ ID NO: 3701 - DNA, 1196 bp, Homo sapiens
tacccaggaaagatggggagggggtgcccagctccgcctatgggaggaaggtgggctggggggagtggagtctcctccgagaagcccatcctttcccgtgctgctttgcagtttagcatggggcctgcatcaggctctgcactcccacgctggaggccagagattcatgtgaatttccagtcgtgggtcatggccagagcatcctttattctctttcccaaggtcgggctctctgttcaccctcttctgcctctgggagcctctggactcatttcttccctcctgcgctcctcagcgggaagtctccatctccttccttcctgtagattcctcttctccacgagaaagttttagaggcttttccaatcccccaaggcaagactttgaattacctttagttttaggccctgatttatgtgggtttgacaacaggctttaaaaaagtttttttttggtaaaatgcacataaaatgtaccatttgaggtctacagttccgtggcttaaatccatttacactgttgagcaaccatcaccaccacccatctccagaactctttcattccgaagctgaacctgcacccattaggcactcactcccaattcggtccttcccagcccctgcagccactgttctacttcctgtcgctattaatttgactcctctaggtgcctcatctaagcaggatcatacagtatgtgtccttttgtgactggcatatcacactagcatcatgtcctcaaagttcatctgcgttgtaggctgagtcagaatttcatgtatatacgcatgcatacaccacattttctttatcccttcatgtgtcagtggacgtttgggttgtttctacctttagagacaggttttttttgttgttgttgttgttttgtttttgagacagagtcttgctctgtcacccaggctggagcacagttgcatgatctcggctcactgcaacctccgcctcccaggttcaagcaattctcctgccttagcacccccgcccgcctccgagtagctgggattacaggcgcgcatcaccacgcccaactgatttttgtattttagtagagatggggtttcacatgttggccaggttggtctcaaactcttgacctcaagtgatccacccacctcaacctcccagcatgctgggatttcaggcgtgagccaccacgcgcggtctagagacaggat

SEQ ID NO: 3702 - DNA, 1139 bp, Homo sapiens
ttgaaccccacaccctcctgactccacagctcaagcgcctttccaggcctcagtctaagagcttgagggtggaagaacgaggcagcttgcagcagctggctttggggtgtcctttgtgatgaaaacacccctccttttagggagctcctgcaaactgatgccagcagggccaggcgagcatggatcacgtggacacggaggccctttgtcctgcttcgtccgtccaaccctatgccagtgagctccacgaagcagtgacgcctgcagagactctggccacaggaagtgtcagtatcctttggtgcagctgtgaatggtgcccaggagctgagcgtcttgtagtgcctgaaggtaacaacaaaaaacagaataatgggactcttatgtcaaagcgacacagagccaagtcagagagcccccagtggccacagctggagcagtttgagctacaaagtcaataaagtaggacaggttgagtattcctcttccaaaaatctgaaacccaaaaaaatctgctctgaaacctgacactttgagtagtgatgggacactcaaaggaagcactcattagagcattttggattttggattttggggttagcgaggctcagtggataagtataatgcaagtccttcaaaatacaaaaaatataaattccaaaacatgtatggtcccaggtatttttttttttttttttttttgagatggaatctcactctgttgactaggctggagtgcagtggcgcaatctcagttcactgcaacctctgcctcccaggttcaagcaattcttctgcctcagcctcctgagtagctggcattacaagcacgtgccaccacgctcggctactttttgtatttttagtagagacagggttttgccatgttggccaggctggtctcgaactcctgacctcaagtgatctgcccacctcagcctcctaaagtcctgagattacaggtgtgagccgctgtacccagccttatcccaagcatttcggataagggatactcaatatgtgttgcatcatagaccaagtacagagtaaacatttcttagtccctgctgatgcaaataaatgattcaataaatgaataaagacgagacaaatcttccatgcagaagagtttcaaataa

SEQ ID NO: 3703 - DNA, 1154 bp, Homo sapiens
agacgtttacaacagccagtcactcagagcgtctcataaatggtggtatgtgttaatgggaaaacaattcaaattataaaaataaagtattcgcaattttcctaaaatatattactgtatataccaatatagtgtaattcgaggcagagatacgtaatcctacatgaaatcgattctcaggtggttctgggtagtcttgaacgtctttaggatgccatggctaatgtcataagtgtgtgctctttctctgctccattgcatgcttcagatgcatgagaggagcttcatttcctgacgttgtaaaagctctttcatgtagaattcaggttaacgggttgcactgccaagaaaggaagtaggtacagaggaagcatatctcagatccaagctagagattaggtcttgtgttttgtaattaattaattatattttgcttaaaaattgtatttcttatttgacaaaaattatatacttatggtgtacaacatggtcttattttcagatgcataatacatttctacctgcctgttgtacagtaaacctcttgaacttcaggtgttttttttttttttttgtctggtttgattttatgaattgccttgactggtgactaggtggtagacgtaggtgttgagctgagtgatatttgatggctctttcactgggaagatacatggggggagggacagtttaattaaggaggaaatggttggtcttggaaatgctgtatttgaaaggccttggtacactcaagtggagtgccctggaagaccactaggtatacaacaggaattatggcaaggatgggcacagctccggcagctttcgtcatgtgggggattgaggccatgggaatgggcgacaggaggcatgcaggtggagggtcctacgaggagtgagaaacaaagctcactgcagaagccaagggaagccattctgaaggaggggcagtcacctgtgcaaccgaaggaagttcaagaggtagaaatagtacagaccataatctacaacttaagctgaagggatgagggaaggagagggcaggagcccttgggcaactaagggaaattaagtgtaggtggataatagaaatccacagataattttagctgtaactcttagcctgaagttttcatatattaggacaattaaat

SEQ ID NO: 3704 - DNA, 1111 bp, Homo sapiens
ctttcccaaaggctcttccaacccgtgggttttggggtccaccgccaccacgagagaggcttttgaacaggtgcctggctgtgttcagaaggaagctggcctgtgtgcttctctccggtgggctcagccgacgtgtgagacttgttctgttaccaaatgaaccgggctgccacgctgtgacaggcgtttgtcctctgctttatttttactttgaagctcaaatgcgagtactaagtgttcacctcagcgttcgaatcattggcctgtaaccctgtgggctgcttcacgagaattcaggacctgcattttcattctaaaaagaaatgaacagcttgtgaaggagttttttggcttcatagtttctattcatgaggtagtgttacttctttatccccctaaagacaaaatgaagataaagggggattgccaggaatgggtttaaaagcacaaatgtggtagcttatcatctacaccatggagagtgaacccttacgaaatgaaagtcaaatgagaccatccgagaaaaagatgcgcataggcatttgtaccatgatcaaccccacgcacatgaaaactgtgaccaagtgacgtgcctgggagctttgacacacgagccgtgtgaattcactaggaaacatgtaataaagtcatggaagagaaaatcgtgtgtaaactttgcctttaactttagaccgcagtatattataatacatttgatatctgaaatatctttacttttttaagagtaagattccatatgtctgtctggaagggagccatggttattcacacgaatatccctgtcacttctccagaggtgtcaggtaactaacacgagcattctttgaagactctgggcacatgaatgatacacagaattgaatgtttaaatttccactgagtcctcatgaatcatttgagactagtaccagctgatcttgtgtacaggctcagggtcagtgcccaagggctcccgcgtgtgtgttctgatcttcagtgcgtagcacattctccatttagaaaagagtggtcagaataattgtggacggtacagtggctttttaaaactacagtctttaggtgtaaggtttggcgccgggagcaattttat

SEQ ID NO: 3705 - DNA, 1201 bp, Homo sapiens
atgttgcccagactggtctcgaattcctgggctcaactggtcttcccacctcatcctctcaatgtgctggcattactggtgtgaaccactgtgcccggccaagcctttctaactaaatgctaattgagctccttctgtatgccactggggcactgtgtatttctctctctgtgtctgtgggagcagggaaggggaggctcaaaggtgagagcacccccacccccgaggatctcgtgccctgggccccctgcgcacagagccttggcccagcccacccctcacccacaggatggtgcaggagcagtgctgccacagccagctggaggagctgcactgtgccacgggcatcagcctggccaacgagcaggaccgctgtgccacgccccacggtgacaacgccagcctggaggccacatttgtgaaggtgagagccaaagaccatgtggggtcgctgcccgtccccactagtcggcagacccaggccctcccagccaagcggcactgtctgtcagcgctccctgcctcaggccacctttctttgtgagcagctgggggttcctgggccaggagggaggtggaaaaccccactgtttctccccctccactgtagccgtaaaccccggaggacacctggggccgagtctcccacgaggccggggggtgaagtgagctggccttgccctgagaaccgcctgtctccaggcattgggcagatgcagaagtcaaagcagggctcctcctgggcttccagaatcttcttctcaattcagggtcggcaccctcaccctacccaggaggctctcaggcttctctacccacagactcgtcagggtccagaggtaaaaatgggccctcactaagacctctgataagatctgacctctataacgaccctaaaagaggaaactgaggttcagagaggcccagcctccaaaatggcctctctgcagtcctgtcagggacccagacgggatcctgccctgaaggtaagctgtgaataaatggcatagtcctcttccctgagtgctcctaggaccctacgtgctagcaggtcactcaggaccgctatggccgtggaagggctgtgtctttgcaagaggtggaaaggtgcctgacagcattgcctacaggcagtaaacccaaggtgtccaggccatccctcccttaccacccagccagcaaggaaaacaagcccggccag

SEQ ID NO: 3706 - DNA, 1193 bp, Homo sapiens
tttcaaccatttagggcagcaattttcagaaaagaattttctagttagaaatactacaaagattctagtaaagactttgtggccaagcttaactaaggccagtatttctgagccagtcaagattcagattgcaactagtacatatttttctgatgttttactttaagtcgttaaagagttcatcaaaaggtgtgatgctattaaagcctagatctttttacatcttttgcactttgtgtggactgggactgtttttgccaagaatgcatggaatggggtaaaatacaataaagcaaagaatctgagtcatgggaaacttcaggaagtactcaaagaaagctgttggaagcagttagctctgcatgtaaatataacctctactgctagggttgctatatttttcctgtaaagagccagataataaataatttaggctttgtaatctctgtcagatttctcagctctcccattgtagtgcaaaaacagccatagacaatatatgaatgaatgaacatgtctaattttgtcttttttaaaaaacccaggaacttggatacgattggtgttgctgttgatttgattcttctgtttcgtgaactgcgagtggaacaggaatctctgttgacaggtagcatgcaatataattcatggattatttatatctttataaagggttcaaaaccagtactttgagtattaacatcattcattgaaacacatgttctgtatttcatgagatagggaaactttaatagtgaattattaaagaattataaagttgtatcaacttcccttcctgaatggctgaattttgttcctttcacatttgtatgttgaagtctgtctgttccagttgctataacaaaatgccttaggctgggtagtttataaacaacagaaatgtattgcttacagttctggaggctggaaagtccaagattaaggtaccagcagattgggtgttttgcgggggctgctctcgtcttcatagatggtgcctcttgctttgttctcctgtggtggaaggtggaaggcagaaggcataaacaagctctctgggccccttttataagggcactaatcccattcacgagggctgcaccatcatgacctagtcacttcccaaaggccccatcttatactagcaagttggggattagatttcagcataggaatttcggaggggcacagat

SEQ ID NO: 3707 - DNA, 1329 bp, Homo sapiens
gtaaagtttcacagtaaagactaccaaatgagtggttaaagcacctggctcagggcacagattgaatcctagcttagactctcagtggttttgtgacactggacaagttaattaacctcaccaagccttatttacccacctttaatgtgaaactaatggcagtacctgcctcatggagtttttgtgaggattaagtgatacaatgtgtgtaacatgcttagctccgtagaaaatggtgaatgaatgttagcccgtttcactttgctgttgctagtgtcgtcgatgtgttcatacaaaaaactgagcatgtctaaaatgtccaattattttaatgttgaaagtaatggacataaaaggtgcattaagcaattctagtttctgtggccaagacacatcaaagaaatgaagaatttaaaaaataggtgattgatgaagattaactttattcatgtttttcctagctagacattagaagcaaggtaaggaatttaaaataataatattcccttaaagttgctttcctaggtatttttagcattgtataatttaagtattatagattcatgcagaaatcctttatgttttacagagttacactgttagaccttatgatagccaagataacgagtgatgagccactcaccaaggatgacatccctgtgtttttgcggcatgctgagttgattgcaagcacctttgtggatcagtgcaagactgtgctcaagctggcctctgaggagcctcctgatgatgaggtaagggaggcagatttcccaatctcgggtaaaagagaatggacagattttctaactcagccaagtcctgtatgagaattcttttttaaaagctttaaaaaatattatgtaagtaatgtatccatatatgagaatagttggaaaatttagataagggaaaacagtgtccttattcctaccatccagagtcaatgacttaggcaaattctggttaattttctagacagatgacatcagatacatgcacacagacgtagacatgtgcacatatgtatctattaaaagtggagcctttctgtgccttctgtttgcaggttcccattttttcttcggaatgtaagctctaggagggcagaaattttgactgttgtgtccatagtactatgtatatggtaggcactgaacaagtatttgctgaatgaataaataaataatacattgtaaatgtctttttaaataaatgccaacataggctgggcacggtgcctcacacctgtaaccccacttctttgggaggccaaggcgggaggatcgcttgagcccaggaattccagatcaccctgggcaacatggt

SEQ ID NO: 3708 - DNA, 1181 bp, Homo sapiens
tagcattttcaaacagtactgtctttctaatctaccaagatattgcatagaagttcatatttacccagaaattatgcaagttcttaaagccagagttttttcaaccacagcattttacaggatttctgtggacaagaaattaatgtattttatgggatatttgtatctttaaagtggaatttgcatgctgggaatgctttaaaaagaaagtatttgcataaatgtcatgtacatagctagtaattttgaacatttattccactgttggaatgtctttttgcttgaataagaacttttctgactctttgctccaagaagacacataatgacacataatcttgcattcttgatggcagatgtctgctgttagtgaaaatgatgagtcgtgtacatatttcatacttctgttttgttcttcatagttttgtttttctctttgacttattacaagcacagactctttaaatttattgaaatattttattctcttacagttatttataacagttaaataatttctcttaaaatatgctaaaaagttatgttttcttttctttctaggaggcactggctacaattaggcttctcgacgtcctgtgcgaaatgactgtgaatactgagctgctcggctatctgcaggttttccctggcttgctggaaagagtgattggtgagtgaaatatcacacattgtatttttagctaagaaatctttggcttgtcatactgtaatataaatccaaatacaaatccttaattttcagtgtactttgggaattttgtgaatatatttttttgagaggaatcacagtgttgtaacagttcaggcaggccagataaacctgagcccatgtgtttgttcagccacttcccttctgttaactgaagattccttctcagtaatgtgaggataacaatgcctgttatgcatatagtagatgtttcatcaatataggatgtgatgaagaaggtggggcaggcaggtttgcgatgatgattgtggttttatattactatagctttgtaaaatgtggcagtaaatttttcccatttacatttagtgaacacatagaatggtgttttatacatattatatatacaaatcttatgagaaaaaggttttaaacaagaaaccattgttaaaagtattaccaaccttgctaaaaagctgtttgcaaaata

SEQ ID NO: 3709 - DNA, 1132 bp, Homo sapiens
ccatcctcactgataagagccccagtgtgcggagtggattcctgagccagttaaaaggttgctacagcagtggaggcctggttggagggtggtgataagcctggaaataaaaggacatatgtgagagacagtaatttgataaagagtaatgaaagaggaagctttctttcaggtagcttattctgtttcattattgttgttttccttttgggaaagaagttgaattttcattgttggcttatgttttcaagggtgacctcagtattttattttattttatttttttgagacggagtcttgctctgtcgccaggttggaatgcagtggcgtgatttcggctcactgcaacctccacctcccaggttcaggcgattccccagcctcagcctcccaagtagctgggactttaatgtttttatattggtgattttgagcagagactgtattaccatctaaaacactacaagcctagcatgtaagctccatgtctgtttgctcctcattctctccagggcccctggcacagttccgggcccacagtgagtgctctgtaaacttttagggatgaacaaatgaatatttttaaatctgttcattgttttcacagttaaacttttctaagcacttatgtaatactgtgtttacttaattttcatttctcaccaacctttatggaagactaggtgataactggttaaattgtaatacagtatcataggtataatctcgaaaaggtaaaaatcaaatgtaacgaagcattataatccagtgactggaacattttatgcaagcctttgctctttatttatctatttttttatcatacacttcttcccagtttttgcttagtccttgttagcagttacattaaaatctgttttaagttccacctcagggaatatcaaaagttggttacttttctaaatgggcctttaattaaaattttaaaaaattagaccattgtgttagattttttaaaatgttggctaaaacagaaaaggttgatttcagtgcagttgggctgaaactatacttaaatagattaaagtataatctggcttttaaaaaaaacacatctgactgggatgaagtagttgtggtcttaactgaagcaggtgaatggaccatattc

SEQ ID NO: 3710 - DNA, 1180 bp, Homo sapiens
gtgactcatgcttgtaatcccagcatgcttgaagacatagcagtagggactatcgacaaagaaacacacagagggaaaaagaattccacatttgggaggctgacgcatgaggatcacctgaggtcagaagttcaagacaagcctgggtaacatggtaaaaccccgtctccactaaaaatacaaaaattagctgggcatggtggcctggggctgcaatctcaactacttgggaggctgaggcatgagaacctcttgaacccaggaggtggaggttgcagtgagcagaggtcatgctactctcaagcctgggcaacagagcaagaccctgtctcaaaaataaataaaataaaatagcccaatcaagcttcattgaaaactgtaatgcatgatatgaaaaatgcattagatgtaatcaatagaaaattagacattgcagaagaaaagattagtgaacttgaagacatagcaatagaaactatccacaaagaaacatacagagggaaaagaattccacaaaatagaggacatcaatgagctgtaggtcaacttcaagcagcttaataattggaacctctgaaggagaggaggtaggaaatggaaaaaaatttcgaaaaaataatgatcaaaatttttccaaaacaatgaaagctataaacccacagatctaaggagtctacaaactccaaacacaagaaccatgaagaaaacaccaaggtacatcatactagaatcgctcaaaaacagtaataaagacaacatcttaaaagcagccagaggggggaaagacgtattacatagaaaggaagaaaataagaatggcaacagacttcttatcagaaacaatgcaagtgggaagacagtgaagcaacatctttaaagtactgggatcaaaaactgtcaaccaatacccgtatgtaaagcaaaaatatatttcaaaagatattttcaacaaaaatatactcagtgaaatatctttcaaaaccaaaggttaaataatgacattttaaaacacaaaagtaggggaaaaaacatattggcaacacatttgctctgtaaaaaaaatgttaaagaaagtcctccttgcagaggaaaaataacagatgggaatgtagatctacacaaacgaatgaagaacactgaaaatggcacctccatgggtacgtatgcaagattttcaaaa

SEQ ID NO: 3711 - DNA, 1180 bp, Homo sapiens
cgggcaccagacggagaccagacagaggccagtaccaggcggggctgagaagttagccggagcatcctaggatgccaggaagccttccagaggtggcagccccgcagcccccgctccttcccacagctgacctccagggctgcagctgcagggcccctgcgtccagccctcggacctgccacgtcccagggccccactgccaggcaccgccccgtgccggccctgtacaggccacatctgctgcagcagccatgccagagctccgcctcccgggctccgtccccatggaaaccacggtggggggggctcctcctgcatttggcccgctgactggtttccattagagccggcctgctttccctgagctctgcccctgcagttcaaggcttcccctgggggtttcttcccacatttaccgagcaccagccgttccgtgccagggaacccagcggtctgggccccgcccgccctggccagcacccaccggtggtgcctgatgcccggcaccgtggctgctcccctgtcctttcttatcgaaggccagctgctgctgggtcctggtgtcgtggactcagccctggatctgagtcagggcactgggctcccatcctggctgggccgtagaatcactggtgggcacttgaataagccccttcctctctccgggtctcagtttacccatctgtaaaatgaaaagctccatctatttcttgagttccttgcaatgccgagaaagaaagacaaagagaaaatgaagccacagtacactgttgctgccgggttctcagaactgggatttttgtttgctttcaaagagggttttttttttctagggaaagagtcatggaatttgaccagagatgattgtttgaggggccaagagccagccagagcccacggacatgcagcatggaaggtgtagccagaagcctgggcagcgatacccgccggtccgccttggcatctgcttggcacccagtgacctggctgtgaacacagtgagcggaggcaggaagtgtgcctgcgccggaatccgaagggctctggaaaactccccaagaggtttccggaggtcagaaatgtgggcagaaaatgagatccagcttttaaaaacctggccgactcatcccccgggagcctagggaggcctgggaaggtgcctccaccaccacgtggctga

SEQ ID NO: 3712 - DNA, 1198 bp, Homo sapiens
gactgtgtccaccctcaggtcagtacagtttgtgaatgttgatgaaaattggggctccccacatccctcccttctggctccaccctctgccgggcgtgcctgaaactggacacacacacacacacagcacacacgtgtatatgcaccagccccagagctctgggggccaaggagccaggcaggtgcttgctgcccattggcacgggctcagctggatctagcccggcctcctgctccttgcccctaccagcctctttctgcggccaccagcctctttctttctgcaactgagggaccagggctccaagcagctgggtttggtccaggtctggccctgttttttgggctcccttctgcctgagttgggtgacactcctgtttgcaaggatccagctgtctcaagggccctgggaggggaggccaggggcagcctaggggaccagtgactacagggcaatttgcagtacctgctgggggctcagcaggtaagatgtcccctgcctgctgctgtctgtcatggctgtctggtggccatggccgggggcgggcttgtcatgctgggaactgctcagaggctgcggccagcctgaggcccctcgccctggcgagccagcccccgagtgcagactgtcgccgatgattcttgcctcctggggcatccgtgcggccatgtgggttgggcaggactggcattctcccctccccaccgttgccatggccaggggcgggcccacctcccgaggctgtgcggagaggaccccaggctgctgcatgtgagcagagcagccggtgtctggcccggacccctctgccatctggggcccggcgtgtttacaggtcggccttgcccgccagactctgcagacgctgccccggggcctttgtgtctgcacgcagggctgagccaccagccgagcggagagtggggagggacacaggtggggagtagggggaggcccctgggggaatcagggaggaggggcaggacagaagagaaaggggatgaagggtaacagaggaaggagaacagcgtggggacaggagaggggcagggactggggaagaggagacacaaggcaggacagggcagggcagcccttggaactgtggggctgtcacagggataccagcctgggggagcagctaaccccaggcatctgacagggacctagtgggtcttggccaaggcgatctggtc

SEQ ID NO: 3713 - DNA, 1244 bp, Homo sapiens
gtctaccgtgctgaccagggtgaaggcacggcgagggactcctcccagacgtgcctcttgtgtgccagctggctgtggctcgggagcagacgcaggcctctccattgtccaggggagcctggcggcgcatccctcctctcccacctcctggcacttccagctgggtgtcccacatgttggattccgtccccaccacacttccagagaccggagaactgtgcagggcctaaggccgtttggatgaattgtcaaaacaagatgcttccagttacagcggcaggagcgggactgggagcacgggctgacggctgctggtgcctttcttcccacctcgcttgcctgtttccgcttgacccttcctccagctccgatgagaagagtataaagcatcttcctaacgggtgtgtttgctatacgaacataatggacgtgaagtggggcagaaacccagaactcagcattcaaggatgcccaggagagctgtccctgttttaaagagctgtgttttgttttgtttcgcatttagagagcagacaaggcacccttctgctgcgctgatacgtttcttacactgggccattttagacccccagggaaacagccttcctggagcgttgtctggaggttccagggacagggcagcctcccagagccgagcaagagctcaaggtacaaatgagagatttgctataccgtgagaagtcaacaacttagccaccacttccccgcaatggaccatgtaacaaatacctcagcaggccctgcaaaaggccatgctagagctgaggcgcacagcctgtggcctctgtagttagggcaggtgggatggagactccttgagtgcacacacctgagcctgcccacacacaggggagcagcatctcgtatgacgtctggaaggaacttcggttgtgtaaagggagccttgaagatacgtgcaaaaggtgctaccccaatttggtgaaactgacattgggcacgtcttgggcttaggagaagcggccgatggtcccggcctgcagtgacaaacccccctccccgcaccgcccccagcaccccctctcctcttcacctcttcctgctggccacgaggaagccacttcctcagagagaccctaccagatgcggatggaaacagatgcaccaaagcaagccctgatgaaaccgcgacttcctaaggtctgtctcctctgaacttgcacctgggcctctctgtgtttggttccaagcacttcccacctcaa

SEQ ID NO: 3714 - DNA, 1211 bp, Homo sapiens
gattttaatatactttgtgagcttagtaacatttttttattcctcttaagataaactttttgaaaaaatatttgggaactaggccaggcgtggtggctcacgcctgtaatcccagcactttgggaggccgaggcaggtgaatcacctgaggtcaggagttcaaaaccagcctggccaacatggtgaagccccgtctctactaaaaatacaaaaattagccgggtgtggtggcacatgtgtgcctgtaatcccagctactcgggaggttgaagcaagagaattccttgaacccaggaggcggaggttgcagtgagccgagatgacaccactgcattccagcctgggcgacaagagcggaagtgtgtctcaaaaaaaaacacaaaaaacaacaaaaaacaaaaaacaactaatattaaagagcacagtctaaagtgtagggctggaatgaatgaatgagcccactaggcaagcaaaggctttcagggcaggtgtccctccgtcccacgagccaggcctccgcaggctgagtactgagtgctgtctgtctgaccaggacgtcatccactcgggcagcgccctcctggccccagccaccagggcggcgtgggagcagatccagcggagcgagggcggcacggcacagctgctccggcgcctcgagggctacttcagcaacgtggcacgcaacgtgcggcggacgtacctgcggcccttcgtcatcgtcaccgccaacatgagtaaggcgctggctgcgttgggggtggaaccctgctaccatcaggggtgtgccccagagctaggcccccatggggtgaagcaggtgggctcccggcccccccttggccatgctcttagaaaaatgattgtgaggccgggcacagtggctcatacctgtaatcccagcactttgggagatcgggacaggcagaccacatgaggtcaggagttggagaccagcctgggcaaaatggtgaaaccccatctctactaaaaatacaaaaagtagccaggtgtggtggtgcatgcctgtaatcccagctactcaggaggctgaggaaggagaatcacttgaacctgggaggcagaggttgcagtgagctgagattgcgccattgcactccagcatgggtgacagagcgagactccatctcaaaaaaaaaaaagccgggcgcggtggctcacgcctgtaatcccagcaatttgggaggcca

SEQ ID NO: 3715 - DNA, 1184 bp, Homo sapiens
gagaagtctccccacagccccacgggaggactgccctcgatccagggggcttccagctgctggacccaccctcgcctgtcccggccatgtagcatttcctcagctctgtccatctagtggcattattgctttaaaaatgagatgcttcctgggccatcagctctgcagagagccacaaagctccttttgggtccgtgtcagaattctgctccccagacggagatggcctcatgggctgctccagcaccagcctgtgcaatgtggtccgtgtggccagagagctggaggctaggggcttggcattcctgggacccagaagcggctaggagactgtcggggcctgcagcagcatgggagcagggggtagcagatggagggtccaagttctagggcaagctgaggccaggagacctgtccctagccccccacctgccaacgccagcgggagccaggacagcgggacatgggtccttcaggggacagcaggctggaggatgaggaggcagagactcaggctggaggccctgagaacccctgtcaccaggcggccacataagccacatcatcccctcaagcacccagaaactggagagacggcagtggaggaggggagggatctggggtctgatgtcacagggctggcctcggttttttgttttttgttttttttttagatggagtctcactcagaacgcccaggctggagtgcaatggcgtgatcttggctcactgcaacctcctcctcccgggttcaagtgattctctggcctcagcctcctgagtagctgggattacaggcgcatgccaccatgcctggctaatttttgtgtttttagtagggatggggtttcaccatgttggtcaggctggtctcaaactcctgacctcatgatctgcccacctcggcctcccaaagtgctgggattacaggcatgagccactgtgcccagctgggctggcctcgttttgtgcccactgcccagcagaaggggctcaggaggacactcagagggttacaggcaaagcagagaagctacaccttctctgggcatgtggggcatagagggaggtagagtttttttggaccctggaaatgtggggtccgtccccctcttatttcccggaagagccccaatttgttaccatgtccacaccccaaaattagaggggagattctgatttac

SEQ ID NO: 3716 - DNA, 1194 bp, Homo sapiens
ctgcagtgaacataggtgcgcatgtgtctttgtaatagaacgatttatattattttgggtatatacccagtaatgagattgctgggtcaaatggtatttctgtctctaggtctttgaggaattgctacactgtcttccatgatgtttgatctaatttacactcccacagacagtgtaaaggtgttcctttttctccataacctcaccaccattaataatcacaattctgactgatatgagatggtatctcattgtggttttgatttgcatttccctaacgatcagtgatgttgagctttttttcatatgtttgtttggctacaggtatgtcttttttttttttttttttttttttttttttgagacaaagtcttactctgcacccaggctggaatgcagtggtgcagtcttggctcactgcagcctccacctcttgggttcaagtgattctcctgccttagcctcccaagtagctgggattacaggtgcatgccaccacgcctggctaatttttctatttttagtagagatgggatttcaccatgttgcccaggctggtctcgaattcctcacctcaaatgatctgcccgccttggcctcccaaagtgctaggattacaggcgtgagccactgcacctggccttttgaaaagtgtctgttcatgtcctttgccccctgtttaatggggttgtttttttcttgtaaatttaagttgcttatagatgctggatgtcagacctttgtcaggtgcatagattgcaaaggcagtttttaaataaagggagatgtacatctgccctatgacccagcagttccactccttcacacctgcctaggagaaatggagacatacacccacaaaatgtatatccacaagagcgttcatcgcagcctatttatggtaaaaatcagtgacacagaagtctaagaatgggtgaatgtgtaaacaagttgtggtatattcttagaatacttttactgcttgtaaagaatgaactactggtactggcaacatgtgtgactcttacaaacacattctgagcaaaataaataggacacaaaggatatatactgtctgtactgtttatatgaattgcaagaacaggcaagtcccgtctatggtgatagataccagaaggcagttaactgggagtgggggccaagaacgactagaaaagggcaatagacatgttc

SEQ ID NO: 3717 - DNA, 1158 bp, Homo sapiens
tggttagagtcctcccgacattagtgttcctttaggaagcttggactctttacaccgttaattacactgttaatttcacttaaacatggaggtggcccagtttgctgcccatgtaagactacttttacttttttgagacaaggtcttgctctgtcgcccaggctggagttcagtggcatgatctcagttcactgcagcctccacctccagagttcaagtgagtctcatgcctcagcctcctgagtagctgggattataggcatgtgccacgactcctggctctctctaggacttctttaatgtcataatagaagctgatggttttctccataaaagtctattagatttatttctaggcacttgttaatatagtacttcttaaaattagcatttttgtttttagctatgtgttgtagatggatacaacatgttgtaagattcttttggatcgtctttgtggacagtatctgtgaagaatgactcctgcctcagtctcccacttgaacccaggaggtggagcttgcagtgagccgagatcgcgccattgcactccagcctgggtgacagagcaagactgtctcaaaaaaaaaaaaaaaaaaaggagcagactgtgctccttgccataggattttatccatgttcttttatttctgcctctcaaatactgtttaatcttaacgtatttttaaattttgtgtgatttttctgtttttgagaggaatttttgatatgttaatactatagatcttagtatattttaaaaactgatgatgtttgatacatgccaaatcatgtgtggaccataaatgtaaatagcaatgcccacaaacccacccatagcctaggaattgggagactcagcaccgccggctgaattcgcctgtgcggtgtgtcccattccatccctgttctgccgcccgtgggggaattttgtcagcttcactgagacacttagtaccctccccttacctgtggttttgctttccatggtgtcagttgcccatggtcagccatagtctgaaagtattaaatgggaaattccagcagtaagcagttcataagttttcagttgtgcaccattctgagcagcgtgatcacagtctccctgtcgtgtcctgcctgccgggagcgtgaatctaacctttgtccagtgcaccc

SEQ ID NO: 3718 - DNA, 1188 bp, Homo sapiens
gttttgcatggttatccagagcagtctcttgaattttggttgtctttgacgcagctgcatctggagatcctctatgtgaggcatgtttagagaaagagaaacattgacccctggaattgatattcttccaagaaatcttttagtcttgttggtaaaggcagtcctcagatggtaccggtccctttgttagtggtgagcctacagagatggtgcctggtgtgcagagcgatgtggttggatggaggtgaacagagcagtctagggcccctgggccgcctgctggtcctagcccatcacagcacagtcattcagcagacatgctgcaccagctgattgtttgagcttgggcttggtgcacatgatggagtttgtctggatctcctgtcttggtattccataggaagatgagttggtccagcccatgtcctaatagatgttgttagcaggaagtctgaacttgaactatctcacatgaagaaagttccttctgctgcctctttttatttctctttggcttcatgaacagtcatgcacccccagtgccatccttttgagctccccaaggcctctgccagacacatcacctccaggggtgactccttgacccaccgtgccatcaccactggctctgcaccccttctgagccattcctggagcttgaggcactgtgaggtcaggggaaaagggtcagcgtggcaaggagagatggtcacccaagctggggtcatagagcagcttatggatttcctggaagtcagtgggaactcatttgggaacccccaaaatgagtccctgtggggtgtctgaaatggtggcagaaggggcaggaatggggtccggcagttctcttccctcaggtcctggcggatggatagcaaagtcctgtgtagacaaggtcacccacaggtggtatatgccggctgctaagggccttgggtggcgggccttggcccccgcagtccagagagtgtctgtttactattccctgcagggtaggcaccttgggccccagaattcggaaggcacttttttcctacctggactcacttcctgcagtgttggaggccacctggccctagtctattttatagagacagggtctcactatgttgtccaggctgatcttgaattcctgggcttaagcaatcctcctgcctaggcctcccaaagtgttgagattacaggtgt

SEQ ID NO: 3719 - DNA, 1193 bp, Homo sapiens
tgcctgcgtgggtgtctgtctgaggctgtgccacatggggggccccaagtgccagctgtgcccaaggccccagctgcttccccggggaggcctcgtcctgggcgtcccgtactactcctgccagccctggggctcccacagccccttttccaccctgactgtcccgtcaccccccaggcgcacacggactccttgaacaccctcgtggcactccaccagctctaccaatacacgcagaagtactatgacgaggtagggtcaggcccccgggggcgggggcaggtggggtgctgggcggtcccccggtgtgctctgatgcgaccctccctcagatcatcaatgccttggaggaggatcctgccgcccagaagatgcagctggccttccgcctgcagcagattgccgctgcactggagaacaaggtcactgacctctgacctacaatctccagtgctgccttgggacataggtacctgaggtacctgagagcccctcaggggaggaggccgagtggctgtggctgaggcccccaccctcccctggaacgcgccccaagccggagtgggtgcagccggaacccgcccagcgtctagactgtagcatcttcctctgagcaataccgccgggcaccgcaccagcaccagccccagccccagctccctccggccgcagaaccagcatcgggtgttcactgtcgagtctccagtgatttgaaaatgtgccttacgctgccacgctgggggcagctggcctccgcctccgcccacgcaccagcagccgcctccatgccctaggttgggcccctgggggatctgagggcctgtggcccccagggcaagttcccagatcctatgtctgtctgtccaccacgagatgggaggaggagaaaaagcggtacgatgccttcctgacctcaccggcctccccaagggtgccggcactctgggtggactcacggctgctgggccccacgtcaaaggtcaagtgagacgtaggtcaagtcctacgtcggggcccagacatcctggggtcctggtctgtcagacaggctgccctagagccccacccagtccggggggactgggagcagttccaagaccaccccacccctttttgtaaatcttgttcattgtaaatcaaatacagcgtctttttcactctgcgggttggctgagtgttcctcctggggctgc

SEQ ID NO: 3720 - DNA, 1182 bp, Homo sapiens
tgcagcgggaggcggcctccggaaaaccccactgcactccagatccacttcctcctagaaacccagatgggcacaccagaggctccacgctcaccaggccccgtgtgccccccgcccacttgcggcacagtctcgtgctcagcacgtcccaccgcgttgcccctttgcccaccgagacccacacatgcacctggaagccccgtgtggtcagggccagggtgggcggggacgggagggcggaggctgcagggaccacccctgccagccgagcccacgaaggcactgccctccgcagtggtggccgcagcatcaacgtcacgggtcagggcttcagcctgatccagaggtttgccatggtggtcatcgcggagcccctgcagtcctggcagccgccgcgggaggctgaatccctgcagcccatgacggtcagtcctggcgtgggctcagctctggcaccggcccatgggatcgtgcccaggaagggcggggtctgcgcccgggggctgacagctgggacttgcctgcaggtggtgggtacagactacgtgttccacaatgacaccaaggtcgtcttcctgtccccggctgtgcctgaggagccagaggcctacaacctcacggtgctgatcgagatggacgggcaccgtgccctgctcagaacagaggccggggccttcgagtacgtgcctgaccccacctttgagaacttcacaggtggcgtcaagaagcaggtcaacaagctcatccacgcccgggtgaggacggtgcagccccgggtgtctgggtcctgctcgggtctgggctgagagctggtccacctgtccctggttccctcctcctcaccccgaccactgccgcctccccagggcaccaatctgaacaaggcgatgacgctgcaggaggccgaggccttcgtgggtgccgagcgctgcaccatgaagacgctgacggagaccgacctgtactgtgagcccccggaggtgcagcccccgcccaagcggcggcagaaacgagacaccacacacaacctgcccgagttcattgtgcgtgagcggggactggcggggggtgcccccacgggaccgcgctgaacccggccccccacacaggtgaagttcggctctcgcgagtgggtgctgggccgcgtggagtacgacacacgggtgagcgacgtgccgctca

SEQ ID NO: 3721 - DNA, 1184 bp, Homo sapiens
ggtggctgggggaggcagaggagtgagcgcagggtcaggcagcatcagctgtcttgattttgacttgctgagtttgctcacaaatgtgagactttcagaggggagatgtccagtgttcactcaggacagaagacatccctgacacatgggagagacacctgggcgcattcgcctaacagaactacagagcaagcaagagcattgaggggcatgtcgagcacgctggtgggtgggggacagtgtggggaaggagggcaaaggagggggttagcccagaggagaacctggggaggcaggtcctggagctgggggtgcagcctcagagctgttgagcagctgggaagtctgctaactttgtgagcccaacctggagaggtctgatgggaatggttactggggagggcccccaccatcctgagctctgggaatcttgtgtgttcatgctgcagatggacttccaggacttgggtctagtgttgctgagggtggatctgcagaggtgagagaaatgacccctttggacttgggtctagtgttgctgaaggtggatttgcaagggtgagagacgtgacccctttgccctcgtttgcagctctgcggccgtcacgatgttctggaagtttgacttgaacaccacgtcccatgttgacaagctgctggacaaggagcatgtgacgctgcaggagttaatggatgaagatgacatcttgcaggagtgtaaggctcagaaccagaagctgctggacttcctgtgcaggcagcagtgcatggaggagctggtgagcctcatcacacaggatccgcccctggacatggaggagaaggtccgcttcaagtatgtaccaaagctgtgacgggccagtacgccaggcagtgctgcaggcaggccgcaggcagtgtctgaggatggccatagttggggatttctgatgaagaagcgagccgtaaaaatccaccccatgtgagaagtgaggagggcactcccatggggtctgaggttgaagagtttggagattgggtgcagtggctcacgcctgtaatcccagcactttgggaggctgaggaggttggattaattgagcccagaaatttgagaccagcctgggcaacatagtgcgaccctgtctctattaaatttttttttttaaattagccagatgtggtgttgtagacctctggttcca

SEQ ID NO: 3722 - DNA, 2233 bp, Homo sapiens
gaatccaccgaccttctttgttgctgtcctcaccgacatcaactccgagcgccactactgcgcctgcttgaccttctgggagccagcggagccttcacaggtcagcttggggcctctgggtacagcatgaatgaagctgcatccttgggccgtggccaactccccctgcccccgtctccccctgacccccagcaggaaacgacgcgcgtggaggatgccacagagagggaggaagagggggatgagggaggccagacccacctgtctcccacagcacctgccccatctgcccagctgtttgcaccgaagacgctggtactggtgtcgcgactcgaccacacggaggtgttcagggtgaggccggcagccggggcggcgaggcacgacgagggtgcttccatcggctgtcccaccactccccgctctggtcattgcagaacagccttggcctcatctatgccatccacgtggagggcctgaatgtgtgcctggagaacgtgattgggaacctgctgacgtgcactgtgcccctggctgggggctcgcaggtgagttttggaggcagctggtatctgcacagccacaggccctcctgctggggccctggtaggtatttggagcccagccagagccacacacagctggaggccttggatgctccctcttgcgtcctcgtgccaccattgcccccaacagtcctggcctgcttacctggccctcgcacctgtgctctgggcctgtgtcgttcagcctctctgtccactcctttgatggtgtgtgcctgtctctggatgttgatgtcagcttgtttgtctgctccctgccctgtgcctgggtgtgttggagtgtctaaccgtgtctttctgcccgtctgtcctgtgcagctggactctgttgaggaaggagcggtatggattctttgtttcttccgcccacctaggccccatccctacccccaagtcaaaagcagccactcctgtcctgagttttctctgcagctgcttgggacaacagaggcagggcatggcgtttccctcttgccatgttgcccatcccagccagtcccacctcgggtctgtcagtacaccagggtctgcctggggacacagagctctgggctgactctgggctggctctggccaaactactgagccccgatcctttttttgctgcagaggacgatctctttgggggctggtgaccggcaggtcatccagactccactggccgactcgctgcccgtcagccgctgcagcgtggccctgctcttccgccagctaggtgagcctgtctgtcccacccccgcatggcttcccctcggggactggtagttagggatgtgggttctcactctgcctgggtgggggcccagggtcctctccaagcttctcttcttcctttaggcatcaccaacgtgctgtctttgttctgtgccgccctcacggagcacaaggttctcttcctgtcccggagctaccagcggctcgccgatgcctgtaggggcctcctggcactgctgtttcctctcagatacaggtgacccctgcccggccctcccagccccttctcctggcccctttgcccagccgcgtcccctggctcactgcatcctctggggcctgcacagcttcacctatgtgcccatcctgccggctcagctgctggaggtcctcagcacacccacgcccttcatcattggggtcaacgcggccttccaggcagagacccaggagctggtaagggctgtgctttgtgtccacctcacggcccaggcctgcaggtccctgactgccggctcccttggtccgcagctcgatgtgattgttgctgatctggatggagggacggtcaccattcctgagtgtgtgcacattccacccttgccagagccactgcagagtcagacgcacagtgtgctgagcatggtgaggggcaccatgggcaagcgggagccttgggggcctttgggatgtggctacctggcagcacggggagcctagagccggggccagcgtgcagctgcctgctccattctgtgctggcaggtcctggacccggagctggagttggctgacctcgccttccctccgcccacgacatccacctcctccctgaagatgcaggtgggggtcgttgctgctcctgcatggggaccccaggcacttaggctgcccccactcaggtctgctgccactgacacacagggccccacccccaggctggccccggctcc

SEQ ID NO: 3723 - DNA, 1198 bp, Homo sapiens
gccccgaggtgcactgacctgttgtggtagctcctagcgtgggaaaacaaagcgacgtggctggacatccccgctccgccccgcccacctcccagaccccattgtggccctttcccgcttcctggcaaccgcactgactgcctgcccccccaacctgggtccgcctcccccttccccaccacccagtgccgccgctgggcctctgtgtggattctgtggcacgggtgggatagtagcctgggccacccagaacgctggcctcacccttacccaagtttcagtatacccattctggaataggacaaatctgcagacaaaagcaaggatgggaataaaggaactgaataatgcaaagcacacactccatttaattatgtgtagagagaggacttatctatttaagtccatgaaatattcgcaaaaaaaatcatgtattgggccacaaaataatcacacaaattgaaaaaaagatgtgacacatgatttgattacaatcaaatacaattctaggcaaacaaaatgtaaaaaaaagaagaagaaaactcagcctgggcaatacagtgagacccatctcgacaaaaaactttaaaaattagctgggtgtgatgatgtacatctgtattcccagctatggggtcggtggctgagtcggcaggatctgttgagtctgggagttggatcctgcagtgagcagtgatcccaccactagactccggcctgggtgacagagtgagaccttgtcttaaaaaaagaaaaaaaaagggagagagagaacaggaagcaggagcaaacaaatattttgaaattgacaaatctttaaaaaaaaaccctggatcaaaacttgtcagaaataatctggttacaaactgtagcaggaagagccgcagacaaaactcctcagacaccaggttaaagaaggaagggatttattcggccgggggcatcggcaagactcctgtctcaagagccgagctccctgagtgagcaattcctgtcccttttaagggctcacaactctaagggggtctgcgtgagaggtcatgatcgattgagcaagcagggggtacgtgactggggtctgcgtgcaccgggtaatcagaacggaacagaacaggacagggattttcacagtgcttttccatgcaatgtctggaatctacagataacataaccggttaggtcaggggtccctctttaa

SEQ ID NO: 3724 - DNA, 1111 bp, Homo sapiens
agccccctgctgctgggcacaggcaaggtagggccggtgacccctgatcccagatccttggcccctgtcctggccttcccctggggtgagtgtgggcagtgcctgagagtctgtgcctcagtgcctcctgcactgagtggcatccaagtggcgccacctctcaggttcctgggtgggcaagaagcggtgcacgtccagggcctcccaccagggctggcagccccaggtatgtgcagtgcttggggcctgccccgccccgtgacccctgactctgcccccagagccctcggcagtctctcttcttctacccgtcctacccagacgaggtccgtggggtttttgctgtgcggactggaaagtacaaggctcacttcttcacccagggtaacccctccccgtggatccctccccccgacctgctgacccctccccggagccctagatccctggcccctcctctcgcccttgccctgtgcacagaattggccccctccccaggctctgcccacagtgataccactgcagaccctgcctgccacgcctccagctctctgactgctcatgagcccccgctgctctatgacctgtccaaggaccctggtgagaactacaacctgctggggggtgtggccggggccaccccagaggtgctgcaagccctgaaacagcttcagctgctcaaggcccagttagacgcagctgtgaccttcggccccagccaggtggcccggggcgaggaccccgccctgcagatctgctgtcatcctggctgcaccccccgcccagcttgctgccattgcccagatccccatgcctgagggcccctcggctggcctgggcatgtgatggctcctcactgggagcctgtgggggaggctcaggtgtctggagggggtttgtgcctgataacgtaataacaccagtggagacttgcagatgtgacaattcgtccaatcctggggtaatgctgtgtgctggtgccggtcccctgtggtacgaatgaggaaactgaggtgcagagaggttcaggacttgtacaagatcacccagccagaaagaggttgggctgggatttgaaccctggtgtcgtggctctggaagctgccctggc

SEQ ID NO: 3725 - DNA, 1237 bp, Homo sapiens
atgtcatctttcctacaattttaagtcatctttttaaatgtccatttttctttttgattgatatttcctccattgatttattaattacacagatgtttgaatgcttaccacaggtcaatccctgtgttaggtgcattaaacgtggtaatgaacgagtgaaagtgttcgccttcatacagcttacggttttaggtagtcatggaaatcggtgatggttcacaacaaaatgattttggtgaaaagaaatacctgttatatgatttaaagaatcaaagcataaagacataatcgaaacttggatgggccgggtgtggtggctcacacctgtaatccccgcactttgggaggccgaggcgggtggatcacgaggtcaggagatgagaccatgctggctaacatggtgaaaccccatttctactaaaaatacaaaaaattagccaggcatggcggtgtgcgcctgtagtccgagctactcgggaggctgaggcaggaggatggcgggaacccgggaggcggagcttgcagtgagccgagatcgtgccaccgcactccagcctgggcgacagagcgagactccatctcaaaaaaaaaaaaaaaaaaaaagaagatcttggataaacttggtaaatatgaaacgcatgactagttttgtgggtagcaatgatgtttaaatgtcacacactaacctttttaaaaaactatccgaattggctagtttatgtcaagtaatattcatttttcactggttgggattgctctcagaatattctataacagaacatggatattttgtcaatgtagtttctctaaacttgagtatttgtagtctgtcttataaataatagaacatagattaagacttagctgtatttgtatcactaatccagatttagcattaatttacttatttagcatcactttggaccgctgatgaattcattagaattttaagggcatgagagggaaacacatgcacgttagggcttccagttctaagattccgcgaaatatactccagggtgcgcaactagatgagtcgtatttgaaggttttccttgaaagtactaatgtgtacagacaggcaagctttgaggaattcagactactctgttaaggcactgcagtcttgttttggtttgctgcctttacaagaatgctgttttttttttcatctagtataagtgccaattcaggaattgcatttgatgaccattcggaatgtcttgagtcagtaatt

SEQ ID NO: 3726 - DNA, 1194 bp, Homo sapiens
gaggtttcaccgtgttgcccaggctggtctcgaactcctgagctcaggcaatccacctgcctcggcctcccaaagtgctaggattacaggagtgagccaccacgcccagcctctctctgttttcattgtactattggtatgactttccaggctgtttggcaatagctgatttattcctctgcctcttttgctgaatcgtgcttcctggaggcaaggactctgtctattcctcattgtctcttcagcactttgtagagtgcctggaacaagatagatattttataaatcttagctaaatgagatgctctcaaaccatcctctcaaatatgctattatccaggcattattataaccatttccctcttaccaatgtggaaattaaggctcacagatattaagtgctacattcagagtctgacttgaacccagagcttctgaactcaaggccatttttcttttcagaacatctggctgtctccttcatggaaaagactgataaaatttataaaattttgttaggctgaattatatgaaatgggaggttaaaaatgttcaaaaatgggtaagtgcatatgcttcattgtggcctttatacaggatgcgactttttattaaaaaagacttacaccccatacttaaaaaaatggactgaaagtctcaatggacttagttggtcagaacaaatgtacctggaagtctggtgagcagaaactcagacccatgaacccttgcagtacagcacagactttaatgaagtgcttcataggatgagtttagtttaatggctgtgtatggatattaacactctggattgaggctttttttctatcaactcatggaatcatgagttggaagtcaactccatcaacccatggagtcatggaagcctgaagtctccaacttctcgtggagtcaggtcatggaatgaatagttgaaagtcctgaatttaggttccagagaagtcaccaccttactgtgtgaactcctgaaagcctgtcatctctgtgaacttcgctttctttatctgcaaaatgggagaacacttcctgtttaaccagattactctgaggtttaagaaaagacattatccattaaagccctcacaaaataaaaagtagtatacagtcatatgatgatttcgtagtggctttgccctacctagaagaaaaagagccagcaggctcaataaacag

SEQ ID NO: 3727 - DNA, 1219 bp, Homo sapiens
cagcaataaatgaggctggtgctgtacagtttgtagtaagaagcttgttctccatcctgagggcagaggtgtctcttgggagattttgaaaaggggactaatggagtctgatatatgcttttagagaactaacaataccagacaaagtttgagttgtgaaataagagatgtgaacactaagtagtttgaagatgggaaacatcaccaggagttgtggtcatcgcagcaaaaacgacagaagaagaaagatattggaaactgaacaaccagtggaagagcaaaaggtgaggaaaatggtcaaaaaatgtgaaggggacatgttacagagaccactttaccagctttaagcattcccatatgtgggggtgtttaaaagatgagaaagagaatttgagtccttgaatgtcaggacagtcatttattatggctgtagtaatactgtgtaaccaacaactcccaaatcccagaggtttacaacaaggaattcattttttttttctcactcatgagtgtttgggtcagtgccagcagctctgcctgagactgcggcttgagctcagggtcactcgcaggtcttcattctgctgccaggctaatataataaggactgccgggggcatgcttttcttatggtagagcacagaaaggaaatccttgccagcagacctctgtttgcatcgtgcccactcctgtccccttaggccctaaaagtcacacagtggacaagtatatactctgctgacgtggagaggtactgcaaaggctggaatatatattcctattatgggaagcgaagaattggaaacagcaaattcaatccattgcagctagtcagagaattttaaatttatggtacaagcaataaaaatccatgacattttgagcatcagaatggcaggcattggaaatattttagcagagcaaagataagaagttggaagagttgggaagcaagtgcaacactttagatatatggtaatagcataatgtaacaacaatgatcaaggagaacaaattgctggggaaattgcctgatgggcaaattaagaggtcttcaatgactgactggaaatgataataacaggcagaaggatgccaggataattctggtgtctctggttttgtggagcagaagctctaagtgacattgatcacttaaaggacaggagctatttgaaagatgggaaaagaacagagtgttgtgtgtaatatggcgtcc

SEQ ID NO: 3728 - DNA, 1544 bp, Homo sapiens
ccaccaccctgatgagtcagtagccatcgttaacgttggcgtaagaccctccaccagcaaaaagattgttagcatttttttagcagtgatgtatttatcaattatacataatgctattgtacacttcttaatagactatggtatagtgtaaccataatttatgcactgggaaaccaacaaattcatgagattcgctttattgtagtgctctggaattgagcctgccgtgtttctgaggtatacctgtgtatttagtatgttccttgtatataaaaccccattttatagggtaggaaactaaggcttagagtttgagcaattttcccatagataacaccaataaattgagggctgcagagaccacttaagtggttctcttaacagtagtctagacatgacgtaatgagatttggcttaggagtgacaatggtaaggaagttaaaggattcaggaaccaaataccagttattgagaagaaagaatggcctcaaaacatcacttctcaaggaagccttgataccctcacccttactacactgtatcctccatttgaatgttgtcaagagctcttctcacaattgtaaataataattgtgtaattttgttttttttttcctactttaggttgctccttgagggcaggacagttcttatggctttatccgttgcgtaagcacagagaggtctgcgaggtcaaaactattgtcatgatagcaagatgcctgtctttttcatttattctcacggtgtgcagaggctacatgatgtgtgatgacatcctcattgatgttaatgaatggtgctatacttgaattttctaaggtgtcattaggtaggtttaggtatgcatacttgtttttagaaattatttttttcctttttcccatttttagaaatcaactcattttttaggttatgccttcagtaatctttgcaacctcaatattgtgtaatggttactttaaaatactgtagttttctttgtgcctaagtataaacataagtacattttgttgttttgtttgcaatagtggtttaaatattttcccaaaatatccaaatttaaaaattctacaactttagaatttaataaatttattctaaaatatttatatattttttcatttaagaatggatcggcttaaaaagactgcttctcatttacttactggctataccatctgtatactaataaaaaacaagatttgatttggaaggactgactcaaactaacgaaaatatgaaacctgtctttctgctttggagatatttacctaatcatgttctgcagtagaataatttagttcttttgtctttttttggagatgaggtcttgctgtgttgcccaggctattcacagctgccatcatagtgaactacagcctgaaactcctgggttcaagagatccttctgcctcagcctcctgagtagctggaactataggcatgcgccaccaagcctgggcttttaaaaaaattttaaaaagaattttgagacaggatcttgccatgttgctcaggctagtcttcaactcctagccctg

SEQ ID NO: 3729 - DNA, 1227 bp, Homo sapiens
tgaatttagggagggctttcttttttttttcccactgaccatggagtagaattggggttacacaaagaaagacagaatattgaaagtgttacgtcaggcgcggtgactgacgcctgtaatcccagcactttgggaggctaaggctggaggatcacttgagcccaggagttcaagaccagcctagacaacatggcaaaaccccgtctctgccgaaaataaaaaaattagctgggcgtgtagtcccagctactcaggaggctgaggtaggaggatcacttgagcccaggaaacagagattaccgagagctgtgatgcaccactgcactccagcctagatgacagagcgagattccgtctccaataaaaagaaaaacaaaagtatttataggactctctaatgtctctgtttaacttattcagagacaatatcagaggaagttactgtactgatattttaagagggtgaatggataatgtaactgaatttcaagggtactgagacaggcattttggttgtttctttggagcagtaattataaagtggactgtgcctgtcacaagggaaaccggaattgtcctatacaaaaaaggaatcctaatgctacagaactgccactcctaccacctcctccaagcctacccaccattggagcagagactagacgtagaaaagcacgacggaaagagctagagatggagcagcagaatgaggcttcagaggagaataatgaccagcaatcacaagaagttccagaaaaagtaactgtatccagtgatcatgaggtaatcgcccctggtcaaatgatgatgctatggcatcaatcctccaaaggaagaggaacccgggttgccgcatggtttaagtaggggagctatagtaacacttagtgccctttatatcaatgtgggtttattgtgttcatacatttctttctgttttacaaagtcaaaaacatcctttgctggttttgcaccagagaataggggttagttatcatctgtgtttaccatgtggcctcacatgagttaacagtttaaagcactagagattgttatagagagttttaagctaccagaataaaacagattgattttttctcagagcttgagtacagctgaatattgcctctatcttaaaggaagtagacaatccagaagaaaaaccagaagaagagaaagaagaggttatagatgaccaggagaacctagctcatagcaggagggtga

SEQ ID NO: 3730 - DNA, 1214 bp, Homo sapiens
cacaggctgtgtgcccatcagcttggagtcactgtcctgcccctgggcaagtcactgatgaccatgggccagaacaaagtgtgacattcagttgtgcagctttgtcactccttggggacacccttaggggccctgccccctcagcagctatctccataggtgggtctatgtctcagtctttggaatttgccatggtttgatgaggctaatgccaactccttctcacgctgccaccgcctgggggctgacaagcctcataggacaccttaagcagtgacaaagggaggcagaagagagtctttggcctccctaaggccaaaaggaggctgaaaggctggcttgctctctgcccacctgtgccctggaggaagagaaatcttcttgacttacacaaagatgatgtgtgggctagaggccaccttggaagcatcctctccttcctgttcacccaccctgctcagcagggcagggagaggctgccttaggccctgctacccacactggcctctgtgtttctgtctcctcctgtctccccagtcccgcatggtccagaatgagatcccctacttcatctggaccactcggcgggatgtgctcgactgtcgcttcctctccaaggatcagatgataaaccactacgcccgggctggctcctttaccacaaaggtgggctccctagaggagcaggcagggcagcttccgaccccctgcccttgggctggcagctctcctccctgctcaccttgttagtaagaggaagttctcaggacaaggggaagtatacaattcagaaaatttggagtctgaccagtatctggcaagttcaaatccagcccctgcaccgtatccggcatttgtagatatgatgtctaaaatgggtctggaggtagaacaatcaccaaatccaatgatagtgagcaaacggactcttacctcctaagcagaagatatctggctaatggacccattctgtcttacctgggtttctttttttttttgagacagagtcttgctctgtctcccaggctggagtgcagtggtgcaatctcagcccactgcaacctctgcctcccagttcaagcaattctcctgcctcagcctcctgagtagctgggactacaggtgcgtgtcaccacacctggctgatttttgtattttttagtagagatggggtttcaccatgttggtgacctcaggtgatccacctgcttcag

SEQ ID NO: 3731 - DNA, 1199 bp, Homo sapiens
aacaccagtctctttttctcagatatgtcttgtcgttcaagacttgcaacactaaacgagaaattgacagcccttgaacggagaatagagtacattgaagctcgggtgagtttgatgggcaagggcattccagagagaatgcacatttccacttattgctgaaaaaaacctgaaagcagaaacagtcttaggaaacttaagcactggccggacatggtggctcacgcctgtaatcccagcactttgggaggccaagacaggtggatcacttgaggtcaggagttcgagtccagcctggccaacatggtgaaaccccatctctactaaaaatacaaaaattagccaggcatggtggctcacacctgttgtcccagctactcgggaggctgaggcaggagaattacttgaacctgggaggtggaggttgcagtgagccgagatcacaccactgcactccagcctgggtggcagagtgagactccatctcaaaaaaacaaaagaagagaaaagttaagcatgttgcctggatttgaaccatgtttctgtgacttcacagctatcttcttttctgctatttctcactgcctaggatctaaagatttttttttagacccctctaatcttttttaatttatctaaatgtcagttttcctttcctttcacaggtgacaaaaggtgagacactcacctagaacagtgccgtgctgctgctgggaagttgctttacacaacacaggccacatgggaaaggccccagcagccttcagctccttcctttctccttaaagagcaacagggcttattcttgtttttcttttttcaaaagtgtggcctttgggctctgccatctggggtgtggtgtggtatgtgggaagaagttcagaggaaccgttggaaacgacgttaggcattttaccttttcagtaacattttatacatctacttgtcaatgtatttgagacattcacagccaaaagcctgggactctttgtgaaggtcctcctcacctctatctttctttctctctctctcaaactttccttaaagttctcattgcctttgcactgcttctgtgaacagtctttgtctcctccccacctttggtgggaagtgcggggcagtcctggtcaagacactcatgccctggcaatgtggctgccagagaatgttgttgctaacccaccagtttcttgttgatt

SEQ ID NO: 3732 - DNA, 1195 bp, Homo sapiens
gctcagccatgttacattgtctatgcagaataagcaggcctggtgtctgcaaatgtaccagtccttctcccgcatctcctgggtgcccccttggctttgcctctcctgtgtcctgtctttctgcgttttagaagtgagagcctctccttcaccttttgagcaactgagtcatctcaagtcctgagctctgctctgccgcctgctggtgccttgtaaaggtatactcgttacaggccctagaggttctaatggtccagggttaagtgagaggagactgtactttgtttcaaaggatccttcaccctgatctgcagtgaggtggatagatcacctggagtccctcgtctgtggtcttggaggcttaaattgtaaaatacatcccttatggaatcctaaattcctctaggtgtttttggaaggcgcatttgagccttgtgagctaaaatggaatggatttaatatttcctatctggcatttccatcttgcccctggtacacaagtcactggcctggaactcagccttgattcactgtccgtcttcacggattagctgtgctgttatgttgtctgtgctgcagattggcccatgtgggaagtcgggggggacctgatttcctgcttggaagacttgggggactgccgagcatatcaaagtgtttatagtcaccaagtgaactgcagcacaaccatctcctctccagcaagccctgaagtcagtagtgcctgcaggtgaaaccaaccagccctgtgttagaggaggaaaagcggagatgacatggaagtctccaagcctgtgccatccacctgccaaggaaaagcacaaggtgctatctacttttctctctaggatttagattatcatttatgtgctgttgcacagtgaaacctcacctgtgtgggcgtgaaagctgattggcattgtttttgattcagctttttggatggctaattgttttcactgtgctgtgggaatgcctctgtattttttcccctctttggccatctttttctgaaaataaagtgatggatcctctagccaacccagtctctccgtgtttgtatagacttacctgagtgatgcagtggtttagtctggttgttggccagcattgtaacccaagaatccaggtagctggagactttttttctttcttttttttttttttttgagaaggagtcttgctcttttgccca

SEQ ID NO: 3733 - DNA, 1239 bp, Homo sapiens
tttttgtttgcttttttctttttcagagatagaatcttgctctgtcacccaggctggagtgcagtggcggaatctcggctcactgcaaactccatctcccaggttcaagcatttctcatgcctctgcctcctgagtagctgcgactactggcgcaagccatcatgctcggctaattttttgtatttttaatagagacagggtttcgtcatgttgccaggctggtctcgaactcctgacctcagacagtctgcccgccttggcctcccaaagtgctgggattacaggttatgagccactatacctggtctgttatgagtttcaaatgaaattaaatgagataatttatgttcatcacttatcaagtcttttgtaattaataagccctcagtagtgggtagattttatcatcattagcttttataatctaattacacttacatgcaaaaaataaattttaaaaagttgagcaaatatggaattagccacagcttgaaatatatgtgtcttttaactctgctctttcattccttgaaacctgcagctggtcatcaatgctgctttgggatttgacacatttgttgtcatgagacatggtctgaagaaaccaaagcagcaaggagctggggacttgtgtccaaaccaccctgtggcatctgctgacctcctgggctcatcgctttttgccaacatccctggttacaagcttggctgctacttctgcaatgatgtggtggccccaggagatgtaagtggatttctctatagttccaaatatttcctatcaccaacttgtacactgaggcagaccgacttggccctttcatttatgactatttaaatattatcttttaacaaagagaagaattctccaatttggggaggatggcattatctcattatgaaccttgactggcgtcatcaactgtacacctgttccttgttcaccaatataaacgcggctacaaaccatatttttggaaagcttattgaggaaaccacagcagactagtccctgatagcactccgtattgtctccggtgcttctcttagtcaagataacattacaaatcaggagtctaaagaccagattccatcaatggcttgacactgcctcccaggtagttctaaaaagtctcttaggttccctctacctttgcaaaataggagtgatgtgtaggcttgtcagatttagtaagtaaaaatataggattcccagctaactttgaatttcagttaat

SEQ ID NO: 3734 - DNA, 1111 bp, Homo sapiens
ggtcacagctgctcctttttggtcaatgagcgtttctatcccctccccctggggtgtgctgtgtcccacctggcccaccagaggctcacgacgatggcacctgaccaggtgacgtgggcgtggtcacctcacctgcaaggctttgtggactctgcacaccgtatgacccccggttttacagtttttagctgttgaattttggaaattggcactgggtgaaaaggtcggaggactggctcttgtagtcacagagtggctgcaggcctttgaaaagtggaggaaagaaaagcccttctccttgccccgcacacatttcactcccactgtactgggcttccaagctttggcattcaggcccctatattttctgtaggaaaaatcgttgagaacacttttctatatgggtgattttgagaccatcgttacgctgtgcgtaaagaatgtacagagaaatttgtaggtattttttgaagaacattaatttgttaatgatatgtagctatttaatttttccctttcctattgtaatcattcattttttttgttgttcggaaaaaaaaagttgatctttttttttgtcgtagatttgtctgtaaaagtgcaggaacagttattctatgagaacactgcatctgcattcatagccacgagtttgttattgctacaggctactgagcgtcgtaacaggaaaaccacccacagctgaccggctcggtggaggacactcctgggacaggtctctttgtcagtgaacaagggcgtcactctgggaggggtcggcggtgctggcggccgggtccctggtgcactgacctatctgggataggcagtaccctggaggggggcctggggcagaggaggcagcagaaaaccaaacatttcactgagaaagccccctccctgctctaagaaggggctccgtgaagttcttcccagagccgcgctgcctgcagtgcgctctgaccttctcttcatgtgtgtaaatctgtaatataccattctctgtggcctgtttttcctggaagaagaaaaaaaaaggtttggcaggccatctttttttgtacttaaaagtagccttaagaacaataataaagtgctcttaaaccacata

SEQ ID NO: 3735 - DNA, 1203 bp, Homo sapiens
atctttatcatttgaaggtgaaattgaagtttataaagtagtattttccccccccacccccaaagaaacagtgaagaagtagagaggatagggaggtagctttggggagtgtaagacttctttagcttttcatcatgttaaatgaatagcttctttctgcccaagtctttttctgagaggatggtgaaaagaggaaggcacactgtggaccatgttcagagtcagtattttacttgattgaagcagtgggacaagatgaggaggaattatgagttaatctttgaatagtaggatggaatctgctaaggagaaccttgaatacaaagctcacatattttttctttatcttgtagtcagtagaaagttgtgaaggttttgatcaggggagtgagttgataagtgctgtacttaagaaggtttatctgaagacagtgtagaaaatgggctgtggggggcatgggtggagaacttgtgcagtcctggagaccaactaggagcatgttttggttgtccgtctgtgaggtactggatgtttgaactagaaccgtagcagtggaaaagaaggagtggatacaggggtgtcttgagagtgtagtcctggggtaaaggagctttggggaccttatgaccctcaatctgttattgcttccaaaggtttgttttctctgtagacttttaaaaaatcaaagtataaaactgacatacataaacgtgcagaaatagtaagtttgtaactcattgagtttttagtataaaattataaagtatgacccaagatgagatatgcatgcaacattaccagcgcctgctaagccttctgtccatcattacttcctttttttttttttttttttttttttgagacagagtctcactctgtcgcccaggctggagtgcagtggtgtgatctcagctcactgcaacatccacctccagggttcaagcgattctcctgcctcagtctcctaagtagctgggattacaggtgcatgccaacacgcccagctaattttttttgtatttttagtggagatggggtttcaccatgttggccagactggtctccaactcctgacctcgtgatccgcccatctcggcctcccaaagtgcattacttctttcaatcttgacttcttctccctgaacagataaccactattttgcttccttcagcatatgttaattttgcctacttttgagctt

SEQ ID NO: 3736 - DNA, 1148 bp, Homo sapiens
acatttgtttataagttttatctcatttactggatcctaagagtcttgagaacaggttagtgcctgccacatcataacgtttagtaaatactgacatttacattatctgtgactaaaaattaatgtgttgggagttatgtatgaggtttacaatcttattcatgtttaaatccctagtctctagcatagtatatcattgatagtatgtatcattgatagtatgtctaaatgttttagaaaacatttagctaaataaatgaaagaataattatataattcagggctgtggctactatgctgattattatatagcatattttttcaaaaatcatgtgtaatttagttttcaaattttttgtagttttaataacatgatagagaacagatagggtcttctagtgttttttttaacagctgctttaaaagtggaattttgcgaattgctgatttacatcaatatcttcagtattttttcctcgtataaagaaaggatcactagactaggagataaaagttggattcagatcttggcagaggggtctgtatgtttgtgtgtgtgtgtgtgtgtgtgtttgaggggtgaggactagttggattaatcttttacattccagtgtcctgtgctgctatttcctatactgttcaactgttcaagcatactatttcatataatcatgtgccttatacattttgatttcagatatccagcagaagtattccagctaaaggaaaaaatacttgaaattgggcatcagagagattagccatttcctccagatatccagacggataccaacagttgctgccaagacaaatttatctttggaattgaaagtctgttaccctgggactatctaatgctaatgtttttcttcctgtttgagtagatttttaacctgtagttatgagtgatggatgtcgttgcagtataataacatttgctcggtccttattgatgatctgctcaaaaaatagattagtagatacttaacccatcagagagcttgtcggtgtaataatgtcactgtaatcaggctgcataatgtaattctctgcttagttcagttgctaatggtcatccggagaggtcattcccatccgagatgactcatgtggaggcttctggaatatggtactgtactttaaag

SEQ ID NO: 3737 - DNA, 1165 bp, Homo sapiens
gatgggagccatgtgtataatttcagattttctggtaaccacattaaaaacattttttaaaaagcaggtggtattttaatacagtattacacagtttatttaacccaacttattcaaagatattgaaatagtttatattctctcttttttttttttttcatactgagtaggaagtcagtgtatattttacacttagagccactctcagttcagactagctatgtatggctggcagctgccccactggacagggcaggaccagaccttcttgctaaattgctctgctgggagtgaaccgagatcacgccactgcactccggcctgggtgacagagcgagactctgtctcaaaaataaaataaataaattgctctgctgggggaactgcattttcttcactgcttcagctccacacttagtatagatgttggtgccctggctgaacggagagtgaatgcatacatagtaatgctttttgtttttttgtaaataactttaggagcctttaacgatagtgaagctctggaaagctttcactgtagttcagcccacgttcagaaccacctacatggcctaccattactttcgaagcaagggctgggtgcccaaagtgggactcaagtacgggacagatttacgtaagtaattcttggcgtggtgtgtgtgagaatagagtttatatcagattcaccctagaatatcaaattgatcttgtgtgctgttgatgatgttttctaagaaggtatcctttgggtttagataagattattggatatttggattgggttaagggtaagtgcaaaaagagaaaaggcagtctagggagaaggcctaggagtagaagcttgcaacgccagttcaggctttccctcttgtttgctctatgatcttagaaaagcgttctggctgagcgccgtggcttacgcatgtaatcccagcactttgggaggccaaggtgggtggatcacgaggtcaggagatcgagaccatcctgactaacaaagtgaaaccccttctctactaaaaaatataaaaaattagctgggcgtggtagcgggtgtctgtagtcccagctactcgggaggctgaggcaggagaatggcgtgaacccgggaggcagaacttgcagtgagccgagatcgcgccattgcaccccacctggacga

SEQ ID NO: 3738 - DNA, 1147 bp, Homo sapiens
gcctctttttccccaggtaaggctcagggctgctagaatgtgattaaagcatgggttggttcgtaaagatggcaatataaggtgggagtgttttgttttgttttatagggaggggacccaggtcctctacaagatggtggggggcagggtacatcctgtgtctttgagacacagctaatgagagcattcttgggctttgtttcagatcctgtcttccattgagctgctccaacactctctaccgaagatcaaccggagcgcttccgagccatccttgcatcgggcagcccacactgaggatatcaatgcttgcacgctgaccacgtccccgaggctgcctgtcttctagttgactttgcacctgtcttcaggctgccaggggaggaggagaagccagcaggcaccacttttctgctccctttctccagaggcagaacacatgttttcagagaagctgctgctaaggaccttctagactgctcacagggccttaacttcatgttgccttcttttctatccctttgggccctgggagaaggaagccatttgcagtgctggtgtgtcctgctccctccccacattccccatgctcaaggcccagccttctgtagatgcgcaagtggatgttgatggtagtacaaaaagcaggggcccagccccagctgttggctacatgagtatttagaggaagtaaggtagcaggcagtccagccctgatgtggagacacatgggattttggaaatcagcttctggaggaatgcatgtcacaggcgggactttcttcagagagtggtgcagcgccagacattttgcacataaggcaccaaacagcccaggactgccgagactctggccgcccgaaggagcctgctttggtactatggaacttttcttaggggacacgtcctcctttcacagcttctaaggtgtccagtgcattgggatggttttccaggcaaggcactcggccaatccgcatctcagccctctcagggagcagtcttccatcatgctgaattttgtcttccaggagctgcccctatggggcggggccgcagggccagccttgtttctctaacaaacaaacaaacaaacagccttgtttctctagtcacatcatgtgtatacaaggaagccaggaataca

SEQ ID NO: 3739 - DNA, 1197 bp, Homo sapiens
ttggagacggagtctctctctgtcgcccaggctggagtacagtggcatgatcttggctcactgcaagctccgcctcccgggttcacgccattctcctgcttcagcctcccaagtagctgggactacaggcgcccgccaccacacctggctaattttttgtattttgtttagtagagactgggtttcaccatgttagccaggatggtcttgatctcctgacctcgtgatctgcccacctcggcctcccaaagtgctgggattacaggcgtgagccattgcgcccggccagctccattataatcttatgggacaaccattgtatatgttgcctgtcacttaccaaaacatcattatgtgacacaggactgcatttgacctcgaatctttgtattaaggtctacttctaggggaaccctgaggtactgcccaaatccaccagggcccaggagctgctcagcaatctcctccaccctccctgtgcaggttcatggccaccagcgacctgatgtcggagttgcagaaggactccatccagctggacgaggacagcgagcgcaaggtggtgaagatgctgctccggctcctggaggacaagaacggtgaggtgcagaacctggctgtcaagtggtgagtgtcagcctcggtggagcaggagagggggccctaccttgtgtgggagcatcctggggaccgctgtccctttggggtacagcctcgcagaggagacctgctgagcagctctcgttgaatggtaccttagtctgagttttcccagaagatgctgagacaaggattcaaatctaagtttatttgggaggcgctcccaggaaacatggtagaggagtagggaagtgaggcaggaaagggaagaggaccaatcaagggtatggtacgaagcaagtgaccacagtgggcctgatgagcttaaccccatggggacctctgggacacagtataggacatgtcccttggacttttcccactcaaagggtaagggagctggggtattaatccaccagctccctggtagtcattggttaagggctgcttctggggtaggatggagggttgtccactgcctgccacctccagccagagaaagccctcagacagatgtaaatgctgggaaggtcaagctgacacacatcaaggtggtaaaggcttaaaggctgggtgcggtggctcatgcctgtaatc

SEQ ID NO: 3740 - DNA, 1299 bp, Homo sapiens
tcatgggccagaaggcagagtcgttttgaatacgtggttcattgagtacccactctgggccagttgatggctgcgaagagagcagaaggggtgctgctgtaggaaatcaatggctcggaagaccacactgaggaaggtgtgagttgatactggaagatctccaggtttgaggcatcttcagaggtatatggtggttttgtgtgtgttgagggtgtggtagcgcagcagctccctagggaattagaaggttttattgaacatttaccctgtgacaggcactgcaggcattcagcgcgcagtgtcatcttcattttacaggtgaggaaaagactcaggttcaagtagatggtcaaggccagtactaccggaaggaccatctgggggttcggacactggtggggtgggatttgctgccccttgcaaattgagagtgtcttggggtcagttttgatttgctcagctgttggcattctttgggctctgagtgggtgaggtgacccttgacctcctgggatcgcatctggagagtgcctagtattctgccagcttcggaaagggagggaaagcaagcctggcagaggcacccattccattcccagcttgctccgtagctggcgattggaagacactctgcgacagtgttcagtccctgggcaggaaagcctccttccaggattcttcctcacctggggccgcttcttccccaaaaggcatcatggccgccctcagaccccttgtgaagcccaagatcgtcaaaaagagaaccaagaagttcatccggcaccagtcagaccgatatgtcaaaattaaggtatgtggtcctgggatggaaatgggtgtggggtgaagaaaagagtttccaacagtttctgacatcacctagtcaggattatctttgaccgatgaactggcttgtggaagagctttctgtagaaatacaggtctcccccagtgtgccctagtgctggtacttatgtctcttgatgtgtgaagcgaaactttaatgaaaagggacatttggccgttttgatgtgttcagagggctttgcatttgtgtcctgtattttgggttgccttgtgacagcaggatccctattttatagacaagaaaactcaggtgctgagagcagtgtctgcagctgtgcttgccatctcagtatctacacagtcccctcgcatcccattggtgcctcctccattgcttgggagtggcaatggtgggggtgccttcatccctagtggctaaagccacgagctcctggtttttcccaccaaaaaagtaaggaaatagtgaagtcc

SEQ ID NO: 3741 - DNA, 1299 bp, Homo sapiens; identical to SEQ ID NO: 3740

SEQ ID NO: 3742 - DNA, 1138 bp, Homo sapiens
aaaaggcgacagaattcgctgagtcagtaattgctgagcacctgctgtgtgccaggcactgctctgggctctgggggtgatcagcgacccagtggccaaaactgctgtcctcagggagctggcatttgcatgtggatgatggacagtgagcaaaatcaatgaggaaggtatatgggatgtcagaggatggtgcacttcacagagaaactgaacccgagtgggtggggtgctgagtggaggggttttgcagggtcctgccagctgcacatgtggactcagccatggggtgtgagaagaacgggcatgggggctcctccaggagcatggtggggtcacgccccacggcccggtgtcgtgttcagatttcccgcttaccagaagcttctcacctctctctcctctgcagcgtcgagggcgaggcccccagcagtgagactggcacatccctggacagcccctcagcctacccccagggccccttggtgcccggttccagcctgagcccggatcactacgagcacacgtcagtgggagcctatgggctgtactcggggccgccggggcaacagcagcgcacgcggaggcccaagctgcagcactcgacctccatcctgcgcaagcaggctgaggaggaggccatcaagcgctcacgctcactctccgagagctatgagctctcctcggacctgcaggacaagcaggtaggagagcacagcccctcaggccacacatgcaagcgcagggcagctctgcccaccatgtgtgcccccaccaggcatggtggcagatctctcccatagacttgagttggggtgcatgtgggctaaggctgagggctctgccccagttccagctccacctgtagctgctctcaggagcctcttgccccagctggctctggctggcgtgtatgaaggacctgggttgtctggcgttccttctggggacttctagagagttgtcttcacatgaggcctttgccatggcccgggttccatgacccgcatggcccagatctggggggccatgataggtgtctgagcatgaggcccagtgtcatcgggacacactgggtacgtggccggccactgaggttctaaagacccaggagagggctgagggagggaggtccattgac

SEQ ID NO: 3743 - DNA, 1177 bp, Homo sapiens
ctcggtgtccttgtctgtaaaattgggatactagtttctgcctcaagtaaatgaataatcctcctccagtgctgaacagtgtctacatctcacttctgatccgtctgtgcctttctggatccatttgcccattctcacctgacccagatgtccagggtcatgagatgtcagaggtaaaaatcagggtccctccttctgtcctttcctcccagaagtccagagggggaaacgtcttgcccaaggtcacacagcccctcgtggcaggacccacagagccgggtctcctgactcatgacatcactcgctcagcttctctggctgggccctggcggccccgtccctccggtctccggtctcgccgcctccgggcaccagggggcgcctcgtcccaatcgcagcccgccacctgacgccctcgctccagaccggcggggttccggctgcgggagagaggccgccgctcccggcccggcgttcagggcttccggggcaggtctgctctgcgacccaccagggagggcactcgcgcgtcctcgctttctccttaggtgcacccccgcgggcgcgctcccgcccatatcccttccaggcccagcctctgctatctgcgccacttcttccccgtctttgggctcccttccgattgtgcccaccccattctctgtaacagtcgccaggccaccagggcccgtcccagcatctaaatcgaggtcggctgagggatgggggcggcaccggcaggcccaggtccccaccccgtccccaaacagtcaggagggtgtgtcctggaggggacgcggaggagcgtggtgcagctgtgcgcctctgggccagtggcttccctgctgtgggcctcagtgttcccatctgcgaactggggacggcggcgggggtggggcgtttcggccggggctgcagctttccctcggaggagccgggggacttggcctgaggtgcgtttgttcgctgtttattgggggtctggggtagtctgagggaaatgccgggggtcgcagtgcccccggttccgcgcctggaccccgcgtaccccgctctcctgacccatccgctgcagcggctgcaccgacctgagcgccctccactcgtccaggctcgggtgacgtcggcggccggggcggcaccgtcctccccgccccctagcacagccgcgcacgca

SEQ ID NO: 3744 - DNA, 1197 bp, Homo sapiens
tcaaacaatggctcagggttttaatttttatttattcatttatttattagcgataaggtctcactctgtcacccaggctggagtgcagtgctgtcattatagctcactgcagcctcgagatcctctctcctcagcctcctgagtacctgggactgtaggcacataccacctcacctggctaatttttaattttttaaattttttgtagagatggggtcctgctatgttgcccaggctggtcttaaactcctggcctcaagtgatcctcccgcctcagcttcccaaagtgctaggattataggcatgaaccaccacacccggccggccaaggtttgtttttttttaattaaaagttgtagatgttgaattgttacaaaatatgcataacataaaacttacccttttaaccagttttccagtgcgcgcaaagtggcattagcacacttaccctgttctgcagccgtcaccatcatctgtttcagaactccttcctcctcccaaactgaaccctgtccccactcaacactaactcctcactccccacccgcagcccctcggggcccccatccaactctggtctccaagcatctggctgcgctggggcctcttcgcaacgtggtcctgcaggcttcgtccttctgtgtccggcttatttccctcagcatcaagtcctcagggttcacctgtgtggtaccacgtgtccagtggctcagttttgcctgtgggcacacggctgggaacccctgtgggtgggctccgagggtttgtcctcagtaagtggggtgctgcttggggggcctcccccatggaccatctaggttccttgctgcgtcccaaggggcgggcagctttggtgaacgctgccccaagttgctgagagtaagagcagagaccttggctttcccagggcctcacggccaggaggacccagaacacgagggtctttctgtctcctgtgtccgcggctctgatgcctggatggaaaagggtgtgaagcaggcccgagatggtgaggaccacgcccggcggtgtgccaaatccatgggttcctgtcccgcctgcctcttccagatctcagccaggccaggaggcaggggctcaatggggcagcccccaaagccctcagttcattccgcactatgtgcctgtgctgtgggtggctgttgcctgtggagtgggcccagtggactgggactg

SEQ ID NO: 3745 - DNA, 1157 bp, Homo sapiens
actgtgcacagagccacttgtatcattattgtttcttctttctctgttgagaaggaaagtgattttagaaagtcatggaatttagaatcaggtgacttgggtttcagcacatgtctcttatctacccacttctctgcatagttaatgctgctgattttgaatccaaccctttgtacgatgtgttatctcaatccctttaacgctgcagcctcttcacatgttttaaagttgtggagtcttaattttattaaattgaattagggcctccccgacaaaaaaggaggagcctggaaagttccatccccctcccacagcccatgacatgctcacatctctgtctttactttctgtgaggctttactcttacccagctcagcagttgccggacatcgagatgtgtaaaaatccgccacctaaaaggggtgtgcggggtgactctgaccatcccctttgaccctcacccctaggttggcctgcttgccctccctggcacctactgtgagccagtctctgggctaaggagtcaacagatgcccccgtactggggcttcaccaccaccaactttccctttcaccagacgatcctgcagggctgtgatggaccacatcaaataatgggaacaaaggtgtcttgaaagtgtaatattgtacgaatgaatgtctctcacctagggatggaatgtgaggggttgccgccacccctccattgttgatgagcaataatagcaaccttgatgactggctatttattgtaagcacttgccatgattctgtgaagtggggagcattattatctccatggtatatatgggggaactgaggcaaaacaaagcaagggtggttgggaaggttgtggtatgagcaaggatcagccaagcatatccctatcagagctgtcatctagacatttttaggggactcttagtttcagtccgttttgttcagagatcatactttgtgtgatttcagtccttttaaatttgttgagacccattttagggtctgagatgcagtctatcctggagaatgttccgtgtacacttaagaagaatgttttctgctgttgggtggactgttctgtacatgtttgataggcctagttggtttgtagtcttgtttgtgtcttatatttccttgttggtctgcctacctgctct

SEQ ID NO: 3746 - DNA, 1637 bp, Homo sapiens
tcctgggtgaggcaggcgcctgctgaatgctggctgtaactgaagagtgcgccgctttccctggctctgctgctaacatcgtctctcttcccaccctagatttcgctgcctcatcacccacatctcccaatgcattgcctcctgctcgcaaagccagccctccctcagggctgtggagcccagcctatgcctcccactaggccgcgtgaaggttcccggaggatgggtctcagccgagcctcgtgcacccccaagatggaacatccctgctgcattcacactggaacaagcccctccagatgagtgccccggccccaggccagcttcactgccgtctcttcacacagagctgtagtttcggctctgcccattagctcattttatgtaggagttttaaatgtgtgtttttttcctttcaagtcttacaaagctaagactttttggctcattcctttttgcatggttgtctagggtttctggacaatgtgctgttgcatttttattttcctagccttgctaaaatctttcccttctcaagactttgagcagttagaagtgctctttagaagttgtctgtgggtgatgttactgtagtggtctcagggaaaggattgtccagttactttagggggtttttggtggggtttttccccctgtgaaaacttactttgcccctagtctggctgctgctaggacttctgaggagcaatgggacatgagtgtccctgtatctgcgccactgccgcaagggaagcctcaggaaccagcacctggaggccaggatagccaagccctgggtgagcgagaggctggagaacacaggagctcacccagggctgctgcccaaccatgggccactgtgaacagacttcagtcctctgtttttgtttcataagccgttgagacatctgatggacttggcttaggccctgctgggacatcccacgtgtgatccctttcactccatcaggacaccaggactgtccttaggaaaatgtccttgagatggcagcaggagtcatattttctgtgtgtgtgtttcggaaagccgctgtgtcctgcctcagcacaaagacccagtgtcatttgctcctcctgttcctgtgccactccagaacctcagcagatctgagccaccgcctgccagtgtgagaggcggccactttcatggcagctcatcaggcgcagggccccagacagcttcccagcaggccctagagcccggcctgggccaatgatggagggcggccgccagcccagggcctgcccatccagaagggactccccagggcctgggggaggagacccttggaaaagtcctctcttcccagctcctgattctggatctgagattctcagatcacaggcccctgtgctccaggccgaggctgggctaccctcagggagatccagagactcatgcccatggccatccatgcgtggacgctgtgtggagagtccaggatgacgggatcccgcacaagctcccttcagtccttcagggctgggccatgtggttgatttttctaaagctggagaaaggaagaattgtgccttgcatattacttgagcttaaactgacaacctggatgtaaataggagcctttctactggtttatttaataaagttctatgtg

SEQ ID NO: 3747 - DNA, 1198 bp, Homo sapiens
aaaggtaatttttgggtacttctgcctgtttttaagactttctcttagtcttcagttttcggcagttttattttgaaatatttgtgtaggctttgaaaaattgtgcttgggatttgttggaatttttgaatctatagatggatttttttcatcacctttggacaattctcagccattttatcatcatttattgcccctctatctcatagcttctactggattccaatgaaatgtatttagaccttttactgtgttctctctgtcttttattccctcatttgttttcctctcacagttttatctcattgtgcttcatttaagacattttctttttaatctatcatctaacttaattctctctttagctgtgtctaatccactgttaacccatccttgtgttttttaatttcagtgtttatattttgaaattggggaatttatttatatttagctcaaatctgccattcattttttaaaatatagttttcaattctctgctgaaattatcaatcttttctgttgtctcctgggacttataaacatagtaattgtaaagacttttcctgatcatctcaatatccagaacctctgtgtgtctatttctatcgtctgttgactgctggtttcattcatgttgtcttgtctcttcatttgcttagatatgtttagctatttggtagatattttatatgctaaattgtttgccaaaataactcgaggcctaggattgtaggtattctctttcagagaatatttgtgtttgcttctaccggtatcctagtggacactagaatttggcatcacctcaatgcagtttcacagattgagagcttctgggtgtccagatgactggaagctggactcgccaacttcctgttcacttctgcgcatcagatctttgttaatgcaatccacatatacagtttgctttttgaactggtacctcccatgggccagttagtatgagttaaggtgaggcaggggcagcaccaggggtgggagaccataggacagagccaacaccagcagacttggcagggagggaaccaaaaggagcagcttccaatttagtgtgagaaagattcctccccctggagctgtccagggagggtttcccaggtgggaggaagcactttaccatggcaggtggggagcagggtttgggtgctggaggaagtgcagaggggaatttgggcat

SEQ ID NO: 3748 - DNA, 1199 bp, Homo sapiens
caataagagttagaactggaattcagacccatgtttggctgtccaaatcccatgttcttttctctttacagttagggtgaaaagaattatactgtggccttatctaagatgctacagattttagccaatacatacatacaaccctgaaggatagctggttgatcactgtctgagctggggacatcttgatgtattggttctctagctggtgacttaaccctattagattacaggatttctatcatatcattagcaaaagaggggggagaaaaaaaagcaaaatttcttattctgtttaagggaaagaaaccttccaaggaaagattgactgcggatccaggaggctcctcagaaacttccagccaagttctagaaaaccacaccaaaccaaagaccagcaaaggaaccaaacaagaggaaacctttgctaagggcacctgcaggccaagtgccaaagggaagaggaacaagggaggcagaaagaaacggagcaagccctcctccagcgaggaagatgagggcccaggagacaagcaggagaaggcaacccagcgacgtccgcatggccgggagcggcgggtggcctccagggtgtcttataaagaggagagtgggagtgatgaggctggcagcggctctgattttgagctctccagtggagaagcctctgatccctctgatgaggattccgaacctggccctccaaagcagaggaaagcccccgctcctcagaggacaaaggctgggtccaagagtgcctccaggacccatcgtgggagccatcgtaaggacccaagcttgccagcggcatcctcaagctcttcaagcagtaaaagaggcaagaaaatgtgcagcgatggtgagaaggcagaaaaaagaagcatagctggtatagaccagtggctagaggtgttctgtgagcaggaggaaaagtgggtatgtgtagactgtgtgcacggtgtggtgggccagcctctgacctgttacaagtacgccaccaagcccatgacctatgtggtgggcattgacagtgacggctgggtccgagatgtcacacagaggtacgacccagtctggatgacagtgacccgcaagtgccgggttgatgctgagtggtgggccgagaccttgagaccataccagagcccatttatggacagggagaagaaagaagacttggaggtaaggccttggctgcc

SEQ ID NO: 3749 - DNA, 1106 bp, Homo sapiens
cttgagtccaggagtttgagaccagcctgggcaacatggcgagaccctgtttctacaaaaagaaaaagggaaaaaaaaagcagggactgtcattctcatctcctccctggggtatccacaggaatggacattcaaatggttgtagcctggtggggtagaaggcagagaagactacccagccagtgaagtgcagaggatagacataggaaaacattccaggcatttggagacagctgaaagtatccatgctgactttcatgatttagaagtctttaactgaattattaaaattgccttttttttgtgctgtacaatgtctactgtactgtgggtcatttagatgagatgaaaaacttaattaaatctgaagtgtcagaggcgcttagtaagccttagtaaagttgtgattgaagaaacttaatacaaatgaactagaggtttgtaatcatgccactcactaacgattttatttctgtagcagaatcattttttctatgtaaggtgttaatgtgtgtgtatgtgctttggttgtaggaaaacttgaaaattccaaaatccttattttcctatttgagaggctggttcagcagggtgtgtgtgtgtgtgtgtgtgtgtgtgtatgaatggtatatttattacattattttgaaagagaattagtgtgttatgtggataatgttatatacagccaaagtggatgtttctatttggcaaggaaggtaggatttctgaaactcaggccttaaccaataggttggaagacaagaccaattgaagagttaggaaatgtgagtttttgttacttctgttattccagtcttggtttcattgtctcattctttatttttaaaatcttgtgcctaaaagtttttttgcttaattatgaagtagacatgcatgtttacatttatgtaaaatatttgctgtgtaaagtattttttgtttattctcttaaaagatcactatatttaaataaaagtgaaggtcagcaacacatttcttgtcttggtgggtttcattttcttttagaaatcaatgagcaatatagggttcttttaagaaccttctgtgcttaagcctaaatagctaactaaatggattccttt

SEQ ID NO: 3750 - DNA, 1313 bp, Homo sapiens
gagtctactgtccaagggatttatctcccagaagcgcatggaaaacatcacaacactacctctataaattggactcatggcaggattccaaggaattcagtatgccatcaacattaagcaatataatcagaactaaactcaacaaaatttttctttcagtgataatcctaatttttggtaaattatcggggaacctgcccccaataattcaaagtgagtccttttctattttccctaagtgtcggctggtctgagaaataaagggaaagagtacaaaagagagaaattttaaagctgggtgtctggggagacatcacatgcccaagccgcaaaaccagcaagtttttattagtgattttcaaaaggggagggagtgtacgaatagggtatgagtcacagagatcacatgcttcacaaggtaataaaatattacaaggcaaatggaggcagggcgagatcacaggaccaggtgaaattaacattgctaatgaagttttgggcacacattgtcattgataacatcttatcaggagacaggggccgggcacagtggcgcgtgcctgtagtcccagctactcgggaggctgaggtgggaggatcgcttgagcccaggagttctgggctgtagtgcgctatgccgatcgggtgtccgcactaagttcggcatcaatatggtgacctcccgggagcgggggaccaccaggttgcctaaggaggggtgaaccggcccaggtcggaaacagagcaggtcaaaactcccgtgctgatcaggagacagagtttgtgagcagacaactggtctgaccaaaatttatgaggtgggaatttcctcttcctaataggcctgggagcgctatgggagactggggcttatttcatcccttatctgcaagtgtaaaaagacagacgttcccagagcagccattttagagacctccccctaggaatgcattctctttctcagggatgttccttgctgagaaaaagaattcagcgatatttctcctatttgcttttgaaagaagataaatatggctctgttccgcccggctctcaggcagcctgacctaatggttatctcccttgttccctaaacatcgctgttatcctgttctttttttaaggtgcccggatttcatatcgttcaaacaatttgtgcagttaactcaatcatcacagggtcctgaggtgatgtacatcctcagcttacaaagatgatgggattaagagattaaagtaaagacaggcataggaaatcacaagaataatgactggggaagtgatgtgtccatgaaatcttcaccatttatgtt

SEQ ID NO: 3751 - DNA, 1277 bp, Homo sapiens
gagggataaatgtaatatggaatatatatatatatatactttagaaatgttctggaagattgtgtatatgttatgtaacagttaatccactcatttaataataggtgacttgctattttgaagaaatgcattgtaagttatttttaaaatagtgatatggtttggatttgtgtgcctaaatctcatttctagttataatccccagtgttggaggtgggaccttgtgggaggtgattggatcatgggggatttcccctttggtactgttctacattctcgtgagatctggttgtttaaaagtgcctagcacccccgtgtccccattttgctcctgctccagccatgtaagatatgcctgcttctcctttgccttctgccatgattataagtttcctgaggcttccccagaagcagaaaccgctatgcttcctatacaacctgccaaactgtgagccaattaaacctcttttctttataaattacccagtttcaggtattttatagcagtgtgagaaccgactaatacaaatagagtcccttaataaaacaaattcccattcagttaatcttttattataaaactgaatttctgtatatcatcttcacttaaatttaagtgcagtgactgtttaactattacagattatcaatacggagattattttacatgtcttggtgtattattggttttagaacctcctatgttttaactattaaagtatcgcttttaatgtcactaatcaacctgttcatattgttgtctccttactaacaatattctgccttataagccttccagatccattacaaaatcacatgaaccctttacctgctcaccttcttgttctgttacctccttggagccttagttttgaaattgaggtgttttgttttttttttctctgaccacaacttttttcattgtcagttctcccacttctttacctacagtgaatctgaactctgctgtattggaacctacttcatctaatctgtttggttccctttcgccacaaactgacctcttgagaagtcttgaccttgtgatttgagcaacattatgtataatagtgttttctgaagtatgggacagtttttactaccggtatatttcttgagattttgtttgggtgaccagtctactttaattactagatattgattgatacttctttgctcacagtccagaatcagtccagactgggtgttgtaggcataattatcccatgcctgcattattctgggctatttgagggtctcccagctcacttcatatc

SEQ ID NO: 3752 - DNA, 1174 bp, Homo sapiens
aaatcctgccaaagcccaagatttgattgtcttaatccttaagtcctgcagtaaagttaaagcatgcataactaagaaagagataccaaatttatcctctaacaccagaggctatagtagtgacactgagtgttctggccccacccatatccctctggtcttatagctttagctttctctgaaaaaaagttccaactgtcagttatctgcatttcttcacctgggtttctttttttttttcttccgcgaaagccaaagaagactgctttatgatgtggggaaggccagaaaagccttggaagtcacattccccagaagcagtcctcaattgatgactgacaggagttggtgtataaatacctcagctccctcacctctcccatgggatagctctgaggtgcatgttctacaccattccccacagtgtaccatgggattaagctctagtcacccacagtggtagctggcttgataatgcatctttaactggctacattcccttctccacttccttactagtgtttcctgggctcatcttccaagtaaaccacttgcacacaaatccttatctctatgtctcctaatggggaaacccacccaaacacacatggcttgtcccaacaaaagcttgcatctctaagagttatctttcttatcacagtttaagctttgtttcaccagtagtctcaacccatgcacaagataaccccattcccctgagttgaacttatcctacaaactgcaaggccacagtatgggcttctaggcagctgtgcccaaaagaaaagagtctgggggaggggcaagatagttggtccttatcccaatctttttttttttttttttttgttggagtctcactccgttgcccaggctggagtgcagtggtgcgatcccagctcactgcaagctctgcctcctgggttcacaccattatcctgcctcagcctcccaagtagttgggactacaggcacctgccaccatgcctggctaattttttggtatttttagtaaagacagggtttcaacattttagccaggatggtctcgatctcctgacctcatgatccacctgccttggcctcccaaagtgctgggattacaggtgtgagccaccgtgcctggccggtccttaccccaatcttattataacattagacatccttcctccct

SEQ ID NO: 3753 - DNA, 1158 bp, Homo sapiens
tgtccttttatccattgtcccatgactaacttccatacagactcaaagactcagcccacacacgccttgctccttaaattttcccctgatccttgacactggaaataattgaattctcatagcacttctgtttatacacagtctatctagacttgagggcaggatctagacttgagggcagtgccttcaatccctcatatgtggtcagcagtcaagcaggtgatggatagacaaatgaataagtggagatttttattgtcattagttatacgtaagttaatgaaactaggaatagctttctttttctttcattgacaaatctctttcagatctctagctcatttctctccctaatacttctttaaaaaaaaaaaaataagctgttctgattattctatttgagcttggtgttgctttgggaaacaaaaatcttaaaattccttcctgtttcccagagatagagaatttgtttttgtcaactgacgtttagtattttttttcctggctggagaagtgcctagtaatctgtttgtgtttgtcaccatttttttttgattatttctaaatgaagcaaaaataaccctactgatgaactgcacattctctctccttttcataactgcctgttgtcctgggaaaaagaagacatcgtttaaactcatggtctttgaagagatctaagggatttatgagccaaaatgggatttattacatgtttattatttaaaagtaatgtgtatcatagtttttagtcacatgcttattttttagaagtatagtttataatagtttttcgacaggcaattgttttttagtggcctcattttagatcttcccatgagaccaaaatgcatattcaacttactacttggcactttgtcagtgatttgagggttaactgttttgcctgtgataattaccaatattgaaagcactcataagtgttagcagtacttgttacaacaatgctattttaatgtcttaggaaagggttaggtcccaccactgtgagagcagagtgaggggctgtttaaatgggtcagacaaggccgggcatggttgctcacacctgtaatcccagaactttgggatgccgagctggaggttcacttgagcccaggaatttgagaccagcctgggcaacatggcaaaaccctg

SEQ ID NO: 3754 - DNA, 1146 bp, Homo sapiens
atgatggacctgaatattggctggtttaggcagaacggaaactgtggctatgtcctccggccagccatcatgagggaggaggtctccttcttcagcgccaatacaaaagactctgtcccaggggtctcacctcaacttcttcacattaaaatcatcagtgggcagaactttcccaagcccaaaggatcaggtgccaaaggtgatgtggtagatccttatgtctatgttgaaatccatggaatccctgctgattgtgcagaacaaaggacaaaaacagtgcaccagaatggagacgctcccatttttgatgaaagctttgaatttcaaatcaacctgcctgaactggccatggtgcgctttgtagtgctggatgatgactacattggggatgaattcatcggccagtacacaattccctttgaatgtttacagacgggctaccgccatgtccccctgcagtccttaactggagaggtccttgcacatgcttctttatttgtccacgtggctattactaaccgaagaggaggaggaaagcctcataaaaggggcctttctgtgagaaaagggaagaaatccagggaatatgcatctttgagaacactgtggattaaaaccgtggatgaggtattcaagaatgcccagccccctatacgggatgccacagatctgagagaaaacatgcaggtgcgtgcttgtgtttaatcatttactcaatggttttcctactttgtacatgtccatagtttataaatatattggttttttaataatagtatatttaagtagtttttaaattctgattagttcttagaatgtttgccactagtctgttttttatcatttaacttcctaaaggtacagttgatgttgaaaatattgattacatattgggataagtgagtctcgttgctgtgttacacaccttcatcccagtccctgttaatgactgctgaacagttccttgtttttttctaatagtatacatgggaatctctgggatttctgaatattccttacctggaacacaaattgatgatctatcaaaataaaaaggatataggtcaaagtaaaatggatgtgatccagtcctttcttacgaagctgtaatgctgaggagatgggaaacctttaaatgagccataa

SEQ ID NO: 3755 - DNA, 1174 bp, Homo sapiens
tgactgtctgggcccacacagttaaccagcccatttctccacactggtacagtagtcacctgtgaaaaaaaaattggaacttactaatttgggcttttcaaaaacattctttgtttagaaggagattctaaagttatttatgatgcttagccatagtattcaggcaaatgttcatttctcctggtacctgtatttaaaatgtacattccacattttaataaattaaccacaagaaaataatcccacatatacaaggtcaggggtggggaagagtattaatggtatcttaattatacccagtctggttttttttttttaaatggggtaaaaatcaaatgcaaccccatcttgttttaggaattttgagaactaataaatgcaccttaatggtcagtgttcctttcaaacatgtgagttctttaacaaaaatgaaataaaccaggtgtctgtgatttctaattaatcaccgctggccattacacaggttttgttgtttggggtggggagggggcttttgttcccttttgacataatatagtcaatgcactaacaattatgtatattcaaacttgattattttaaattcgatcttcagctgtactgtaaatagggtactgcattgtagtctccatatctgtattacttttctgtaatatttaagagttgcttaaaagcatacaaaatgtactgttactaaaacagctaattatttctctctccccctttgacaggaaggggcttcagttgttcctccatggctagaaccataataaacaatgtacccgtaatttgtaacataaagtattgcaatatgttagtaacaatcttgcagccttcctttccaaagttcattttattttgatcagttcagtatattgcactaattattttaggtattttcattatatgaaagctaccatgtgtcagagatgatttaatctatttaagtgttggactgctaggagaacttgtacatttatgataatgcagaattaggaaaacggttcaccagtgtttagttttatattgaggtgctcaggttggaataaagtggtataaaaagcaagtatcggcttttctcttttccttttttttggcataaaacagtgaatatatataaatgatactatatgacctagtatccgcttttatattttctttactatgttcataa

SEQ ID NO: 3756 - DNA, 1153 bp, Homo sapiens
atgttctcttccgtgcttataaacatttcactttagtctctatgagattgtgtgaatttttctgtggtcgtaggctacattttcacactacataaactatgcccctggttatagaatgcacatgcattctgcagtacaccaatgtatttgtttgtagttggctttattatttattcgtatgtgtatatttaaacattcctgacttggttcctgacaccaagaatacatacatgtatattttcttggaaatactatggaatataaatgagtattagcatcaccctgcgttgatcaggtgaatttgatagaaatgggaggggaaattttcttaataagtcctaaacccaagaataaacttttatatttttttttctgcttcatagctgtggaaaattattgcaaccaaactattgaaaccattcttaaagttaaaagaattgttattttaggacaaattttgaagataatacttttttgggggtggggaacttctgctgttattgttgctgtgctggaggaatggtgcttattcttttggtagcataactagtggtctgacatgaaaaactcttaaaacttaccctatattgggtctttaactgctattttatgttaaaaccttacatattagtatgtatatatatatgtgaatgcatacatatacaaactacattttcttatttttaaaatatcttaaggtacatgaaggagttaacatgttcatgaaacattgtgacatggaaaggtacttaggacttagtctaaaatggaaaaaaaaaagcaagacgcaagactgaatatgtagtatattcaatttaaaaactttctggccaggagcagtggctcacgcgtgtaatcccagtactttgggaggctgaggcaggtggatcacctgaggtgaggagttcaacaccagcctggccaacatgatgaagccacatctctattaaaaatacaaaaattagctgggtgtcgtggcactcacctgtagtcccatctactcaggaggctgaggcaggagaatcgcttgaacctggggaacagaggttgcagtgagccgagatggcgccactacactctagccggggcgacagagactccatctaaaaaaagaaaaaaagttctgaagtgaacatgtgtattacttttaaag

SEQ ID NO: 3757 - DNA, 1227 bp, Homo sapiens
gctctttgtatagatgaacgtgttgagaaccacctttatccctcacagcttccatcttaaaatgtatttagaactacctttatccctcacagctttcctcttaaaaagcagccaaacaacagaaaatccatccaggtctggattctagtaaagtcatttccggataccaactaggtcgctttgaggtggagtttcagcacctaaaaatcccctgctttgcagtgaagggtaagatgagagaaacaggcaattggagtcattctgttttttcctttttgttccagggtagttacatgtacttaatttgtttgaaacatgcaagtagattatggaacattaatataagctgtctataagttatccaacctatccgagaagcattcaacagtagtcactgtgtatttgggtgaattagaatataattgacttctctagtagacttttgagctgagttcatccttctggtttgttgactcctcacctggttctctatcgaattcatattttggaagtcatacctctttttttattgttagtttttaagggtgaatccagaatcttctttaatttctaatgctaacaagggcatagtcttaagttttctgtttactttattctgaactgcaaaactaggaaggagaatcggggtataagtgctctctgttctgtcagctcacatgcttcgtagcataagcaggtgtgtgatgattatttcagagcaaaaggaaagacttagtaaaatttgtatgtatgtattcaatttgattatagcttcactaaatatacaagtgaatataatgaaatggaatttcatgcaactcaattaaattagcttctttaccaccatattaattatccaaattttattaatttgaaatattttcttacattgttactttaacaacaaatgcgtcttcaaattaatcatctcttctgtgtattgaagaatagttcttttgattgttgtgctctttaagactttttaatgcattttctatatttagttatttcacaaattagtataatggctataattataataatttcttctagtatatggcagaacttaattttgcctatgaatttgtaaacatttccagaagatagaatatcttaagaatggatttaaaatttgggatttgggccaggatcaaagttcttgacctcatagtttcaagcatttattttttatatatatatatatgtatatatatacgtatatatata

SEQ ID NO: 3758 - DNA, 1160 bp, Homo sapiens
caatcttaattggatttctggttatatcacaggtgataagctatcacaggtgacaaactgtaaaatgttcaaacttatgctcctaactggttgtcccactagtaacctgtagcagtggttcccaaatgcaaactacctgcttaaaggtcattgttgtgggtggggcacttaaatatatggattcttgggtcccctctagatattctcaatcatcgggcctggggtggggtctagaaatctttagtctttaaagttccatcgattattttgatgcacagtgaaatttgggaatcaccaattttctgtacaatccataaatctgcatgtagtgacatactggtaaacctttattttttttgtatactaaaggaccagcagaattgggcccatgccaacatgtcacctctagggcctagactgccctcacttttgtttttttctaggttggtttcttagcactaccaagttgaacatgaacagtacgactcctgcctctaggaggcagcttggaatattgtcagtactggattttagagagcctggcttctgtgaatgaactcttggccttggttcctcatctgtaaaaagattttagagtagccttttgcctttaagtgtttaccataaactagataaaagagcattcccctttatctgcaacccctgtattagtgttattttcatatatagtccacttttcattaactgcactccaggtgtcatagctgtatcagccagtgtctctagactttcttcagtttgctataacaaagtaccatgaattggatggcttataaacaacagaagtttatttctcacagttctggaggctagaaatatgagatcaaggtgctggcagcttcaggtctggtgaggatgcgtttcttggtttccagacaactgtcttcttgctgtatcctcatatggtagagaaaagttagagagcttttgaggttctctttaagaacactaatccttttcatgaggatttctaccccctaacccagtaccttcaaaggctccacctcctaataccgtcacattgaggattaggatttcaacataaaagtttcgaggggatgcaaacatgtaggcaggtaggcaaacttatgatgaccaagaaccggttctaacctcaggaaatgaagcaataatggtaa

SEQ ID NO: 3759 - DNA, 1124 bp, Homo sapiens
tttgtctgtcacagaagagagctgcttatgattttgaaggggtcagggagggtgggagttggtaaagagtagggtatttctataacagatattattcagtcttatttcctaagattttgttgtaacttaaggtatcttgctacagtagacagaattggtaatagcaacttttaaaattgtcattagttctgcaatattagctgaaatgtagtacagaaaagaatgtacatttagacatttgggttcagttgcttgtagtctgtaaatttaaaacagcttaatttggtacaggttacacatatggccatttatgtaaagtccctctaagactacatactttttgtttaaaacaaaattggaatttgttttcccttcttggaagggaacattgatatttaacagagtttttagagattgtcatctcatatatataaaatggacacgtggctataaaacaccatataagagatgagtagtgcgttttattttatatgccaatctactttgtttaaaaaaggtctgaatcaggacttgtgaaaacctgtagtgaaataccttaagctgttaactaactgtaaggcgtggaataggagttgctcagtggattggttctatgttgtggactacttaagtctgcatttgttactgtgctaataaacaatattaaaaaccacctaataaacactgctgtgttcatttacttttcttttgccttttggttgccattcgcagattcttctgaaatcgataggtatctgcttctaaaacaagctaaaaataatgcatatttagtaggtattagttagttacctatattaggatctgtactttacacagctgtagatgaggtatcctagaaaaggttaaataatctaccccatttaggcttcaaagacgaaccctactgcatctttttaaaagcattttctgacttgcagatgctgtagtagcaagtacatgagaaatgggttccgtcatggataaattggtaccctgccttagggggcattttggcagtacatgtcctgacccagcagttctgtttctgtatgtctctttcagagaaacttatctggatacacatacattcattacagaatttaaaaagaattggtaactgtttg

SEQ ID NO: 3760 - DNA, 2537 bp, Homo sapiens
attaagcaacttttctgattgtacttaggtgagctgtctcgtatataaaacagggtttgtgatttttactaatcttggtgaagagtaattgcttgaaagacttgtctttgttacaaatgcgtgtgtatatactggaagtacttgtggaacctaagctttaaagcggcaagaatatgcagaagagaccaaatgtggcctgcacagcctaaaatatatactaaatatttttaaagctaaacgttgctgagctctcagttgtatggaaaaagataaggtccccaaaccctaaattttgttacccagatattaacatattcctgccctagtcaggaatggagtattaagagggaatgatgtgtttcagtctatgtgtgttgttttagcaagtctacattatctcattacacttgtgatagtctagggagaaatgcttagtaaataacttgagtagtaaaagactcttgtctggtggtgaactagagttgagaattaaaattctttctgacttgctgctataggcaatgtgggagattgaccttgggccttttttcctattctaggagcgagctggacgccactgtggggctctgagagtcctgaattcttactgggttggtgaagattccacatacaaattttttgaggttatcctcattgatccattccataaagctatcagaagaaatcctgacacccagtggatcaccaaaccagtccacaagcacagggagatgcgtgggctgacatctgcaggccgaaagagccgtggccttggaaagggccacaagttccaccacactattggtggctctcgccgggcagcttggagaaggcgcaatactctccagctccaccgttaccgctaatataagtaaagtttgtaaaattcatacttaataaacaatttaggacagtcatgtctgcttacaggtgttatttgtctgttaaaactagtctgcagatgtttcttgaatgctttgtcaaattaagaaagttaaagtgcaataatgtttgaagacaataagtggtggtgtatcttgtttctaataagataaacttttttgtctttgctttatcttattagggagttgtatgtcagtgtataaaacatactgtgtggtataacaggcttaataaattctttaaaaggagagaactgaaactagccctgtagatttgtctggtgcatgtgatgaaacctgcagctttatcggagtgatggcaatgctctgctggtttattttcaagtggctgcgttttttttagtttggcaggtgtagactttttaagttgggctttagaaaatctgggttagcctgaagaaaattgcctcagcctccacagtaccattttaaattcacataaaaggtgaaagctcctggttcagtgccatggcttcatggcattcagtgattagtggtaatggtaaacactggtgtgttttgaagttgaatgtgcgataaaattattagccttaagattggtaagctagcaatgaatgctagggtgggaagctggtgagccagtggccattagataaatacctttcaagtgtgagcttagacgtcaaccctaaaatacttaaccgtaatgctaattgtgatcattatgaatcccttcagtcacattagggggaaagtagttggctataagtacgtcattcttagtccagtcagtcttaaaaacatcttgggttacccactctgtccactcccataggctacagaaaaagtcacaagcgcatggtttccaaccatatgtgttttctgcagttatttctcttgttctggccaaacaaccctaaaaatccttaccattccacaaagttggaccatcacttgtgcacccactttgactatgagtataccaccacattgcatttctgtttgcaccatgtcttccaggagactagactactgttgtccagggtcaatttgagtgtaaagaaaatgtagacaaggaattgcccaattttaaattctgactttgctgacttaatttaaatgctcgttctgaaccaattttctcctatcttctctaggggtttcaaaagactcagttaattgatttccaggaagtactcatagcaagttcataaaagttcttgagacctaaatttcttcacaaaaaaagaaaagatcttaagtcatacattttaattgtgtagaggttgttcaactgaaggaataaatgtctattaaactaaaacaaatggaccttctgttattttttgtcatcttacagtgctaatgtactttaaagcaaaccaaatgccctaaccagcaaaaaggcatcaaaatgtgattatagaaataatataatttgagatagcataaaatgtacttattctctcagttctttgatcattgcatgaattaggtttttatctaaaactgttcagctgggtgtggtggctcaggcctgtaatcctggcactttgggagacaagctggaggatttgttgaggccagcctgggcagcatagtgagacctaaaaacaaaaaaaatccttaaacatgactaatttgggaaggaga

SEQ ID NO: 3761 - DNA, 1250 bp, Homo sapiens
gatggggtcctgctctgtctccaggctagagtgcagtagcatgatcatggctcactacagccttgaactcctgggctcaagtgatcctctcgctttagccttctgaatagctggcactactagaggtgctgggtgcaaaccacatgcagcaagtttttaaatttttttgtagaaacagcattaccttatgttgcccaggctggtctcaaattcctaggctcaagcgacaatcctcccacctcagcccccaaagtactatgattacaggcatgagccagtgtgccgggcctatctccctttttaaatcagtgggagttacatgtgctttgaactttgcggaagcaggacgaataatgggaaataaggaaatactttattttttgcttttggtgtaagcaaacatttcatatcagtatcctgtttctaaagttaatggctttactgttgagatttgcaaaaataaaaaatacgtattatcttgtatctaattatgtgattttcctcctattttctaggaggtgtgattgcctatatcagttcttccagctcagcctcaagccctgcctcttgtcacagtgagggttctgagaatagtttccagtcctcctcctcttctgttccatcttctccaaatagctctaattctgataccaatggtaatcccaagaatggtgatctcgccaatattgaaggcatcttgaagaatgatcgaatagattgttctatgaaaacaagcaaatcgagtgcacctgggatgacaaaaagtcatagtggtgtgacaagtaagttactttggttttctaaagattgctgccattaattgcaaatggggcttattttatcagcttttcatttaggtggccattatgtttctgggtacagttttcactccttgctgggtaatcatacatcagtagttagggaagaaatcagtgatgatgatagaagttataacctaggggctgtcattaattcttgcctcagagcaagacatgtgattatgtactctgcctgaccctggtccctctagggtaccctcttttactacatttcacagttacttttcttctgaactactagaactaagtcttgtttctagaacagagtacttgctcattgtgggaaggggttacgttagtgaaactggatttgggaatatttgggatgaggaaatgttggattgggataaccaaatgagtagggggatttggacctatctggcctctgtaggtgaagtaaattgacacagc

SEQ ID NO: 3762 - DNA, 1244 bp, Homo sapiens
ttgaatttttactaatctgggcattgtgcatactttttgggtaatatataatttcagaaataaaggtgttacatttttcaggctagaacttggtaaatatgaaaccaccaaggtggtgaattactgtatgtaatctttttcctccaaaaaataagataactggtcttacacttaggttagcattatgattctaattttaaaagcaccattatttgtaatacttcctaaacataagcgaagtttaaggagtgatagttcttaatactagtctttacttcctttcataacttttaaatctattgaaaaaaaatctagaaaccgaagaagacatcttttgatcaggattcagatgtggacatcttcccctcagacttccctactgagccaccttctctgccacgaaccggtcgggctaggaaagaagtaaaatattttgcagagtctgatgaagaagaagatgatgttgattttgcaatgtttaattaagtgcccaaagagcacaaacatttttcaacaaatatcttgtgttgtccttttgtcttctctgtctcagacttttgtacatctggcttattttaatgtgatgatgtaattgacggttttttattattgtggtaggccttttaacattttgttcttacacatacagttttatgctcttttttactcattgaaatgtcacgtactgtctgattggcttgtagaattgttatagactgccgtgcattagcacagattttaattgtcatggttacaaactacagacctgctttttgaaatgaaatttaaacattaaaaatggaactgtgttctctgtctctttactgaagataaaggtgtagtaaaagctcccacacacctttaaaataaatatattttattctttgccaggagactccatggaaaaaggtaaacagtatatgaacatagaaagcattgttaaacaaacaatctcaatgtacaaacagagccagtgaaagtacatcacagacttgctaatatatcaaaaaaaaaaaattccactagtgcttaaatgagaactaagaaactgacacttgtatctgttaaccactctaccacagctttcactctgcttcatagtgattgaacaaggtcaaaggaggcagattctatgcctgtttctttgggagttgttaatattaattagccccttggcatcaagaaggctggaaaaaaaaatcccaatatcaggcatgaatcaggaaggacactagagttacatg

SEQ ID NO: 3763 - DNA, 1197 bp, Homo sapiens
cacacccttagactatcaaagaaacaggcatttcagcgctatgttgaagacaaccatcatgacacaaattattcaaaaaagaaatagtgtgttgtatttaacattacaatttaggctcctctcagtttgtcttaagagaaaataaaagatgcttcttgccttcttgtcttttttttgttttgttttgttttttgccattgtagctactgccaattgagacattctgtagtttttctcagattcagagaagaaaatatctcacaagtttgttcatccaacattgtaatatgagttcttcagattcctagagaaagctcaaaggctgtccaaatccccacagctatggccatctctagtcttttgattttaactatacaaggaaattcttattatgaaatctttttatgaattatttttaaacattttttaacatttgtaatgttagtttttccaaggaaaactttgttgttagcagcaaatttttccagaataaaacgctgacaaaaaaatcagtaactttttaaaaaggctttatttagtgctttatatgttgctggcactgtttgatgagacgggtttgtgtgtgtgtgtgtgtgtgtgtgtgtgtgtgtgtgtgtgtgtgtttcacatgaaatatgcacatacacatttattttttatttaatttagctactttagctcatttaatcttcatgacaaccctacaaggtgcatttgcttatcataaattatcattcattttatggaacagaatgaggcatagagaggtaaagtatattgcaaaaacgtacacagctagtaggtggcagagcaggattcaagcgcctgtaggttgtggtataaacattttcctcaactgcctcacaacacttgctatgtagcctccacaactgtatgactctaactgatgggatacgtacacatgaaaaatggttaagaggccatatacagcaaaaaagtttgtgctgtacgactgcttatatgcacctaaaacaaacaaacaaaaacactggtgtgcttaccttaaaataaacttgagactttattacagttctggaagaaaaaattgtttttcacagacctgagctaaatttttgacaatgtataaacatacatgagggctagtagcacagtggggatgccttgcaagtgtaagttttgctagtctatgattgcattgggctgggatacagaaat

SEQ ID NO: 3764 - DNA, 1231 bp, Homo sapiens
cattgttgttgttgttgttgttgttgacagagcctcactctgttgcctggctggagtgcagtggtgctatctcgactcactgcaagctccgcctcccagattcatgccattctcctgcctcagcctcccgagtagctgggactgcaggcacccgccaccacaccgggctaatttttgtatttttagtagagacaggatttcaccatgttggccaggatggtctcgagctctagaccttgtgatctgcccacgtcagcctcccaaagtgctggaattacaggtgtgagccatcgtacctggccttaaattcgtttttaatgaaaactttctattagttccataaatgaaaaagtggtatcacttgccataataaaagagaaccatgaaagaaaatgtgttcttatgtggccctgggatgttattggtaggcccaaaatctaaggcccactctctacattagaaaggagagaattagcaggtgtcaagagagctgttaaacacatgctggcacaaaaatgaaatcttttttcttgaaatattcataagggtctatggccataccaccctgaaggtacccaatctcgtctgatctcagaagtaagcagggttgggcctagttagtacttggatgggaaataatcagaaggatcaaaagataaatgaaaaggaggccatttccttctctgtgtgattcagtgttgttcattgttgtgcccatacactacctaaatcatagtatgggacacatgaacagctctatcatttgaagggcccattgcaaaatgaaaatgtgggtccttgtttaaaaaattattaatatactcaaaagaagacacacaaatggcaaacaggcatatgaaaaggtgcttaacatcactgatcatcagaaaaatgcaaatcaaaactaccatgagatatcctcttaccccagtttaaatggcttctatctaaaagtcaggcaataacaaatgctggtgaggatgtggaaagagaaccctcgtccacggttggtgggaatataaactagtacgatcactatggagaacagtttggaggttcctcaaaaaactaaaaatagagctaccatatgatccagcaatcacactgctgggcatatacccaaaagaaagaaaatcagtacattgaagagatacttgcactcccatgtttgttgcagcactgttcataatagccaagatttggaagcacctaagtgtccatcaacagagga

SEQ ID NO: 3765 - DNA, 1215 bp, Homo sapiens
gtgtaatttttctttatcttccttttctcattttcttatgtacacacaagtatgggcaaaattggagtatgttagaactccaaactcaaggataagctagactaagaccctgttttgataaaaaaaaaaaaaaaaaaaaaaaaaaagttagtgggatcagtaaaaaagttacctacagttaacattgttaaacattttgaattttaatcattcttgtttcatattctccctgatctttttatgtattcctccagatatgagctagttctttgtatgcaacacaaaaaggtgtgggtttttttttgtagtttataaagaaggcaaattgttttgagatgttgctttcaaacttatgtaaggtaaacaaaatgtaatgatgaagagtacatacattaatatttttgtgtctcattttatatgtaattaaattttccatttttttcttcctaggtttacccagggttgatgataaccgctggccttattcattggattttaaatacattgaacataactgttcacataagagacgtatgtgtgttccttgcaccaacttttagcggccttacatctatatctactttcctgcttacaagagaactttggaaccaaggagcaggacttttagctgcttgttttattgctattgtaccaggctacatatctcggtcagtagctggatcctttgataatgaaggcattgctatttttgcacttcagttcacatactatttatgggtaagtgacatttaatgttttgctgccattattactcgtgacctttctcctgaaacactttaggctgtacgcagatttgtcttttacaaattatgtagttgcgtacagagatctgtattactgttcataatcaatttaataatggataacattttaaaatatgttaggcatctctcaagttatgtgtaaatatcctttttaaataagtcagaactccaaaagaagagctatcataaaacaatctgttgatatttttgtttctttgttttggggagataggtaagaaatagttacccaggaaagttgaagcatggtttgatggctaagaattttaaattgtttctgaaactagcattatttattttgctgctgccaggctatttaaacttaatgattttttcccctgtgtatgaaatatgatgctacttgggttcactttagagcttgcatttatttatgtatttattattttagctt

SEQ ID NO: 3766 - DNA, 1181 bp, Homo sapiens
aaagtacctcaacataatgaagtccatatatgaaaaacccacaaccaatctcataatagtgaatggctgaaaccttttccagtaagatcaagaacaaacaaggatttttttttttttttttttttttgcctccttccttcaacacagtatttgaagttctaggtacagcaattaggcaagaacaagaaataaaagacatccaaatttggaagaagtaaaatctgttagcaaatgacatgattgtatctagaaaatcctagatcccacacaccccccaaaaaactgttagaataaacaaattcagcaaaggatacaaaaccaatgcacaaaaatcagtattatgtgttttttacgaaatgaggtcttgttatgttgcccaggctggagtgcagtggctattcacaggagcaatcatagcatgctgaaatctcaaactcctgggcccaagcaatcctcctgtctcagcctcctgagtagctggaactataggcatgtgacactgtgcctggcacttacacttttatatgccaacattgaacaatccaaaaaggaaactgagaaagatctacttacagtagtaccaaaaagagtaaaatacttaagaattaaacttaactgaggaagacttgcccagtgaaaactacaaaacatgctgaaagaaattaagacagataaataaatggaaagatattctggttaacagattggaagacttactgttaagacaatgctactcaaagggatctacagattcaatgcaatccctatcaaaatcccagagttttttgcaaaaatagaaaatttcatcctaaaattcacatggaatcttaaatgaccctgtacagacgaaacaatattgaaaaaagaataaaaaagttggaggtctcatacttcctaatcttgtaacttgctacaaagctacagtaactaaaagagtgtggtactggcataaagactgacatcgaccattggaaaagaataggccataaataaacattcgtgtatatagccagtgattttcaacaaggtaccaagatcactcaatggggaatgcagagtcttttcaacaaatggtgttggggaaactggatatccacatgcaaaagaatgaagttggacccttatctaacaccatatataaaaaccaactcaaaatggatcaaagtaccccctacccccca

SEQ ID NO: 3767 - DNA, 1169 bp, Homo sapiens
cgggagacggaggttgcagtgagccaagattgtgccactacactccagcctgggtgacagaacgggagtccgtctaaaaaaaaaaaaaaaaaaaaaaatcaccaggttccttgacatagagctctttgtggaatgccatgtgctctttgacatattgacaagtttgatatcatcgtgtgacttgaggactaggaaatcacagctcatatgtatttatgcagaatgtgatcacaaactcatgcccctgaaaaattaagctttctatgtaggcaagacagtgattttgttcagagtaattggtatttccttcatttatgttattaatatttgacagacatattatacttcctgtgtgccagatactattttaagcattttacaaataacttacttcaccctcattgaagtcctgtgaggtagatacttctattactcgattcctttgttgcttatacttttgttttatattccggtggcagcctataggcagatgcttgtagctgcctccagtttaagaaaaattccttggagaaaacctcagctctgcctcataactgatgctctcctctcccagaaagttgggaaagttccaccttgatttgaactcgctggccaaacaccagctatctctgtagacacagattttgacaggttcagacccagattggaaatgattttgattcaggttgcctttgagtctgtggagagtcagagtttatggcaatttcagcccgctctatcctctgtttgggattatgtgttcccagagagtaaactgtgtggccccagagtcaccctaggaggatctgagtgaccctgggttttgtgtttttactctgtggatgttgtggtcacgctggatcatgttgtgtggaggcttgggagcatgtgttggaggaacagttgagattttaattttatttttggtggcttttttggtacatccaaccctttcaggttaattaaatgccaggtagagctagcccacaagtggattttgttttgaaaatgtgcctgttttccaggagccctttgtggcagcctggtctggttgcccagatatcattttggcttcttggtgccttagtgcctgggatgaattggcctgcctgctgcagtctcttctcctcagccctgatatccgccaactgggtggctttgatgcctct

SEQ ID NO: 3768 - DNA, 1194 bp, Homo sapiens
caaagttttaccttactacccccaacccccacctgcctctttctgtaaccattcagtgacaattactaggacttgatgtatccactgcctagcccaggggcatcttgggagatgagtatcctgtcaggcagtacccctagaacagtacatgctggaagaaaagctcccctacgtaccccgtgtgacagagagaacaggaactgcgggctcactgggagagctggttacacaagcaggaggcagtcagccttctgtgactgcactgccctctgcagaagctttcatttgtttaggcatgttcttgaactggtattgcagtcagaaaatcctagaatgaaaacaggaaaaaagttttgcttctttcagaaagcccactaagggccaggtgtggtggctcatgcctgtaatcccagcactttgggaggccagggtgggaggactgtttgaggccaggagtacaagaccagactgggcaacatagcaagacccccatttctaaaaaaattttttttttcaatttttttaacgagaaaagataggtcatttcaaagaggtcttgtgaggctgtgaaaccaagagctcttaacactgcgaccaaagatggaagttctctataggatgccatggcatttgatggtgctatgttttcttgaggagatataagaaaaaagaaaaagaaaaaaaatgataaaagagaatccactaggcaccagaaattgctctggggagagtgcagatcaacctccacccagttgtctctcagcctgaggggggaaatctgacacttcctctgcagcggagggagagaagaacagcccacatatctgcccagtgacaatcccaggccttgaaagagctcactgcttcatggaggagtgaaaacagacttcatatatcctaggaaagactctgcaacttaagggaaagggagcattgtcctgagatcttagagagaaaacactgctgtgaaatgtttttatatcagaacagagaaagattttagaaaatatccacaatttatggagcaatgtaccagagataaggaagttgtaccaagagagagttccagagatctgcagtgttccctcgagcctttgcaaagtatggctttccacagtcttaggaggaagctacatgagtccagggaaagagcccttagaaagatgtggataagcacaatctaaaaagtcagaa

SEQ ID NO: 3769 - DNA, 1148 bp, Homo sapiens
attagaaatgatacactttcctcagatgcactgccgccgtattcactcctaagtgaactccctgaggttatttgagcaaaactacaggctttcagatgttctccgaaataaaaacagcataaccagaaatcatttgagaaggatagtaattgaaccaataaagtagttttagatggcaaagcctggtatcaagaaaaggtagtgagtgggtgattcaatggaggtgaaatgataacttttgctaattaggatgtgccctaaaccccacttctattatgctttgttttctccagttctttgccttcctggtcaccatctgctacgctggaaatacatatttcagttttatagcatggagatccaggaccatacagtgatttaccattttgataattaaaaggaaaaaaaaaggaagactctcactgtaaaaacagctgtaggtataatgtatattcccagagaattgtatttaactaattaatgttttttatattcttaaatttgctcacaaattgtggtttgttacaattaaactggatacttatttgcaaagtgttgtagcttataatgaactcttaagtatcttattaatgtattaatgtcttcatagatcatattttcttagacaatgtttaaatagataaattgctaatattgagaatgtgtcaagtttgtaaacctaacttttaagatgccagattcttttttgattaaatgttgcaaaatcccaagtaatgttgtgtttgattggagaaaggagacctacctgttgaagccagaggctaggctgtcaaggctggtgggaggctgggaagtctccctcttcacagggctgcatcgtatgatattgtcaggtgacacttatccatagtcttagggcaaagaggcgggagattcatctccccaattctggggatcatagatcagtgttcatgattttcatatgctaacaggttgccccagaaagcatctattcagacctggccttggacatcagtgataagctcatgggaagttatgctactaagtgcagtgactgacgtgcttgtgatattttttctaatatgcattataaaaaaatatataactattaaaaggataaatatctgaatatattgaatatatcttaaaattatcttgctggctgg

SEQ ID NO: 3770 - DNA, 1190 bp, Homo sapiens
gaagtgttcaagatagctattatcattaaagtattatgtgttcttaattgttttgctttgactactgatttttcacaattcctgtttttattgttatattttttaaactgctgtataagttacaaaggagttgggccgggcatggtggcacacgcctataatctcagcattttgggaggccagggtgggcagatcgctttaactcaggactttgagaccatcctgggcagcatggtgaaatcttgctctacaaaaaatacaaaaatcaaccaggcatggtggatgcacctgtagtgtcagctactcaggaggctgaagtgggaggatcacttgagcctaggagatcgaggctgcagtgagctgagatcttgccactgcactccagcctgggcaacagagttgccctgtctcacacacacacacaaaaactatatatatatgagttttatttctagtgtattactgatcaagaagtaatggatgaagctgggcacagtggcacacacctgtagtgcaagttactcgggaaattcaggtgggaggattgctggagcccagaagttcaagactagcctgggcaccatagactctgtctttaaaaaaaaaaaaaaaagtagtagtaatggatgataatagtacagcattttaaatccatcactatagagatggtctgatcttactctcctcgatttagaagttggggaacaaatggaattatttgacaggtttacacaatcaataatgacagtgttgcagttagaaatcacatttctaagtcttcacagttctaatctgttaattgttgttattattttttttttttttgagatggagttttgctcttgttgcccaggctagagtgcaatggtgcgatcttggcttaccgcagcctctgcctcctgggttcaagggattctcctgcctcagccttcctgagtagctgggattacaggcatgcaccaccacacccggctaattttgtatttttagtagagacgggatttctccatgttggtcaggctgatctcgaactcccaacctcagatgatcggcccgcctcggcctcccaaagtgctgggattacaggcgtgagccaccgctcccggccccctgttaattgttattatgaagttgatggagattacattctattgttgagttagagatctatcagggagataaagcagtat

SEQ ID NO: 3771 - DNA, 1229 bp, Homo sapiens
tcagttctcctgattgttctgtatctcctcggctctctggaagttgtgtattctgtttctttagtgactctgggggtggggatagaggactgagggagaatagttcgcagattcgcatttttctaggcttagctcctgaatcatttataggagaaatttctctatatagctctttacatgcgagataactgaagtttggcttatacgatgattaaatttaaaaactttggtatttggtgtcggctcaataccagagttttttgttgttgttgttgttgttttggttatatccatctaaaaacaggaaacaagaagtcaaatactacttgataggctgcgtggttaaatatgaatgtttacatagaaaaaattacttttttaatagactgctgccaagcaagaatatatgattattgatattctttaaagctacatggagctagttgaaaaattagtttttacccttgtttttaatgtggttgaaagcacctactgaagattagcctggattgagtcactgccctatcacatataagccctaggatcttaagcaagttgcttgacatctataaacctcagtttcttcatctttaaaatggttgttatagaaataataatacttgcctctagggttgtggcgggaatcaaatgagttaatgtttgtatcgtggtaatatttgcaagtgatactttgtcatggatttatcttaaactgcattagaaaatatttgtgatcagaactttttaaaaaattgaattagtgcctacataagtgatattcatagggcaaaaataaattaggatccaaaagcaaaaaaaaattgtataatatatttttagtttactaatttaaacaaattactactcatttctaaggtaaaatggatttaagctcatatgacctcattgaaattgattctattttaattaaatatttggaaacactgtcatggtaaaggtaagattcagtagttttgttcttattttatacattttgtccagttatttctgcacattagatattgtgtagatgattctgtttatggtaaaacaaaagtggcagttttgttcattttttggtatacctaatttgcactgaggttgtgccattttttttttaacacccctttgacactgggtctgtgcatgggactgagtgttcttagaggtcccagcctccttcactccaccatacaagaatagattaaatttccttttttatgaactta

SEQ ID NO: 3772 - DNA, 1195 bp, Homo sapiens
tgtatccacatggtcttagacctccttttaatgattgtattaacttacaagctcaggtagtatttttcttaagactctatctcagagcacactgactgaatgttgatgtgtgtagcaaagtgtttactttctttaaataaccagctctgtaactctgtaagttctttgtgtttctagcagtctgtgtagttgtctttcttcagaggaagatttttcacatttctggggttttcttgcttttagggtggtaagattcctttctttttttcccttttctcctaaaatcgatgcaggtaagggtgggtgggtaaggggtgttgttttttaactagcatgttagttatacttgggtgggtgggagggttgttaaactgaatcttgcttaatactgtccattagctctcatgccgggtcagcaaaatgctttaatttttaactgcagaacatgtgactcggttgagtctttttgtcttttttttttttaaataaacaattgggggaattaatgtgggcaagttgccttatgttagaatgactaagttaaacctcttaatttgtatttgtccaaggcagacatgatataaggaatatgcactaccgtagtaactcccctggccgcagaaaccacactgcaagcctgtccggggtggggtgctgactgccatttgccacttttaaatgggcactgccgtggtaatgtgaatcccatcaatgcagtagatgggtggggaaatgaagatttccccccaaacctttaggcaaaagtgagtttttgtttggttgattttgggtttttttcccccctcctcttttggctttcacattttaaatcttaaatgttactattgcaggccgcaggcatgacaggcaatgagcaggtgaagaaccaatggaaaagtgttcaaaaactcctgtgttagctaacaggcttctgaatgtatcactgtggtccacagagaaggctggaggaggtagcaaggagatgctgtatcagctactacagccttaaaacaaagttggtgtctctttggactttaaaattgttcctatgcagcttattttatttttgtttaatcaaataaacgagggtttttccatggctacagtgtgtctgtgtgatcctttaatccatagtaaataagggtatgtgcactgtactggatggaaagggagtccctgaggtagacagtccagg

SEQ ID NO: 3773 - DNA, 1199 bp, Homo sapiens
tctaacagtttgtgtgtgtgtgtgtgtgtgtgtgtgtgtgtgtgtgtgtgtgtagtctttagggtttcctacatctaagattatatcatctgtgaatcgatcattttacttctcctttctaatttgaatgccttttatttctttcttgcctagttgctctgactaggacttccaaaactatgttgagtagaagtggcaaaaacagacatcttgcctttttcctgatcttagaggaaaagcttgcagtctttcactattgaatatgatgttagctatgggctcttcacatgtgggctttatgatgtggaggtagttttcttctattttgcatttgttgagttgttggtttttttaatcatgaaagggtgttgaatcttgtcatgctttctctgcctcaatttagattatcatgtggtttttgcccttcaatctgttaatttggtgtattatattgattgatttttatatgttaaaccattcttgcattttaggaataaatcccacttgatcatagtatataacccttttaatgtactgttgaattcagtttgctagtattttgttgaggatttttgcatcaatattcaccaggaatattattgttctgtagttttcttgtagtgtatttgtctggctttggtattaggataatattggtctcatagaataaatttagaaatgttcctcctcttcaacttttgtaatagtttcaggaggattggtattaattcttctttaaatgtttggtagaattctccagtgaagccatctggttctaggtttttctttgagtgtgtgtgtgtgtgtgtgtgtgtgtgtgtgtgtgtgtgtgtgtgtgtgtgcgcgcatgctgagacatggtcttgctctgtcgccggggctggagtgcagaggcatgatcttgggtcactgcaacctccacctcccaggttcaagcgattctccttcctcagcctcccaagtagccaggaccacaggcacgcgccaccacacccggctaatttttgtatttttagtagagacggggtttcaccatgttggccaggctggtctcaaactcttgacctcaagtgatctggccgcttccccctcccaaagtgctgggattacaggcgggagccaccgtacccggcctctttgaggtttttgatgactgattcaatctttttaatagctattggtctgtatagattttctgt

SEQ ID NO: 3774 - DNA, 1241 bp, Homo sapiens
gtactgtcacaggtgggcaacaccaagcagagaggctggaggtgggagttccaacctcaggaggtggcaaaactaggcgactttccaaatcccctccaacccagaggctccaccatcctttgggttttccaggtctggtttagctgtaggggagctaacctagatctggagactgtggtcccatccagatgggatccagacactctaggacccagatgagacacctgtttgctgagcacatcctccctatctccctcagccccaggacaatccagctttttccagctgcttccagggacctgagaccagctcaggtcaccagagctggaagtggaacataggcatttctccataggcatgtgcctaactagaactaagtttcaagcctggcctccaggctgccgtggagaccccatctgtggcctgcccacccagggctgccagtcggccccaggctctctgaagaaggactgtggagaaggggcttgttcatatggcctttttgtttagaagcagagaaattatagggtgtggtttgctgatttcttcatttgtcttttcttcccaaccctagtgaacgacctgaagaatgcagccccctgtgcagtcagctatctgctctttgatcagaatgacaaggtcatgcagcagaacctggtgtattaccagtaccacagggacacttggggcctctcggatgagcacttccagcccagacctgtaagtctggtgcaccacaccttcccttttctcttcattcttgccttctggagactacctcgtgccttaagagaaagggttattttggaaataaaggggctgggcgcggtgactcatgcctgtaatcccagcactttgggaggccgaggcgggcggatcatgatgtcaggagttcgagaccagcctggccaacacggtgaaaccccatctctactaaacatacaaaaattagccaggcgtggtggcacgtggctgtagtcccagctacttgggaggctgaggcagaagaatcgcttgaacccaggggcagaggttgctgtgagccgagattgcgccaaaaaaaaggaaatcaaggaaaagtcatttttttctgtagttttgtgcatgtgtgtgttttaacattttactgcttcattctgatttctgaatctgtaaaaactctacaaatttcaaacattacagaaatattttactttgaaaacaaaattctctcataatcctacaccttctttctctctcgg

SEQ ID NO: 3775 - DNA, 1099 bp, Homo sapiens
gttcctatgcgtcactaggtaagagaactgattatggaaaattgtaccatgttctctccctgatctctgtgaagacaagttcatataccttaatcatttctattcattcttgttatttaaggatagtccatatgttttaatataattctatattgcggacacacttctgaggaatctgagctgccttgtttctccttttcccttgttctcatcatcgtcttgatcaaagaaacaattcttgaatccatgattgcctgtagaattttcataactgcacttctaccacatctagccactggtttctaagggggtttgggaagggaattggcttgtatctaactttcctgttttctttctcctacttctcttctcttaccaagaatgtgaagccttttggagatctgggagaactgcaaagctctactctgtctaaccaaaccctaaacatatattccaaaactctattcagtttgatttcttcatgtttttatgtctatcaaattaaaaagttgacgttggtttgcgtatctcttcttcatgcttccatttttttcttttgggtagtactgctggaacactaagcaggcagatcgccagaacacaatacaggttgagcatacctaatctaaaaatctgaaatctgaaatgctccaaaatctgaaactttttgagcaccaacatgacactcaaaggtattttggactgaggcgggcagatcacctgaggtcaggagttcgtgaccagcctggccaaagtggcaaaaccctatctctactaaaaatgcaaaacttagccgggcatggtggctcatgcctgtaatcccagctacttgggaagctgaggcaggagaatcacttgaacccaggaggcagaggttgcagtgagccaaaatcgtgccattgcactgcagcctgggcgacagagtgagactccgtcaaaaaaaaaaaaaaaaaaggtatttcggattttggatttttgaattagcaatgcctagggatgctcagtcatttaagtatgaatgcacatatttcaaaatctgaaatctaaaacatttttggccccaaacattttaaataaggagtactcaacctgttagaag

SEQ ID NO: 3776 - DNA, 1099 bp, Homo sapiens
attttctgatagttctggagcctggaaatccaaggtcagggtgccagtatggtcatattctggtgagatttacagatggccttctctctgtgtcctcatatggtgaacagcaggaggaagccctctggtgtctcttcttgtacgggaactaatcccctatgaggccccaccttcatgacctcatctaaaccccattattttccaaaggtcccatgttcaaataccatcacattaggagttagggattcaaaatacgaaatttggggagcacagtcccgtacatagcagcaggtatatcttaaataaattaatagaaatgggattgccaatagcaaaatataaatatgtctgtaatttgttacatatttggattgttgatccacttggaatttatcctgatgtgtggtgctagatatggatccagtttttaaagtcttcttccaaatggctagcccattgtccccaaaccatttattttataatagccttgtttacctcactgatctgacattctgactttatcacacattagattcacggtatatattgggatctatttctgcttttattgtttcattgacttgtttatctgttcatactccagttccatatcattttagttatttatacttgagactgttttaatgtctgataggtattatctctcattttttgaatttttctgcctgtccttgcttgtttcctaaattttgtcattttctgggttttcctgactattcttgcatgtgtttcttcatatgaattttcttttgtttaactatgatggaaaacatatataaaagtgtagttgtgtaactatgatggtcaaacatatataaaagtatgaatcattgaacttctgttacccaacttaagtgattatcagtatttcgctattttgtgttttagttatttctcctttcctcatttttttggagtattttacaactatctcacgtatcatttcattcttaagttttttagcctgtgtctctaagagataaagatttaaaaaaattaaaaaacaaaaatttaaaaaattaagaaattttgctagatgggtcattatcccaatctagcaaaattaatattaatatta

SEQ ID NO: 3777 - DNA, 1240 bp, Homo sapiens
taatcaattgtgtttctatacactaaaaacgagcaattaaaaaaataaatttaaaaagaaattaggaaataagcacttcaaaaatgaaattagtaaacagtgtggacattcctcaaaaaattacaaataaaactatcacacgactagcaatgccacctctagggcacacatccaaaatttgatgcaatcaggtgcagcaaaatctcacaaatcaccactaaaggacgtactcatgcaaccaaataccacctgtaccccaacaacttatgaaaaaactaaataaataaataaataaattttttaaaaatcgatgcaatcccatttacaacagcatcaaaaagaaataaagttaacaaggagacaaaaaggatgtgagggtgatctcactgcaacatctgtcaccccattgattgccagcgttgatttggctgatccagctggataggcaggtgtctcttttctccctcactgctccatgtgcatctctcttgaagctgcgcactggtcgaaggggacgaccatcacccatagagaagtactggtcttcagtcaagggtatacaagaagctgcattctcctgttagaacctccaaacaagctctcaaggtccatttgtaggagaatgtagggtagtcaagcttccaagactccagacacttccaaatgaggtgctgcatatagcagtctgcctttcttttgaaaaaacaaaaaaacacaaggagacaaaagacttgcacaatgaaaactataaaacgatgctaaaataaataaaagaagacataaataaatggaaagacatcctatgttcatgaattggaagacttcattttgtgaaaatgtctgtactgcccaaagtaatctacagattcaatccaatccctattgaaagcttaatcacattttttgcagaaataaaaggaatatcccaaaatttctatggaatctcaaaggaccccaaatagccaaaataatcttgagaaagaagaacaaagctgaaggcttcacacttcctcacttcaaagcatattacaaagctacagtaatcaaatatttacataatattttaagtgtatattatcataataacataatcaaatatttacataaagccaaacatatagaccaatggaacagaaaagaaagcccaaaaataaatccataggtcaaatcatagcaagggtgccaagacaacacaacagagaaagcatattgtcttcaacaaatagtagttaaaaaatac

SEQ ID NO: 3778 - DNA, 1106 bp, Homo sapiens
ttccaattcctgaaacctttacagatctcattctgtggattcttctggattctaattcatggggcattttttttgttttttgttaattcctcatactttatctgtggggaattacttgaagcctgggttgacaatgaaattctgcagagagaatttgcatttgattctactggaggaacagtcagccccgatatcagtttaaattaaaatctctgcttaaggttttcaggcaacctgcttagcatgaatcctggctggaaaagcatgtgaggaccagtttatgattacacattcacagggtgtcatgttttcttccaacaccaatgctagaggtggcagttttgcttactgcccttggagggacaggggagtgggcatgggcatagtagtatggttttccttttcactgggggtgcagcccttggagtctcagcttaatgtgttggggaagtggtctcctattagactctccatttcaaaccattccatgattttgtcctccttttgccaccttccgagcctgtaaaaactaatgtttgtgattcctgaggtttctctaatgtcttttaataaagttgacctcagagatctcgttacctctctgagttcctgctttgtcttagattttgatccttgagtgttctttaatcttttagcaattccttgttgcatgttaaaagattagttatattttattcctcatttgtgttcgttttcaccaggaggctcaattcaggcttctttgcttacttggtgtctctagttctggtgcctggtgctttggtcaatgaagtggggttggtaggattctattacttacctgttttttggttttattttttgttttgcagttctccgggagatgttgcataaccactccttcgtgggctgtgtgaatcctcagtgggccttggcacagcatcaaaccaagttataccttctcaacaccaccaagcttaggtaaatcagctgagtgtgtgaacaagcagagctactacaacaatggtccagggagcacaggcacaaaagctaaggagagcagcatgaggtagttgggagggcacaggctttggagtcagacacatgtggtttcaaatccaagttcg

SEQ ID NO: 3779 - DNA, 1165 bp, Homo sapiens
ttattttgagacagagtcttgctccgtctcccaagctggagtgctgtggcgcaatcttggctcactacaacctccgcctcctaggttcaagtgattttcctgcctcagcctctagagtagctgggattacagacatgcaccaccctgctcggctaatttttgtatttttgatagagacagggtttcaccatgttggccaggctgcccagctatagtaattttaaatggttaagtagaatttctgctgatggcagctttctgaggctaatattataatacacacagattgctgtgggtagcatagtgaaaagaagtaggagttttagtaattagtataaaattaaatattctaaaatttattggaataatttggtagtgggaagaggtatttggtgactaatttctctgttaaaagtgaatatataaatgagcatgaaaattgcacaaagaaataccttaagttattatgtttttgtttacttcagggctgaaaacacagttaaatcactttcaaagttaaaagactattaagaacacaagatggggactcctgcttctggaaggaaaagaacacctgtgaaagaccgattttctgcagaagatgaagctttgagtaacattgccagagaggtatgtttggtaaatcccctctcaacactgagttgcacagatgtattgtaaaaatgccgatttgacagagatatagacgtttactcattgaactagtttcagatgtttattatgagcaagatgttatagctagtctctaaaatagtgtgttagaataaaatatagttggatattatcaacagaaatcaaatatagagatgaatctctgaacaacacattttatttgagacagtagaattgtaatttgggcatacacacagactgcattggtctttggtatgtccaaagaacaaagaaaagattgaggtttttattagagaaatgttatgcattgttttgaaagaaaatgcattggcactagcgaagtttttgggagctggcatgctctgatttgtgagtgactgtggtaggtaaaactagtcttagagttatagcagttcgtttccgcagctactaggtaaaactgatcttaaggttatagcaggtcatttcagcagctggcttgccagataatccctgggcaggtgcttgtgcc

SEQ ID NO: 3780 - DNA, 1099 bp, Homo sapiens
ccagccaccagctggctaccactgagtaacctcagctgatgccacatgaaacagaactgaattgcccagccaagccctgcccacattactgcccacagaagtgtaagatataataaagtaggactgaggtgggaggattgcttgagcccagaagttctagtccagcctgagcagtgcagcaagaatttctctctaaaaataaataaataaataaataaataaataaataaataaataaataaataatattaaagtagttgttttaagccactaagttctggggcagtttgttatgcggcaatagataactgaaacacttggcatataataaatgcttaatagatacaggtcagagcattttgatgtcaaatttcattacccatgatcagtatgtaagagtatccaagtttgagagattactgccctgatcccaccttctatgacctcctctgtctctacccctgggattctagcaatgctgggacttatttttccatctggtgcacagtgtgccttcatctgctaaaaacctcataagtccttgttaaccatctgccttctgcataaaggacaccacaccaaacagcccccggactactttttttttgagacagagtcttgctctgtcacccaggctggagtgcagtggtgtgatcatagctcactgcagccttgacctcctgggctcaagtaatcctctcacttccacctcctgtgcagctggaaccataggcatgtgccaccatgcctagctaattgtttaattttttgtagacatgcggtctcactgtgttgtccaagctggtcttgaattcctgggctcaagcaatcctcttgcctttgcctcccaaaatgctggaattataggtgtgagccgccacatctggcccaaaccatttctaattctacctctgccatcatctccatggataaccttggatctaccttctggccccatttctccatttttatttttatttttattttattttatttattgagtttttcaaaacggggtctcactctgtcacccaggctggagggcagtggcatgatctcagctcactgcaacttccgcctcccaggttcaagtgatcct

SEQ ID NO: 3781 - DNA, 1101 bp, Homo sapiens
tataaaaaaagtttcaggctcatcttgttttttccttggatcagccttgtaatcttccatttatccaaggggccctgacttctctgagtgggagagatgtttggatgctctctctggatgctcattgctactgggatgatgctgttcccagcccctttcagtgggctgagctgggaatatgtaaggatatataacaacccctttcagtgggctgagctgggaaatattaggatatatatatacatatccaaatatatatatgtctgtatcaatacacacgttacctttctatttgtctgtctgtctacttctccatgtgttgaaaaacatgagttcaaccctatacactctacttccagtccaacaccatggggttcattctggctttcttccttcccatatttgtatcttatcctaacagtgacaaagttgattcttctgacccctccagattgctgcctccttgacatgcaagccccattttggcttctctgcttacccttacctgtgttgtctctgtgtcgtctctccagcagcctcttgaatctgccccactctggttatgtacttacatgtggcccttgagccacttctgtttgcctatttaatggctttttagagaaggaagaagaaaaaagaaaggtaggaaggtagacaggcaataaatatttttaaagggaagggtccatttacatttaatgtaattattgaaatgattggatttaattgaatctatccatttattttttatttttttaatccatccatttacaaaatggattacatatcaatttttctttttcttttcttttgttctatatgttcttttttctttcttattcttttcctgtcttatttttggattaactgagcaatgtctagtattccattttatctcctctgttggctttttaaggtatacactttttaattgatttttaaattgaaatccttaatttgaaaagtctggtttgcactaatattatacacttgaattttttacgaacatgcttgcactacaagaatgactaaaggatgtcttccgggctaaagggaaaatcataccagatggaaagtcagagcttcaggaaggaatgtaga

SEQ ID NO: 3782 - DNA, 1208 bp, Homo sapiens
gggaggcagtggggggccctcgagtgcccagcctggccagactgtccattgagcaatggctctgaggctgtgaggtgctgcttccacctggaaaaactggccctgagggctcggagccagcctctatcccccaggacagctgccccagggaattgtcaagcatcagtgaggacctgtactgggttcccagtggctgccttgacactgctgctgcctggggatgggagcacattgctggacctcgacagcgccacttagtgggctcagtgggcactggggggaagaagaggcctagatttgtggggtttgggagcagcccctcagcaacactgttgagccttgacattgagtgtggtgtgtggaccagtagcatcagcttcaccaggatgttgtaggagtggccgaatcttgggcctcaccccagaacctatgtgtagcaaggtcccatgtgcatgccaccctagggcagttgcttccaaatgctaatctgagggccatctcagtctcacctgggaagtttgtaaaaatgcaaaattcttagctctttccagaccagaatcaccagtgtgaggcctagaaatctgtaagtgctccatgatttttttttaacttgaggtatactacttcatataccataaaatttatctttttctttttctttttttttttttgagatggagtctcactctgccgcccaggctggagtgcagtggcgcaatctcggctcactgcaacctccgcctcctgggttcaagcgattctctgcctcagcctcctgagtagctgggattacaggcgtccgccaccacgccgggctaatttttgtatttttagtaaaggtggggtttcaccatcttggccatgctggtcttgaactcctgacctcgtgatccacccgcctcggcctcccaaagtgctgggattacaggcaggagccaccgcacccagccaaaatttaccatttttaagtgcacagttcagtggtttttagtatattcataaggttatgcaaccatcaccactatctatttccagaacatttgcaccaccccaaaagaaatcctgtgcccattatcagtcactatgcatttctaaagaacatcaggtctcatgttttgaatggtgaacttttgctgtgcttaaatttttatgctcattcaaacatctaagttccacatgtgcaaagttctgtgcaacgccctttggga

SEQ ID NO: 3783 - DNA, 1307 bp, Homo sapiens
gtaagtacaaattttgagcttgctattctcgtggttagttctgggtaatttctttctatcttccttaaatgaagccagacccctacgttgaaaacatactttaaataaatgttcttgttattgagagaaaagatttctgctccaggggaggaatatgtcagttgtctgagttacgggacttgggttgggtcatgaacatgagaaagttcattggctgagtttctaatagctcgcatagtgccttcaacttcataggtacttacacaggctattgaactgaattttgagtggaaagtggggtaagaggtgggaatgaacaatatggtttggaagaaccagaggatggaaggcattaagttggctaaggcacttacttattttagagataaagctaccaaggacttgggagtgacatgctgtaaaggagttttaggatgaatcttgcatcagtgcagattataaaagggaaagagtggcagaaagccaggaagtggattattaagaaccaatgatggaataagtacagggaaagagaaaggaaagatggatttagccaactgaatctaggctgcacactattaaagctcagggtggaggccagtcttggctcatgaacttctgagtgtcggaagtgtgctatatcaatggcaggattttcgctaacaccagtagagcttgcctctatgactggagtttggtagtactcgctgccacatagagtaaacttgagaagaatgtttgcacagccaggtcaagtgttacaaatccttctgccctcacttaggcatctatatcataaatctcaagaggacctgggagaagcttctgctggcagctcgtgcaattgttgccattgaaaaccctgctgatgtcagtgttatatcctccaggaatactggccaggtttgtggaacagtggttagtttttatattatagaaataaagcttacagacattgtgagacatagaaagacataagaaaacagaaataactcaggccgggcgcggtggctacgcctgtaatcccagcactttgggaggtggagtccggcgtattacgaggtcaggagatccacaccacggtgaagccccatctctactaaaaatacaaaaaattagttgggcgtgggggcgggtgcctgtagtcccagctactcaggaggccaaagtggagaatggcgtgaacccggtgggcggagcttgcagtgagctgagatgcgccactgtactccagcctgggtgacagagccgagactctgtctcaaaaaaaaaaaaaaagaaaatagaaaactcaaactccactgtta

SEQ ID NO: 3784 - DNA, 1307 bp, Homo sapiens; identical to SEQ ID NO: 3783

SEQ ID NO: 3785 - DNA, 2062 bp, Homo sapiens
gcatctagattgggccaggtagtgttgctaggtgctcgggatatatagtagaaaaacaagcctgtcttttttaatgtatgcaggaaatctctggagaagtaagagaggttaaggaaagctgggtatgtgcctgctttacatggagtagtagtgattaagttggccagtgcccagaagtgcttactgggtgccaggattgttgctgtggaatatcgagtaccactaacttttaaattcttcaaagagggctgtgctgaagtttgctgctgccactggagccactccaattgctggccgcttcactcctggaaccttcactaaccagatccaggcagccttccgggagccacggcttcttgtggttactgaccccagggctgaccaccagcctctcacggaggcatcttatgttaacctacctaccattgcgctgtgtaacacagattctcctctgcgctatgtggacattgccatcccatgcaacaacaaggtaatgattttaggatctagagtttgtgaatgcgtgctctagaaaaaacattcctgtgcacattgttagagcttggagttgaggctactgactggccgatgaactcgcaagtgtaggtagtgtgctacatgaggggcaagttttcgctaacaccacaagggtctctggcccaatgagtggagtttgatagtaattcttgctacaagtataacattactgcatgacagctttgtggagaaatgaaaacatttggaaaatagtgtgttcttctgcctttgtccatgtttcttgctcaggcctcaggcacttggcctttgttttcacaccaacttgatgggttctactataagatgctaaaaaggtgggttgtgtgtggttcagattggttgatttgtaaccctagttgtgcataagaattgcccagatattttttttaaatgccagtgtccaggcatttttttttcaatccctatgattccagtgtgcagacaaggttgaaaatccctatttataatgctccctgttacaattgcttttcaactaagagatgtctgtacttttggtacctagatgatgtaagagccaggaaggtgcttgctgtttgggtttgaccaagtgtcactttttaataatctgccactcttggcagggagctcactcagtgggtttgatgtggtggatgctggctcgggaagttctgcgcatgcgtggcaccatttcccgtgaacacccatgggaggtcatgcctgatctgtacttctacagagatcctgaagaggtaagcttctccaaaggcttgtggttacataagcaaattggacgacttggactgtgcttctaggaagcaaaacttgtcagtccctgtaagtctttcctcttttttttttgtaacccagattgaaaaagaagagcaggctgctgctgagaaggcagtgaccaaggaggaatttcagggtgaatggactgctcccgctcctgagttcactgctactcagcctgaggttgcagactggtctgaaggtgtacaggtgccctctgtgcctattcagcaattccctactggtatgtatcaggatagaggtgaatcaagctgatattttgcaacttctcagttttattctaactttaatgatctctgtgacttttatactagctttaagaggttttcattccagtgtgctacagcatctgatagactgctgttgggagtggggtaaggaaaaatactacattgaggacagagctgatggctttttttggtattctcttaacagaagactggagcgctcagcctgccacggaagactggtctgcagctcccactgctcaggccactgaatgggtaggagcaaccactgactggtcttaagctgttcttgcataggctcttaagcagcatggaaaaatggttgatggaaaataaacatcagtttctaaaagttgtcttcatttagtttgctttttactccagatcagaatacctgggattgcatatcaaagcataataataaatacatgtctcgacatgagttgtacttctaaagcccactgtagatagtgtatattgctttt

SEQ ID NO: 3786 - DNA, 2062 bp, Homo sapiens; identical to SEQ ID NO: 3785

SEQ ID NO: 3787 - DNA, 1208 bp, Homo sapiens
tgcctgtaatggtactgtgattgaacatcctgaatacggagaggttattcagcttcaaggtgaccaaagaaaaaacatctgccagtttctcttggaggtgagtgattgggtgctttatgtgtaaccttgagattgcttttaaaattgtatttaaaggcaacatgatttgttttctactaagtaaaaaatcatacgaatgaaggaaattaggtgaaataaagacatggtagttatttggaaagcaaagacctttatctggtttattttgtcattagagtattctgatcatttctttatatacacacacaggctatttcttggcatgtaaagtattcaaatacgtgttgaattgttggctatcagcagtgcatgccacagacaacagtgttgcagtaagctgttgatagtgattctttttaattactcttccatgttttcttaatgaatttttatatttctcagagttattttgctaaattagattttattttacaggttggcattgtaaaggaggaacagcttaaggttcatggattctaaaatgaacctaaatacgtggagaatttcttgaatagttttgttctctaaacccggtttggctgccttgtgaaatgattccctgcagtaaacggacttttcatttatttaatcattcaaacttccattcacatctgcatgattacagaaaacatggggtatgtagactagtaacacataagaaaattgcagtaagatggtaacaaaacctcatattgtctttacatgtttccaatggaaaatgttttgagtgtttattgttcagtttattacgtttcacttgattaaatttttttgttgttgtattaaaccatgtacgttgcagcttaacaataaaaaaaaatctatgaatctttgtgagcaattatgctcccaaatctaagcaagtaaaatacacattttgtctttcttaattggagttctctcattctgcatatattccttctgattagcttcagctgttacacccagcgcttagaggagaaccttatatccagtgctagagaacctttgttatttgtagcttgtgtttttcatgtactgatttaagaatagaagcaggagtagaaattcagccagagccactagtcatggcaaagcaagtaaaagttgtcaaagaatttatcagattgtagtattaaatgttgttaaagagtatgaagtttaacagt

SEQ ID NO: 3788 - DNA, 1197 bp, Homo sapiens
gatggggtttcaccatgttggccatgctggtctcgagctcctgacctcaggtgatacacccgccttggcctcccaaagtgctggaattacaggtgtgagccactgtgcccggcctgcaaattttcttataaaaagtaaactaggaaaatagggcaagtataaaaattgcaggttgagcatatttctaatccaaaaagctctaacctctgaaactgagctatgacactacaatttaaaaatccctagcctacccgcatggtgggttatggtcaaaatacaggtacacagcactattcagtgtccctgaggaagaaatagttaaccttcagggtacatgtatatgaagcataaatgaatttcctgtatagacctaggtcccatccccaaagtgtcatgtatatgcacttaactccaacatcagaacacatctcgtcctaagtgtttcagataagagatacttatcctgtgtatagtaggttggacttctgtttctctctaccacaagatacaggtaatttggggcagtaaaagatcctggatagatttaaaaatactacaaagctgtacatgaaacaggattacttttttttttttttttgagacagagccttactcttgcccaggctggaatgtagtggcacgatctcagctcactgcgacctccacctcccaggttcaagttgttctgcctcagcctcccaagtagcaggggttaaatgcgtgtaccaccatgcccctctaatattgtattagagatggggttttgccatgtcagccagactggtcttgaactcctgacctcaggtgatctgtccgccttggcctcccaaagtgctgggattacaggcgtgagccaccgcttctggccaggaatacattttaaataaatttgtttcctaaccaaaagctagcttcaggcgtcactggggtaaaggaaaaagcacattgatttgcttgataataggcaagtggtatggtgtaataaggaaaatatggatgatttcggattacctgttctactctgggaggtagagaattgtctagagaaagtggcatctatacctaaaataagaagaaggtggtgtaaggggaagaatgacacgagataggaaataaacgaactgatagtgtagaggactggctcgggaccacatcaaggaagtaggttagtggttagatcgtgtaggggaacacggg

SEQ ID NO: 3789 - DNA, 1189 bp, Homo sapiens
acaacctgtgatggtgtccttcttccctgagaagctggaggtggttttagtgggaagcagaaagagagagacacataatgaagaggacagcattggcaggtcagacagagcttaggtgatcagtgggcagatttctgcagaaggatgggagattgccatcctgtcctggagtgaagtgtgttaggagacaaagaagtaacactgcacatcaccttcaagggagaactattaatagcttctgataaggcaagatgatagaaaggggagaaatatccaggatgaaaggaactttatcctcatgaaatcactcctctgtctgtagcagaagatgtagaggaggaagaccagaaagaagctgggtggagggccctgatacgtgcttcaggatggatggaggcagggtgaaagacggttacctgctgtggtcgatttagaaagcatgccagaaaaatatacctggcctgtggaaccagacatgggttgacatgatcaccaggcagagaacaacaggtgctgggctgtgtacttaggatgataatattagggccccagaggtatgcacatggaaagttggaatgctggctcggggctgcccctgctggggtcctgtgtggctctccttgccagtacaaaccttccatggggctcagtgccatggattccagtaaatttatccctttcctggaattcaggcctctccctctgttcttgtgcagggcttgggcaggaacctgttgtttcaggagccagtaacctttgaggatgtggctgtgtacttcacccagaatgaatgggccagcctgcaccctacgcagagggccctatacagggaggtgatgctggagaattatgcaaatgtgacttccttgtgtaagtcctccttcctctctgaaactcagcttctgcccttgggagctcctagattcctccttagcagaactaggatctctttaataccatcagaattgatgccctatgggctgagctccctaatccccagtgccaggggtagctggatggagaaagagctcggttcactttggtgtttaacaggacttttctcttccctggttcctaatggagacccaactgcagggggctttcctctggatacagagagaactgagaaggttcctggtgcactgtcttcattccttccatcttccagttccctggagctgatcttggc

SEQ ID NO: 3790 - DNA, 1175 bp, Homo sapiens
taacttctgctctctgaaagatcctgttagcagacgaaaaggcagcaacatgaagaaaatacttgtaaaccacatatatgacaaaggactcctataaaatatatttaaaatctctcaaaactcaacagtaaaatcacaaacaatcccattaaaaaatgggcaaaaggcatgaagagacatttcactgagaagaatatacagatggcaaataagtacatgaaaagatgttcaatacaactatccattagggaaatgcaaattaaaatcacgataagataccattatgcaactattagaagagctaaaataaaaaatagtgactatcaagactggcaaggatgcagagaaactcataaattgctggtggaaatgtaaaatggtacagccaatctggaaaatatttggcagattcttaagaactaaacttacacttacagaacaacccagcaatcacactcctgggcatttaccccagaaaaatgagacttatgtccatataaaaaccagaacatgaatgttcattgccgttttatttgtaatagctgaaaccaggaaacaaccaaaatgtcattcaatgtgtgaaaggctaaacaaactgcagtacatccataccatgaaatactaaccattgataaaaagaaacaaactattgatacacacaacttggatggatctcaatggtattatgttgagtgaaaaaagccaatcccaaaaggtcacatactgtatgattccatttatataacattcttgaaatgacaaaattatagagaaggagaacaaattagtggttgtcaggggttagaaatgatgagtgggaggaggtgggtatgattatgaagggttagcatgagggatatctctgtggtaatggaataattctgtaccttgattgtgatggtggttacaacaatttatacatgtaataaaatgatatagaactatatatacacactgtaccaatgtcagtttcctggttgtgataatgtactatagttatacagcaactaaccattaggagaaattgggtgaagggttcatagaacctctctgtattacttttacaactttctctgaatctataattatatcaaaatagttttaaaaatgaaaaaagtaaaacactgtatcgtatgagtttatattgatactgtcaattcaaatttaggattaca

SEQ ID NO: 3791 - DNA, 1155 bp, Homo sapiens
gaatgatcattttatggtatctgtttttaaggtggatataattaggaaaattaaagggccaaatgatgaggagttaagtgccagttctggttcaaattttcagtgaatcagttttgatataactttcatcttagggcattactcttgcctaccaacatagtttctaaatttttttcttttggtgtgatcactgtgggaagaaggaaattgggcccaaactgatacattgtttggaggactgggatgtctgaatttgagtggaatgctttaaaaggacaagttggatagggccccagtatgggggtctgagtgatggggtccaggaatacatttaggtccaatggcaagctggctgaaattcttgtataataaaataggttggtaatatggctcttctcagacatgtgatcaagattccttgactaacaagatatatatatatatctttctagctcatcatactggctagtggtggaccccaagctttagtaaatataatgaggacctatacttacgaaaaactactgtggaccacaagcagagtgctgaaggtgctatctgtctgctctagtaataagccggctattgtagaagctggtaagtatatgtatctattctgagtcttgtgtatagcatctgcagttctaattagattacttttcttaggaaaaggtggtagaactttaactactgaaaataaatggtcctattcagtttgcagccaagatttacattcagagtacctgtcatctggattgtagctaaatatttaaggctagtttaggtagagttcttattatccatcaaaaatgatggcatatgttttgcttaataaaatttgtttgtaatttcagttttgagtaaacctaagatttgctaacagagctgtgaatttataggagaaaagacaaattctaatatagtacagttttatgtaaagtgattgctttattagtagatgctcatgagcagtttttgttttgttttaacttttaggttccgggtaatgtgcaggcttgttatataggtaaattgcatgtcacaggggtttcgtgtgcagattattttgtcacccaggcagtaagtattgtacccaataggtagtttttcagttctttacctcccacccgtaagtaggccccagtgtctgttgtt

SEQ ID NO: 3792 - DNA, 1191 bp, Homo sapiens
aaaggagatgtcttggaacattggaatgttctcagatttctggttgttatgtgatcatgtgtggaagttattaactttaatgttttttgccacagcttttgcaacttaatactcaaatgagtaacatttgctgttttaaacattaatagcagcctttctctctttatacagctgtattgtctgaacttgcattgtgattggcctgtagagttgctgagagggctcgaggggtgggctggtatctcagaaagtgcctgacacactaaccaagctgagtttcctatgggaacaattgaagtaaactttttgttctggtcctttttggtcgaggagtaacaatacaaatggattttgggagtgactcaagaagtgaagaatgcacaagaatggatcacaagatggaatttatcaaaccctagccttgcttgttaaatttttttttttttttttttaagaatatctgtaatggtactgactttgcttgctttgaagtagctctttttttttttttttttttttttttgcagtaactgttttttaagtctctcgtagtgttaagttatagtgaatactgctacagcaatttctaatttttaagaattgagtaatggtgtagaacactaattcataatcactctaattaattgtaatctgaataaagtgtaacaattgtgtagcctttttgtataaaatagacaaatagaaaatggtccaattagtttcctttttaatatgcttaaaataagcaggtggatctatttcatgtttttgatcaaaaactatttgggatatgtatgggtagggtaaatcagtaagaggtgttatttggaaccttgttttggacagtttaccagttgccttttatcccaaagttgttgtaacctgctgtgatacgatgcttcaagagaaaatgcggttataaaaaatggttcagaattaaacttttaattcattcgattgtgtcactctttctttttttcttgtcattaataaatggtttgtgagggtggtaagtaagtttatccaactcaactttatcctgaactttatcctgagatagatagatacatagtgaagtaatttgttgtagcgatagagagggccctacttctctagatgcaatttgccaagtttctttagcatttggccctggattacgctggacccctaaaaaagtgtttcagccttgca

SEQ ID NO: 3793 - DNA, 1205 bp, Homo sapiens
tgggaacctgcatattaaaccagctccccttgccattttaacttttaaaaattgaacttaaaagtaaacaacaacaacaaagacctttaatctagtccaaccatcattgttcacatggggcccctgaggtgcggggtgcattgacttgctaagccttgcacagccagggtatgtggggccaggaattgtgtgcaggtctcctcaccactctagagttgtgtccataaagtagaacctacagtaatattattatacccccattttcacctttgctcattcacttgtgtccacacggtcacagacatagcaagcgtttatacggttggttttatggggcaacgaacctcatgttttttactcatgcagggctcatcccaggagagtgggaatttgctcaagataaggcatgaggacccggagtatctggcatggagtttaactggaatccctctacctccaccactgtacctggaggctcctgtctcccctcatcctgtttgacccttgagcagggccgacacagtggtcgctcccttctggtcactctcctggcttggctcccagtgcctcacttgcccccagagttcccttttgtctctctggacagtctttccagcctctttcaccagttctttctttttcctcttcctctgagcttccaaatcagtggctgtcaaccctgatgcacctagagctttaaaaaatatagtctgccaggcgctgtggctcatgcctgtaatcccagcactttggtaggctgaggtgggtggatcacctgagatcaggagtttgagaccagcctggctaacatggcgaaactccatctctactaaaaatacaaaaattagccaggcatggtggcgtgcacctgtaatcccagctaacttgggaggctgagacaggagaatctcttgaacccgggaggcagaggttgcagtgagccgagattgtgccactgcactccagcctgggtgacagagtgagactccatctcaaaaatgaacaacaaacaaataaaaataaataaaatttaaaaaaaaaatacaatccttggccaggcgtggtggctcacgcctgtaatcccatcactttaggaggccaaggcaggcagatcatatgagcccagaagttcgagaccagcctgggcaacatgatgaaaccccatctctacaaaaaattaaaaaaaaaaaaaaaaaaagctgggt

SEQ ID NO: 3794 - DNA, 1170 bp, Homo sapiens
ttccgagtcccccagcccaccagcatccccacccctgagcttgtgtgagatgggcctgttctgggatccccaccctgtgctgacctcccagggctgaggtcacctgaatgtggggccagttggttcccctagcttgtacgttgctttgaacctcgtgtttcccacgagggagggggccccttctctggtcatcgcaaagacctgctccagaatgggcccttttccttcccattccctcctttggtgcctttctcagagtacatggacttccttctgccagactggggagagaagtctccatccccagctcctagggaccatgcagctgacctgctccaaggcacactggcagccccagcaaaatcctggagccggcaccagggcatgtcccacgagactgttaggagggctgtgcatctttgccccttggttgctcattgagaagcagtatagggcttccatgcctgtttggcctcccctggatccctgtagcagctgttaaaagagaacctttccaagctttgcacagtggcagtatcatagccaatgaggtttattactagttgaaaattttccccaataccccgccgtgacgacttgagatagaggcagcattggcaatttttgacagtttttagggatactgaattattaggttggtgcaaaagtaattgcaattataaaaaaaaaaaagaacctttcctgctttttaagcagacaacaatgcattcccctctgctgcccttctggaaacttttctgtcctaatggactccacgactggatcccaactgctggaacctagcaagtccctagtgagcacaacacgagtgaatgaacaaatctttctgctttccttccgtaactcaggccccacacatttcagtgggcctttccctgggtagcaccgttgatgtagatctcttcatatgtgacatgtctccccgcgaccctctaactccactggttagaatggatttgggcaaggatataaagagggttaagggcagcacggtgcagaggaaagggctctgcacccaggattcaggagctcacggccacaactgactggatgggcacagcctggcctcagtccatgcactgtggccaaccttacccttcctaagataaggagtatctcatctcccagagtcctggttcacgtcttgct

SEQ ID NO: 3795 - DNA, 1235 bp, Homo sapiens
ttccttgttcttttgttgttgttgttgagacagagtctcgctctgtcacccaggctggagtgcaatggcactgaggcttactgcaacctctgcctgccggattcaagtgatcctccagcctcagcctcccaagtagctgggactacaggcctgtgccaccatgcctggctaatttttgtatttttagtagagacagggtttcaacatgttagccaggctggtctcaaactcctgacctcaagtgatctgcctacctcggcctcccaaagtgctggcattacaggtgtgagccactgcacccaccccttccttgacctttcaacagcatttgtcattgctgtcctgtatgtccttttcagtcactgtttaaaaaaaaaaaaaaagccataacccccactctcctggttttcctcttcctatatctctagtctctttctcccctcagtctccattgcagcttcttttcctctgccataagagaaactatcacattctccttaggcagtcttatccactacatagttccagtcagtttctacaagtgatgtttctcaaagctgtatctccaacctagcctttgtccctgagtttcagccccaaatagccacaagcctcaacatcgtttgacatcacctcacactgtacatttccacaactgaatatatcaccttcatttccattccagcatctcccccactgttccctgcctacataaggggcatcaccagtttctcagttgcttaacccagaaccccagaaggcatccctaatttcccttttctttccctccccacttgatcactaaggcctgccaaatctacttctaatgtctttcaaatgcacacacttcttttctcattgctcccactatctctggcctgcatgcttgtagcagccttgtcactgttctttttgtttctcatctgggcgtcttccctaactttcaccatgttacagccaataaaactctaaatgcatctcaggcttcatcattcttctgcctaaaaccatccatggctcccattactcctaggagagtacagaatctggacacctgtgtcctgcttaacctccactttgcctttatactgcctttataaaccttttcttctggaggtctttccctgtatgctggaacaggttggtcccctataacacctgcctcaccctaacaccatctcatttttttttacctgatagaaactttaatgatgttaaaaaaccaatcagtccag

SEQ ID NO: 3796 - DNA, 1153 bp, Homo sapiens
ttctgttcccttgcacccttcctaataaatttatggacagtctgggtcaggttgtggctggatttctatattgcttgaagacttggaaaattctgtgtattatttcatacatgcttctgtatcttttttcatttcccaatgggttattaatttcacatcagagaaaagagtctagttgtggggttttttttcccctaaaccaagcaatttctttgaataaaagttgaaatttcgtttttcaaaggtttgtatgttttcttttgtatattagaactatgactgtgtttattctcataatagtagcatctgcataaatctaactattgcacttgccccaaaaagccttagaaaagtcagttgcagagatttgtaatgaaatctaatattactaggttttaacgctataatagcttcagtgttataatagtcttttatatttcctttgggggaaaatggattactactctttttcagaagcctgttcccaaggtaatcactttttaaagttttctgtgtttctgtttgttctgaagaagatttgtttgtatgaatgttaaaaggacatataagttagttttcaaggatattcctgctggaattaaaataactctaagtgatctttatcacagatttttttttcctttgaactagtaggaaacagctatttagctggttctgttatgtagcaatttaaaactaatgctgtaggccactttgtggttgttccttgtggcagatacttttgtaccttaaaattgtattttgctatttaaatttttgtttcacagggctttcttccttagataattttgtgatacaattgagtatacacatacttaatttagatatgttcctgtaacttaatataacataatttttttgtcttacagtctagcttcaattaagttgaataataaatttaccgtataaaaattaaacacctaaaaagattattgaacttcttccatgtatagcacattaggcaagctaattggaaatttggaggaagtaagctagagatttttctaaaattttattagttttccctgaaagttaataatttaaatatcatttagccaaagtatgttactactaaaagtgactgttctaaggctgtttgtgtgaagtattaaatatatgttcttttcctcaa

SEQ ID NO: 3797 - DNA, 1198 bp, Homo sapiens
tagttctaaagaagataacaggccaatcctgaaggtactccctgtttgctgcagaatgtcagatattttggatgttgcataagagtcctatttgccccagttaattcaacttttgtctgcctgttttgtggactggctggctctgttagaactctgtccaaaaagtgcatggaatataacttgtaaagcttcccacaattgacaatatatatgcatgtgtttaaaccaaatccagaaagcttaaacaatagagctgcataatagtatttattaaagaatcacaactgtaaacatgagaataatttaaggattctagtttagttttttgtaattgcaaattatatttttgctgctgatatattagaataatttttaaatgtcatcttgaaatagaaatatgtattttaagcactcacgcaaaggtaaatgaacacgttttaaatgtgtgtgttgctaattttttccataagaattgtaaacattgaactgaacaaattacctataatggatttggttaatgacttatgagcaagctggtttggccagacagtatacccaaacttttatataatatacagaaggctatcacacttgtgaaattctcttgtctaatctgaatttgcattccatggtgttaacatggtatatgtattgttattaaagtaagtgacccatgtcaaatgtcttttatttatttcatgaggaaaagctttctgtagaggaacaaatttgagaacaagtttcaggaaattgtcttttttgttgttgttctctaatcatgttctcctttctgtttcaacgattttaaaaatattttactttatggtatgttttattttttttccttttgtgggtaatttttgttctattgattatccatataaattttttttttttttttttgagacggagttattctctgtcatcttggctggcgtgcagtggcacgatcttggctcactgcaacttccatcccccaggttcaagtgattctcttgcctcagcctcctgagtagctgtgattacaggcatgcaccaacatgcctggctaatttttgtatatttagtagagacgaggtttcaccatgttggccaggctgatcttgaattcctgacctcaggttatccacctgcctcggcctcccaaagtgctaggattacaggcgtgagccaccacgcccagctgattatccatata

SEQ ID NO: 3798 - DNA, 1211 bp, Homo sapiens
aacttgtaactcccaccctttatattatgaaaaacttcattatctctttactccttcccatagttccatgagttgggttttttttttttaaaccaagccaattacatttattaaatatttcctttttttcatttttattaaccaagtgcctatagctgggtctgaaataaaaacatacacttcagatagttgtatctatatgatatttgattcagatggttgatgtttgttaacccgtggatctttaatatgaagagacagttccattaacattttttggaaatgattataataaggtcccctgtacatttcgctccattacacccccatcccccatttacggtttcagtgatcccttgcagtcttaggatctcaagctgaggctgtggtctataccttaggagtttgtagttttgttaacacggtttttttttttttcttatggaaaaagataatttaaaatattctctaaaatgaatggtttttcttttttcttaagagatggggtctggctatgtttcccaggctagagcacaatggctattcacagatgtggtttagcacactgtggactcaaattcctgggttcaagtgatcctcccaccttaggcttcctgctagctgggactgtaggcatgcaccactgtgcctggcttaaaatgaatgttatattaagacaggtaccacttcccacccccatttgtggaggaatatggtggataatttttgttgatgccattcttagtcctataataccagatgtctagttctggggacccaagctcctgaatcatcacctttttttaaaaaaaacctgaattactaagaataagaagctttccctgtttcttctctctcccatctcaaactgtgttggctttgtgcctgcttgaacttacctactgtctgtttcccacatctgtttcactaatttccactggagcatccttagtggcttgggaggcttgtaagggcaagggcatctcttactcatctctgtctgctatgccaagaacagtgcctgccacagatgaagcagggcagggcagcagcagccacctttgaatgttttctctgtgctgaatacttagcatggattctgttttaattcatttaatgtccacagcagctttacaagaaagtagattactattagtacttccattttaaagattgggaacacattttaaaataatttggttaaagtcgta

SEQ ID NO: 3799 - DNA, 1204 bp, Homo sapiens
ggcagctctattcaaaatcacaaaggctggaaaaaaaatcaaaatattcctcttctacagaatggaaaaacaagctgtggtatatccacacgatagtacactactctgcaacaaaaaaggaacaaactattgataaatgcaataacatggatgaatctcaaatgcattatgccaagtgaaaaacaaacagacttaagagcctatgtactatatgattccatttatatgatactctgagaaaggcaaaactcgtagggagagagaacagattagtggttaagggtagggagagagtttgacaatggagggaaatttggaaaggaggatgaaactgttctatttcttaattttgattattattacatgaattaatacaaaaacacacaggtctttacaccaaaaagtatgacttttcctgtatgtaaattttttaaaaaacccttaaaatttttaaaatgaaaaaaagtcactgatatggtgggtagggggaaagggtgataggactgttcaagtttaaaagacaccaaaaaagagggtctgaagttatcacagtgagttatctcagttgatcgttcatggtcagttacagatcgaactccttgttccactctttccccacccttctcactactgcacttgactagccaaaaaaaaagacagagagagagaccaaagaggcataacaaccaaatgcaatgaattttgactggctcttcctatttgacgtaggaggaaaaattgctataaaaaaaatttttggaagacaattggggaaatgtaaatatagaccagattttagaggaaattatgaaattcttgttaattttcataatgtgataatggcaatgggattaaataggagactatccttattcttaggagatgtatgctgaaatatttaggtaaattgccttgatgtctgcaccttactttcaagaagttcattttttaaaaagttgtgtttttatctgtatggtctgtatgtgcatgtatatacataaaaataaagcaaatataagcaaaatgataaatatgaatgacaactacagaatttgggttaaaggcatacaactattcactgaacttttagcatttctgtatatttgaaaatttcaaagtaataagtggagagaaatcattcacaaaactaatcttggcaaatcagtgtgttgtgaaatcctctctggaagatttttggtccaaa

SEQ ID NO: 3800 - DNA, 1197 bp, Homo sapiens
tctgtcatcatccttgtttttatttttcatcttgtttactcaaacgtgaactgtcttgtctgtggagatgactcagatctcattttctttctggagccctcttctgtactctggtaatgtttctaattgtcagatgtttgtgcctgattcctcaaatttaacatgtccagaccatgatcttatttttaccttcctgctcctaaactaaacgatataaaaagcttagttctggccgggcgccgtggttcacgcctgtaatcctagcactttggggtaacaccgtgaaaccccgtctgtattaaaaatacaaaaaaattagccgggcaaggtggcggcgcctgtagtcccagctactcgggaggctgaggcaggagaatggcgtgaacccaggaggcggagcttgcagtgagccgagatcgtgccactgcactccagcctgggcgacagagcaagactccgtctcaaaaaaaaaaaaaaaaaaaaagctcagttcttcctcttgaaacattatattggcttaatcattgccttgactaattgttagattattagtttaatctcatggttctgtaattcccactcctgattgtgagttactaaaaaaaatcatatggagaggtgattttattaaaactgattattcagttgagacctaggatttttagttttattctctttattatctagtgaatgaacttattttagaactgatgcaaagaaatgtcactgacttgttaagtagagtacacctgtggcttcttcaagtgtgtttgataatgaggtcatataagtgactctaaaatggtttgtttactgtgtgaaggaaggtaggaaacaatggggagatacgtgttaccagcacatggcttgtctaaaacacttatactaccaatctgagtctttaaaagttacaggttggggggggaggggcagttaaaacagtattaattaatgtgttaacatatattagagggcctggattgtcattgatctaatagtgataatttgaatcacttaagtatcatttatccaaaataaaatggcatgttagtcacttaaattgtagctgtatgagaccatattcttttttttttgtttgttttccagagacaggttcttgctctgtcacccaggctggagtgcagtggcacaatcatggctcactgcagcctcaacctcctgggctcaagcaatcct

SEQ ID NO: 3801 - DNA, 1177 bp, Homo sapiens
cttgaaggcttgctaaaagtaactgggcctggttctttgggtgaggggattgggagggatatatctttagcaactgttttagtcagtttgagctattataacaaaataccatagaggatggcttaaacaacagacatttatttctcacagttctgtagtcttcataattcaacatcaagatgccagaatggttgagtgctggtgagggctctcttcctggtttgcagatggccccctttttcctgtgtcctcaaatttcagagagcaagagcactggtgcctcttccaagtcttttaagggcgttagtgagagtgacagccccattctcatgacctactccaatcctagttattttccaaaggccccccacccccaaatataacatttggggttagggcttcaacataaatattcattctataacattccactcctagccactctattcatatccttacatacaaaataagttcattccatcctaacagcctccaaagttttaactcattctagtatcaactaacatttaaagtccaaagtctcatctaaatatctaaatatctaaataaaggccgggcatggtggctcacgcctgtaatcccagcactttgggaggccgaggcgggtggatcactacgtcaggagttcgagaccagcctgaccaacatggtgaaaccccatctctactaaaaatacaaaaattagctgggcgtgatggtgtgcacctgtaatcccagctacacggggaggctgaggcaggagaatcgcttgaacccgagagacagaggttgcagtgagccgagatcgcaccattgcactccagcctgggcgacagtgagactttgtctcaaaaatatctaaatcagatatgggtgagacccaaggtttagcttatcctgaggcaaaattcccctccagctgtgaacctatgaaaccagacaagttatgtgcttccaaaatacagtgatgggataggcaggattaggtattccaattccaaaagtgagaaattggaaggaagaaagggatgatgaggctgggtgtgatagctcatgcctttaatcctagcactttgggaggctgaggtgggaggattgcttgagtccaggagttcgagaccagcctgggcaacatagggagaccttatttctacaaaaataataaaaataattagtt

SEQ ID NO: 3802 - DNA, 1101 bp, Homo sapiens
tcatttgagagataaggaaactgaggcagatgtctagctggccgcaaaaccaagtgtcttggtgccaattttagtgttagttgtatttgagcacaaagggctaggtaaaggggtcaataagtagatggtaaataagtagaagagatgtgactgaagtccgatctaaaacttaagtctgaagctaaaatccatgctcttaattactgcttattacttcccattccctccttaacccacacccaggtctggcttctgttcccaccgttgtgtacagtctcctctgggagaggtcaccagtgccatgagtggggctcgagggcagctccattgttctcaatgcaaagctttactgctgttttgatgctccatacttgaggtgggtctctctgatctcacagttgtagattgtgggcagaaagaggtccacagtgcttaggtgagtccattttcttaagaaacaagaagagctagcttattttacttgtttccaggttccagtccttgtcaaggatcaggacactctccagaaggtggtgagtgccccaggaacaacacttcctcctgtacttcctggcagccacatagcagctgaaatttgcccgcatcctcctactgacctagtggcattcaacctccaggatcctcagcatggtatttactcagtgctctgggttttgggctgttcaaggacccttcctgtggctcatccccctacttccagggagttgcttcctctgctaccctgtctaggagtctcttacagtgccaatttctttctgctgttctgttgttctctccttctttcttgggcccctctgagcttgtatacatcccccctttttttttttgagacggagtctcgctctgtcgcccaggctggagtgcagtggcgcgatctcagctcactgcaacctccgcctcctgggtttacgccattctcctacgtcagcctcctgagtagctgggactacaggtgcccgccactgtgcccggctagttttttaattttttttttagtagaaacggggtttcactgtgttagccaagatggtcttgatctgaccttgtgatctgcccgccttggcctcccaaagtgctggg

SEQ ID NO: 3803 - DNA, 1195 bp, Homo sapiens
gtatgcaacctataggacttctaattttctgtgccagtttccacaaagctacttcctgaaactttgatggtctatgacaatgaatcacaatctggtgcaaactgcccaggccctcctcaactggctgatggaggctcatcttcacagctgtttactttccagtatataaaggactagagtcaattggtgagacaacaacaagtaaccaagagacctttgagtcctccccaggagagggagattggcttgagatcctgggggtgaggagagaatgcaattagacctcaaacctagagtacagttaaacctcaattgggatacctatatatgtttactgtaataatgttaatctctagacctgttcatctaaatattaactgattactttgtcttagaatggattagcacacaagcaaaagaaataggtttttacataaaacttccttagtctgttaaaagttgtacatagtaatgatttgggaatccttattggaataccataattaagaaactgtgatgattgtctcctaacagagggatatgctctgtgaggacctggctcatgccactgagcagctgaacatgctcacagaggcctcaaaaaaacactcggggctgctgcagtctgcccaggaagaactgaccaagaaggaagccctgattcaggaacttcagcacaaggtgagaaacacacaggtgtcactcaagatgggagacaagagaccaagtgtagtggctcactcctgtaatcccagcactttgagaggccaagggggtggaccacttgaagtcaggagttcaagagcagtctggccaacatggtgaactgaaaccctgtctctactaaaaatagaaaagttagccgggcgtggtggcgctcacctgtaatcccagctacttgggaggctgaggcacaagaattgcttgaacctgggaggtggaggttgcaatgagccaagattgcaccactgcactccagcctgggtgacagagtgagaccctgtctcaaaaaaaaaaaaaaaaaaaatgggggacaggaggaatccacagttgaggttgtcatgacattcctgcattggccaacttctccatgtacaaaggggaggctaatggagtatccttacctggactgagacttgctcagctgcctcccacccaccttaggtccttgacacatggcaaccagttctaacca

SEQ ID NO: 3804 - DNA, 1166 bp, Homo sapiens
acacagtgcctagggcccacaatacttttagaggcctctgcaaaagttttaatttcttttaaaatcagaagaaaaaaatgaacttttagggtcaaaagttatatttgtctttatattgatgcagttgtaaaatataatttttaatattatctgaaggagcaaggagcctacaaaggcagaagcacctagggctcatgaaagttatgacacagctctgcacagaactggtcccttgggagagccacacataaacatggcaggactggtggcagcatcagggtggtgactggtgctatgcggagaggagtgagctttcttttctttccctgtcagttcacaggtatgacccggcaggatgcttttctagccctgactcagaaagcccgggggaagagagtgggtggagacgtgacaagtgataaactgaaagactggctgatttcacggcagcggtactggggcacaccaatccccattgtccactgcccagtctgtggccccacacctgtgcccctggaggacttgcctgtgaccctgcccaacatcgcgtctttcactggcaagggaggccccccactggccatggcttcagagtgggtgaactgctcctgcccaaggtaaggagccacatccctgcagtggtgactgtgcctatggccccatacctgctagggcttcagacagcctcctccctcctggtgctaactctgctccctttttccctgacttccatgaggctggaaagaacactgtgggtctttggggccctttaagagaagggtctggaatctgtggccctgcctctgcaatgggcatcctcccttctctgagctgttggaagcagcagtgtcagttcagatctatcccagaaacatctgatccaactgatggaaaagctctaaattttccttacagctttgtaaaaaaccactttcctccattttgatattccaaagagccacgtggagaggggagaaaatgttctcttctccaccttgcagttttccaatatagtgactgtaacaacagtggagattttatcatgagtagcagagtagttgctaagagagcaagtgtgctcagggctgcattctttaatatgctgaagcaccatggttcctttctcctcattttggaagtgggattatgtttttctgtctattcac

SEQ ID NO: 3805 - DNA, 1162 bp, Homo sapiens
aaagtgctgggattataggcatgagacaccacactcggcctatcagtcaatattttataaacggctgatgtaaataaagaaaataaagaggattttgactactgtcttctaaactgtaaaaatggtctattgagtatatatttagtgtgacgatcatcagctatttcctagtggagggaattcctttactggaagcaggacgattctgaaactagaattataaagatgtaacactgacactcccacccccagtttatgtttgatgctgattattcagggatggtttaggtcttagcatttttgaccaagatgaacagcatcaaatggaagtgccagttcagagacaagcctgaggcatagtctgacttggtggttctcaaagtgtggtccctggactagcaccatcagcatcactagggaacttaactagaaatgcagagtctcgggccccttcccacacttactaagtcagcagtctgtgtttcaacaaactcacctggtggttctgaagcatgctaaggtttgagaaccacctaagtttttggtgtttatccctcggctattccattttgtcctctgtccttattagctctgccaaagccgcagcagctccctagtgttacgtctctacgtatgagccgccataacaagtcagtgaggacagtgaaatttgcctcttcaagggagcagaaggaagtttaattgggaatgccaggaaatccatctacttccctggaaggactgaacgtttataccgccccctcacaaatccttatgttgaatctctaatcccaacatgatggtatttggaggtggagtctttgggaggtgattaagttatgagagtggatacttcctgaatgggattagtgtccttataagaagagctcagagatgtagttagttccctttccaccatgtgagaaaacagcaggaagacagccatctgtaaatcaggaactggatcctcaccaagaacctgaccctactagcaccctgatgttggacttccaacctccagagctgtgagaaataaatgtctattgtttaagctactcactttatggtattttgttctaacagcctaaaatgactaagacattccccttagtctgagagatattccttttggaacagaaaacaagagagacagtatagtgtg

SEQ ID NO: 3806 - DNA, 1189 bp, Homo sapiens
aaatgcgaggagctcccacaccctatctgcaatccgggactcagaagccctccccgaggccagggcccgcacctgccgccccgcccgccgcgcctcaggcctctggcccgtgggactcacagcttcagctgctcgtaggccgccgtcgccatcctgcacaaccacctccttccttctctctccgcccgccccgccccgcgccgccacctcggctacaactctaccggtcaccctggcacagcggccgcagctcccagcctcttcccacccctttccccgccccgcaggagagccggcctgaacgggaggcggtggaggacaaattagtgcgcaagcaagagcacgcgagagatgccgccgacgcggcgggttggagtgcgacgaagagcgccgtgacgaagccgctgcggattggtggggcgcgttttggggaaaggcagagcagcgggagcgcggcgcaagggcaaaatggatcgttggtacccggaagcccgttcaaactgtataagggtgatcagctatcacggagaaggctttagcaagtcggggccagtggcgcaatggataacgcgtctgactacggatcagaagattctaggttcgactcctggctggctcgcgatgtctgttttgccacacttgacccatgtactactgggtcttgtaaagatgtatattcacaatgtgaaagtattacaagaccttggaaaggtgtatggttagaatgtgaaagttaaatatctgaaattttgatgccgctttgctcacaatgtcatcctttatcctttaaacctggagttgtctgaggtggtttgcaaactgcaaagcgccctgttcccaatgatgcacctgagaagtctgtaaatggggtaaatttaggcaaacacacctggaaaagtggcattttggagtggggaatgctgtggccggaggttagcaaccggatgatgcaaaagcgtatttaaggcagcagttctggcctttccccgccacggagcagaagcccccatagtgatgtgagaagcggcgctgtcccagtttactaggatgggatgggctttggatctaaccagcagcgaagaaaacctgcggtgcggctgcgctcggtagtaggggtccacaaagcgtcagaatctgcagcagccccggcctttgcgagctccagctccgaagtcaacccggcccccaa

SEQ ID NO: 3807 - DNA, 1090 bp, Homo sapiens
cccagcccacaggaagggaacccagaggagggtggggagaggatggccgcgctgggcccaaggaggggtgacggccaggagtggtgagagccgggctgatgtacttggcctcactgcccccagggaagtcatcagctccaaggagaagagcaaatacaagttccctcctgctgctttgccccaggaattcagcgccttcttccaaggtcaggccccgcccctgcccccacttggctccacccccaaacctaggccccttcctgtcgttccttgatcctgccatacacaggaaccacttggtggtggctgcatgcaggactgggagaaccaaagaccaagcaagagtttagggacagagacaagagaagacatcttgggctggagcgagggcctcccatcaggtggaggggtggggtcaacctgcctacccagatttctcatcctctttccccgccatctcctggatccttctagccacttgtaccctactgtgatcttaaaactctctggtccaatccctttgtccccatagcctccacgcatctccacccatcccggagacacaggaggtatctccacctcctgttccctggctgctggaggatctggtgcccaggacagctgtggctgcctgttcacaggtggtcctgtgaacctgttctccctggtgaccctccacccctgggtcccctctctcctctcattggagggagactggccaggactttagataggctcagggtgggatatggcctggacagaggtgggcagggctgtgaaaaggtggtgacctattgggatattaaatgtctcagtgatgcccccatggagctgtgggcctggatctagagttggggcagcaactccaggaggggaggcacccctagggagctcctcgactttattttcccatagcctgggtgctgttattaaaacaaactggatttcatttctcctcccatcatatcccttgatgtcaacctgacgtcctcaagatgaaatcctactcctcccacagcctttctctccacttgccctgctgctcagcctggcttctgtcctctcattcccagactgctaccactgaccc

SEQ ID NO: 3808 - DNA, 1177 bp, Homo sapiens
taagaatttcaatttaaccatccttaaaatgaggacagagagggtatatgggataagggatatctgctggtcgcaaagcccccttgcagtcgcaagttggtgtatatcccctctcccttccagactgctcccggccgcgcctcccttgcccatgaaggtggccatccgcagcgtggccgtgaccaaggagcgcagccacgtgctggtgggcctggaggatggcaagctcatcgtggtggtcgcggggcagccctctgaggtgaggatggggcgggggtggggaggcccctcgaacggggcggggcgtggcgcggcgatcccagctgatcctactcaacccttacgcccaccaggtgcgcagcagccagttcgcgcggaagctgtggcggtcctcgcggcgcatctcccaggtgtcctcgggagagacggaatacaaccctactgaggcgcgctgaacctggccagtccggctgctcgggccccgcccccggcaggcctggcccgggaggccccgcccagaagtcggcgggaacaccccggggtgggcagcccaggggggtgagcggggcccaccctgcccagctcagggattggcgggcgatgttaccccctcagggattggcgggcggaagtcccgcccctcgccggctgaggggccgccctgagggccagcactggcgtctgcggccgcagcagcactttttgcacagtctggggcggggttccccggcttccaagtcgctgtttcgtcaaagcacgagggccgcctgtggccttaattcctaacggcggccccggttctcccttctcggcaataaaccaggcctagttttgtagctgctccgtctccgagtgtgcgttcgcgcgcagcgtctcggcctgccatggccaccgtcccagggtcgccgtctgagtctggcctggctcgcgttcccctggcccgtgaccccctctgggcccactcgccccccctccgcgtggccgtcgctgaactggggcctcagtttacccggcagtgtagcccctgccccacatctcgccccggcttgtggtttccccacgatctcttcatggggtcgccttcgcacgccattcgtccacaaccgcaacccggccaggcgccccgcaggcgcgtttgcattccttcgccgggcaggggcgacaacacccgaggccg

SEQ ID NO: 3809 - DNA, 1102 bp, Homo sapiens
acagaggacaaggccgtgctgcaaaacctaaagcgcatcctggctaaggtgcaggagatgcgggaccagcgcgtgtccctggagcagcagctgcgtgagcttatccagaaagatgacatcactgcctcgctggtcaccacagaccactcagagatgaaggtgggctgggtgagcagggtagaggggctctggctccgggccccacccttaggagtcgaggccctgagtgtccgtccctggcccccaccccttcctcagaagttgttcgaggagcagctgaaaaagtatgaccagctgaaggtgtacctggagcagaacctggccgcccaggaccgtgtcctctgtgcactgacagaggccaacgtgcagtacgcagccgtgcggcgggtactcagcgacttggaccaaaagtcagtgcccagtcctctgctctttcccggagccacctggagcccagccccatggttcacctggagctggcccttctgcccaccaggtggaactccacgctgcagaccctggtggcctcgtatgaagcctatgaggacctgatgaagaagtcgcaggagggcagggacttctacgcagatctggagagcaaggtggctgctctgctggagcgcacgcagtccacctgccaggcccgcgaggctgcccgccagcagctcctggacaggtttgtgtggccctggggctgtggtgcggctcgggtccagacaggctggggtgatgggagcctggccccactttttccttgcctgtcgcacagggagctgaagaagaagccgccgccacggcccacagccccaaagccgctgctgccccgcagggaggagagtgaggcagtggaagcaggagacccccctgaggagctgcgcagcctcccccctgacatggtggctggcccacgactgcctgacaccttcctgggaagtgccaccccgctccactttcctcccagccccttccccagctccacaggcccaggaccccactatctctcaggccccttgccccctggtacctactcgggccccacccagctgatacagcccagggccccagggccccatgcaatgcccgtagcacctgggcctgccct

SEQ ID NO: 3810 - DNA, 1178 bp, Homo sapiens
tgatgcttctgcaccccagccccaactgcagccttcgggcggagagcctggtccacgtgcacttcaaggaggagattggtgtcgctgagctcatcccccttgtgaccacctacatcatcttgtttgcctacatctacttctccacgcgtaggttcatggcagggaggctgagggctttctccaagctaaacgggcatttccatgtcacctgcttccctggctctggaggtggcttggggtagagagatagaacacacctggtggtcatcagagctagggctttgtcccccagcagggtcttaggagcttgggtggggccggggctcttcccactttcagccccttcctgggttagggttcctaaaaggtgtactgtgtccatgacactgggaagtgcttgtgcctgtccctttcctttggtgaaaccaggagttttcccttcctcgactgtcagggcaacctactcccgggagccccagtgggccgggggctgggggaggggccgccctgatacgccctctctgccctccagggaagatcgacatggtcaagtccaagtgggggctggccctggctgccgtggtcacagtgctcagctcgctgctcatgtctgtgggactctgcacactcttcggcctgacgcccaccctcaatggcgggtaggtccctagcaggctccactgggccacagggtgggctcaggccagagagccttgcacttctgggttcttggccttccctggactttgctgtgacctcacgtcttcacattgttgtttttgacatttaagaggtacattttcttcctcttctttgtctggcttgtattcatacttgtgtttgtatatagcatatctagctatagtgagtgtccatatgtacaaaagtgcatatttgtgggctgggtgtgtatataaggggtgtgtgttggtatgtttgtgtatacatgagtatgtattgcatgtgtgtagtcggatttgtgtgtctgtgtttatgtattctatatacacacaccacacacacactgcagcttgatggcttaagccactggaggtgtgagatagagaagagaacattttttttttcatgattagaacatttaaatgcctaatgaaataggtcattttagaggaagctctttggaagatatgagcacactgtaatttgtcgcctttttc

SEQ ID NO: 3811 - DNA, 1199 bp, Homo sapiens
aggagaccggagtccagctcaaatctgtctccctgtgctggctttaaggcagtaattttattaggaaaggtttagagggtggatactaggattagcagatgattgatggaaggaagggtgatttctgggaagtctttgagcatgcccagttatctcttgatgccacctcacaggtcccatgtgcaaattccggggggagttagtatgaaacatggcagtggaaattcaggctgtgacatcggcaagctcattctgcacaactccagtcggccatcttggttccagcttatttcagccagttcttttatctcataagcggagggagtttctgggtttcagcaaattgtttcttttcttatctgccatcctgcaaactcaagaacttgtattagtcattggtttctttaactctgtggggcacggtttccaatgcccattaaatcccttgaattggaccgtctttcttcttcctgtgctcagctgccctttctgccctccctcatttcttctgcagtatgtgggtgccccggtggcttatgtccagcagatatttgtgaagtcctcagtgtttccctggcacaagaacctcctggcagtagatgtatttcgttcacctttgtcccgggcattccaactggtggaggagatccggaaccacgtgctgagagacaggtacccctctcagggaccctggcctccctgaatcccattctgtactgaagggagagttacagtcctcagtgtaactgcagtgagccagtcagctctgcagagatagaacaagcaagaaggatggagggtgagctagccttgaatttctcagcatccttgtgggtctacggtggctgcattccgcttggacctatgcagatggcacacacatagccttgagtctcatccttacatctcagatggagtcagtgtccactgtgctaactcatgacccacatggcttcctgcctgtgggttatggtgtgaatgtaatggtggtgtctctgccgacgagaagcaagctctacctgggggtaccttctgaagccccagcccaagtcgtgctcccctgcctatcagtgggtccctgggttatgctggcttggcatacaatgtgtgtaattggcaagctgcatcactgccaggttttagttagctagtggcgttgacagatattttggtgaactaaatgaagcccctaatttacc

SEQ ID NO: 3812 - DNA, 1158 bp, Homo sapiens
actcaggaggccgaggcaggagaatggcatgaacccaggaggcagagcttgcagtgagctgatattgcgccactacactccagcctgggcaacagagcaagactccgtctcaaaaaaaaaaaaaaaatacctgggtgtggtggtgcatggctatagtccaagctactcaggaggctaaagtgggaggattgcttgcacccaggaagttaaggcaacagtcagtgagcaattattgcactactgcactccagcctgggtgatgcagtgagatgctgtcctatttttttgagacagtcttgctttgtcacccatgctgaagtgcagcacaatctcagctcactgcaagctctgccccccaggttcaagcaggtctcctgcctcagcctgccacgtagctgggactacaggcatgcaccaccatgcccagctaattttcgtatttttagtagagatgggatttcaccatgttggccaggctggtctcgaactcccggcctcaaatgatccacctgccttggcctcccaaagtgttgggattacaggcatgagtcaccgtgcttggctgagaccctgtctctttaaaaaaaaaaaaaaaggcggaatattggaatagacatcaaagcagacatcggaatggctaacatgcgtatataagtgctcaacattattagggaagtacaaattaaaaccacagtgagggctgggcacagtggcgtgtgcctgtaatcccagcactttgggaggccgaggcgggcagatcacaagatcaggagttcgataccagcctggccaatatgatgaaactctatctctactaaaaatacaaaaattagacaggcttggtggtcccagcctgtagtcccagctattcgggaggctgaggcagaagaatcgcttgaacccaggaggcggaggttgcagtgagccaagatcgcgccactgcactccagcctgggtgacagagcgagacaccatctcaaaaaaaaaaaaccaccatgagatactactacatagccactaaaatggctatatcaaaaagactgacagtaacaagtgctgacaaggatgtgaggaaataggaaccctcatatcatacattgctagtgggaatgtaaaatggggcagtcactttggaaaatagtttggcagtttcttaaa

SEQ ID NO: 3813 - DNA, 1098 bp, Homo sapiens
taatgagttactttggttccttttagttcattcaagtcttggagctttttccttgtttcagtgatgcttccttcaaccagatagaaaacgctgatattattatttggttgctgtatgcattgtctccccccccccaactttttccctcttccaggatgatcctagtgctccccacaaaatccaggaggttctcaagtcctgcctgaaagaggaggagtcatttaacatccagaactccatgtcgcccaaacttgagggtggcaaaggtgaccaggctgacttggatgtgaactgtcttcagaataatttaacctaaagcagagcaagaagagaggaagcgggggtagtgggtggggggtaggggaagaaacattatctcctcttgtacagagtctatttcttgtaaccatttgttaaactcttttctttttctgatctcatggcatgcttttatgtattttgtacaggaggcaaaaaaatacttaaaataagcaaagaaactgaacagaattgcatacattgggttgttttttctgtgctgtctgtacattgcttctgctgctgtgatttctaaacctgtgctgttattcaactgacttttttttgtactttgacccacgtttttttgaaataccagtaaaaaacaaagttcttgaaataaaactttttaaaaagttattcattttcttagtctttgtgtccactcctttaagtttgagttgagtaaccttcattgaagatgtttgtttatttatttatttattttgaggtggaatctcgctctgtcacccaggctggagtgcaaggctcactgtagccttgacctccccagctcaagtgatcctcccacctcagccttctgagtagctgggactacaggtgcaagccaccacacctggctaatctataaattttttttggaaaggcagggtctcactatgttgcccaggctggtctcaaactcctgggctcaagcaatctgtctcctcagcctcccaaagtgctggaattacaagtgtgaaccactgcacctggccaaagatgtatatttatttatatttatttatttgtttatttattttttgagacagagtctca

SEQ ID NO: 3814 - DNA, 2020 bp, Homo sapiens
agtgaccttatttctgcttttctgagctaagaatggtgctgatggtaaagtttgagacttttgccacacacaaatttgtgaaaattaaacgagatgtggaaggagaacctcagtgattttattccctagtgaggcctctgagggcctccacactgcctggcagaacataccactgaactagtatgtgctagaggagggcacaaacatccgctccttccctaggcctgctggctctggttttctatgcagatgattcattggattgggggtgagtgttttgtttttctgggggcagtgtgagctttgagggttggaatattgggaggcattccttagtttcctcaactagcctggaaagttaggagtctagggtaattacccccaatgagtctagcctactattcactgctttgtgtgcatttttttctccctctttaaaaaaccctttaaaagaaaaaaaaaagtagatagtgctaaatattttagctcatgaaacttggttaggatggctgggggtacaagtccccaaactacctcttgttacagtagccagggagtggaatttcgtcaaccggtacttttaaggttaggatgggacgggaaaagtgaagcaggatattagctccttataccttctcccttccatttctgagatctcacattccatctatcacagggttttcaaagagatgctgagggtaacaaggaactcacttggcagtcagagcatcatgctttgaggtttggggtgctcaggctgggagggtagaatgccattccagaggacaagccacaaaaatgccttaatttgagctcgtatttacccctgctgataagtgacttgagagttcccggttttttcctcttgtccttccctcccttctgtccttccatgtgtggggaaagggtgtttttggtagagcttggtttccaaagcgcctggctttctcacttcacattctcaagtggcagtttcattatttagaatgcaaggtggacatcttttggatatctttttctatatattttctaaagctttacatatgagagggtatagggaggtgtttataaaacacttgagaacttttttccttaatatcagaaagcaaaaaaataaaaccacaattgagatttgcctttcaaaccctcaggtttgcctctaaccaggtgtccctggtcaccatcagagtactggaatacgggaaccgaggagaccttggtccttttgtttttgttctggactcttgggagtggaaatgagaatgagtttattcctactggagcttagttccaatgcatttggctccagaaagaccccagtgccttttgacaatggccagggttttacctacttcctgccagtctttcccaaaggaaactcattccaaatacttcttttttcccctggagtccgagaaggaaaatggaattctggttcatactgtggtcccttgtaacctcaggtctttaatgtgatcactttcaaatttaaaagatccaggtggaaatatttttactatagtaataattctacaaaatacctgaattcttaacactgttatatttcagtataagtggtggctttttcttttcatgtctttgatctggttttattcctgtaattcagccacctgattttgtgaggggggggaataatatgtggtttttgtacaaacatgtttctcagtgtgttgttattttggaaaaaatgaggggagggagtttggcaagaatggagaaaatgaatgaagaaggcctaatctctctctttttcagtgaataaatggaacaccatttctggattctagtcccattctctgcattcatacaccagtttcttcatatatcctatgaagaacctaaacatttggccccacctggtcttggtttgatcagcagttaaaattctgtgactcgggcttccttcccgactgcccaccttcatgatgtgtaaggaacatacattttgagggtacctcacccactgttcatttgcatggtcaaagtgaaaatgagtgga

SEQ ID NO: 3815 - DNA, 1177 bp, Homo sapiens
cccttccctcctttccttcctccctccctccctcccttccttccctccctccctccctccctcttttcttttgtttcttcttttctttctttctatcactcttgccgcctaggctggaatgcagtggcacaatctcggctcactgcaacttctgcctcccaggttcaagcgattctggtgcctcagtctcctgagtagctgggattacaggcacgcaccaccatgcccagctaatttttgtatttttagtagagatggggtttcaccatgttattggccaggctgctctcgaactcctgacctcaggtgatctgcccacctctgcctcccaaagtgctgagattatacgcgtgagccaccgtgcctggactactttctttacagtatgcatgtcttttatttattttacttgcctgattgaaaataatctaaggaaaccatcaaatctttctatttatgcataaatatttgcattaattttttttaaaaaagctatctaaagaacttctaatattacacattactttcttgttacctgacatgaaagcatctgttttttctgtcttaggccctggagatgtacaaggatgattggaacaaagtgtcggaacatgttggaagtcgtactcaggatgaatgcatcctccactttttgagacttcccattgaggacccataccttgagaattcagatgcttcccttgggcctttggcctaccagcctgtccccttcagtcagtcaggaaatccagttatgagtactgttgcttttttggcatctgtggtggaccctcgcgtggcatctgctgcagcaaaagcggctttgggtatggacttccctaaaccatctcctcaacagaaaaactcagtttatcccaatttaaatattaccagccgttacattcatttcttttaatgtaaataacaaaaatcagatattacctgtgaaagataccatattctttataaaagtattacaatatttggctggacaccaaattagctgggtgtggtggcacatgcctatagtcccagctacttgggaggctgaggcaggagaatcgcttgaacccaggaggcagaggttgcagtgagccgagatcgtgccactgcactccatcccctgggcaatagagcaagactccgtctcaaaaaaaaaaaaaaagtattacaaaat

SEQ ID NO: 3816 - DNA, 1201 bp, Homo sapiens
ttgaattctggctccatcagttaccaaccctgtggctaggacatattctctaacaactcagtgtttgtttcctcacccataaatgggatgatagcagaccctacctgcaatatagagcgattatgaggattcaattgtcagacatacattgcttataacagtgccctgtacacagtaaagtatagatatgtggtagtgaggcagatagcctatgtaaccacgtgttagtttccaattctgcagttaactaccaccatgaccaagtttgaatttatgttacttcacattaatgtcattagattacttgttgttatacattaataaacagttgttttgcatattcgtggttctaaattcactcataactttaaatgtgcaatataatatcaatgttttttatgctcttgtcttaatttgttgttgtatttttaaggaatctgaagatttttgagtttctaagtaacattgtttctgagaggatacatgtccaccttatgaattttgccattgctttttagatacttggcatatcgaaattttatgattgacacgtatcgtctaaacccccaagagtatttaactagcactgcttgtcggaggaacttgactggagatgtgtgtgctgtgatgaggtaaactgtttgactttttctgagacatttaactgtaggaatttacttatgcatgctgtctaatgtttgcttgattaaactggttgtttcaactgggtaaaacacctaattttagttatgccatttaggggttgattatattttgtttcctttcatttcattcaatttaattattttatttttattctattttattaatttaattttattgtcaagatggggtttcacagtgttgccaaggctggtctcgatctcctggcctcaagcgattctcctgcctccgcctcccgaagtattgtgattgcaggcatgagcactgtgttcagcattagaggttgaaaattttaaatatttaatttaggctgggtgcagtggcttacacctgtattcccagcacttcaagaagccaagatgggcggatcacctgaggtcaggagttcgagcctggccaacatggcgaaaccccatctttactaaaaatataaaaattagccaagcgtggtggcacatgactgtaatcttagctattggggaggctgaggcaggagaactcaggagacagagattgc

SEQ ID NO: 3817 - DNA, 2120 bp, Homo sapiens
gtgggtggggccggggcacctgcctgggattctccaagcgactgtgccttgagccagtgggtgccagggcagcaagggtgggggctgtgtgtgaaacccaccaccatcaccccatcccactccccccctcgactgaccctgcactgtctcccccactgtttcattgtagactgagggcggtggcagcgaggctcctctgtgtccgggtccccctgctggggaggagccggccatctctgaggcagcgcctgaagctggcgcccccacttcagccagtggcctcaatggccaccccaccctgtcagggggtggtgaccaaagggaggcccagaccttggacagccagatccaggagacaagtaagtggctgggctcggcctaagggccagccaggggccctgccactggccgcaaattgaaactcctttgtttttgactagagtgtggcctaaattttaatgaagtaaccttttattttccaggcatctaatgatgacattctggtctcgtcttccgtctcccccgtgttcccctcttgtctcccctgttcccctctcccttccctcctcccatgtcactgcagattgagacctacaggctgacgttccgggcaaatgccagggcccgcaccgaccacggggccgacattgtctcccgccccccacacttccctggcggccccaactcgggctcccgggtccttggccccctttcccgggctgtccactagaccagtgagcgcttgggcgccgtgctgggcagcccgctaggctcgccttccctcctgctttgcgtgcccggggcagcagcagccctgccccacacctcctctcactccccagcctgggcccatctccctgctttggtcttgccccatcactgcgccactgctccgtggaggaggttgggagggggttggggtggttgaggctaagttgggatctaggagaggagaaccagattctatcctcatctttttttggttctttggtccaaacccaaaagaaactgacatgccctcccttctccctggatctacctggagggaagagtggaggtggattccgagtggtgacaggacgctgaccgtggagcttaagccactgcctctccctctggtcccacaaatgggcgcccccccctccccatgcaggtggtgtcgggcccttcttgctgccctgccccaagttgggggtcagtgctgcctgtccccatgcttaacatacccgcctagctgctgtcacatttttcttgttttgtccttttatttttttctaataacctaaaaactggcaaaatagttctgcaggttgaagccatgtctacatgaaagtcctcagtaagtgttagagggaacagggcggagatatccttatgccacccccgctggaggatgtgggcagcttagggccctggaggcggtgcggcagggaagaggggtgcagaggctgtggctggtgagccggtcaggcacacaaggggcccttggagcgtggactggttggttttgccattttgttgtgtgtatgctgcttttcttttctaaccaagaggctggttttggcatctctgtcccattccctgggatctggtggtcagccctaggataaaaagccagggctggagaacaagaaagggccaggagatggaattccttcaggccggcacccacaccctaggacatgtaagccctcatgtccaagggagcctcatgcagatagtaggaaatcaggtctggaaatttaaaaataaaaggcatgagactaaggctatctgcttcccttatgccctgactggagaggggagggaggagaggcaaggcccacagagggcatcccagctaggccttgggatggctgcagtgaggagaaatcccgggaactgtattgacacaaagattcttattgcacttgtattttttgtattaaagtttgcatggtttctaataaaggattcaaacataagtttgtagtgaaatggcctgggagattccaagggcttctctggagggggattggctgcagtgtagatttgcctctgaggaggctgccccagacttggcctcctcatgccccctcctgacctctgcccttctctggtcctggcatccctggagaagg

SEQ ID NO: 3818 - DNA, 1220 bp, Homo sapiens
ggtgtctctagcccacccagcccccattattgagcattcacccaccaccattccgccaatcactatggtgttcacccaggaacatttgaatgcaagctgtcacatcagagaccatgataaggagttggagaaattgagttctaccgaggaggctgtgctcaaccaagccccccagcagaaaaaggcagtgcgcagggccctgtctgaatgttctcacctctcagttcccccagctgtcaaccttgcagataagtaccctgaactccctgcccgagaagagccttcttctggcctgctgcctccccctagtagcccaatgcctagtcctacacctgggaaactgggagctcctgctatgaagcgctccatgactgtgggtgaggaacagacagctagctacaaattgagccctgggaaactgcccatcttgtctactaaagagatacctcctttcatctgtgaggaaccagtggccaagaagagagaagaattggctcacttcagcaacagcagcagcaactctgggaagaaggaactcggcactgctggattatatctccatagtaagctggagcagattcctgaaggaagcagcaaggaaaaagggcaggaagattttagtgaaactagaattgattcatgctcgcaggtttgccagcgaggagagaaacagccaggacagacggctctggcagggaagaaagaaattgaggtcactgcaacccagagcactccatcgttcctgtttgaaaagcccccacgtgatggtatgtttctaaattttgcctccattgggaacaagcagacagcaaggaaggaaccaaagtgacagattaccggcagagcactaagcagctttttacagctgggttctgtgactgcctggggaaagcttaattcccttgtgttggaagcttgctgggagtgaggcaaggaagagaacaaagtgaatcttgcagggtcaagctgaatgtcttgctagcatgacagataatgtgaattgagtgtgcaagtttggggtggaatggggtcagagaatggtgggtataaaaactagaccccctttcttgacctcatgtcaccctgtccaacccatcccccatccacccagccctcagctccctgttggtttgaaccagatgattcctgagctctaaatccttcaatcccaactgattgatttccttgcttgaaaatctgtcactttatatagattcaca

SEQ ID NO: 3819 - DNA, 1195 bp, Homo sapiens
ctcagcctcccaaagtgctaggattacaggtgtgagccaccgcgcctggccagcaatctgatttcatctgttcccaatcactccctccatttaaccctaggtgttttttggaagcaaaccccagatcatttgatctttatattagcatgtatctcaaaaaaaaaaaaaaaaaggttcctttttagagcataattgcaataccattaacaaacacacaccggttccctagtaccaaatatccagtcagtattcaattcaccagttatctcataattaaaaaaaaaaaactagctcgttagaattagaatctaaatttattttaatccatagattcttctataggggatatatatataaacagtttggattttacttgtgttttaaagatgccagagatttaactgtgctcatagccagagggggagaaatgaggagagaaggaatgaaaaattaagtctagaaggttggaggactgggtggcaagaaggtgataaagggcatatttgctgtccttggaaaggagaatcacgtgtattttgcatattctctggtttagcattttccccaaattaaaaagaaataaaaatgggggattatatttttctcataaataggaaggaaagaagtaatgatggactctgatgtagataaatttatggtagaggaaacagcagtcatataatatcattttctataaagtaaaatactatattttggatggagtgagctggaaaagaaagtatgtataacagactgtggagaatgagaaaggaagttgcatggggacacattttgtttttgtttttgtttttgagacagagttttgctctctcgcccaggctggagtgcagtgacgtgatcttggctcactgcaacctccgcctcccaggttcaagccattcttctgcctcagcctcctgattagctgggattacaggcgtgtgccaccacacccagctaatttttgtatttttagtagagacagggtttcaccatgttgatcaggctgttcttgatctcctgaccttgtgatccacctgcctcagcctcccaaagtgctgagattacaggcgtgagccaccacgccttgccagggacacatgtttttataggaagttgtgtagagaggtgtgtttataggaacaagtacattcagtatgataataaatcaagtgttgtaggaggtagaatactg

SEQ ID NO: 3820 - DNA, 1204 bp, Homo sapiens
cagcggctggctaaagggctcctcaagcgtggccagagcggacgctgaggccggggaggcgctgagagtgagcgagggctgctaacacgttgtcacctctcactattgctgcccctttcccatggcctgagctaaaagccatagaaagtgtgtgtatgtgtgtgtgtttaggggttgctgggcaggggaagggtgggacaccatcattccacaagacctcgaagttactcctcccatagaaaaatgaaagtggaaaaattagtgatcatacatctactttaaacatgagagggagaaaaaagtgttcattttctattaaaatccatgtaggcactgtcgagataccacacagatctggtccggcaagaggactgtcaggtccaggcagtcataggaagagattgtaagctgcagtaaatctgagtctctcttcaaagggtttagcctgctaacttccttatccttgttctcaaattcaactttcttgttcttccttacccctagttactgtaaacagcctaccccattctcgtcagctttaatcaataattcacatctgttcccttggttacctgtacccattgttcccccgaaactgcacgcctcacactccacctctgtaactcatgtccccctccccttctatagttaggaaaatatgtacaagtggccaattgggtcagctcagattgtgcagtctgaccccagcccatggggggagtgacacagagatagggactgtgttaaggataaaaatcccctggtctcctttgttctctgtgctcttgtgatcttgattgacacaagtggcaccgttccgcagaagtaaattaccttgctgagagaaattaaacttttgcctgagtgctggttttacttcatggcaccgagcatttcatcctagagcattttatatccaacaattctgggggctcgtctgggattcccattctccttcgggaaggggtcttcagtcaccctacccaggggagacacttcccactgccctgttgcggtggccctcagggatgggagatcgagacccacctgttgtgacgaataaacctggactctcagcaacgcggggaagagagacttgcaatactgcggcgaccaggtaaactgcacagaccaaggtagaaaacgtcgcaggggcaacaaattacttctttagtggttttgcgggggtcggggcattctggag

SEQ ID NO: 3821 - DNA, 1117 bp, Homo sapiens
actgggctgtgctttaggtccaggtaacataagccatcttacgttacgtaagctcacggtctgtttcagtggaggacgtgagatatgcgtccgtggccagaatctggacgtggtacagacgccaagaatccgggtgaccgtggtctcgagaatgctgcagcccagccaggggcttggacggaggcgtcgcgtggtcccggagacggcatgttcccttggaccctcctgcagtagccagcaagtaggacacccttgggtacccccacactctccccttgccccataccacaccctggggacagccagagcaggtgccagaggaggctcttcccatctttgcttggcccctcgtcaacctgcctgtcttccttccagtttgaggagccgtgccatgtcaactcctcccagctcatcacgtgccgcacacctgccctcccaggcctgcctgaggacccctgggtccgggtggaatttatccttgacaacctggtctttgactttgcaacactgaaccccacacctttctcctatgaggccgaccccaccctgcagccactcaaccctgaggaccccaccatgccattccggcacaagcctgggagtgtgttctccgtggaggtacagctcctacttggacctggcagggccccgagacccttcccttggctggacagcactgctgtgtgtggcggagaggccgagacagtagagcaagggccggtggatggacatggctcctcatccttgctgtggtgggggcagagggggctggtggggggtgcctagcctagcatctggcacgagctggactgcttggctggtggcccgggtcctgatgcactccatggcaggctctggaatgactgcatttgtatgttcggcctgtgcagtagctgggtggtgtggtccacataggccatcgggctgacccccgttggcagcctggctcacatggacatgcgctaggcatgtgtcttggacatacacagtgggcagcagatgggcatgcgggcagaccacaggttgatacagcatcatcacccccctggtgagtcatcagacacagattgggggctccagctttgttaggtagctgggcaggatttgggaggcagct

SEQ ID NO: 3822 - DNA, 1178 bp, Homo sapiens
acatctcacctggggctagtccttccctgctcagcccctgggggccatgggcaggttctggctccatatcttcccctggctccacagggtcgcctctccatgaggagccctcccctcccagcccccaaaatggacctggaaccgctgtccctgcccccactgacttcagaccctcagccacacctgaggacctcttggcctccccgctgtcaccgtcagaggtagcagcagtgccccctgcagaccctggccccgaggctcttcatcccacagtgcccctggacctgccccctgccactgttcctgccaccactttcccaggggccatgggctccgtgaagcccgccctggactggctcacgagagaaggcggcgagctgcccgaggcggacgagtggacggggggtgacgcacccgccttctccacttccaccctcctctcaggtgatggagactcagcagagcttgagggccctcccgcccccctcatcctcccgtccagcctcgactaccagtatgacacccccgggctctgggagctggtgaggcccagcccaggaaggaggcctcaggggaggggatgtggggaagatgctacccctagcttgccttgtgattctgcactgggaggaggtgaggggcagggtggagtctgcagccccacaccggccttgcctctggaatctggcaaggcagagggctgagctgggcagggtgggctccatagactgccttgcccttggtgcctgcaggaagaggcgaccttgggggcaagctcctgcccctgtgtggagagcgttcagggctccacgttgatgccggtccatgtggagcgggaaatccggctgctaggcaggaacctgcaccttttccaggtcagtgtgtcctgcctgccgctgtccttgcagcctccttagctgttgagaaactctgcacaagccctggggagcaggaggagggcagagtccgagggctcaactccaacccagaagctgtgctgggggatctgttgggtgacctgcaggactccctgggcccagctcctgaagctgcccaacagctgtgttctctgccctcaggatggcccaggagacaatgagtgtgtgatggagctggagggcctcgaggtggtggttgaggcccgggtcgagtgtgagccacctccagatacccagtgc

SEQ ID NO: 3823 - DNA, 1467 bp, Homo sapiens
tgattagcccaagccctttgctgttacagaatgtccccaaaattgctatatgaaagcaacccttcgattcacatatgataattttttatttctttttataatgtattttataggggacatcagcagccaccagcatggtggggtctttgttggggagtgggggagtcttttgtaaatcaagtaagaatccattaaagaaattaattttaaatgtgcattacctggttacataaaggactctagaacaacttaggttcttttgggactgttgaaacattgtctttaaggacagaatgtactgggtgcctttctctgtactctgaatatgcatgtgtattgcggtggggatgggggagttgggggccctcacttggtccttctctgttgtttttttccaggacaaagccaaaggccccttgttagctggccatccctgccccattttttcccctggtcctttcccctgtggccacagggaagtgtggcctgaataccccaccccggctcctctgcacccagagctgggggccacctcagaagtgtcatctctctctgagcacgcattcccctgcagcagtcgaggactgagcagattgagtgatgctggggcagagaggcctgggaggaaaggtgttcagccagtcgtttgtaaggcgctcgtcggcacctgctgaaacgcccccacctgacagccccatcctcaaagactgtcttaattactcatggcaggttctagagacttaaggggaaaagctgctttcaaggccaccacatgtctgtgctccccaaccagctctatctgccttgtgttcattttgttattttgtgacgtgagactgcaaagaccaataaaaacatattttataagaacaaaaggcctgggtgcctacccgtgtgggggcactgtgggaagcctttgctagggtgtcttgtgctgtgtggtttgttttgtttgcccctttattttgctttgcttacccagtcttcccttactcttggatgcttcttaaccctcaggcaaacctgtgttccccctgtattcaggctctgctttaaagcaagccatgaggctgttggagtttctgtttagggcattaaaaattcccgcaaactataaagagcaatgttttcagtcttttaggattagaagaattacataaaaattaataaacattttcaatgatggaaaaatgtgtcttgtaattctttggctcttgcctcgttgagtacatcagagaggaagactctcagccatgtttgctccctaattgcttgtcttgtatggtgtcatcttttctagctgttttgatatttgttaagtttgcagatgagtttggggcctctggcaacatagagactaaggaactgggtaagaaaaaaacaaatgttacaatcatgttacttacaacgcttcttcctgctaaattaaaagttctttctgctcctcacccccttccaggtgtggta

SEQ ID NO: 3824 - DNA, 1484 bp, Homo sapiens
catgaattctatgccagagtcactcctgcagtctgctagggatgggccttcttatcccactctcgcacacatcccagtctagtctttgccttcacagagtcctccttgacacccctgacttaatgatagttgctgttttggagtagaattgatcaggtttaagtcatcctgctcaggttgggcatagtggctcatgcctgtaatctcagcactttgggaagccaaagtgggaggattgcttgagcccaggagttccaaaccatcctgggcaacagagggagaccctgtctctaccaagaaaaaaaaaaaaaaaaaaagttaaaaaaacaattagctggacctggtggtgcacactcagtaggctgaggtgaaaggattcctttaacctgggagactgaagctgcagtgagccatgatcgtgccactgcactccagtctgggggacaaagtgggaccctatctcaaaaaaaaaaaaaaaaagtcatcctcctccaactactgattgacatatggatcatcagttcagaccctcactgcatacaggatccctagagggttctatttaatagcttgaggaagggagactttaaaaggacgtgtgtgagtgaaataggatatagccattaccacggtgccaggacctgacagcgttccaattctttttgcagcatggggaatcaaaggtggcatgccaagttcaactcagggctgaggtatccacattgtccacatcaggcaagccctgcactgacggttgagcctcatggagaggagcatgtgttggaaagagatccctttgttaactgttttgtggtgttctcttcaatgaattagagctcatgccccttttctggctttgctgttgattttggatggtagagaatattcctgagagccttccttttggcccccagcttatgccacccactctcttctcttggttgaattctctgaaggaaaggttcatgtgctattgtcctgttagtcaatagtcttcatatataattgtgttacatatattgctgtagactctcagaaatcagggtagagcttttcctttgagcagtttaatgagtgaattcagcagcaaagtcgcaagaaatggttctccagccaggagaggttatgtttatcctctgattgcccgttttctctgcacacagtgatatcgtattcagtgagaggtgctgttggcacccagcagcaccctgggcacacagcatttcatgtcatgtcacagtgtacaagctaccctctaattcagaaagaagagcattttgcacagagaaaaataaaaagatccatgaatgtcatcttttatcttttattttcagttggctgatgttggaatttttgttcttgtcatgaacttgtaaaccaatcttgccaagatacaagttgttttggtttttcactacaatgacctcttgttcctcctgtcttgactgctgacgttcctcaatgattctattgtctattttatg

SEQ ID NO: 3825 - DNA, 1177 bp, Homo sapiens
ctggccaacatggtgaaaccccatctctacatctctactaaaaatacaaaaattagtcaggcatggtggcgcgtgcctgtaatcctagatactcgggaggctgaggcaggagaattgcttgaacctgggaggcagaggttccagtgagctgagattgcaccactgcacttcagcctgggtgataaagggagactccgtctcaaaaaaaaaaaaaaatatatatatatatatatatagccacatacatggcaggagtatgagtcattggtggcaatcaaaaaatatatttgtgcaggctgggcgcggtggctcacacctgtaatcccagcactttgggaggcggaggcaggcggatcacgaggtcaggagatcaagactatcctggctaacatggtgaaaccccgtctctactgaaaatacaaaaaaaaattagccgggcgtggtagcaggtggctgtagtcccagctactcgggaggctgaagcaggagaatggcgtgaacccaggaggcagagcttgcagtgagcagagatcgtgccactgcactccagcctgggtgacagagcaagactccgtctcaaaaaaaaaaaaaaaaaatttgtgcctgatgtatgaacattctcctttgaatggcccaaagggttattgacattggaaccacagtgaagaaaatgcaattctggtcctacaaatagcatcctaaagctacaaaagtaactgatggaggaactaaaaatagtgctttatatatcaaaaagttgggacttgaaagtgggagatagggagcaatttaagtaagttacatgtcatagagagttagggttatactcagtgatgttggtgacaaccagaagaaccttagacaaatgactggaaaagatttctcctggataggaagacctggtggtggtagtggtaaaaaggaatgaggtcgcagtgttgttcctttccatcaaagagccttttatgttttatgaactattgatttttcttttcttttcttttttttttttttttggagatggagtctcactctgtcgcccaggctggagtgcagtggcgcaatctcggctcactgcaagctccacctcccgggttcacgccattctcctgcctcagcttcccgagtagctgggactacaggtgcctgccaccacgcccggctaattttttgtatt

SEQ ID NO: 3826 - DNA, 1182 bp, Homo sapiens
ccgtagtaggccaggtacactcaaggctgtgactctggctggctcttggcgactgctggcagtgactgatacaggggccctgtatctctatgacgtcgaggtcaagtgctgggagcagctgctagaggataaacatttccagtcctactgcctgctggaggcagctcctggtcccgagggcttcggattgtgtgctatggccaatggggaaggtcgtgtcaaggttgtccccatcaacactccaactgctgctgtggaccagaccctgtttcctgggaaggtgcacagcttgagctgggccctgcgtggttatgaggagctcctgttgctggcatcgggccctggcggggtagtagcttgcctagagatctcagccgcaccctctggcaaggccatctttgtcaaggaacgttgtcggtacctgctgcccccaagcaagcagagatggcacacatgcagtgccttcctacccccaggtgacttcctggtgtgtggtgaccgccggggctctgtgctgctattcccctccagaccaggtctgctcaaggaccctggggtgggaggcaaggctcgggctggtgctggggcacctgtagtgggtagtggtagtagtgggggtgggaatgctttcactgggttgggcccagtgtctaccctgccctctctgcacgggaagcagggtgtgacctcagtcacatgccatggtggctatgtgtataccacagggcgtgatggagcctactaccagctgtttgtacgagacggccagctccagccagtcctaaggcagaagtcctgtcgaggcatgaactggctagctgggctccgtatagtgcccgatgggagcatggttatcctgggtttccatgccaatgagtttgtggtgtggaaccctcggtcacacgagaagctgcacatcgtcaactgtggtggagggcaccgttcgtgggcattctctgatactgaggcggccatggcctttgcttacctcaaggatggggatgtcatgctgtacagggctctgggtggctgcacccggccacacgtgattctccgggagggtctgcatggccgtgagatcacttgtgtaaagcgtgtgggcaccattaccctggggcctgaatatggagtgcccagcttcatgcagcctgatgacctggagcctggcagtgaggggcccga

SEQ ID NO: 3827 - DNA, 1174 bp, Homo sapiens
cctgaccctttccctccgcagggccccgcggcgagggcatcggctctcgccggcggatgacgagctgtatcagcggacgcgcatctctctgctgcaacgcgaggccgctcaggcaatgtacatcgacagctacaacagccgcggcttcatgataaacggaaaccgcgtgctcggcccctgcgctctgctcccgcactcggtggtgcagtggaacgtgagtcctggcccgcagtgtggaaactgaggcccagagtcacaggccctcaccctgcttggtccctgcaaacttggctttcctctgtctcctcctgcagtggatggagatggggagaggctgcgtggatttgtcgtattaaatgtgcctcctccctgcacaggtgggatcccaccaggacatcaccgaagacagcttttccctcttctggttgctggagccccggataggtactggggaaggggagggagaacagaggtgttctgggccccagaaggcgacccccactgcagcctctcaacagaactgtagactagccacacccacccttccctagagatcgtggtggtggggactggagaccggaccgagaggctgcagtcccaggtgcttcaagccatgaggcagcggggcattgctgtggaagtgcaggacacggtgagtcccgggactggggcatgctgcggggagcacaggcctggcgctagacaggctgatgctggccttttctttgcagcccaatgcctgtgccaccttcaacttcctgtgtcatgaaggccgagtaactggagctgctctcatccctccaccaggagggacttcacttacatctttgggccaagctgctcaatgaaccgccaggaactgacctgctgactgcactctgccaggcttcccaatgctttcactcttatctaccctttggcacttatcttgcttatcaacataataatttatacacttctcccattttgtatcaggtgtgttgctggccaggagctgatggctcactgggctcttggaggggaatgtgaagaaaccaaggagtcactttttcatctagattacttaggattccttgacttttcagaagtcgggaagcagtatgtttgcctgttgtagacctacttgctcacatgcagatttgagaggacctcaacggcttttctcacaaaatcg

SEQ ID NO: 3828 - DNA, 1167 bp, Homo sapiens
ccagcattttggaagccaaggtgggcagatcacctgaggtcaggagttcgagactagcctggccaacgtggtgaaaccccatctctactaaaaatacaaaaattagctggtgtggtggcgggcgccgtaatcccaccttctctggaggctgaggcaggagaattgcttgaacccgggaggcggaaattgcagtgagctaagattgcaccattgcactccagcctgggccacaagagcaaaacaccatctcaaataataataaataaataaatagatagatagatacctgtgaatgtcaagaaaattaggtactgcaatcagcttcatttccatccttgggctgtagccagagttgtatcagagggagaagcccttgggtggcttgtttgtttgttttgtttttttgagacagtcctgcactattgcccaggctggagcgccgtggcgcgatcccagctcactgcaacctctgcctcccaggttcaagtgattctcctgtcccagtctcccaagtagctgggattataggcacctgccaccatgcccagctaatttgttgtatttttagtagagacggggtttcaccatgttggccaggctggtctcgaactcctgacctcgttgattcgcccggctcagcctcccaaagtgctgggattacaggcgtgagccaccacgcctggccctgtgtggctttttgggcctcaggcccataggcctcccaccacatctgcccctgggtagccacatacagttccaggaacatctgaggagccaaagatgttgattgttccagggacatgcttggatgcttgggctgtgtcaccctcaccaaacctggcaggaacacagtagttaatttttttttttttttttgagatggagtcttgctttgtcgtccacgctggagtgcagcggcgtgatctcgggtcactccgcctcttgggttcacgccattctcctgcctcagcctcccgagtagctgggattacaggctcctgtcaccatgcccggctagttttttgtatttttagtagagatggggtttcaccctgttagccaggatgatcctgatctcctgatctcatgatccacctgcctcagcctcccaaagtgctgggattacaggcatgagtcactgcacccggcctaacttttttttttaag

SEQ ID NO: 3829 - DNA, 1164 bp, Homo sapiens
gagcaggggcagttgagcatactgtgagcacttttcatttgcttccattcttcttgctcagggagaagaaattggcctctgactccacaggctgtgaatgctttgtgctacctcctgcagggtctgagtggtaggtggcctggaaggagcctgtagttagccttaacctcaactcctgccccaggcagggcagtggcagtggccacaactggttgggaaccagggcacgcccactggggaggcacatgcaatcaagtggccagggtctaaccatgccatagttcttggggcaccagcaggtgccaggccaacctctgctaaggagtgggtgtgtagcctccacatttgagcccagaggaatcactagacctgtggtaagggatgttgctggctatgcagcctgccctatgccagagtcactggcctaaaagacagtctgttagacaatcactcagctgttagttaggcctttctccccaactctttggtttgttcgggctttagcacttataaacagccctggctggtccaaaggtagtgagttatctcaatcgactactcacagtttcagatctaactccttgttctactccttcccctcttcttatactaccctcagtctttaaaaacaatcaggtccaaaggtattgagttatctcaattgactactcacagttacagatctaactccttgttccactccttccccacttcttatactatacttcacttggtctttaaaaacaatcaaaacaaaaaacagccttttgccagctctgcctcacccccatattccttcctcttattagctcaggaggtgggcacttccctgagattcagtttcctttcttccctttttttttctttttttttttgagacagggtctcactctgtcactcatgctggagtgcagtggcgtgatctcagctcactgcaatctctgcctcctggcctcaagtgatcctttcgcctcagtccctacccaagtagctggaactacaggcacgaaccaccatgaccagctaaattattatttttttgagacagagtcttgctctgtcactcaggatggaggggagcggtgccatctcggctcattgcaacctccgcctccaggttcaagcaattctcctacctcagcctccaaagtagctgggactaca

SEQ ID NO: 3830 - DNA, 1251 bp, Homo sapiens
actttttacttactatatgtatgccacactattagctaaaaggactatttttttttctttgctaggagccggtgaaacctgaagaaggcagagatatggcaaacaggattggcgcttttgggtacatggagtgttcagcaaagaccaaagatggagtgagagaggtttttgaaatggctacgagagctgctctgcaagctagacgtgggaagaaaaaatctgggtgccttgtcttgtgaaaccttgctgcaagcacagcccttatgcggttaattttgaagtgctgtttattaatcttagtgtatgattactggcctttttcatttatctataatttacctaagattacaaatcagaagtcatcttgctaccagtatttagaagccaactatgattattaacgatgtccaacccgtctggcccaccagggtccttttgacactgctctaacagccctcctctgcactcccacctgacacaccaggcgctaattcaaggaatttcttaacttcttgcttctttctagaaagagaaacagttggtaacttttgtgaattaggctgtaactactttataactaacatgtcctgcctattatctgtcagctgcaaggtactctggtgagtcaccacttcagggctttactccgtaacagattttgttggcatagctctggggtgggcagttttttgaaaatgggctcaaccagaaaagcccaagttcatgcagctgtggcagagttacagttctgtggtttcatgttagttaccttatagttactgtgtaattagtgccacttaatgtatgttaccaaaaataaatatatctaccccagactagatgtagtattttttgtataattggatttcctaatactgtcatcctcaaagaaagtgtattggttttttaaaaaagaaagtgtatttggaaataaagtcagatggaaaattcattttttaaattcccgttttgtcactttttctgataaaagatggccatattaccccttttcggccccatgtatctcagtaccccatggagctgggctaagtaaataggaattggtttcacgcctgaggcaattagacactttggaagatggcataacctgtctcacctggacttaagcatctggctctaattcacagtgctcttttctcctcactgtatccaggttccctcccagaggagccaccagttctcatgggtggcactcagtctctcttctctccagctgactaaacttttttt

SEQ ID NO: 3831 - DNA, 1139 bp, Homo sapiens
cccagatgaggacttaccagaggtggggggattggatcaatataccaagagggaagagggggccagtctggcctgaactgtgacttccagggaagtgccttggagggactactgttccttccttcccaaggcctgtggggtgggcagcattctggctcattgctggttgggaggcttctgggcagtgagctggatccttgctgggtccttgtgtgtgtgtgtcagatgctgtgtgacatggctagaatatcggagctacgcctgattctgcggcagccatcaccactgtggctgtctttcacagtggaggagctgcagatctatcagcagggaccaaaggtaagtgactagctcagctgctggctggccctttccccagaaagcttctatgactgggaaagctaggtggtggggtgggtaatgggtgaagattgtgaatggggccttcatggaggttagctgggtgtgaatgctggaagctcacaatgagaggtgaggccatgtccccatatcccctgacctttggggccacctgctactttcagagctggagcctttaggtgctgggagacacttttgagcttgtgtttctgaggactccgtctgcacagcaggagaacttaggtagtctgactgcctctttaggtctctgtgggctccctaaacagggttttcccagtgtctgaggcccagcggcccttctctctgctcctaggaccttggaatctggtcccagagctgtccactttgtctcactcagggcagtacatctttgctttgcagagcccctccgtgacctttcccaagtggctctcccacccagtgccctgtgagcaacctgcactcctccgtgaggtaagccctcaccctaggtaagaaccatgtgtgaatggctctagtgtccaacacaggccaggtagaccccttcctgtaaaattctggggctgggcccagggcccttgggtgttatcttcctcctgggtattctgtgggatttgaggcatctctgttgtggggctacatcaggccctaacctcatgtttcataagccatctgagaatgttgttggtctcagctggagggcccctagcccaggttggcctctctggagcctgaagggcactgctggggagagaccc

SEQ ID NO: 3832 - DNA, 1195 bp, Homo sapiens
acaagagtgaaactgcatctcaaaaaaaaagtggaaagaaaaggactgggcgtggtggctcacacctgtaatcccagcactttgggaggccgaggcgggtacatcattttaggtcaggagtccaagaccagcctggtcgacatggtaaaaccctgtctctagtaaaaatacaaaaattagccaggcgtggtggtgtgcgcctgtaatcccagctacctgggaggctgaggcaggagaattgtttgaatcttgaatctgggaggcagaggttgcagtgagccgagatcgtgctgttgcactccatcctgggcgatggagtgagactctgtctcaaaaaaaaaaaaaaaagaaaaaaaagtggaaagaaaagagaaaaggagcccgatctcatgcctgtaatcccagcattttgggaggctaaggtgggaggattacttgaagccaggagtttgagaccagcttgggcaacaaagagagaccctgtctctacaaaaaataaaaaaaaaaaaaaaaattagttgagtgtggtggcacgttccctaggtactcgggaagctgaggtgggggcatcttttgagcccaagagttttttttttttttttttttttttaaattttttgtagagagggttttgccatgttgcccacgctggccttgaactgctgagcttaagcgattcatctgcctgagcctcacaaactgctggattacagatgtgagccactgggccttagcctaggagttgaggctgcagtgagctttcatcacagcaaatcacaccactgcactccagactgggtgacaaagtgagaccctggctcaaaaaataaaaaaatgaaaagtctcttgtcgtcccctcccttttttttttttttttttttttttttttggatacagaatcttgcactgttgcctgggctggagtgcaatggcgtaatctcggctcattgcaacctctgcctcccgggttcaagcgattctcctgcctcagcctcttgagtagctgggattacaggtgcccaccatcacgccgagctaagtttttgtattttcagtagagacgaggttttactatgttagccaggctggtctcctgaccttgtgatcctcccacctcagcctcccaaagtgctgggattacaggcgtgaggcatcccattttattttttctgtaaatagggaatacaacacatgg

SEQ ID NO: 3833 - DNA, 1193 bp, Homo sapiens
tgcaggaggagaaggctcccctaccccctcctgagtaccccaaccagagtgtgcccgagaccactcctctgaaccaggacaccatgggagagtacacgcccctgcgggatgaggatcccaatgcgcctccctaccagcccccaccgcccttcacagcacccatggagggcaagggctcccgtcccaagaacatgaccccataccggtcacctcctccctatgtcccaccttaacccgcaagcgcctgggtggaggcagggtagggcaggggcctggagacgacatggtgttgtctgtggagaccggtggcctgcagaccattgcccaccgggagccgacacctgacctagcacacactgacacaggggcctggacaagcccgccctctctggtcctcccaaaccccaaagcagctggagagactttggggacttttttatttttattttttgcctaacagcttttggtttgttcatagagaattcttcgcttcatttttgatggctggctctgaaagcaccatgtggagtggaggtggagggagcgaggaaccatgaatgaactcgcaggcagtgccgggcggccccctggctctctgcgttttgcctttaacactaactgtactgttttttctattcacgtgtgtctagctgcaggatgtaacatggaaaacagtaactaaagattaaattcaaaggactttcagaagttaaggttaagtttttacgtttaatctgctgtttacctaaacttgtatgtataatttttgggtgggtatggggaattgctttgctaaaaataagctcccagggtgtttcaaacttagagaagaccaagggacagtattttttatcaaaggaatactattttttcacactacgtcaacttggttgctctgataccccagagcctgattgggggcctcccggccctggctcacgccaagtccctggtgctgggtttgctctcccgctgttgccaggggctggaagctggaggggtctcttgggccatggacatccccacttccagcccatgtacactagtggcccacgaccaaggggtcttcatttccatgaaaaagggactccaagaggcagtggtggctgtggcccccaactttggtgctccagggtgggccagctgcttgtgggggcacctgggaggtcaaaggtctccaccacatcaaccta

SEQ ID NO: 3834 - DNA, 1181 bp, Homo sapiens
aagatggctgtgggctgctcagaagctcttggggaggctgggatgaggggctccctaccccaggggtgccatgggctggtggcaggccctggctgctgcagagttagtggggggccatgtagagtgtcgaagaaaactttcctcgcagcagcctggttggttgggtgcccttgtctccactgaacagatgaggaatgtgaagcatcctccctagggagaataagtgggcaagttgtgatgcaaaccagccctgccctagagcccaggccccggggtggggggtgggcagtggagagggagtaggcatgtctgagccacagataaggcgttgctggcttaactctggcacctacccagtggcaggctaccggcccctgcaggacccaccgagtgctgacctggtgcgggcacagaggttgctgggctgcttccgggcagtgctgagtgtggagctggaccctgtggtgagctggggtctgggccaggcggggtggggggcttccacagcctcctgcccctcacacttctccctcctccccctccacacaggaggggcggctgttggacaaggagagctccaagtggcggttgcggggccagcccaccgtcctcctcacactggcccacatcttccatcactttgcaccgcttctggtgagcggcattgggaggggcatgggaggggaggagacaggccatgctagacacgcccgtggtagatgtgccctcactgagggctgcagtgctgaggtcccacagcatcacctggcgagggccccatgtgaccagggccctcagacctcagtcagtcccctagggaaacagggacattgccaaccaagggcatcaggggatgtcctggaaagaagactgaaggataataacatcccaggccaaggaaactgcgtgtgccaagccttagaggagccgtggggcaatggccttcttgtccctcagtcagaccccggaaggggtcatctatgtttggtgttgctcgagtggctcaaggctctgtgcctgaggcttgtgccttggccatgtgccagggcaggggtgccttgaccagagtggaaggccaccacctcaccagtgcctggccttggtgcagcgcaaggtgtatctggtggaggctgtgctcatgagcttcttgctgggcatcgtggagaagggcacacccacac

SEQ ID NO: 3835 - DNA, 1178 bp, Homo sapiens
caccagccggagtctggctgcgcggtgacccaccacacgttgcccagccgtgtggctgggatggtcggtacccatggccgtgcggtcgagccttgatgctccaggacagtcctggaaggcttcctggcagatccgtgggaagaaagccgacagaagggcgggaggcgggaggggaaaggtcccccgggatgggtagggcctcaacgctgggcatcggcgcaggtgtgtactgcagggagccagccagaccccccacggactgcctgaccttgggggaagcccggagtagaggaagaggccggacccccagacccgccattgactatgtccgccattgactatgtgttctgagagaaatttttttttttttttttgagactgagtctcactctttcgcccaggccggagtgcagtggcgcgatctcggctcactgcaagctccgcctcccgggttcacgccattctcctgcctcagcctcccgagtagctgggactacaggcgcccgctaccgcgcccggctaattttttgtatttttaatagagacggggtttcaccgtgttagccaggatggtctcgatctcctgacctcgtgatccgcccgccttggcctcccagagtgctgggatgacaggcgtgagcctctgagagcaaattttacccagttcctctctatcctcccgatgactctgaaatcaaactcagcaagtcatccgagcccccacggcgcagcggccctaggctggcatgggcgatgcggagctactccgccctcaggaagcaggcgaggtgcccagcgggagaatcacccacatcaccgtctaatctctgctgtgaagtggaagcgcgagaaggagggagcgtctcatgacggagggtgtgaagacgctaggctggacgaagcagaaaggcgggtgtcactggggacgttctgagggtaagccgatggcggctatcgcggaggagaccctggcgaggtggggccccgcgcggggcaagggggatggggtgccacagagggctagttgcaagaggacgcgtgacggctgcagctctgcggagaccgggcctcgacggccaaggagtggcaggtcggcggaggcgggggccaggcccggaggcagagcgagacaggagagcaggcaaggcgggggccaccgtgagtgggggccgcgaggc

SEQ ID NO: 3836 - DNA, 1200 bp, Homo sapiens
cattgttcaattcccacctgtgagtgagaacatgcagtgtttgttttttttgtcttgcgatagtttgctgagaatgatggtttccagcttcatccatgtccctgcaaaggacatgaactcatccttttttatggcagcatagtattccatggtgtatatgtgccacattttcttaatccagtctatcattgatggacatttgggttggttccaagtctttgctgttgtgaatagtgccacaataaacatatgtgtgcatgtgtctttatagcagcatgatttataatcatttgggcatatacccagtaatgggatggctgggtcaaatggtgtttctagttctagatccttgaggaatcgccgcactgtcttccataatggttgaactagtttacagtcccaccaatagtgtaaaagtgttcctatttctccacatcctctccagcatctgttgtttcctgactttttaatgattgccattctaactggtgtgagatggtatctcattgtggttttgatttgcatttctctgatagccactgatgatgagcattttttcatgtgtctgttggctgcataaatgtcttttttttttttttttttgagacagagtctcattctgtcgcccaggctggagtgcagtggtgtgatctcggctcactgcaagctccgcctcccaggttcatgccattctcctgcctcagcctcccaagtagctgggactacaggtgcccaccaccatgcccggctaattttttgtatttttagtagagacggggtttcaccgtgttaggatggtctcgatctcctgacctcgtgatccacccgcctcggcctcccaaagtgctgggattacaggtgtgagccactgtgcctggccaataaatgtcttcttttgagtagtgtctgttcgtatccttcgcccactttttgatggggttgtttttttcttgtaaatttgtttgagttctttgtagattctggatattagccatttgtcagatgagtagattgcaaaaattttttcccattctgtaggttacctattcactctgatggtagtttctttgctgtgcagaagctctttagtttaattagatcccgtttgtcaattttggcttttgttgccattgcttttggtgttttagacatgaagcccttgcccatgcctatgagcaggagcaggcatcttaaatggca

SEQ ID NO: 3837 - DNA, 1184 bp, Homo sapiens
tggtcagactgtaaatgtagaacagtgatgatcacaatgacttactatatagttataacttacttaagtggaatatattttcccatagtattcttactctttatcgttcattcaggcctacacatctttaacgtttcatatttcatttgacaacagcatcctagatatatgaagttaatctaatttgaaaagtccttttattcatttaagattggtggagcaactaagtcttattatttcttgatttatatgttgtactgactgagcatgaaacattcttcattttaagagaaaatactgtttatgatgtcatatcatgctatgtttttagtcacattttaaagaaattattttgaagtaaagataaaaaaggaaatttaaaaatatttctaagtggaattcagtagtctattctcagagatgattactgccttcactttgagtttattttctccacctctagaacactgcgctaaggtgggttttttcttctgactcaccagtaacttttatcaatgatttttactggttcctcttcatctttctgtgtttctaacactggtgatgcccccaaacttaatttctgacctcttcttttctgtttatacccaatcctgccactgtcccctctcgccattatcaccattgacttccagacttgcatattgcttccttgaacttccttcaatgcatattgcttccttgaactccacacttttaactaaactttatctctgttttgatgtctaataagcacctcaaactcaatagctcccaaacaaaattccatattgtatcagcaaaatgattcctttcttggtatttatctcaatggtttaggcaaaagacatctggaatttctcatactataactccaatcaaatgtttagcaggttctgtcagctctactttcaaaataaatctaaatctgaccacttaccacctcaactgttctcaccctcatataagccatcatcatcatttatgtgatggctgcagtaatctcctaactggtttctctcctccctcccttgccccttccatttttcccccaactaacatccagagaaatgttccagaatgaaacaccagatgtcattcttttgcctaaaaccctccaatggctatcatctaacccagagtagaagcagaagtctagaaaatggtctctagggccccagtgg

SEQ ID NO: 3838 - DNA, 1245 bp, Homo sapiens
ttcaggagttcgagaccagcctgggcaacatggtgaaaccttatctctacaaaaaaaaaaaaaagacaaaaattagctcggcatggtggtgtgtgcctgtggtcccaggtgctctggagactgaggtagggggatcacctgagcctggggaggtgaaggctgcagtgaccagtgattgtaccgctacactccagcctgggcgacagtgagaccctgtatagatcagttaatagatagatagaaagaaagaattcattgttaacagcatatagtatttgaaagcaagtgctgtattaagagaataaaaggaagcattggtaattgaaggtaaattgatgcctttgtaacaataacttggcagttctgcaaagctaaatgttttttatagccagtcatgagtagactgcaaaatttcgagagttcagtcttggcaatctgcaaatgaatctgcatgacatttgatttcaaacaatctttcctttgaagctaccaggagtttctttcaagcatacttccagccattggtgctcccatcctccttgactcaaataggcacaaatatgaccattcatttttcctttactttccccagaaatgtgattgttttcactgctcttttactgttttcctcttaagataaatctagtaatgatttcataagatgaccataatgcagaatgttttcctcaatatctgccttagtgtaatgtaattctgatgcagaatgatggcaaagttttaattagcaacatttaagctataagaaataaccaattgaccttggcaattattccatttatttgttcaacaaatattatattaagcacttattatgtgctacaagttttgctacatggtggagatgattagcaagacacagtccttatcatctaaggacttgcagtcgagtgaagtgacaaataggtgccctaaaatataataggtattcttctagaaatcagaattcagtgaagacccaaaagaagtagtggtcaggtctaaggtagggatgttgagaatggagaataatagagcaagctggaaaggattcatagaaaaggcaatattgaactgaatcctttaaaaaaaaaagagagagacggggaaagaaaggcaagaaataccattaataaagtagagtctttgtaggctttttcaatgtaaaagagatctgaagaggtcagagaggaccctgatgagactgccttaaatgacttgctgaaaagttcgacctctaacctgtga

SEQ ID NO: 3839 - DNA, 1196 bp, Homo sapiens
catttttcttgagtaaacatttcttggattgtcacaagcctttggttaaccagtattagccaccccattgctttcatggacaagcagattttcagaggtctttactctgccattcctaaagtacctctcccatcatcgtgttcttaatatccaaaaaagcatgttcttacaatcaaacgctcaggggccatgccccagaaaatgaagcccatggactcagtcggacaccagtttggctagaccttagtctgtcccatgctttgggctttgtgggtataaagtgggtatagagctgctttgggcactgtgggtatagagctacctctgttctgcccagtttgggtctgcttccatctggcctgtgagagtacccagaactcactctcatgtagccctctaagagagaaacaactcacagagagaaccagatctaactcactggtcccacccattgtcatgatctagtggcggccaggagtggcctattgaggagatgcatattgtggtggtggtgtctcacatcagctttcctctgctgtcaggaatttctgctgaagattttttgcgtgttccggaacctgatgaagatgagtgtcttccctcgggactggatggtaatgagactgctcacaagcaagtaagtatggaagggctctgtatcagcatcactgagctgttctcagactaagaagagtatgtgtatttcagagagggagcacatgagcaagacaaataaaggccagggccatgggaacagagaggagagggcaaatgagaaaaacatttttgtgcttagtagatgatggcacagtaaggatagagaagaaaattttcaggatgtgaaatataatatccagagaagggttcttccttgaggaaggcctgctcagtggcccactggcctctgctgccctataggtttgggcattatcccaagccttcttctcagtttgaattgtgttgtctaccaggcagtgcttgcctcccatagacagtgccagttatccacctgagacctggctgcaaggctctgaccacttctgattactgacatagaatttactctaaagataatcctaacctgactgcctcatttatatttctagcttgtgcttcctcctggcaaaccagacaaatgatgcatgtggtaaggggctggctcatctggtctctctctattcagcagaaggctactt

SEQ ID NO: 3840 - DNA, 1161 bp, Homo sapiens
ccaatgagaaatgaggagaaactgaggctcaattgagatgctaaatggctggcgagtgcaaaaccattccgttggacccacccctagaaccattctcaggcagcttctggcttgggatttctgtgcggcattcattccagaaacggtcccatccaggcaggaatcgccgtacacccggcgcaggggaacggccttcagtcggctctcagcggaactttcctctccgcggcgcgtgttcccgtccgtgcggtcgggcgcgcgggccgggagggggacgctttctggcgcggaccgtgagcggaggctggcgagcgccgccgccggtggagaccgacgcttggccagagccagcccgcggcgcccgggcctggccggctgcttcccgcctcagccgccgcccccgcctccgccgccgcagactttgcctaggcgggcgaagctgaacgtgaggtccctcggccctgcgcggtccggcgcggcccggagccgcggcgcaggaggtgagacgccggtgccggttcctcgctcccggccggggccgccgggtcccgcaacaatggggaccgactggagacgcggcctgggcccctgccatgcagtggctcggggcagctagatggacccagcggcccgggccttcggggcacggggtcccccacccgggaaactccagtggccggaggcttggcgggggtcttgggcctcgacccggggcctcagtggcttgatatttgaggatttcgtagccggggaagggagtcgtagggacacggagacttaactgttgcccctctgcgcttttggctctggatgctggcgccccggaggatgaccagagcgcggtgtggggttgggaaagtatttggaattttaggggcttctgtgtgtctaatccctaaggcgcatctggatgcgtctccccgaccccctctcctgaggtctgggaatttggcagactggggtcgggctggggcagaagaggcattgagagtttagcttccctgaggtaactggtgattagttcctggaaaggcaggagctcagctgggcacaagagagttaagcagagagctggatcctccggggccctgatgcaccctgacgaggagtggttttcaggcaaggaacttatcacaggagtgagtagtggcacacggtgag

SEQ ID NO: 3841 - DNA, 1112 bp, Homo sapiens
ttgcttgctcgcccatctgagtgtagaagcgcacatcccatttctgtctttgggaacattctttcccaagagagctgccttactaggtgacttagcttggcctggggaggggagtgaaggaagggagaatgagtgagagaaggagggtgggtagggggagcagactgtgatcccatgtgaagtggggtctttttagggggtgggaaggaagctgaccaggtatgtgtgtttgtgagtgtgtgtgtgtatgtttattttgtatgtgtatgtatggaacagagcaggggtgaaggtgggaggggagggagggaagaactaagagggaaactgaaaaatgaatttatctttctttaaatggaagtcagtttggtggttcatggcacctagtgtgaacatcagggtgagcccagaagagccatggaaataacaagtttccttcgggatgggtgaagagaaggcccagctaactcaagtccctggtattcagagccacatttgtgtgagaatttggggaaattcatgagagaaaatgggcattaccaatctatgtctcttaaccccggtggctatctctgagcagctctccctttccagcttggaaggttgtctgtgtgcagaggctgggagggagaagcactgcagtacgtgaatgaaaggtcgcagagttgtggctggaaaatacatttttcaccagggtagaactgagcccccagctgcctatcctggtagtcttttctgttcctttccttcccctttagagagctccatgttaatttatttcttatgggcaattatttattacttggacttttcatgtgtcttgtttatttgggggtggggggaggttaggggtaaggagggtaggtgatagaaagggaagttttaagatatcccagaccctatagccactggtgaaaaacaatcctggatggatggtaaattgaccaggggaagagttaggtttgaccaaggtttggattaaacaactatatttttgagagatggcttttcaggaagatcagggaatcctgagactggatagttagtggagggtgggactcattccacagaaatcgaaagttgtgatcatggagtttgcaattgggaagtaa

SEQ ID NO: 3842 - DNA, 1202 bp, Homo sapiens
tgctcatttttaattacagacaccaacatgcacctgcctgcacacagcagtccctgcaagtggggactcaaaccctggaggcccctcaggcagctggtcttcatggcacgtgcatgctttggggaggtatagcaagaggctgcagctagaaggtagcacgttattattctgcccggaaactttcctctcacccccaccaggctgccccaaagcttctggcccagaagccagacctgtctgttggtgctctggggccttgccacagcagcagggagagcctgcagaagggctggtgagcaccttcccctctctctactctcccctcacaccagcagagcccaaagctctgaaaatggcaggcaaaggagacagggagtaagacaggatggccagggagggaaaagaggaagcaggaagtggcagagagcaccccaggcaggagcctagggcattggcttggctacacaaatcggtagcttccctctggccctcaatttgcccaagtatgaaataaagggtctacagtcataccaccctgaatgcacctgatcttgtctgatctcagaagctaagcaaggtcgggtctagttagtacttggatgggagactgcctggaataccgggtgctgtaggcttttggcctatcgttccctccctctttccctctttggccaggcgcggtggctcatgcctgcaatcctagcactttgggaggtcaaggcgggtggattacttgaggtcacaagtttcagaccagcctggccaacatagtgaaaccctgtctctactacaaatacaaaaattaaccaggtgtggtgacaggtgcatgtaatcccagctacccgggaggctgaggcaggagaattgcttgaatgcgggagatggaggtgcagtgagccgagatcgcgccactgcactccagcccgggcaacagagcaaaacaagaaagaaggaaagaaggaaggaaggaaggaaggaaggaaggaaggaaggaaggaaggaaggaaggaaggacggacggaaggaaggggaagggaagggaagggaagggaggaaggaaggaaggaaggaaggaaggaaggaaggaaggaaggaaggaaggaaggaaggaaagaaagggattagaatagatgatctcaaaagaagtgaggaactggaaaggatgaataaaaacaccattatgtgacggtaagaaaactata

SEQ ID NO: 3843 - DNA, 1148 bp, Homo sapiens
ctctctcttctctcccaggctctggctcatgcacatgcaacaggtgcgtctgtctatatgtctgggttcttgtcttttgtggtctgtttgtcttttctacctctttctcttgcagtgatagactgagggggtaaaatcaagagaaaaaactctcaggaatcaaggaacataatcctgtggagggtaatccattacatgagcttctcctgttcttccactttcctgcctggctttcactccttcccctgctctgcccagcctttccctcccacccactcctccttctgcaaatgccctgaaggccagcccttaccccaacacccacttccccacctccttaggccccagatacatacatgcccacatgcacgcttacatgtttagagccatccttgtttccaaatatgacccttcgcttgagggcaactgcataggtacatctaactctggactggcatgcacattgtcatgtgcagctttgcatatacacacatgcatacatgagcctccacacaagcacttgcacacatgtggactcctaaccatgctaacctcactggctgggaaggtggggaccccatgggccagcccttgcaggaggcccttttgcaaggcttagggtgtggccagccctgaaagctacttggacacaggtttcagctggccccagcccagaagtgacccccagaaagggagggccaccgctttgccccctgcttttacccttccttctgggtgctctacacctcaggttaccaggcctgaggcatctcagccaagcttgtttcctgctctgaggcttgtggggtgggagccagagtggaggtcggtgaaataaagtgatgcaattagaccccaccggctcctgcttctaaagagcgccgcccctcccccacccctgggaccaacactgtgggcccctcccccaccccggcgggaccagatggtccccctgccctttgtccaccaggccagatggagaggaagggagattggattcccctccccacccacacatacccaggtgccaagagactcagctgtggggggaggtggaggtcagtgggaccaggctgagccgattatggaggagtgggggggaaggaatagttgcttccccgagggcggggggtgcccagcggacttga

SEQ ID NO: 3844 - DNA, 1115 bp, Homo sapiens
catgtagtttttctctagctttggcttctgcctgagcacagcctaactggcccacccaaagcctgcaattcctttttctaccctaccagacccataataaagctttccttggtctccacagcctgaagtgtaaccctctggtcagggtgtaacctgcctcctgagggcagtttggctatctcccttgcttggcagtggcacttagggtaaggagtggccttgtctgagtgcgtgcagggcacattcccacactgaccagccttatgacctccatctgacccagtgctggagttggggtcagcttctcttcctgtgtcagggggttctaaggattagctgagaaggctggagggtctaggggagagctgagcatgtccccagtctgttccttccctttacttttgctctctgttccgtggagtgaatcacaaactctgagcctcagtttccccatatcccaccttggctataagtcttttggaccagacttggtatttaattgacaccttcttctaaagaggggagggggtgtccctgaggggatgtcaggaaaaaacttggtcgaacccctgctgtaggaagttgaagccccacaaccttggcagacagggcagcaaagcagcttgtaattttgttcttgaaggaggtctgcacagcattacccaggtggcgtattggctccctggggtggtggtacactttctctggaaatagtttcaagaggttgggtatttccacatttgaggttgacttgatgctgtctttagaatgctgggtacccctatggagaggggcagcagggagagacttggggacccacatgctgccacctgtacctttcctgcttttcaggtggaccccaagttcctgaggaacatgcgctttgccaagaagcacaacaaaaagggcctaaagaagatgcaggccaacaatgccaaggccatgagtgcacgtgccgaggctatcaaggccctcgtaaagcccaaggaggttaagcccaagatcccaaagggtgtcagccgcaagctcgatcgacttgcctacattgcccaccccaagcttgggaagcgtgctcgtgcccgtattgccaaggggctcaggctgtgccggccaaa

SEQ ID NO: 3845 - DNA, 1176 bp, Homo sapiens
cccatccagctggggttctggcatgggctgaaagaggctggcttggggccacggtgaaactgcctcctcaccatccgtcctgcctccctggcgcccccagagccttctgatgaagattgacgccttccactacgtgcagctggggacagcctacaggtcagtcggctctgccccaaccccacccccgccccaccctacactgctgttctggctcaggactaccttggactgatggtatcttgggcctgctcaggggcctccagcctgtgccagacgaggaggtgattgagctgtatgggggtacccagcacatcccactataccagatgagtggcttctatggcaaggtactccataccccagcagccagcctgccccatggacatgtgcccatgtcccaaggcagatttggggccctcgtctccagcactgaaggggttggggtcccaaagggtgtctgagacaatggccccctccccagggtccctccattaagcagttcatggacatcttctcgctaccggagatggctctgctgtcctgtgtggtggactactttctgggccacagcctggagtttgaccaagcacatctctacaaggacgtgacggtgaggatgctgggcctgccctcggatggcaggaaagactaagtccagccacagtgggacagccccacctgggccctgctgtaccctcattgtcctccactgcccccaggacgccatccgagacgtgcatgtgaagggcctcatgtaccagtggatcgagcaggacatgggtaagtgtggacagaagccctgccgtggccggcctgagcaggtggcaggactgaccctcacagactcatctgccccattagagaagtacatcctgagaggggatgagacgtttgctgtcctgagccgcctggtggcccatgggaaacagctgttcctcatcaccaacagtcctttcagcttcgtgtgagtccagcccctgtggatggagggacagcagggccagggctctgggtggggagggcaggcacggagccgccctcagactacttgccacctgaaactcctccacacagagacaaggggatgcggcacatggtgggtcccgattggcgccagctcttcgatgtggtcattgtccaggcagacaagcccagcttcttcactgaccggcgcaa

SEQ ID NO: 3846 - DNA, 1193 bp, Homo sapiens
agaaacaaacaaaaaccatgtttgggaatacatgtgaagagcgagggctctgccaatcattatcatcataatgaatattctaactaatattaatcagttactatgctccagggttgtgttcagtgcatcattcctattaccgcactaaattatcacagcgtcagaacaaggcctccgttttacggcttagggaattgaggcacagatgggctaagggagcacctgtagagcagggatgtggtttggtaacagagtgcatgctctttatactgctcttctgcgattattgtgaataaagcgcctacaagtgcctgtggaactgtaagtgccccatacaagatagcttttattaattttagggttctcacggggcgcttacttagatttttgctgtgataattgataaagttcagctttcaacactccatatcaaattctgttactttagaagtctaggcaccaatcacgtctccgaaataaacgcaaggcattgcataattgcattttggaatgtggtgctgtacatagtccatcagagagggtcatcacttctatctgggtattaggaataaaaatggcggtggcagagtagggggcgcggctgccaactgcgagctcagacctgcactggggaggcagggggcggggccgggccggcgccacgtgggctgtccttcccttttgggccgtcccacctccagagctgaggcgcctgcgccagctccttcgaggccctgctcggcttcagggagcacgcgcgccctgccgtgctctgattggcggagctgcacgcccccgctgcagtctgattggcggatccgcctcgctttagaaggtcggcgcccagttccggcactcgtgcgcctaccagacagtggcggaggacggcgctcgctagtctcccaggtcgcggtacacggcgagaacgggcggggcggtctcggctgcgtccgggcgatccagtgcttagttccgtcatatccctctccacgacctcggtcgagcatgttcaccagggcccaggtgagacggattctgcagcgggtgcccgggaagcagcgatttggcatctaccggttcctgcccttcttttttgtcctgggaggaacgatggagtggatcatgattaaagtgcgcgtgggccaggagaccttctgtaagtgagggggtagcagtctctgtttcctttcagg

SEQ ID NO: 3847 - DNA, 1156 bp, Homo sapiens
gagtaaagctgcaactttgatggcccaaggtgacgatccaagttaaagaatattctgaaaattagacatctataaaaggactgagataagctctccacacattcccagccagctggaaaacctacacatgctgtgggggaagatgcaaaagaacctggtgaagagcagaatccaaaggatacttgaaaattggctgcaactttgagtgcatcccccaacctatacacagatctgtcagcacatggtacatccttacgggcttgaggtagttaagtacaaacttcacctaagtcattggctatagaaagagaggagcaacccctagtgtcaggtttccttgcagacctatagtgggagctccagaggagagaagagaaagggagagaaaaaagatttgaagacataatgctgaaaacctctcaaattgatgaaaaacagctccaagaatttcaagtaagataatcacaaagagagccccatttagatacatcatcatcaaaccgatgaaaatcttaaaagcagcaactgattgatcacgtacatgtaattatctgcacattccatccaggggcctggggattgtccagcccaattgacaattagtgatacctgagcacttttcccagcatgtggggtcagggccactcaatctgtcactaccacgacaactggcacccatcttcatgtgttacctgtcggtccgggtactagctcacctatcatagccattgccagcactggtgcagaacacttgggtcccagagagttggcccagcactgctactgctttcacccttgccacatccactgcccaagggctcgggaacccacccacctgctcgatccactgctgccattcctggcactccagcaagccagctggagtcccaggaattggcctgcctggacctgctaacaccagtgccagtatacaccactctggggcccaaagcatggcccccttgacagcccagtccccagcagtactttatgcacctcaagccaggcacccccacctcctccccaccccccacattacttaggaactgggctccacaggagccggtgagtggcaggcaagcaaacattaccccctgagctccgcttcctgttagatcagtggtggcattagattctcataggagcatgaacccta

SEQ ID NO: 3848 - DNA, 1129 bp, Homo sapiens
tccccttacctttttgcactactcatttgtcctgggctctgcttcttgctcttttccacatgatggcccacctagcaaatgatcataattgtaaggcacatagagaagcagatgaggtgctgactccagaggtggataccttggggcctctgtaccccaggcctgcctgactgcctcatgggctgaaggcttaataccttcagcacactaatgtactgctacatataggttgggaaactctaggccaaatttggagccagaagttgagtcattcaagattgctgatatacaaatgaatatgcttttgttgaatttgtcccatcaaaattggaagtatagcattctggtaagtgaaagactaaaacaaggaagtccagggcttaaaaaaaaaaaaaaacttatagctagttaaactacaacacgttaaaatatcctcctaagtgagccaggagtttggtagcaggtgtccagctgaagacttggtgacagagtctatttaaatgtaagaacatggctgattatttcttatagaagaagttggattccatgggttccaagagaagaagagctacctccccttccagcagtgtcagcggggactttgatgatgggcaccattctgtgtcaacaccaggcccaagcaggaaaaggaggagactttccaatcttccaactgtagatcctgtgagtaacttggattacatggtttctgcctgctcttcccacaattcccctatcttccctttaatggtaaaattgttacgatgcaaggcatctccacttttttaagattctcttgattaatagtcttttcttttatgaacattatgtattcagctaagtcttagagtaatagtgtgatcttatgaataatttcagtatgttacatcatatattaattcagcaaataactgtgtgactatcatgtgacaagcactgttctcatggttgggatatagccatgtggaaacaagcccatttttcacatggaacttagattccaggcgggggaagtagaatgtaaacaagtaaacgaataaagaataatgtatccttagctagtaataagtgctaagaagaaaattttgggtgatttgggctgttttggcctgaattcgctggaagagag

SEQ ID NO: 3849 - DNA, 1185 bp, Homo sapiens
taaccagtggcataagctagtaaagaattggtatctaaagaactatcctcagggatggggtatattctttgtttcccttaagtaagttttctgcacaatttcacatggcgcaacgatgtggctatttttgtctcaaatgtaaggttccagtgctggaaaacgatattcacctcagtttgtaaaggctgccaagttactccattggaatggacatttgaagccatggggaaggactgcttcatatactgatgtttgggaaaaatggtatattccagacccaacaggcaaattcaacctaatccgaagatataccgagatctcaaacataaagtgaaacagaatttgaactgtaagcaagcatttctcaggaagtcctggaagatagcatgcgtgggaagtaacagttgctaggcttcaatgcctatcggtagcaagccatggaaaaagatgtgtcagctaggtaaagatgacaaactgccctgtctggcagtcagcttcccagacagactatagactataaatatgtctccatctgccttaccaagtgttttcttactacaatgctgaatgactggaaagaagaactgatatggctagttcagctagctggtacagataattcaaaactgctgttggttttaattttgtaacctgtggcctgatctgtaaataaaacttacatttttcaataggtatcttctttttttattccagataactacttccactcacaatgagatgaattgtctttttacagaatttagggattccaagttgcctggttttaatataatacatattcacaaaatttacacagctcatgcataccataacttatacagagaacagtttagcagtctgcttaaaatgttaaaaaaaaaatcataaaaagccattgttctgttacacataatctgtactgaagtcataagcatcatcctcttcaatgattttatccaagataaaagaccttgtagactgttcacctatattgcaggaaaataaagagattttcaaaaagtaaaagtgattctataccatgctgcttcgttagaaccccttttgcctgcctcacctgctgtagtctcctcagacagtgcctcccctgtctcttctgcagcaaacatgcctgagctgttttcctgtgtgacaaagaaaaatagtgctggattagtagcccttgtc

SEQ ID NO: 3850 - DNA, 1214 bp, Homo sapiens
gagggtcaggcaggagcaagatggggctggaggagccagaggagtccatccccaggcagggggagacccaggggggtgagctttaagcagggcctggcaagcgtgggtttgtccttctgagaaggtgcctctgctgctggggccgcacgtgggcctctgatcactctgcgggctgcagctccccaacgtcaccacatcaagcctcaccttccatcaggccagacacctggggtgttttctctcgcattccctttgtcttcaaggttgtgggaggatgagggaaggcgctcagggcctgcacgctccgctctgggttcttggatactgcgggcaacacagctggaccagatgccccagtgcaaggggttggcaagcatgagctcagccatgggaacgaggtggcaagtggttctccctgggacagggacaggcccgcaggctgagctcttagctacacgcagccctcaggatgtcccaccaggcccccaccagggcagatagtggtgcccagccctcccctcagccacgccgtgtgctctccctcacagaaaagatcaacatccgcgtgctggaccccttcaccatcaagcccctggacagaaaactcattctcgacagcgctcgtgccaccaagggcaggatcctcaccgtggaggaccattattatgaaggtaaggaggcctggggcaggcaggctgggcaagggacagggccagagagccgagcgttggacgtgcctcttctatctgagccccaggagggcagctgtggcccagaacacccagagctgtccctcagagcagctgggacgtggtctcttaaaaggcctcaggcttggcctggggacctagctaactcacagctgctgatgagctctgtggagctcctgctgcccaggaagctggtgaggattccaacctcgctgctaaatggtggatggtggcgtccctgaggtagtgtagggtggaagctatggtgcagcttgggaagcaatgcagaatttctggtatttgtgagtccttcacacagcaggctccctaagtacacaccagcctctctaagtaggaggccccagtgggagagatgggctttgactctggggtcaaatgtagataattggactatggacagtggctggctggtcaccaacaatggtgtttgaaacaaacatttagaggccatatttgggcttataaaaatagttctgggccgtg

SEQ ID NO: 3851 - DNA, 1148 bp, Homo sapiens
tcccacagagacctccagacatgttcacaactaacttcagcttccccctctccctaaccctaggtgctcttcctgggctgggctggcctgcccaggcagtgataccaccacccaatacccagataccagggtgtcctctaggctccctgctcctacctgaccagccaccaactccttccattccaactccagttctcatcctcttctctgccagtatcttagtccagactctcctcaatctcacccctacaatttgtcctttatgtggccgaccaagtgcacgttctaaaatataaagcctgatggctcatcccctggacatgttgccattgccctgtggataaagtccagatcctctaacgtgtctcagatactctgcagtctgcccgcttcttctctctttccctgtcaccctcctacccagcctctgatccagctgtgctgaagcacgtgtggctctcagtggctgtgctccccagccagctcgcctcatccctccccagtttcactcctcttcctagtgccttccttcccactgagctctgcaactctgccttgtgtgtgtgtgtgcgggggtccggtgggggggcccttaccagttgtcctggcctcttttttcacatcacagtcacagcacaatgcctggcacctgataaattcaagaatttttatcaaatggatgaaacatttgcctggacaaaactgggtttgttttcctgtagaaatgtgatcataccatagtcttataatattgatattatactaatttgcagtgtactttggggccttacagactttctgaagccttgagaatcatgtgtttcagtgaactaattttttcagtataaacagatctaaacaactaattcactcattttaggaataaaaagttgaggctgtctgtgttttcaaagtgcttaggtgtgtctcccactaaaatgtaagctctgtgagaactgttgttactcccttgctgcatcgcgtgggcccaggttagagcaagacctggcaccctgtgagtactcaggaaataaaggttattgactatggaaatactgcttaaaagtacaggaaaacacgaatgtttttcctttgaacgattatggtatcaataagccaacttactaaaatatatataaattttaaat

SEQ ID NO: 3852 - DNA, 1188 bp, Homo sapiens
ctggaagtcctgaccctgctttcacctggcatgtgtaatccagtcatgctcgtatcagtctctgtaggagcacttgaaggtattacataaatgctatctaactctgggaaacgccaacatgtgattgcctccagaggaatcttctttaaaaaaaaattcaaaatgttatttccttactaggatgtctttaaagaattataacccttaccgtgcctccacattagatagatccctgccaccagcacccatgtggccaccagcagagacagcaggaggagaggcagccagcctcccggcttgcttttgtctggaaaaaacaaagcttattcacctttggaaaacaaatccacacttatctcttaatttaaaaactaagacttggtatactttatagaggtttatttattttttattattttttagttttgagacagagtctcgctttgttgcctaggctggagtgcagtggcgcaatctcggttcactgcagcctccgtctcccgggttcaagcaatgctgcctcagcctcctgagtagctgggattacaggcatgtgtcaccgcgcccagccactttgtagagatttagatccctttaaaaccatcagtcagaagctctttagagagtctgccaatcatatctttttccctagagtgtgcaggtcttgcattagattctcaaaagggatatgggacccaggaagttaagaacagtcctaaaatctctttggcttctttgtcctgatatgcaccggcattttcacagtaggaactagggtttctgtccagtttttttggttctttaaggaattaatgttattctgggtacaactgcttacatacatagcacatatagatgacatttttacaggccgtcttgttagactgacatacatggaggatagtgccacccgcctcacaagaacatcaggtaagctcaggcacagagtgcccaggaatctgtaaggcttcgcccacgcacaagtcagggctgccagtcacctgggttgtcttcactttatttggctgcgtctaatgacaccttccaacttttgaccccacccctggactgttgtgtaaacattgtatttctccatctgtaatgaaaaagctaacacatctctaactccagagacattttccagaacatgctgttctcaggcactagtgaggcggtaccattattcct

SEQ ID NO: 3853 - DNA, 1199 bp, Homo sapiens
actagagcccaaaggaagaaaaatggagctatgtgaagacagtgcctgtagatgctgaatgaatggatgaatgaatgggcaggcttccctgactctctttaattgttccattagagggtaactttcctagctttggttcctttgataataaaataccatttcatcaatgtcatctctaggagaaggacaatttcaaatcccttagaagaaaagcaatgtatacaaaggaggaggctactgaatttgttgcttcacaaaggagcttagttttaccatggaagccacaatctctatccaagagacatgaagcacacacaaagtgacttttgaatatcattcattggagcaaaatggacttctgaccaacagtatcgatcaattggttaaagtcaccaagatgttttttcctaaaccatctcaccaacattggggcaaataattccagccaagtgcagcagccatacactgttggtgattacttgccctgtggaatttaattagcactagaacccttggcatcaccttcgcaccatgatgaagacacactgtattggatgtgagggcaatctggctgcaacatctgtcaccccattgatggccagggttgattcggctgatctggctggtaggcgggtgtccccttcctccctcaccactccatgtgtgtccctcccaaagctacatgcttggtcaaagaggacgacatccccaatagaggaggaccgatcttcagtcaagggcatacgagtagctgtgctcccctgttagaacccccaagcaagctgtcaagacacactgtattaaaggatgcaagagcaaagatgcctattcttaggtccggtgacatactgctaccctaccaacacaaaatacatataaataactttctgtgtaatatattaagttagatttttgttatattttccaaaccaggaaagacactgttcaaaagaatttggcaaatcacaaacactaacctggattatactttttaattgcaaatttttaggcactgtattagttaaatctacattcaatctacattgaacagaaaattttaccctatcccaaatgactagatcaaatgtatgaaaagatatatttaatgtgaatatagaaataagattttcaacccaaaaggttgataaaataaagtgtttttattttcagtcaggaaaaaaagtcatattaaaggtcac

SEQ ID NO: 3854 - DNA, 1168 bp, Homo sapiens
atcttttgggaaatgcagaatggcatgacgtaacagaacctgaggatagtgtctaattataacacatagaaataatcatgattcagaagtccctgtgtgtgctgctggtcttatctgcataaagccctataatcacagtgtaagatattgtaggggataaacagaaggcaattactgacactgtgactggaggccagacccagtctttgtgccattcagaggcatctgcttttgtttgtcgtattaatctatttatgataatgataactattgtagacaaccaatttattatgcttttatcatatgcaatgcactttccgcaattttcattttaatctccctaacagccacgtgtgggcaatggtatctgtattttatgaatgccaaaatgggaggcccagcgagatgaaaaaaattgcccaaacttatcaggagtaaagttgtggtttgaacctggaaatcagtctttggccactaagccattgaagtaataatatctctggaagtagggagcagctcctctcttacttccttggtttccaaggcagcatgtctttctggtgggttctctgagcccaacactctttcccatttctttttttttttttttttcgcacttgagccttcttgtccttcaattctcagcctaaagtcgcacctgtaaagaggcagtttctgacctctcagtactctctttttctatcagagcagtcttcatgattttcaatagtatctttgcttgtgtggttatttgatttacgtttgtgtccctcttggggctagaagctttgggaaactcaggatacatattggttttgttcaccactatacacctagcccctgcacagtgtgtagcccacagacattccccagatgtctgtttaagaagtaaatgaatggctccatcacttgctggaggttagaccagagtttcttagtcttctttttcattattgtcccacctaagaagaaaaattttattaaatttattttattttcttaaatttcaataggtttcaggggagcaggtggtgtttggttacatgagtaagttctttagtggtgatttctgagattctggtgcatccatcacccaagcagtgtacacggtacccaatgtgtagtctttttttacaattttattttatttattatactttaagtttta

SEQ ID NO: 3855 - DNA, 1131 bp, Homo sapiens
tgtagacagtgcatactatggagtatgcattttgtctttgaggtttttgtaagcattattggttactattgtcagcaaaggggttatattaataaaaaggtaggaaaccagatatggcgatttagcattgagctactagatttccccacatgcataaagcaatttaattgcaagatagtagagctgtcatagctttaatcttttgtgagatggcctctgctttggttccaggttctgtgtaaaatgaaagatgtacttttgtttttgatgaaaaaaagcagaaatgatcattcatttagtgctaaccaactagtttagtaatccagtgaagctagatgtcaaaaaattttattttatatttgtcttgtcaaatactgaattaccgtataactttagatgctgttttgacattaacccctttggagctgggagttgggatttcccaacattaaacgtgaacacatttcgcagaagcttttagcatcggattatctggacattcacatctagtgtgagtgttgtgactaagtgaacttgtggcagaagaccaagctttaagggattgtggacttgcagaccctgacgcgttatattgtgtgagtagtgtataattttaaaacttaaacaaactgtgtatttcaatagaggaggactttttgttttttaaatgtagctcttttagaaaacgatgaaaaggatgaagaggatatgtctctggattcaggggatgaaatctcacatatagaagtatgcagcaattttcattcagaaatatgggagaaagagaccaaaggatcacgtggaacagatcaaaaaaagaatactcaaattgagttgcaatcgtctcctgatgtgcaaaacagtttattagaagataagacttaccttgattctgaagagagaacttctattgatatagtatgctctgaaggagagaacagcaattcaacagaacaagattcatatagtaactttcaggtttatcatagtcaattaaatatgtcccatcagtttagtcattttaatgttctcactcatcagacatttttggggacaccatatgccctttcatcaagtcagtctcaagaaaatgagaattacttcttatctgcttatactgaaagcttggat

SEQ ID NO: 3856 - DNA, 1155 bp, Homo sapiens
ttctgataaacccctcattgtccgaattctcaatactcactctctgaaacacaagaaccaaatagatttgtgtaactcagtatctctccatatccaaacctactatctcaactttcactttctgaacttgggaactgaatagattttgatgatgaggaatgcttgcattgtagtcaggctttcagaagaaaacaagccatgtaatacaaacataaaattatgttcatatgcagtgagaaagtaagaaggaagggccaggcgcggtggctcacccaacactttgggaggccgaggcgggtggatcacttgaggtcaggagtttgagaccagcctgggcaacatgataaaaccccgtctctactaaaaatacaaaaattagctgggtgtcgtggcacatgcctctaatcccagctactcgagaagctgaggcaggagaatcgcttgaacccggaaggttgaacccggaggttgcagtgagctgagactgtgccactgcgctccagcctgggcgagagagtctgtctcaaaaaaaaaagagagagagacagagagtgagagagagactgtgtgtgtgtgtgtgtgtgtgtgtgtgtgtgtgcacgcgtgtgtgttttaattctaggacatttaattgaaaggtttctagcctgtaagtcaaagactcgcaagggttttataactctgcctggaagttttatgtcaatctgactatcccatctataaacaacagactgattaagcacatatatatgaaaataattaaattctatgtagccattaaacatgaagttgcacgttctgaaactcaaagatatttgactgccattcgactacctggaaactgaggctcaacaaagtgagaagtaaaaagtcaactgttgtaaaacttgtattaaatggcgcacctatgcaaaaaagttgtatccctctttcttggaacttacgaccaccatttagcaagacaaaaagaaaccttggaacagccacttcccttctctccaaccacctcctcgccttcagctaaaccacatatactggcatcacattcattttccattcacttctcaacccaccacaatctgatgtttgacccaatccctctacccaaactagatatgcttcagtattaaattggaccttacctcagaaatatcc

SEQ ID NO: 3857 - DNA, 1203 bp, Homo sapiens
tttccatactggtttagtccagaagtaatggctaattctcctaacctccatcttcccccacaaaattttcacttgcctttttgaagtcattggagccaagtctcattcttaaggaaatttccatggtatttcattagttgtatatggatgagtgggttctgagaacaatagctctctccatacataatagcaaagtaatcaaggtaaaatttactttgagctatcctcagtccaaaaaactttgtttcgtatttgtactcttgattcctgccagcatattcatttctaattgtacactatgttcaaccttgttgatgtagagatgaagtacccactcctaaagtattgtctgtggtaattttttttagaatgaagaaaagtgattttaaaaaaagatcttactgtgaagaacaaatggatggagagtggttgtattataatcattaataggcgtcagctgtgaattcagaaaatttcagatcctcagcctcttcttgctaattatttcgtcatcttctatgtattagttactttaaatcagacaattgtttatttgtacttcgtatgacccatttgtatgtcttttttttttttttttttggagtcagagcctctgttgcccaggctgggatgcagtgttgcgatcccggctgactgcagcctctgcatcctaggttcaaaggattctccttccttagcctcccccagtagttcggattacaggcatgtgccaccacgcccagctaatttttgtattctccttagaggtgggattttgccatgttggccaggctggtctggaactcctgacctgaagtgatccgccctccttggcctcccaaagtgctgggattacaggcatgagccgccacgcccagccccatttgtatgttttgataggaatgatatgtcttttaagtttagcttttttaaatttatgtatatatgataatattttttgtgatacatgtatacataatacaaaaagatctgccttaacaccaaacaaattggtaaaactaattgatgaagatgttcttttgattaaggaacaaagctgtttgatgacctaaattatatatcaatgcccactgcctttataaatacaaccttcaaatcttgagtgtgggctgggcatggtggatcatgtctgtaatcccagcactttgagaggccgaggtgggcgaatcacgaggtcaggag

SEQ ID NO: 3858 - DNA, 1205 bp, Homo sapiens
tttttttaatggctcctaatatattgagatcacatatctaatatttacatgttatttcttttttatttaccttttttaattagtagagttaatacagatacagaccatgagtatacaagcaaaggaaaaagctggttaacctgtgcacttttttgtaacatgctctaatcccatgtgtgcttgtttcttcattttcctgccttgctatagcttatccttttatcatttttgaaattttgaccagaggagtaaatggacttttggggaatggggaggacaatgaacttttggaagttacatgcagaattttttggagaggggcccctagctttcaaaggggtctgcaatttctcaaaaatggttaaaaacactgatattggtgtgttggtttaaagtaatttcacttaattgagaagctgactcagtttcttaatatttgtagtgcttggtttaagaggcatttgcaaacacttcaatagttgcaaagtgatgtgttctgggtgttcatccaccatgtcattatcctaggtcatcactcctgaagaaatcattcacccggatgtggacgagcactcagttatgacttacctgtcccagttccccaaagccaagctcaagccgggggctcctctcaaacccaaactcaacccgaagaaagccagggcctatggcagaggtgagtgctggtcctctggtgttgtattggagacatgtcctctggtgttggagatgatttcatggcttcaagagtgatgttcttagaatcaaaaatagataggtgtaatcctcaaagagaccccaagcctcctttgtaacacattttatgactgttttattctgccttgtttttctaaggctttaagaaatgtttctgcttagatggaaagggcaagtttgctgcttggtgattttagtgcagtagcccattgctcccatttttcagaagaggaatcgcggggtagggagtcgggggagtttggtcttgccccagatcaccacagtcagtgatgggggtgggccatctggctgctgattcatttctccttctgttacactaagcctgcctcagatttccagccggagtgggagctattgttaacccctggcagatacttccttgctaagacatcctgtttatgactgcgaggcagctgcggaacaccgttttgctcagaacattatagtgggtagaagccatttcaagg

SEQ ID NO: 3859 - DNA, 1200 bp, Homo sapiens
aagaactacattttaaattcaattacattttcattcatttaaattaaaatttaaacaaccacatgtagccattagctgctatattggagaatgcggatttaggacaatcctcttaaccctgagaaagatacacaatgattcccaaaatgctaatctaactcaaagaggaggagctaccctgagcccgagtttggtaattttgtgagctacctgaccacttgaccatgcccatacaacctagaaattactattcttaaccttaataatacttctcctgggtagtatatgtaacatattggatatgttataaaaccagataatttaggccatatttccaatgcaataagttaacatttttctacatgattgttgcatacacacaacactcaaacatcttaaaaaagaataaaataagcaataacttaagctacatcccataaaataagcaataacttaaggtacatcccaagtgtacatttaagcaaaatatcaaaatgccaggatcagtgtcttctcaaggattcaacggctatgacctttgagggtacaggctgtgcctgccagctcgatatgttcatctccaggggcctggcacagccgtggagaaggcactcggcaaatatttcctgaacacgagtaaataccaagagccattctattcagtaactcaggtttatttatttttcttattttttccccatctattgtgccgatgttctccactgaaaaggtaaaagtgaacatgtggggaaaggcaggttgtagaaaaaaaggacttcacccccaccaccctcccccaatatactcaagttacccagatagaggagcccaagcgatgagtcagtatcaatagactgggagagccacaggcccagggaaggctcagatcctaacctgtccaagcaccaaagggggctagaatgagagtacaggagaaaaaaaaaaaaaggaagaaagaaagaaaagaaagaaagaaagaaagaaagaaagaaagaaagaaagaaagaaagaaagaaagaaagaaagaaagaaagaaagaaagaaacaacaacaacaaaaaaccaacgctggccaggattacttttacccagataccaacaggaacagccaactagttgaccccaaagtcttgttctcaaaacaataccatcatgaaaataccaagggaggaaaaaacagaacacgacgtaatcagcaaat

SEQ ID NO: 3860 - DNA, 1196 bp, Homo sapiens
agttgctaagatcaggaatttgtgggacctaatttggtccaaactaggcaagaacctcgagaaattggtatgtaatttaggtttgtgttacagaaaagaattggcaaagaccataagagcataatgctttccacagttaaatgtgagcaacctccccaaatccagaactgtaagaaaagaacggtttctttgctaacccagtaggccatattgttaacagaagttgtatccgataaaagatctatgtttaaactataagatgcaacaggaaaaaagaaacacagcatatggaactgtttctacaccacttcaagtcaacagagacaatattttaaaaataaccaggagaattctccaggatgtttctttttatctctcttctctgcattgcgatttttactgactctgacacagagtagtcattgcaaaaaataagaagccgagggctagtgtcatatccatgctgaagaggtgtttagtttctttcatcaaggggcagctgggaaggaaagcatttctgtgtgcctttgccttggggaagacctgtctcctaagaactctgtgcatgtgatctgcgctgttgaaggagaaatgggtgagcagaagtgaccgcaccctgtaacttcctgtgtccaggagagctggcagtcggcccggtcttctgagacatccagtaaaaatgaatcccagttacatctgcggtgctcacagaaatagatctgctgtatctaataaaagcaaatgttactttttgtaaagggctgccgggtcacattcggaatggtaaacaagtcccccaaaaaacttatttttgaggtagagactgtgtagatcacattttacctcctggactattatttacgtgtatcttactgtaaatgactcaggattaaggagaaaaaaacaccatcttcctttgaagagaaagaagggaagctggtgtttctagcagtctctgcgaaaggtagagattccttccacatccgtgaattaaccccacttaggagtgggcaccctgctatatttccattcccaaaccttgcacacgctgtgttctcggggaggctgaacaagctgtgggtctgaattgcgtgtctggcttgcacagccccacgtgggccgaggggaggtgggctgattcataatgaatgctccgggtacttagagtagggcagagtgcaggggactgttattct

SEQ ID NO: 3861 - DNA, 1146 bp, Homo sapiens
ttaacaggttccagtaatggttgtgtgatactcttcattttattagggttcaacagttcatcaaagggaagagaaatgtaggggctcctatttgaaaaatttatgtgtgtttatttacacataaatatgtacatttgggtcaggtgcagtggctcacatttgtaatcccaacactttgggagcccaaggtgggcagatcatttgaggtcaggaatttgaggccagcctggtcaacatggtgaaaccctgtctcgactaaaaatacaaaaaatttagccaggcctggtggcacacacttgtaatcccagctatttgggaggccgagataggaggatcgcttgaactgtggaggcgggggttgcagtgagctgagatcatgccactgcactccagcttgggcaacaataaataaaaataaataaaatttaaaaaatatagtatgtacatttgcatatcctattcccattgaatattatctaaacttgcctatatttcttaactcagaagttacatgcatcctccttaacaagtgggtgagctagataaatctcaggggattaaaaaagattcaattacttatcttttggggtgaattgatgaataagaaactgtaatagcaaccctctggacctactaggcatctgtaattggtaggcttttccgacattttttccttcacagacttagcaaccgaagcacaaggtggattaaataaatgactaaataaaagagaaacagaaatatcatatcctggctccagatccatgattgtcagtagtgtgttacagtgtttttaccagtaacagttagcattgccttgattataagcaaacaaaagtagattctatttagcttaagcaaaaaaaaaaaaaaaaaaaaaaaaaaattattggcaggctttgagtagttcactatatagactaaaggatataggagaatgagacttgagaattgacagaaagcagagtagattggggtttatgcatagcaagtgctactgaacagtcttataaggacaccacgatttaaagaaataattttcagttcttttcagtcttctgtttattttagtcaagattcagaatttagggagaaatatctaattggcctgaattgggaaatgtgcccaattttggctacgacaca

SEQ ID NO: 3862 - DNA, 1164 bp, Homo sapiens
ctttgaatgcattctctgtgccaggtattttctttattcttttagatgaacttggaacggtgaaggttacaaagtaaaaatatttaggagtaagtggcttttacaagatttgaccaaagaacagaatgctttgctgacactttggaaatgtaagggtggtgtatgtttaatcgggaaatactcagtttctaatgcatgcaatgtttgtctggaacctttttccttaaatgattcaaatcagttccattcaaacctgtgtacttagcactcttgataggtactgaataaaacaaagatacagtccctccttgctgggacttcagagtctggctcattgttccttaacttatttaaccaatgtctctaaatttctaaatataaatatctcaggccctctttacatgttatttgaaactttaaataagctaaattaaagataattaagttaaagccctgctttatttttgttacctataacttatacatttatttatggctctctgaaatactgatgtgactgatgatgtgaaatagcaaacacttgctgataaatggcacaagcttgtcatttatcagtcagcttcatgttttgtagaaaccagaggttgcaaattagtggttccatgggtccaatgcagatcacagagtcattgtcatcctaagtgagccaacatttgaagttgagatattatccatagaatgcagattttcgacttatcttaaaacattggaagatcgggtagctatgggcctgcattcccacctgacagcaatgggatgggactgactggctgctgcccccttcagggaggacgtgttctcttctgttgtcatgtcctcatcactcatccagtaaacacacatgcctgaaaattggcctgcagcatgcaactaactttcctgactgctggaaaacacttgagtttgagagtcctggtagattccagggagaggagattggagtattttcagaatacagagtagatggaccttgaggtattggtaggatttatatacttgaagaagtgctgagaggaggtcatgccagaaaggagaataactttgatgctgaatcccaccaggtttttctctaataatatttaaattgctgaaggatgcagatgatttccttttttctaataaatgaaagcatatttaaggtta

SEQ ID NO: 3863 - DNA, 1169 bp, Homo sapiens
ccttgttttacttaataatggccccagcacaagagtagtaatgctggcatagtgttataattgctctattttatcattagctatcattgtcaatatcttactctgcctaatttataaattaaactttttcataggtatgcatgtgtaggagaaacatagtactgtttggtttcaggcatccactggggatcttgaagcatctgtcctgcggataaccagggacttctatactatgtgttgagtactgtgctgaataccatatgggaattgtctaattttattgctctaagattcttcttaggtggatattatgagcattccacctttgcatgtgagatgcaaagaagttattgttctgtcagttatgcaaggttgcacagacagtaagtggcagaggcagaattcaaactcccagatctgagttcataactatttccaaatactgtctccttcacattacaatgatatcttcagaaactctactgcatcctggttattactttatattgaaaactgtatacctctaacccagtgatgcgtcaccatttttggacccctcttcagagaaaaatacacacacacacacacacacacttggttgcattcatacatgtatatatgtgcatatgtgtaattttttctttttaatttcagaggttttaaggatcccaagttgaggacacctaacctacagggaaaactcatttgaacttggagtctagttgctgtttacttccttatgagggcactaattcttgctgatattaacaaaccctttcaagtatttccagtgtagcagagtcaaacttcaaacctggctgttggtctaatatataacaagactagtaaccatttatttattacgtgtacctaactcttagggttgacagtgggtatacacactggtgaagtcctactggttatacgcagtgggcatctgtaatgatttggtcaggggtgaatatcatgcctgctaacaactttttgaggtaggtgatgttacatattatgcccgttgttcaaatgagaatcctcaggctcagagcacttcctcaatagcttacatgtggcagatgcctgtcaatctaatttcaaatctgctctgatctactttcctatcccggctttgaatgtacctttccttccaaatctgttacaggttctgcatt

SEQ ID NO: 3864 - DNA, 1180 bp, Homo sapiens
ctgctctgaagctagcttcttttgttcccttttactccaatgaattcagactatctcctggcttttgtttctccacagtagtaaaactctattgtgatgcagcagcagacaattcaagccaaggtgacaatcatttcagaaaataaagcaaacctgctttcataaacacctaccacatgactaaatatgccttctacagcagggggaaggaacagacactgaaatgttcacttttagctcagaaaaaaagatgacaaagaaactctcaataataggtaaaagcagctgccatttacaaggtaatacttaatttcccttaatgatgtctgtaggacatagattctcaaactgtggtccaaagacccctgtgggtccccaagatactttcaggaggtgcaagggagttttcaggagacaatatgacttataatatcacaacagattgaatgcaaaagcagttaggagaatccagctgtcttctgctgaggcagacattaaaaagatttgcaaaagtataaagcaatgccactcttccaactaaaatttgttttgaaaaataattttttttttcctacggccataccaccctgaacgcgcccgatctcatctgaaaaataattttttttaattttgttattattacactttaagttttagggtacatgtgcacaacatgcaggtttgttacatatgtatacatgtgccatgttgctgtgctgcacccattaactcgtgatttaacattaggtgtatctcctaatgctatccctccccgctccccccaccccacagcagtccctggtgtgtgatgttccccttcctgtgtccatgtgttctcattgttcaatttcccacctatgagtgagagcatgcagtgtttggttttttgtccttgcgatagtttgctgagaatgatggtttccagtttcatccatgtccctacaaaggacatgaactcatcattttttatggctgcatagtattccatggtgtatatgtgccacatatattcttttataaaaatgtgttatttatgttaacatgctatggttgtattagttatttaaaatgaattaagtttttttaatttgtcagttaaaatttttagaacagtaaatatccacagatatgatccacataaacaaaacctctttcaggtcctattcaataattcttaaga

SEQ ID NO: 3865 - DNA, 1223 bp, Homo sapiens
agtcatgttatagcacagcgagaaattggaatatcagttatgtaagacacagagaagcccagcagtatatgctgtacattgctgcattctcctcctcaaagaggtcatctctaatgacattttaaccaacacacacacacacacagacacccatggcctgacaaacctgagcatcaggaatatcacatttaagtagtctgaatagtgtaataatgaaatgggtttagaaaggaagaatacagtgactcccatcatacaggaaaatctgagtctctcgattttgacaaggtaagagtggagatttcaaaaccaatagtattaactagccaatgatgcttacgtctcactcagcaggaggaatcttaagtcaagttggttgctaggcagagagctgaatgagtgacaggtattttcatcagggagtttccataaactctgtctcttctcagaacttctactgagcctacctcatttccagcccgaagcaaaaaaagataaaaatattaccagacccgctcttttccggttagcgcggcgtgagaagccatgagcagcagtctctcgcaacaccctgtacgaggcggtgcgggaagtcctgcaccggaaccagcgcaagcgccgcaagttcctggagacggtggagttgcagatcagcttgaagaactatgacccccagaaggacaagtgcttctcgggcaccgtcagacttaagtccactccccgccctaagttgtgtgtgtgtgtcctgggggaccagcagcactgtgacgaggctaaggccgtggatatcccccacatggacatcgaggcgctgaaaaaactcaaaaagaataaaaaactggtcaagaagctggccaagaagtatgatgcgtttttggcctcagagtctctgatcaagcagattccacgaatcctcggcccaggtctaaataaggcaggaaagttcccttccctgctcacacacaacgaaaacatggtggccaaagtgggtgaggtgaagtccacaatcaagttccaaatgaagaaggtgttatgtctggctgtagctgttggtcacgtgaagatgacagccgatgagcttgtgtataacattcacctggctgtcaacttcttggtgtcattgctcaagaaaaactggcagaatgtccgggccttatatatcgagagcaccatgggcaagccccagcgcctatattaaggcacatttgaataaattctattac

SEQ ID NO: 3866 - DNA, 1267 bp, Homo sapiens
gtatctaccttcacagtgttgagagattaaatgagaaaatatagatgcctggttggcataagtgcttagtatataccggctatttttattatttttaaggctattgattactagtactttagaactttgtatatactgtgtctccccacccccattacaaagtggcctttgcatagtaaaagttcgtatggctttgagtgtaatcatatctttgggtggatagtgcatcactacctttgccttacatgatatattaaataattgaacagcagcagatacctctttaactttattcagattttgtccttggcctgttccccaccagccaaagcagggagaaatttgtagctcaggccctcaagttgaaagtgggcattaatattagcaaattccctttaataatcatcccattaaatttgatgaccagaggggacgtcctcatagcttataacagaaaatagtgtctctaggagtcaagggagcttttcccaaatgttatctattgagcaagattaaagagacagatcacccaggaggctgatggtaggtggtgttaatccattagtccacacgcagataactcgttaggtttcctgagcatcccccttaatcttggctgcagagatagaaaaggagattgtagaaacttgccctgcagcaaagattattgatatgttttcctcttacatgactcaaaaccaaaaaggaatgtaataaataacggctgtgactcctggagtgattaaagagcactcaggagccaggagagctgatagctgccagctccagagcctgagtgggcagaacttggttccttgagacagcagctgcctaggaaggacaaagtctgcatgacgctctgtggtgctttgtgtgcaagttgaccattgtggcaaggtcataggatagcatggtggggagggggttgcccctttgtgtttgttgcccgcacctttgcccttgtgtgcaggattctctctgcttccttttgtggatgaatccttctgactttttaggtcatagattttgtgttgattcttaagtgtggcctctacagaggtcgtttgccccttaatatgtttatattgttgctgttaactttattgtttttgtctgtcttaccagacacaaggcaagattttgtttctctcttcactctcttttctggcttaacccaagacctggtggtggcacatactaaccactccaaaatttttagaggctgaatgccagctgttggcttaatccatatgttttcatgaaacca

SEQ ID NO: 3867 - DNA, 1198 bp, Homo sapiens
catcagtggttcttaaaccaacctttttatcaggatcactttgggcatatgttaaaatatacacacgtgggccgggcacagtggctcacacctgtaatcccagcactttgggaggccgaggtgggtggatcacctgagaggtcaggagttcgagatcagcctgggcaacatggtgaaaccccatctctgttaaaaatgcaaaattagccaggcatggtggcacatgcctgtaattccagctacttgggaggctaaggcaggagaattgcttgaagctgggaggtggaggatgcggtgagctaagatcgcgccattgcactccagcctgggcaacaagagtaaatctccgtctcaccccccgcgcccccccccaccaaaaaaaaaaatatatatatatatacacacacacacacctgaaccccactgcagattaatggctctttggatatttgtaggcctgctctttgttcttacagctatgtgtaggaatcactggtaagtctttaccttccttgtctcttctctttccaaaccattgttctttgtttaggcctttgttatagaacatagcccttttctgttcatccactaccctctgacctctctgattcatgtacccctcaccttcctcattgttttctgagtgtgtagtacatagtaagtgcttgaaagtggttgaagtaatgcagtttaaagttgtaacattttgaggcctggtgttgatctacaaagatggtaggctcagttccaaacaagacactagcctttcctgtctcctggaggccagctttacttagggatagtgataataaaatatagcagctactatttactatgctcttactaccttccgggtactttgcataatgcctctcagacattattgacatcaaggcctgaactaggaatatcagataataatatctattgccatcactttgtagttgaggaaatagaggtgcagtaagttttaataacttgctgaagatgatgcagtttgtaaatgggtgaagttctgtttgaaaccagtttttttgttgttgttgttgttttttgtttttttatttgtttttttcagacggagtctctgtctgtcacccaggctggagtgcaatggcacaatctcggctcactgcaacctctgcctcccgggttcaagcagttctcctgcgtcagcctccctagtagctgggactac

SEQ ID NO: 3868 - DNA, 1147 bp, Homo sapiens
tgtcatgcatcacctacccccaacttttgttcattaactgaggttaagtggatcctaaaatctgaacattaacttcagattcctgtaatgagattactcttaacaaaagctctggtttcctcaattccttaggttctgttagggtagcagggaatccaagtgaattagcaatggaattgcctgaaaatattaatagatgttttggacttgacagatcagtcacccttttatatttgtattaatggggagggaacaggggcatagggcataatcaaagccctttgaacttggctttaaaatacagaacaagcaaatacctttgaacttggctttaaaatacagaggactacaatttgtaatagttttacatgagtttgcatcctgagagcaggagatgtaggagtggctctgtattttgggatgggtttgaatgctctatttagttgttctgccaaaagttttctcagactaccttgggagatgtcatgttacctgattgccttgtgttgtgctttagaatggtgctagtttctgaattatccattttatttctgtttttttttcttatcttctatagatgatcacagtagggtgaagttaagacctttaccaggaaaagactctaagcacagcgactacattaatgcaaactatgttgatgtaagtcagaactgttattataaacctgtttctagaaattgaagactgcagcagaaactgtttaatatattttaatactgtacagagctttcactaaaaacaaagcccattcaatatggaaggcatttgaattattgactggtcttctgtgataactgctttcatctcactttgtgctgtgtcattttgaagggttacaacaaagcaaaagcctacattgccacccaaggacctttgaagtctacatttgaagatttctggaggatgatttgggaacaaaacactggaatcattgtgatgattacgaaccttgtggaaaaaggaagagtaagagccttttgactcactatcttaataatgcaccttcattcaaaagatacttgtggagtacctgctttagggtaggaacttgacaaggtataaagagttacggaaatgaaaagtgttctctctgctttatcttgcttatgattcagaaggaaagaga

SEQ ID NO: 3869 - DNA, 1209 bp, Homo sapiens
acaatcctatgaatatggtgcttttatttcttccattttgcagatgagaaatctgaagctcagaaacacatgagactcgtccaaggtcaaatagctgaatattgacagagatgctttatattgcctttgatttaggggaaaaaaaaaaaacatgtgaaagggtagcgttccattggacacaaaatggagacaaatagaagtgaaagggtgctggaaataacatttcattgctgggactgatacttgaatattcgttactatgtcgccattgggtgtgagactagatgaggtaagtaatgggtagagggaggaattgtcaactggttttatcatgttggacaaaatgtaaaatagtctcaatgaaacttttagaacccagctcttatttccattttcagcactaggtcaccaaagtgatggggtttagtaaatcttaacattttgggaattaagaaacctaataagaatctaacaaaacttatgtaacatgacccagagtatataaattcaaaatgtccactagcgtgaggctatttagaaaattattatagtctacagccataccaccctgaacacgccctgatctcagaagctaaacagggtcgggcctggttagtacttggatgggggaaaattattatagaaccttcactacctaacatacagaacagcacaatatgataattcatagtcctgtacatatattatatgactgttaaaaaaaataaggcagatcctccttgaaaaagtaaggcatgtacaggtcatattattaggtagcaaacagtatattaaagattgtgtttaatttcagtgttttaagttgttaatattggagattaaattatgaagaaccttaccttttcctcctgtaaacattcctgtattggttgaatttttataaatagcacgttttgactgaattaatgattaaaatcaatttgacctaaattctaaacaaaaggtcagatttctgccaccttcctgtatgtttctaaatgttataaatatcttttaatcaaagactttaaattgtctattcctgatacatttctatactaaccgaataaaatagatgaataagccgttgtcaaccggacattcaaactttttaaaaaccaactctaggactgtttttgtttcacaattcacttgggtagagtaccacagctcagggaaagcaaacgagagaagaaaggattttccctg

SEQ ID NO: 3870 - DNA, 1463 bp, Homo sapiens
ctgctgcccgtcccctccctcgggcggccgcgggagtcgaaagcgaaagctagcccgcgccgcggactttgagcccggggcggggggtggccttgaggaggcgggctcggggggctgggcggccatgggggcgctgtcagcgtgccccacccggtccgcgggccgcgcacgccgccggaactccctggcgcctccttaaaaaacggcccccgcgcgactctttcccccttttttttgttacattgtaggagcggaaagaatgtcggagcgggccgcggatgacgtcaggggggagccgcgccgcgcggcggcggcggcgggcggagcagcggccgcggccgcccggcagcagcagcagcagcagcagcagcagcagccgccgcctccgcagccccagcggcagcagcacccgccaccgccgccacggcgcacacggccggaggacggcgggcccggcgccgcctccacctcggccgccgcaatggcgacggtcggggagcgcaggcctctgcccagtcctgaagtgatgctgggacagtcgtggaatctgtgggttgaggcttccaaacttcctgggaaggacggtgagtgtccacgccctcctccccccttcaccccctcgcgaccccctcctctctcctcccctcccccctgcccccctcctgtgacccgccccctcgaggggcagagatgctatcgtttgctgggttgcggaacgcggaggtgcccacacctaccccgtgcgtgcgtgagtgtgcgtcacactcctggccactgacctgcctctcccctcctcctgtgtgtgtatatctcctagggacagaattggacgaaagtttcaaggagtttgggaaaaaccgcgaagtcatggggctctgtcgggaaggtgagtccagcccccctgatggagtttgtacaaacccctgggaagtttcattgacagttcactgggaccgggaacatcagcccaccataccgactccccgactccccgtgcctgcgaagatgctgcctgaggagggagggagggggcagagcgcttggaaagtttggtttgggggcctcctgtaatgagagcgtccggaatccttctgtgaccaggcaggagcagcattattggtgatgagcgctgggaaccggcgggaagtttaacctagatctctgcatttctgacctccttacggagaaacaggagtagaggaaggaattctcagctttgaaacctttccacgaatgcttaggggacattttctgttggcaatcgaaacgaattttgaacttaaagaagatgctttacctatgcagtcttatttctgtaggatttaaggtacaagttggggatgttagaaaaaggtcatcataacccggagtgcattttggtcagattttttgcgagctgccaatatcacgggggaaagaaagccagaattttatttggtcaaataagcctttactgcccgtgg

SEQ ID NO: 3871 - DNA, 1178 bp, Homo sapiens
gaggcataagtctagatgcccagagagcatccaggcactgaactgctcagagcttgagatgaaatgacatacaagcttcagggtaaaactgtctactagcaagattacctccctcaattctaccattgcagatttcttctgaccccaaatgcaaccttacagagaatgctgaatgaggaaggccaattccttacaatgatggcagaacccccaagcgaatgccctattgaggagaaggacatcactgtatttggaattctgcctgctagtgatagctcacacatcacatcccagaatcccactcccaatgcattatttcctgaggcaagaacttaaggtcctcacctaattcctccatcacaaccattaactcttattggacaagctcctcctgtgagtagggcctgtactcacttcctcttagatcataattccatcttcaagagactgatttccagaatagtaatctttttccagcgttctctcttctccaatgccctggttgttatttttcccacctctcctaatattgatcttcttgtcttttggttagaactgcaacttcggagttgagttcatttcctattgctgctcaattcagtagcaacatagctggcttgttcccagacccaggaagtataagtcattgacagtttcctgagtggctctgccaatccataccacccttggtactgtgaaaaggcttcttggcagccaggtggcattgaggatggtattcagggcgctttccttctgtcatatagttgtgggatctctaccaagtgtgaaggtgaatgaggtaagggagatcagaaccatgcttcctggtttttcatacatccaaggaagaagtcctggtgtgggttgtttgacaccttctttccactttcaccttttattttttattccttcctttctacccccaaccagtcgagcaaatgagcaattttgtgtttctaatacaggatctggaagtagtgctttctaatcctcatttcctgtaggatgttcctgcactataacaagattatgttttcttccttctgcagcagctttctgcttcttgggtactactagctattgttcaattcaggtgaggcctgtgatgacatatatgtagcatgtgctctgcgctccctgcaagctgagcagatacaaccaatgcatcactgtatact

SEQ ID NO: 3872 - DNA, 1156 bp, Homo sapiens
ttgttccggcgcccaggctggggaaggcaggggagagggagagctgcttccccgggcagcgcggtgggcaaatgcctttgcactttggagggctttgtaagctctcggggaaaattagaaacggaagggctgcgattctcctctgtccgttttcctatttctaaaaggaagaatgtacatgcggaaggctttttaagtttgcttcctggaaattaacatttgtatgttagagcactgtgttatctaggtaagagatgtatgtctgtgggcatcagaaaacagaatccagagtctggcttgctgagtgcttgggagctaaaaggcttttctccctgtctggttctgtaagtgaatgggccaaacccggaaggctgggggatttttgaagattcaggaaggctatgcctcccttcctcttcctaagtcctaagtctaactgacctgggtaccagggggcaatggagtgtacaaggaagctgtcttgtccacagtgttggtatatagactttgtctcacacacaaagggagtggatttgtgcctgaactaaattatttgagggtatgtatggcttatttttaaggattaggtatgttgggcccttttctctttcccagagtttaccatgctcaacaccctgtcaactgagaatcaattaggagactacttatgagtgtgtgctagccaaataacccttgctggtttatagtgttgtttgttttactactcctcttgaatgagtattcagtgctttcaaaagattcggacacatttgttgggggtttcagtaaaacgggaagcttttgcatgagggcattgtgacttttatattgaaaacataaaaattccatatgcacatggtaacccacggaatgacatactgtctttggggttctgggaaaataaatgcatttcttagttgagaaaagcttgtcttttatcatctataaggctcatactttctgaaaaactgttgttttttgatcacttggaagcctgtattaattagatatgaagttggattcttttcgtgatttaacttgcactgaaactcgtcgacaaggcgcagctcatcacttgccaatgaattttagtgctgttgaaagctttagcagtttaatggtatcaacagagactcgattcctccatttctcaact

SEQ ID NO: 3873 - DNA, 1157 bp, Homo sapiens
cccctcccaggcgcgctggggacccggggcgccgcggtgcacggtggcgggcggccccgggagatcaccgaccccgaagcaatccctggcggcgcccggggtccggaaccccagcgcggcgtctcagccgcggcggggtgctcgccactgacccctcagcccttggccgggactgacgttcaagcggacagctgggctctgccgggactgacgttcaaggggcagccgagcacttcctgagccctgcctggcacccgccgagagactttttggcacaagtaggggccagccgttgaggtgtcattcggggtctcacgtgttgaactttccatttgcccactgccgtctttaaacttttccaagctctctctctctgcgacattgccccatttcgcccgctgtgtcaaccccaggttttgcctcctatccatcatctttcagatgtttcccttttttccttcctcattaggcctgtggaaatcgaatcaagggtttctggagtggagtgattccagctgctttgagctgaaggaaaagtagcctggccagtaaagcgtccgtgtgctggaggagtgcagccacccatcccggcgggccttgcaggacgaccgacaccaggaaggctttgtgccaggcccagcagccacccccagccgccttatgcaagtgggtacatgccctcgccagacgccagctttctgatctgcgtctttagattttttccatcgcctaagcgttacttctccactgatcggtgagtttagtgatggccagagctcactggaggacaatggacttggataaccaaaggtcagggcttggtcataacaatgactttattaccgggaaggacgagtcaaaaaataggaaggcctgggaaccctcaggctcgccactctaggtgggtagccctgtgattcagccagtgggattactgctgtgagaatgggaaagttgtttgcttctgggaatgtttgatccactaagtatcctgttggccagttccagtggatgcctgtagaaagtgggccacctcctcccgttccccattggaatctggtccgagttgctgtgttgggggtggtgcctgtgaactcgagtatagcagtgtggtattcattaaggaaaagaaagcgcaccaccggccaggccttctg

SEQ ID NO: 3874 - DNA, 1195 bp, Homo sapiens
gacagtgatcacatcctttgcaaatttttatcagtgccataaacctccctagttagttcctttaaccctgtattagttcattttgctttgctataaaggaatatctgaaactgggtaatttattcaggaaagaggtttatttggctcatggttctgcaggctgtgtgagcatggcaaaagcatctgcttggcttctggtgagacctcaggaagcttttactcgtgaaagctaagggggatggcaaggcatgtcatatgacgagagggagcaagagagagaggagggaataccaggcttcttttaataaccagctcttgcgtgaacttaatatcacagggagggcaccaagccatgcatgtgggatctgccctaacggtccaaacacctcccactaggcctcacctccaacactggggatcacatttcagtatgagatttggaggggacagatatccaaactatatccaaccctttgatatgttgtacagcttcaggttctcatgttgtttttctgtaaccatattccagctatccatattggttaactggaatatagttagagaaaacaacttttcctaattgttcaggccaacatgcagcattatgggactggtcttaactttagataatagacttctgataactgatgcagtcttaaaggagagcaggtatttatgttgttgtttttttgtttacattgatgctatactttggattctttgatgttactagccactgaaagctggatgttttgtccacatatgcaattgctaagccacatctgcctattataaacttggcagtttggggagtgtctttttttttttgtttttcttaatatccaagtataggtccttacaaatgtattcttaaaattcaacctgtttttctctctttatatgtattctgccaacttacctggtgtttctagcttcatttcacctgttttgataattatatcctttatttctttttcaaataattgatgaaaatttttaataagactgaactctctgagaacagacatctgaatcatacttctggccaggcccttttaggtttatctcattctgttcatcagaccttcttggtactttgtatttctttatcttgttcacaaggatgtcatgaaaaacctttccagatcctctactgaagcctaggtatgctatcttttgcattttcctgagttgc

SEQ ID NO: 3875 - DNA, 1197 bp, Homo sapiens
cccagctactcaggaggctgaggcaggagaatcacctgaacttaggaggtagagactgaagtgagctgagatcgcagtgtgggtgacagagtgagactctgtctcaaaagaaaaaaaaaaaaaaaactcagtcctgcccagcagataagatataaagtatatctgtgttattaacatttcatgggggaggagggtattgggggaaaaattgtctagagaggctccttaagagtgcaattatggggccggctgcagcggctcatgcccataatcccaacactttgggaagccgaggtgggcagatcacaaggatgcaaaaattagccaggcatggtggtgcgtgcctgtaatcccagctactcgggaggctgaagcaggagaattgcttgaaccgggaggtggaggttgcagtgagccaagatcgtgccactgcactccagcctgggcaacagatcaagactctgtctcggaaaaaaaaaaaaaaaatgcaataatgaaaaaaaaaagttatgcaacaatgtcttaacccaagcatgttctgcctcagggcctttgcacttgttggcctctgtctggaatatgcttttctcagatctgccaaggctgaatcctcatcattgctatttctggctaaatgttgcctcctcaaatagccgtttcctagctgctttatttatagcattttagagagtgtctcactctgtcacccaagctgaagtgcagtggcgtgaccatagctcatagctcagggcataactcatagctcactgcagcctcaaactcctgggctcaagcgatccttctgcatcagcctcccaaagtgctgggattacaggtatgaaccactggcccagcctgctctgtctaaagtaacaactctccccatcacattagtctgtattctcattttcatggtacttaacacgacctgaaatcaccctgtgtgttgcttgatttgcttgttttctggctttcttcttcgctggcaagtctttgagagaggagcacttgactctctggcttgtgtcactgttgagtccccagagcctattataaagtctggaacacaataagagcttgatgaatatttgtgaatatgtgaatggatgctagtcacacagtggataaagcagtggagctaagatttggattcaggtgctcagacttcaaatcacctatttagcaactactgaaacc

SEQ ID NO: 3876 - DNA, 1166 bp, Homo sapiens
aaaagcaatattgtgcagcgatggaaatgcgccctcttgtttttgtgtttttacaaattctgaagggccatctatggcccccctattaactttgttgcctttccttttgccccattcagcattttactgggctttcttttctgtcttggtgaagagaaaaggggaacaaatttaaaacaaaaaacgaaaaaatccaggctcttagagatttgggatgtgaggtgcttgtcaaagtgtattggctcggtgtgatttgatggaatttaatttgaatccttcgtctggtaagacaggctgtagtaatagcctttggttttttttttttttttttttttttttgcattgttaaatgtttggtgatatttatggcagccaggctaatcttaaaagaatgaatttatgagaagcacagaacctcatgacttcagcctcttacccttagtatccaagcactgtagtgcattatagtttgaatgccagattcccattaatgctaactgatggacctcattatgctttgagatgagaccttaatcagggtccctgttgaaaatctacgattaggctgtctttgattcataactctgtgaacttgggcacatttcctgttctctctgggtctcagtgtcctcatctataaaatggaggtaataatactcgccctggggagtttttgcgagagttaaatgagataattcacgaaagcagtgctgtctgatagaatatgaaccaagtacataaattcaaagtttctagtactctcactaaaaatagtaaaaaaaaaaaaaaaatagtgaaactaattttaatgtattttatttaacccaaaatatctaaaatatcacttcaacatgtaatcagtataaaaattattaacaagatattttcacattttttcctaagtctttgtgctgcctttaaaattgcatgtatattttatacctccagcacatccccaatttggacactaaattttcatcagaaaatttatttgacctgtgtttagattttataaaatgtataattgaaaaagttagattcatatacctaacttgtttcaaacgtattcaaaagatttccaataaataaattgaatatgtctttagatttaaattaaattatatgaaaagttcagtctgaatgagtctgaacaagccacatttcca

SEQ ID NO: 3877 - DNA, 1205 bp, Homo sapiens
tctgctgtatcactagtaagaaaggactgagtaatgtagagacatgaatttttattttcaagactttaggctttgattcagccctctgattaccagagctcctgcgtatgctaaaactgattgaaatttcaatttgttagccttttccctgttggaaagtctaataaatagtaaaaggaccacaagacaggcatactcagcatgtggcctgaatcatccgtaaactggatatctagaccatcaacaatcaagaacccaggcagagttttccttttaaataattgtctgcatttctctcccccaccccccaccattggtacataatttgcatgtgtaggctcatgtttcaggtttcatatgtttaaagttgcttttctaccctttgccatttctgacattcacgtgaatgcatttcagtatatggatgtatcatcagttatatgaagtcagttttcctgtggtcagacgatcctgttccaacccatacaaattagactcttccgaaatacctagcaggccctgtctctgattgctgcccattaaggtggtcttgaaatgccaccctggctgaatttcttacttatttatgtgtaaatggttatctccagacgccctgcagaacttctccctggaaggcttttctttgggtgataacagtgtgtgccacattatacataatgacagcattaaagggtggggatggaaaggacaggccaccccctggactactatctcctgggagctagacccgctgcctagtttatgcttaaacatcctggtaacttatattttcctttttgtttctccatttcacttaatgattttctatgtattgttgcagacatctcaacagtgagcatgcgctggacgatagaagtacagcccaatgtagagtacaaatgcaggttgtacagcagttagagctacaggtaaaaccacatttatttttaatattaacctcagtatgcctcaaattccagatttctgtagtgttctgtaatgagttcctgtgtactcattattgaatggaaggtccaaaacctgtcattgtcctttattttattttattttattttattttattttattttattttattttattttttacctctttgggcaggttcagccccagttcactctttggaactgctgctcagaggtttccaaattctgggcacctgtgtgtatgcagccaactctcag

SEQ ID NO: 3878 - DNA, 1099 bp, Homo sapiens
agctaatttttgtatttttagtggagacagggtttcaccatgttggccaggctggtcttgaactcctgacctcgtgatcccgccgcctcggcctcccaaaatgctaggattacaggcgtgagccaccgcactcggccgggatttgacaaatatttgttcagcaaacaaatggatgatgaattaataaatgatacttaataatcaggacttgtatggaggacagttccaaaagtatatttccaagtaacttgtgtaccctcttattggaaaatgtcgactattccataggctatgaagttggattttgttttgaatctgcagtgattcaaataaggtaattcacaatgaaagatctttctgcctccgtcccctcgagagtaacatcagtgtgtctttcctagctgggagatcaggccaccaagagagacagtcattttgaaatgtgcgaatgttttcacaattgttcgagattatttctcagtaacacagctttagtctacagagcttgctaacctgcctcagtattctgtgttcttttattgtgggtagatagatgttgataaatcaaaagaaaaaaaaatcttgttaatttcagcattacatcagatcttagcaaatgtagatttctattataatattttggtctaactatcggaaataaaagtctgtttttctctgtgttataccagtttgctcaattttatgttttttttttaaatttaaatatatgaaaataatacaagaattggctttagttccagattgcagaactggaaactaaagttaaaaaaaatctaatttttttattaatgtatttgatattatgttgaaaacttagtgataatttactaaaagtggcattatttatatcgatttattaaatagagaatatagcccaaaccttaatgtgctggaagataattacttagaatatccgacagctttgcgagaggcctgtattactttaaaaggtataaatgataggttgtgtaataccctacattcttatcttgaactatattatcgggggctctttctgttttaccttaatgtgcccaggggactcctgcttagcttaataggacacccaaaaggagga

SEQ ID NO: 3879 - DNA, 1495 bp, Homo sapiens
gcgccaccggccaggcggccgccaactggacggcgggcttcggccgcgggcccacgccgcccgcgcttgtgggcatccggcccgcagggccgggccgcggcgcgcgccgcctcctcgtgctggaagaattcaagacggagaagaggctgtgcaagatgttctacgccgtcacgctgctcttcctgctcctctgggggccctacgtcgtggccagctacctgcgggtcctggtgcggcccggcgccgtcccccaggcctacctgacggcctccgtgtggctgaccttcgcgcaggccggcatcaaccccgtcgtgtgcttcctcttcaacagggagctgagggactgcttcagggcccagttcccctgctgccagagcccccggaccacccaggcgacccatccctgcgacctgaaaggcattggtttatgagggaggccccgccacatagacccccaacccagcctttccctttggctcggacggtgacgttgtatcttttccttctggcccctgtttaattttctaagctgccttcaaaatgactcgaagtggacagacacttggattgtactgactcctttgggggtggggtgggtgaggagtaggatgctcagcccactccagctccgcacattcgtcctcctaactcgactttcttcctgacaataggccctgcagtctttttgtagcggtactgacgtcttttattccatgtgtggttcctttttttctttttctataaaggctgtactaattttcttcatgcaacgtttcctaaagaccatggccagttttctacagaagctatttttgacaacctcaagtggcattacattttgcagtgaagtagaggaacctagggggacttcttcacaagttagatttcttgaggatcttctgttggaagcaggagaaagtggggggtggggggaagttgtccgaaatgccctctgaattgccggctgcagggtccttgtgctgcgctggttctttgaaagtctcagtgttgatattgaacttaaagagcagagatggagatcagtagcaaggcagtcatttttttaaagcagtaagtaacaagtaagatttggttcccggtttactttctgctgctaaaaaccacgtcagtgacaactgctctctgtattatagcaatcttgaatggaaacatttctgtcaagttgtaagttttaaaagagtaaagtgttttggttagtaatgatgtggagaaaaatacagtattgcatgtgttcgtgtgtatagattgtggttcgaggattgggagggctctgagaagcagagtactacatcaaaattgttttaagtattttttgccaataaaaaattaattttatggaaatggcttgtgctttgagaagcccagttttattctgtcttatgaaactaatttccactttgaaaattgttcttctgttgtttatggtataaatgaatggaatataatgatatcctccttctaggaaacaaagcat

SEQ ID NO: 3880 - DNA, 1182 bp, Homo sapiens
tacaatcccaattttcaaaatacctgttttttaaagctacgattttaggtaagtctgtaattggagatcttgctagtagtgtgagaatctcacttgatgccacaatacttgggcttgtgataatgtagtttctctgaggttaaataagcaggcatattatgccatgctctggggactcagtttttactagctatagaccttttctgttttgatagagaaagagaaaaagacaaagagcattcctgaaggactagattcaacttcttgtgaagtttgttctagttccttgttctaagattttttaaaatcataggcattgtggagcagattgcaaaagtagcttttttcataccagtataggtgggacatgttttgatagttggactatttgaggtaggaggaaaggtggagggttaaggggcatgtatgtaatctggtgaaggaattggaaaagaaacgctttggaaggataccttcctgattgccaggttcagaggcttgtcctcaggccttatttgctatagcttttaagattatttttaatattattgaccattctttccttgaaaagcttctctcccttttaaaatggtatctcattctcttcgttttcccctcttttactggcttctgttcatctcctttctttctcactgtttagtggaaagagcagaaacttgggttaaactctgcttgtgctagtctcgtttttactgttgggtgtttggtttatttaataacttcaagaagtcatgaggatagtgagaagtaatgtatgtagaatgctcagcacagtgcttcctcataggaaacattcattacctgttaattttcttacttctttccctcttttaacggggagcagttctatctctgggtagatctttatattcattgaggtctctctctctctcatgtatcatatacattgagatctctctctcatatatataatatccctaaagagctcagttctgaggcccagagagagacagttaagtacatcattataatacaatgttatgcaacatgctgatgtagcatctgctgtctgcactgcattgtacagaggacatacactcttgtagccagcattagctgacctactggcaggaaattattattttgatgcaagtttggggagtatacataacattgaaaagatcggtactgtctcagaga

SEQ ID NO: 3881 - DNA, 1243 bp, Homo sapiens
aaagaagagtgaacctaaaagcacttcaaagccatttaacagcaaattttgttagcaaattttctttccaaagcacttatcttagttttcttaaaaatgaccatgtttgcgtggaccgctctccgccaacaggtgtcttccacagacccctctcgctttagccctcagtctctttcaattctgtcttttctctcggtccataaaaacaaggaagtcgaccccagtggagcctagtctccccacgaggaggcggccccgggggtggagtcaaccctggaggccacgctctgtgggaaagcacggggcatgcaaactcgaaatgaaagcccgggaacgccggaacaagcacaggtgtaagatttcccttttaaaacgtggagaataagaaatcagcccgagtgtgtaatggcgtcaatagtggtgtggacgagacaaaggcaatgaggcaaggagcgaggctggggctctcaccgcgactttaatatggatgagagtgggacggtgacggcgggggcgaaagcaacggtaacgcttcttgacctttgggctaagatcaagtctagtaactgttcttatcagtttaatatctgatatgttctctatccgaggacaatatattaaatgggtttttggagcagggagatggaataggagcttgctctctccactccacacatcgacctggtattgcagtagctccacgaactgtgcacccctttagaagggaagaacactgcagagtagcttgcacacctagtatctgtgatatgctggttttcctattccttgaactaccttgaagttcctggtctgcggacataaggtggacttttcggcactcccattttcgctgtgtctacagcactttgggaagactagaacccaaaacgagactacccgtttctgtatctgcatgcagagagagcgtgttcaatgtttcttggaggtccttagatctcagcttggcagtcgagtggtggtgaccttttaaaggaacggggtccaccagtgtggcccagcctggacttgaacttcttcctcttttttttttttttcaagttctagatacatgtgcagaacgtgcaggtttgttacataggtatgcatgtgtcttggtggtttgctgcatctaccaaccagtcatctaggttttaagcccatatgcattaggtatttgttctgatgctctctctccccttgccccccaaccccgccgtcaggccccggtgtgtgatgttcccct

SEQ ID NO: 3882 - DNA, 1179 bp, Homo sapiens
aggctggagtgcagtggcacaatctcagctcactgcaacctccacctcccaggttcacctcccgcctgtaatcccagcattttgggaggccaaggtgggtggatcacctgaggtcaggagttcaagaccagcctggccaacatagtgaaacaccatctctactaaaaaaaatacaaaattagcgaagcgtcatggcaggtacctgtaatcccagctactcaggaggctgaggcaggagaatcgcttgaacccggaaaggcagaggttgcagtgagccaagatcgcgccattgcactccagcctgggctacaagagcgaaactacatctcaaaataataataataataataataataataataataaaccacagcacacccaccacaaaccagctgtcagtgtgaaaataaagccaaatagcttaacatttctaaagactagctggggccagacatgatgggtcatgcctggaatcccagcacttagagaggccaaggcaagaggatcacttgaggtcaggagttcaagaccagcctggccaacatggtgaaaccctgtcactactaaaaatacaaaaataagccaggtgttgtggcgggctcctgtaatcctgtaatctacttgggaggctgaagtggaagaatcgcttgaactcaggaggcggagtttgcatgaactgagatcatgcactccagcctaggcaacggaacaagactatctaaaacaaagactagctggagaatcctgccaggaaaaggccctcagcctccaactgctctgctcactcgaagctggaagatgcggctctagagacccatcaggaccaagccacgactccccacttggagaaatcaacggggaaagagacggaggcaaaggagaaccatctcactgggagaggcgatgctgtttgacacatcgtccctgtacctcccaaagccactgccctcccacacctgggcaacagtggccccaaccccaggcacagccctcctgcaggaaggaagaggactgaatggagggcgtggccgactgaaaggacgtggcctcctcaaaccccttggtaaagggcctctggggccacctggcagggaggggctggcataccaggaagtaccctccacccgggagttcagccagagcccaggtcctgtccgcaagtggcctccagagccacct

SEQ ID NO: 3883 - DNA, 1679 bp, Homo sapiens
ttttgccatgtgggccaggttggtctgaaactcctgacttcatgtgatccacccacctcaagctcccgaagtgctggggttacaggtgtgagcctccatgcccagcctaatttttgtatttttagtagagacagggttttgccatgttgaccaggttggtcttgaacttctgacttcaggtgatctgcccacctcggtctcccaaagtgctgggattacaggcatgagccactgcacctggctacttctaagcttcttacatgcagaaatcagaacctggaatctgtttctaagacttatcttcttaatgcctatgtggacaattaaaggatttttctcctcaggactctgaatatgatgaattgtattagtagactttctaatattgagcttttcttaatttgtgaaataaactcagaaagttccttcttggttttaacagtctatttctgtttgtaaatattagtatttctgtggattctgtacttgttccttgttatcctttcattctcttaggttcatttggtctgatggattcaggtaccattgaaattctgatagtttcaaaatcttttatctccaggtttgatctctcttgtgaactctggaactgtattcccaattgtcaattggacatccctacgtatgggacctcagatatttcaaacatgatgtgtccaagtctgtatcacttctggccatcatattgttcttttatttttccaaatttcacatcaccagtaacaaactagctgtgatcatggcagatagcctggaaataaaactcccctttttaccctttgcacagcaaattgacatcaaatcctgtttctactttttttttttttaactattgcttccctattctgtattctcactgctccatctcctgatgtaggaggtcatctgttttcctcttttcctctcctctgactcttaagccctttcccattctctttctcaggaatggctgttaaaatgccaatatggtcttgtaactttcctgtacttagtgaacctccttatttacaccctgtttgtgaagtggctgtgttcaccctgggtggacacggaatgtttttgtcatgtacaaagagaattttatgctgcctgtgtacagttattaatttgtaagtacactcagctttttgtatctgtaggtttaatatctgtgtatgtaagcaaacttggatgcaaaatatttgaaataaaatcagatgcttgcatctgtagtgaacatattcagactttttcttgtcattatttcctaaacaacacaactatttacatccacattgtatttggtcttctaagtgtgaaaggaaaataaagcttgggactccaaactcattaaactaaagggaaaagtcaagctgggaactcggtcatgcaaacctgcctccttcttttggttcctaaataagatggctccaagataaaaagctttttgtcttgtagccccctccatcatatttttcccacaaggaaatttctggtgtgctttaagatctttaaagtgtttctgttaaaattcatcatagcaatgtaaattgatagcttatccttttttttttttttttttttttgatatggagtttcgctattgtcacccaggctggagtgcaatggcacaatctcggctcaccgcaacctccgcctcccgggttcaaatgattctc

SEQ ID NO: 3884 - DNA, 1117 bp, Homo sapiens
tctctttagggtaacgtataacagagatgcataggaaaattcaggggtatgctttgaaatactattaggagatagcaaatgggggatagatggataaaatttaatctatatattactgggcaatagttaaaaggaataaactatctctagatatacatagatctcaaaattggcctcaaaaatgatattgacttaaaaaacactaagtaaaacatggtgaatgtcacatttctctgtgtaaatagaaaaatagaaaaaatataacaatcattgttgatatgtatttaggaaagaaaggattaatagtttaatattgagagtagattagacacacacatattaagtatataagaattagcctttggatttgttaatctttttgttttaatctgctgtatctctatttactatttcattcattattattgtcagtttttataatcgcatttcttctgcttggtttcttattttttccctaatatcttaagttagctgttgaatttatctgttttcagactttattgcttttttgtatgttttaaatatgctttcctatttccaaatctacaaatttttcaaaaaaaattgtttttttctgacttcaaacttaattgtgttgtgcttagagaaatatatctgtctgataattccttggaattggctaatatttgcattatggcctccccacatggttagtttctctctgaagttccatgcgtatctgagaatactgtgtattccttggaattggctaatatttgcattgtggcctcccaacatggttagtttttctctgaagttccaagcgtatctgagaatactgtgtattccttggaattggctaatatttgcattatggcctccccacatggttcggttttctctgaagttctgtgcatatctgagaatacggtgtattccttcaaattggctaatatttgcattatggtctccccaaatggttaggttttctttgaagttccgtgtgtatctgagaatactgtgtattccttggaactggctaatatttgcattatggcctccccacatggtttggttttctctgaagttctgtgcgtatctgcgaatactgtgtattccttcaaattggctaata

SEQ ID NO: 3885 - DNA, 1180 bp, Homo sapiens
ccataaatatatcaggctccatacaattaagtagaaaaggaatctcttttttatattattcttatcctgtagcatttatctgtacttggtgtcatatcagaaacatttccgagagggcctggtttcttccaattacgaagtaggaaatgtattttttttgtaaactttcaccaatgctctagttaccaatatgagaaatctcattgaaaactacaataccctctagtgtatgtgattgcatattgtttaaacattaatgttgctttaggatttttatgcaaagcagtaaaaatttgaggttaagccctaaaatatcatttcttcatttatctggcaaacttactgagcatgtaatatgtgatagatagtaatttagctgctggatatatagcagtgaacaacgggcgaaaatttgtgttctcttaaaatctattatttagaggggtaagacaattatcaaagaaaatatttaaaactcttaatatgtcatgtattggtaagtgctaaggagaagaaatacacatggagggtggacggttacaaggtcaggaaagacttcattaagcaggtgaaatgtgagcaaagacgcaaaggaacagagaagacaagccatgcaggatagcctagttgttaagagtacagactttgcaggtagagaggcctgcaggtgtctggtgtgtttgagggagggtaaggagctctgtctgactgggctgtagtcagctgaaggacagtgagagcagaaggagacagtggggtaatggagccaaattacatagttccttgtaggcctctgtaacatctcaggcttttactttgaatgagatggaaagccactgaagactttttatccagccataccttatgatctggcttaatacgagaaaatatcactgtgggtgctatggagaaggtgccctaagaggccacagtgtgttcataggaaatgctaagccttctacctgtgtgccagaccctatcgcctctcaattaatgcaggaacattattccaccaacttttccctttcttctgtatcatcaattctcctcttgctaattaatcatattcttcatatgcaaacatgctacaattattcttattttaaaatacctttccatattctacaaatctctcaagatactgcctcctttctctgatcctgagagcaaaactccatgc

SEQ ID NO: 3886 - DNA, 1203 bp, Homo sapiens
ctttcttagttaaattagattggaggacaggtttgacttctggcttattcgaatgccacagtaggaactcttaaacactgagatgccagattcatttggttccgttcgaaccaagatctgattaactaaaaatttgtcatatctaatacgaagaagaatgatagaactttaacgctattatttccaatatgctacaaagatttgcaaaataataacattacgtttcttctgaatgattgtttttattattagggtagcataaaacccattacttttctctttctatactacctgtaagtataacctttcttaagcacacttccttcaagtcactctttattcataaacctatagtgcttttcatcgcatcacagtgaaacctacaatacttaccatagcaatgcttgcaaattattcttctccgtgtagcattctggcttccatcagctgatctaagattttccaatcctgacactcatttgtccccaaactagctccagcatttcagcagagcagtctactttcaatcactagtatttgcttggtcttgtggttaacccaccccgatatcaattatcctttggtcctctttgtcaacaatgattaacctgaacaatctctgaccttgtgcttgtcttgtgttctttccaatttaaggtacttgctcttgcttgcattgccttctctatttttccccagcctatatgtctgacttccttagttcagtttgaagattttactggtatggggtgctgtctacaatttagcatataaatggtatatttttttcacctagaaaagcccaaaacagtgaacactaaatgaatgcctcggaatagtacattttaaaaagaacagaattcttgatctaaagcaaatactcaatattttttccatctcattatacctaaggaataatatatctgcattattatacctattccattatacctatacacatacccaccagtgacagtgacttactattgcagtagtaaatatagtgtttgaaaacaatatatatgtgatttgaaaaaaaactaatcgattctgatatgtgttgtttcaagtatgttacctgaatacaaatctaaccgattctgatacgcccttttgtagagagtgctgctacacaacgttgaaaatgtatgacccaaagcctataaatgagtagccaacattccagagtaacaaaagcactac

SEQ ID NO: 3887 - DNA, 1174 bp, Homo sapiens
gtcataattttgtcaagattacagtgaattttttcaaaagtcaaatagttgacataccttttatgaattcagcctttcttgtttcctgtttttgatatctattaacaagttttaaaatatttatctttttctctaaaaacattgattatatcagtacctcttgattttctattagatattacccattgatttttttttaatatataaaagcttaggatttaacattttcaccattcccctcttaggcacaaaattctccccaaatagtgctgatttcatttttattaattattattcagtgtttgaaacagcttactccatttaagaatatttatagttggatgtgaaggcactctggctgccacgtctgtcaccccagtgatcaccagtgtagatttacactgacctggctggctaggctggtgtctcttttttccctcaccagtccccatgcttccctccagaagctctttcagaggacgccctccctcctgagccatgaggatctttcttctgcgctctgctgctagagcctccaaactctctaggtctgtctgtagaacacagagtagtccagcttccaagactccagacacagcaatgaggtgctgtatatggcagtctgcctttcttggagggaaatatatatttatagctgatccacgcaaaatgttatacttcttttgtcgaactttttgttttctcttaattggattgtcttattcatttgcattgttttcaatttaacctcaaatgctcaccaatttgaatacattcttttgcaatatcttcaaatctattacttgttctatcactttaatcctcttttaccaatgttctatcatttgtgatcctttttacaaatctctcaccactgctcccacaacctaaggtgtgactatggtcttgggatgtcccttcgccatcatgttgggattttctagactttccctgtgtagaatctcctttttcctggatcccatgtccctttttctaagtttactctttggtatcagagaaagaaatcttccactagctttctgaaaaagggcttatttaaatcatattcttggatagcctttatgcctgaaaatatcttttactgccctcattattagttgatttcttaactaggtattgaatttagtgttctcgcagaattttagagcaatgt

SEQ ID NO: 3888 - DNA, 1162 bp, Homo sapiens
cagtctgtgtcttttaattggagcatttagtccatttacatttaaagttaatattgttatgtgtgaatttgatcttgtcattatgatgttagatggttattttgctcattggttgatgcagtttcttcctagccttgatggtctttacaatttggcatgtttttgcagtggctggtactggttgttcctttccacgtttagtacttccttcaggagctcttttagggcaggcctggtggtgacaaaatctctcagcatttgcttgtctaaagtattttattactccttcacttatgaagcttagtttggctggatatgaaattgtgggttgaaaattcttttctttaagaatgttgaatattggcccccactctcttctggcttgtagggtttctgccgagagatccgctgttagtctgatggtcttccctttgtgggtaacctgacctttctctctggctgcccttaacattttttccttcatttcaactttggtgaatctgacaattatgtgtcttggagttgctcttctcgaggagtatatttgtggcgttctctgtatttcctgaatctgaatgttggcctgccatgccagattggggaagttctcctggataatatcctgcagagtgtttttcaacttggttccattctccccgtcactttcaggtacaccaatcagacgtagatttggtcttttcacatagtcccatatttcttggaggctttgttcatttctttttattcttttttctctaaacttcccttctcacttcatttcattcatttcatcttccatcactgataccctttcttccagttgatcgcatcggctcctgaggcttctgcattcttcacgtagttctcgagctttggctttcagctccatcagctcctttaggcacttctctgtattggttattctagttatacattcgtctaaatttttttaaagtttttaacttctttgccttgggtttgaatttccttgtgtagctcggagtagtttgatcgtctgaagccttcttctctcaactcgtcaaagtcattctccatccagctttgttccgttgctggtgaggaactgcgttcctttggaggaggagaggtgctctgctttttagagtttccagtttttctgctctgttttttccccatcttt

SEQ ID NO: 3889 - DNA, 1179 bp, Homo sapiens
attaaaataatgcatttctccttcctccttttccttctcctcctccttcccctttctctctcttttagggctctgtgaaccagaagaaaataggaatagagggaggtaagaaattttgggaaaatgaagcaagaatcaatagcttttataaaaaatagaaagatcaaaaaatctttaataaactttgctaaccaagaagaactgtgatttggctgaggtttattgtttatttaatctaaaataaaatatttgctttgatatttaaatataaaatcattttgtcataaatacatagaattttaaaattattttgtgagattagtacaaataaatatataaaatatacatgtttatagaatatataaaaatgaatttcttgaaatttgttcttacacttagaagtattggtcactagatcagtaaatataagtttctctctatcaatgatttttgatggtgatggttttgaatcgatttatgaacaatttacatttttatctgatagctaactacattaaaatgtaggtcttaaagacaaaattattaatgtgtatgttcagaaatataattaaaccatagttaacaaaaacatgaaattatttaataagagatgtagtttttttctgagacggagtctcgctctgtcgcccaggctggagtacagtggttcgatctcggctcactgcaagctccgcctcctgggttcacgccattctcctgcctcagcctcccgagtagctgggactacaggtgccgccaccacgcccggataattttttgtatttttagtggagacagggtttcaccgtgttagccaggatggtctcaatctcctgaccttgtgatccgcccgcctcggcctcccagagtgctgggattacaggcatgagccaccgcgcccggccgagatgtagttttttaaagtattctttttgcactacctacctgggactatgacaaggaaatattataaaataagaaatactgtattttcttttatattatataatatctgaattatatgaattattttacttgattatatatttttatgttactatgatacttttgggattgattatccaattctttgtctgtcatttgtacaaaataattatggtactagcaatgtttttgcttaattagaaggcaataaagcatgattatttttgaaaaata

SEQ ID NO: 3890 - DNA, 1150 bp, Homo sapiens
taaaggttccggatgtttaaggacttcttgacactgcagttttagttctttcttaagtatgccttctttttctttattatagctgattattcatgatggaatttcagattttacaaaattaattatttctagatgcaaaactagtgagtttaccatgttcaacaaattacatttatatttaagatggcctcacagtcaaaatagcctaaatttgtataatttagcttaatttttcataattatttcaaaaacgtttgttatttttctaaaagatgatgtccctgttaataaaatactttatatttttaaaataagtaaatagtcatttaaaaacaaactctgactagtggatcacaaggtcaggaggtcgagaccatcctggacaacatggtgaaaccccatctctactacaagtgccaaaattaactgggtgtggtggcgggcacctataatcttggctacttaggaggctgaggcaggagaatcgcttgaacccgggaggcagaggttgcaatgagccgagattgtgcctctgcactccagcctggtgacagaacaagactccatctcaaaaaaaaaaaaaaaacgaaaaacaaaaaaacaactctgactatactgacattaaccattattaagtgggaataagaatttaataatttagcttgagagctcataatgaaatattttaatttcagacttatctgatttgctaatgcttaagtcatttctttactcaacctacacttacatagtaaagttgtgggtgaaagttttcctggtctcactcgttcaaagaagatggttatgacagtttttagccaccatatgggcttcttttgttttcttcaaaaatagaatacctgaattcacacagtaatgtctatccagacccttacccacgtgaactaagctagatagtaatttccagaaactacattatttaaccagactaaagaatgtaaatcgaatgattataataccatacttaaagtcaaaatcacaactataattttgcagaaagcttccagttttgattagatataaggtaagaaatattgataaaagattacataaataaaaaaacagtattgcttactaattccatttttttcttttttttttttttttctttttgagacagatacttgct

SEQ ID NO: 3891 - DNA, 1195 bp, Homo sapiens
acataaaaagaaaaaaatgaccaaaatatattgtggcaagtgttttcaaattctttgtcacaataagacatatgatgaggtgatatattaataataataatttttaaagttccatggattggaaaatgtagttcataacaaggaattataaccaagaagcagaaaatgtaatcagaaatgaaaaaatactacttagtaataagcataataagttagcattttgttgattaatttataaacctgggaaataattctgcccaattttgttcagtgaggtctcatagcaagtatggccaccattgtgaaaaaagtataaaacaagagttaaacatacatacattccatttaaatgaaaaatcactatcttaaaaaatctaatatttttaaaacataaattaaaaaatgttagattttaaagattttttattgaaaaataaaaatgttctaaaaatgttttgatactttattgcagcattaagcattaaaaattaggagccacttgaatttccatacattaggagataatctaatagtaaaactttttctcagtgatatactaggcagcaaattaaatatgaggactttgaagactgatgtggcacaaaatattcattgacatgaacttactagaaatttgtttgccaaagcatacagtacaactataactattagtagcaataaataatggaaaatgtaaaacttgtcagagcagctgtcattaatgaaatcataactattaattttatatatttttctcatgtgctcattctacctttattattggttaaaaaacaatcacagatagataagataggtaagatagatatatcagtaaggtaaatggatagatgaagtagacagattcacctcttttaattttgcttttccacatatagataaatatatatgatagataataatttgattacttagaagtaaattctagactatttttcatatggtctattcttccagaatatgcttctattgaagaaatcctaaaggttcaattgtgaaatttgcctttatttccctcctgaattattttccatttagttaacaaagaggcagatttgtagctaaactaccattaagaagttacttaattcaatcttaaagtattcctaaagggaaccaccattaatagagagaaagtattgctggcacaataaaattttttgagaaattgaagtgt

SEQ ID NO: 3892 - DNA, 1203 bp, Homo sapiens
ctttgacggttctgatgacgaagaagaaagccaggatattgtgaatcaagttcttgatgaaattggaattgaaatttctggaaaggtatgaacatcatcttttcttagttggaaatagtttctgcctaccacgtttgtcacttaattgttttgtttttactaggaggtgcatggtttttatttctgtttcaaaagtaaattaaacagacctctttacagcacatcctgtatgtcctagtccaaatgtttcctaatgcacgtttgtctttttcattgtttaatatagatggccaaagctccatcagctgctcgaagcttaccatctgcctctacttcaaaggctacaatctcagatgaagagattgaacggcaactcaaggctttaggagtagattagtcaaaagaagtcatactattttgcttacttataattatgtagtataaaccaagcacagtgcagatttcttttacaaaacacatgtattttgcaaaaaaaaaaaaaatgaagaccatgagtgaacagttgtttcctaacccatggctatttagaatcttttgccaaagaatgacaatgatgcaaaaatgggaacagtttggattttaattagaactgtttaggagtgatgatgtgtaaaaagttgacttctcttttgcatggcacagagaaattatattccttacttcatgtcagtttatgttctaaatctttttcactgaatataaaaatcttgttaaatgccattaggcaccaacttaaagagggttgtaaaaatattaaaagtatatcgttaattctgtatctgttgcttgtcttttgtaagtgattatgtgttatgaccataggtggttacagctgccaaattatttttaaatggtcaaaaagaagagtgctatttaaacatctgtcttaaacaaaaactgtcataacttttcttttttctttttccattaggagaacattctagttggtaaatttcaaaatgtgcttgacacctgccttaaatagcacagacctattgtgcacatctttaaattatttcagctggcagaaaagaattacatttaaaactgaaatcaaggcctcaatacaaagattatcctggctcttttctatctctgtgggcctaattgaaatatgtactcttattttagacacgcctctgttaaaacagaccaggttttcctggtctcagacctatgatg

SEQ ID NO: 3893 - DNA, 1201 bp, Homo sapiens
agaagcgtatcgtactgttgaagagctttacaaacgtccagatgaagaatataatgaaggcacaagtagtgttcaaaatcgtgttcgttttgaattgcttccaattttgaaaaagggattgttttttgaccctgaattttggaacttcgtaatgattaagaaaaactgtgtagcattattgagtgataaatcagcagttagatttctaaatgaaagcacactggaaaataatgcaggtaatctaaaaaggacggaggaacagcaaggtttggatgaagggtttgactctcttacagatcagagcactggagagactgatcctgatgatgtatctggagtgcagcctaaaggtcatattaatacgaagaaaaatcttacagctctcagtacttccaaagtagatcacaatgtcccaaggcatcgttgtatgttatgtaacaaggaatttttaggtggtcacattgtaaggcatgcccaggctcatcagaaaaaaggcagttttgcatgtgtaatatgtggtaggaaatttagaaacagaggacttatgcagaagcatttgaagaatcatgttaagaagatacagaggcagcaaattgctgcagctcaacaggatgatcaggaagtcactgctttggaagaaataaattgttctagttcttccatttcatttgaaaatgggaattctgatagtaaggatttggaagtggagacacttactgcttctagtgaaggaaacaaagaagtcatccctgagcatgtggctgaattcattgaaattcccataagtgtaccagaagatgttattgaaaatgttattgaaaatggcagtcctaataattctttaaataatgttttcaagcctttaactgaatgtggggatgattatgaggaggaagaggatgaagaaggtgattatgaagaagatgattatgacctgaatcaagaaacttcagtaattcataaaatcaatggaactgtgtgccatccaaaagacatatatgccacagatcaagaaggaaactttaagtgtcctgctcttggttgtgtccggatatttaaaagaattgggtttctaaataaacatgcaatgaccgtacatccaaccgatttaaatgtgcgacaaacagtaatgaagtggagcaaaggaaaatgcaaattttgtcaaaggcaatttgaagattctcaacattttatagaccac

SEQ ID NO: 3894 - DNA, 1185 bp, Homo sapiens
tcaggtgtatttttttcctagaaatatatctgtaacaatgatttaaggtggtgcagatggtgtttgttctatattataaatctgctgtctttgcttggcattttatagttaaattaattagaatatgtggttttatgcataacgtgtttagttctgtattctttctatgatagtgctttgaaccttcaaaaattcacattttccagcgctccgaccattttcccgcttatcaaatgtacaaatttgttcaaggtttttttttccccccaacttttgtaactgattgtctcagaactgattggtattctgagactaactttttaagcagcactatttctagttctggcaaaatagtttttttatttgcaatgttgttttctgttaaagactatattatgtttactgcaaaggtcagtgactctactgacaccagctttatttcccccactttttttgcattcacaaatacaaattgaaagggtaaattatattgaaaggcctttagaacagcagattcacatgcacatgtttgactttcgacattcagcttatagaattatggagtctatccagcaggctataaagcaagtacttgagacaaaaccggaatgattaataactgcaatcactgaactatatttggagagttttgttacataattgcagtcataatgagcactacagaatctgattatcttacattcacaatctggaggggctttttatttcactttgttataaaatgttctctgagaatatgatgccacatattaatgcacaagagggagatgcctaatgagagtggactgtgtgattaccagaacccagtgccatttactaagtggctctccatgtttacataaatcctgggaatactgtatacatttcttcttatgtacttagggttttagcttcagtcagcatcacactttttctccagaaattacttcacttagagtacaaacatatttttccaactattaagaaaaattatgcagcacatctcaaaaaatagcatctctttggaaaatagcctttaaaaaaaaacaactttatctgattatagaaatacaaaattctgctaaagctgaatacttttgaattgttcattatgttctgtgcctttaaactagagactatttgcttattaatattttttgttttgcaagcatatgtaacccggtt

SEQ ID NO: 3895 - DNA, 1169 bp, Homo sapiens
aagacagtcattttaaaatggtggctgaattttccaacccacccccaaactaaacactaagtttaattttcagctcctctgttggacatgtaagtgtgtctcttgttggacataggcaaaataacttggcaaacttagttctggtgatttcttgatagtttggaagtctattgctgggaagaaattccatcatacatattcatgcttataataagctggggattttttgtttgtttttgcaaatgcttgcccctacttttcaataattttctatgttagtagctgtgaagaactaaggtggggagcagtactacaagttgagtaatggtatgagtatataccagaattctgattggcagcaagttttattagtcagaataacacttggttatggaagtgactaatgctgaaaaaattgattatttttattagataatttctcacctatagacttaaactgtgaacttgctctagtgtcttattagttaaactttgtaaaatatacatatatttgtttttccattgtatgcaaattgaaagaaaaagatgtaccatttctctgttgtatgttggattatgtaggaaatgtttgtgtacaattaaaaaaaaaagatgaaaaaagttcctgtagatgttttgtgtagtatcttggcatctgtattgatagttaaaattcacttccaaataaaacacccatgatgctagatttgatgtgtgcccaatttgaacaagggttgattgacacctgtaaaatttgttgaaacgttcctcttaagggaatacagtaatcttatatagatatatatatatacaaatcttatacatatatataaatcttatatatatatatatatatatatatataaaaagaatctttcactctttaaactataatcaagatttgaagacttgaaagtgagatgaagggaaaataaatgtttttcaacattattttgttttgttgtaaatacaatgcacagattaaaatatgctatcataagaggctgaaatgaaatctgccttttcagttcaaacttgagtttcagaaacagactattttttgaatgttagaagttgatataaaacaaatgtcaaaaagtctctctaaatgtcatgcctattcttttcaaggtaaaattgaattaatttatctcatcaataaactgatg

SEQ ID NO: 3896 - DNA, 1199 bp, Homo sapiens
ggcgtcttatttatataatctcatttaagtttaccaataattaccttagtgacattattatgaaatacttaaaaaaatttagctccccatgagggagcttatgaaatttaagggtcgaaggtggatttagcagtaaactaagtgtagagtgcttagttgaacagggccctgaagcgcatacacaccgcccgtcaccctcctcaagtatacttcaaaggatatttaactaaaacccctacgcatttatatagaggaaacaagtcgtaacatggtaagtgtagtggaaagtgcacttggacgaaccagagtgtagcttaacataaagcacccaacttacacttaggagatttcaactcaacttgaccactctgagccaaacctagccctaaacccgttccaccttactatcaaataaccttaaccaaaccatttacccaaataaagtataggcgatagaaattgtaaaccggcgcaatagatatagtaccgcaagggaaagatgaaaaattataaccaagcataatacagcaaggactaacccctgtaccttttgcataatgaattaactagaaataactttgcaaagagaaccaaagctaaggcccccgaaaccagacgagctacctaagaacagctaaaagagcacacccgtctatgtagcaaaatagtgggaagatttataggtagaggcgacaaacctatcgagcctggtgatagctggttgtccaagatagaatcttagttcaactttaaatttacctacagaaccttctaaatccccttgtaaatttaactgttagtccaaagaggaacagctctttggacactaggaaaaaaccttgtaaagagagtaaaaaatttaatacccatagtaggcctaaaagcagccaccaattaagaaagcgttcaagctcaacacccatcgtctaaaaaatcccaaacatacaactgagctccttacactcaattggaccaatctattaccttatagaagaactaatgttagtataagtaacatgaaaacattctcctccgcataagcctacatcagaccaaaatattaaactgacaattaacagcccaatatctacaatcaaccaacaagccattattaccctcactgttaacccaacacaggcatgcccacaaggaaaggttaaaaaaagtaaaaggaactcggcaaatcttaccccgcctgt

SEQ ID NO: 3897 - DNA, 1168 bp, Homo sapiens
tgtaatggaaccaaaccaaaacaactggcttcgtacaaactggatctcccgtgatgcagctcagaaaatttatgtggaaatgaaattcacactaagggattgtaacagcatcccatgggtcttggggacttgcaaagaaacatttaatctgttttatatggaatcagatgagtcccacggaattaaattcaagccaaaccagtatacaaagatcgacacaattgctgctgatgagagttttacccagatggatttgggtgatcgcatcctcaaactcaacactgaaattcgtgaggtggggcctatagaaaggaaaggattttatctggcttttcaagacattggggcgtgcattgccctggtttcagtccgtgttttctacaagaaatgccccttcactgttcgtaacttggccatgtttcctgataccattccaagggttgattcctcctctttggttgaagtacggggttcttgtgtgaagagtgctgaagagcgtgacactcctaaactgtattgtggagctgatggagattggctggttcctcttggaaggtgcatctgcagtacaggatatgaagaaattgagggttcttgccatggtaagaaacaaacatttaaataatttatcttgcatttaaatgattttaaaaaagttttattttttaaattaacaaatagtaattgtgcatattcatgggtgtgtagtaatgttttgatacatataatgtatactgatcagatcaaagtagttaatatatccatcatctcaaacactgatcttttcaaaatgacgatttattaaaagtaaatattatacatttatttcaaataatacatttttgagtggtatacttgataattaattgtgaaagcaattgattcatattaaccataagaaaatttctgtcatttttctcctgggaaaggtgtatgaaattgtgccaaagtgctttcagtaaagtcgttaaacaatatgaattgctgtatccgcctaatttttataaaggaaagcagcatcaacaacagcaacaaaaagcaatgagattcaaaatagtgatttccctggtgttcacatttttacagtttatagaaatatgacatttaaagacagcaataattatttctatcatattgaattataatacttgaattgtacttaaataga

SEQ ID NO: 3898 - DNA, 1174 bp, Homo sapiens
gacatggtgaatcccacagctctatgagggcaaggagagactagagggagagagaacacaggctgagtcatggtggctaggaggtgagatggaccttctctgcctatttgtttttctgagaagaggtatgcataagtattaagctaaagaaggtttgcccatggatcacctgagtttctacactatatgaaaccctggtttatattaaaggtgtattttggctctgggatattaatactagccaaagcatacccaagagttgttaagaaactatttgtttggcaaatagtttttttaaaggtcaagttggtacaaggcacatcaggcacagtagagacaaagaagtataaggctttttttttttttattcttaggattttatttttcatttattttaagtaaagaggtatgtgtgtcattttttatgacgttttttgcttttgttttggacatgcatagatgggagtacatgcattcaccctcagagaattccaaagaagctgaaattctggaagttctacgccatccaagggactgggtgcgttgatgcaggcagaatggctgtgcaggggtttggagggcacacgatgtgtgctccccatgccactggtcggcactttgccactgtgtggcagttacccgtgccttagtcttctccactctgcaccctacctcgtgggcagatgataacatgttttggatgctgtcagtgatgaatggtgagatggcagattgtcagagtcaattgattaaacctcatttatacttctagtgtcattttatatgactagtttacaaaataggacattgagtttccaagtattgagataagggaatataaatagtattatatgtatcaggaaatctctcatcttgtttttgtttcatgtattttttaaagttttcatttgtgccacaaaaatctgtcgtggaatatattttattttcattaattcagtgaagttgagacttcatagtaattttagaatgcaacttgaaggtaaaaattttactttgtcaatactgaagtctctgctgtaatccttatatatctttctccagagaacataatattgtcaaatagatacacatttttctaataggtatttagaagcacttgaaataatctctgcatgtgttacaattcagttatttctgtagtttgtaaactcta

SEQ ID NO: 3899 - DNA, 1177 bp, Homo sapiens
taaaattacactgacttggctgttacttgatcttaggaaacagcacagtttaagatattgtgaattctgacttatactttattaaatgctgtaaatctaaatagatcctgttggatgtgatgggtctagtccagtttatttaagttcatgtttcactgtttgcactttgcattgaacaatgggtttattcgctgatgtaaacggttcgagtgaagaattaatgcagtaagtatgacaacacatacacacttgcctctccccatctccagaagaggggagcagagtccgagcttatctaaatatgaatgtggccacaaagctgtggaaggtgacaaagcttaaacacctttgccctggctctgcattgtcacctagagagcaagaggtctatagaaacatcatgtcacatgaaacgattctctgctttttggttctgaacttgaagtccctaaactgcaaaatctaagagttgggtggttattaaaatgcttttaaagtcaactgtggcaccaattctaatgtaatccaacttgtgactgtttttttttgttttgttttgtttttgtgtgtgtgtgtgtggcactgggaaaagtggaaacaaacatgtattgaaatacatattggaaataaaaatggtttgagcgtcagtgatattctcccagaatgtacttatcttacctcggcatgtactgtagtcactcagtatttgtatatgttgctagaatttagattgtaaaatagtgaaattttaatgtgttcatttgtttttaatgtatatatgtcttgctcagattatttggtttaaataaaacaaccttgaggtttgtagcttttccttatactataaaatgccagattcttctattttaacctcactaatttatggccaatattgtgcttccagcaacatttgaaaatgacactgttagtttactttgactttttctatgaccagcgccatcctttttttaaaaaaataatttcaacttttattttagattctaagggtacatgtgcagagtgcaggttgttacatgggtatattgtgtgatactgaggtttgtggtatgaatgatcccatcatccaggttgtgagcatagtacccaatacatagtctttcagcccttgccctccccgctcccctcgctccccccgccgcagtcctcagtgtctatc

SEQ ID NO: 3900 - DNA, 1437 bp, Homo sapiens
tgtgcttggctctgggggataatagaagtaattattaaaccggaatttagtggcccaagttgaatcaggaagccagttcctcagaacagttcccagcaatgcttgagaactctaacaagatatacagccaaagccagacacttttttacttgtgaaagactgtgaaaaaaattaatcatattttcctggagctccgttagtcttgcctatcaaactctttgatgataatgaaataacttcctggagcattgatgatgaagatccttcagtgccaatgtatttaattgcttgattttacatagagtatggtcatgtaccttccttccacattagtgtatcctggaaggaaataagatggaatttcgaatggcctgttctccattttcacagattacagatattccccctccaggaaactacatcccatcccacccttgaattaaacgcatcttctctgttctcccatataacctatgtagacttcttacatagcgcttaccacattgttatgacgtatttacttgcctaactcccggacttgaccttggagtccttggctaggttgtaaggtgcctgccacttcagagttattcagtaagtgttcattgactgacacgtttttaagtttccagcttcaaatgggtcctgtcaataatagatttattcattccttattgcctctgtctcattgctaagccatgattccaaagctttaacactcttttcatgccctttcttccacttattccttaaccactctcacccttcacaaacaccttcaccttcctcacctttcttctttgttgctttccttcctctgcccccaacacctcttcacatctttacacatgttctccttttcctgtctttggaagtattgctcttggtttccgattctgtcccctccatctaagctttgtttgtttttgtgagatggacttttgctctgtcacctaggctggagtgccctggcatgatcttggctcactgcaaactacgcctcctaggttcaagtgattcttgtgtctcagcctccctagtagctgggattacaggcacccactaccacactcggctaatgatgagattatagatggggtttcaccacgttggccaggctagtctcgaattcctgacctcagatgatccacctgcctcggccttccaaagtgctgggattaaaggcgtgagcccccgcgcccagccacctccatgtaagctttggatcataagcatcgcctcttaaatcttgcccatcaaatacccccttcccttctgtagctgtagtttctttctcactattggttctttttccacaactttataacacgcccagtggtcccactttctaataaaatctccctttccctgctccccactctgccagtttctcttccatcttcacattgcctgaattcattgtactcatctcctaat

SEQ ID NO: 3901 - DNA, 1097 bp, Homo sapiens
gggatttttaaataaagttgcaaagagtacaaatgataattggccatgcaaataaaaactgatttgttgattttttttttaaggggggttggcagttgattatgttctggatgattccgtctatatatgtgtgaataatgtaagtattttacagcatgttgatttttaaattaacgtagtaaatgctgtaaaatagatttatattcagttaaccgctttcagttgattttttgaaagaaacaaaggttaaatgggggattaaagtaaaattgagagaccctttaaaccattgtcagcatgcacaatgcctctgattctgcagttttagaaacttggtggcacttattaatcctcttggcccctttccactctaatggatagtgtacattcttcttaaagtccacaacagcagattttcttgcagtaaattatgcagatgcaaaatattctaattgatatatgtgttggaagactgagtattgatgggggagtggaccagacaaagaggtaagatgaaacagtagtgtgtttataattgtctgtgactattttctataataattagtactatttaatggtgagcttttaaaaatgtaggatagagggtacagtggcactgtatatactatttatagtctcagctactagggaggctgaggcaagaggcttgagaccaggagctcgaggctgtaatgtgccatgatgattgcacctgcgaatagccactgcactccagcctgggcaatatagcaagaccccatcctttaaaaaattttagaacttttttaaaatcaaagtgcagattgcttgtatgtaaaacccaaataaaggtagagtaagtgtgatatatgggagtattaaaatagcttaaaatttctcgtgaaggacatgtggctaaagggtcaaaaaggatgtaagacttggagccagagcatagtatttcctgaaataacaagtttagtgctttaactatggctacatgtgcttaaggaattttgagccacttatttttgaagatgctgaggacatgtagagtgctttttgtagtgagctaaccttgatctctaaggactaactacccaggtccaggtcttcac

SEQ ID NO: 3902 - DNA, 1279 bp, Homo sapiens
cctactagtgtctgacataataaatgtcaacttcattgacgcagttcttggtataaccaaaaaagcttgagatggccatgattatgtatgactagctcttctttaacatttttcttaacattatttctcctaacattatttcaaacagctacaaagatttaaccaaagggaggagaaaaaaaaactaccaattttaccctattatttaaagcaggtagttcaaataagtagcttctctcatagacagaaattaatgttggccgggcgcggtggctgacgcctgtaatcccagcacttcgggaggccgaggcgggcggatcacgaggtcaagagattgagaccattctagccaacatggtgaaatctcgtctctactaaaaatacaaaaattgctcctccacaggaggcctacacgccgccgcttgtgctgccgccatgtcgctagtgatccctgaaaagttccagcatattttgcgagtactcaacaccaacatcgatgggcagcggaaaatagcctttgccatcactgccattaagggtgtgggccgaagatatgctcatgtggtgttgaggaaagcagacactgacctcaccaagagggcgggagaactcactgatgatgaggtggaacgtgtgatcaccgttatgcagaatccacgccagtacaagatcccagactggttcttgaacagacagaaggatgtaaaggatggaaaatatagccaggtcctagccaatggtctggacaacaagctccgtgaagacctggagcgactgaagaagattcgggcccatagagggctgcgtcacttctggggccttcgtgtccgaggccagcacaccaagaccactggccgccgtggccgcaccgtgggtgtgtccaagaagaaataagtctgtaggccttgtctgttaataaatagtttatatacctatgaaaaaaataaaaaataaaaaaaataaaaaataaaaatacaaaaattagctgggcgtggtggcccgcgcctgtagtcccagctacttgggaggctgaggcaggaaaatcacttgaatcggggagacggagtttgcagtgcgcccaggtcacgccactgcattccagcctggcgacagagctccatctcaaaaaaaaaaaaaaggaaaccattcataaaaaaaaaaaacttatacttccaacttagtagactgctcgacaggaattaaaattcagaatattctctagttaagcccctaagacaaacttgacagtgttttcaaaaaagtgactatctgccacaaa

SEQ ID NO: 3903 - DNA, 1220 bp, Homo sapiens
taactctcttaactcccttattacctaaacttgtctggctcccaggaacagccttatagagagagggagtattgtattgggaagaaaatgttactgaactattgactgaaagtaaatttagataaaatacagcttttttccttatgggcatttgttttgtttcaagtcatcataaactaggtattgcattgctatccgtggatacagacgcttagctcttaaaagattttttttttatgtaaactgttgaatatttgaaatagtccacttcaccttaatgggtcttgtctatcttcattagtcttcaaagaaaaaccatttgctaccaaagtaaatcagtattttgaatgtgcttctcttgttttttgtttattagctagttcctgtaagcatttccaccagaacttgaggcaaatcgtaaggaagctgtttcttttaaaacacaaaccaccaccaaaaatttaaatgtacatattgcttaagtatttggctgtttttattttttaaaaggtataaacaccaaaaaaaaaattaacattgtatgaagatggaaaataagaagatgcactttctgtaactttgtctaaggatttaaattactaacttatgaactccaatttgaattgaacttaactatcggctttcttactggtaaaattatatggtttattttaaatgcgtacatattgaccaatggcctctgaaaaagcacattttagatactgaaattgaaggaaagaaaatgcatcttcaaacattttttggaatctcaccacatatactttgttagatttgtgtattgtagggtgtttgttttgtatttttgtattgtatatgaactttttttaaatgtgacagttaaacacatctttaaaagcatagtcacagacaaaagcatacagtataaaaatttccttgaaaactcctacaatattatatttggaggcagcttcagactgttttattggtggtagctgcttgctgaggtcttttagttggtaataactccagagaagcagcctgtgtatattcctaacactttgttcactagcatttaagtttagaataagcccaagtaagacaatggaaatgtatatagaactcttagttcttacatgatttaattatatcgatacatgaatttaacttactttaatgtaggcaaactatcaattttttgtccattttcctgtttgttaaaataacatacctctcctacg

SEQ ID NO: 3904 - DNA, 1221 bp, Homo sapiens
atggaaatttcctttgtgtttgcagagatccgtaaaacaccactaaaactgtagtttgagcttgaaaaatataaccactgcaaacttgtgtgaggatagagagcttgctttttgttttaacttgtgactcaaataatgttagttgtcaaaatgacttcatcacagtaagttttgcatgtcagtactgttttgctttgtaatttatgttgactttattaggatgcatcatcaaatgatcaaaattagcaaactagcaaaaatgaatttcaaagtcattcagtcagtgatgtaaaataaataaaatcctgagccctctgccaactgcatgaacgtaccctcatggccaaggtgaccccagaaaaacctttaaaacagagttcctgatcataacaggacaggagggcagacatgcctcattaaactccctcccttttgaagtttagacacaacaaccgaccagcattgatgttaaagaagagatatcaagactgacagaaaggactttttgtggcaaaaaggtatcaaaagataaacaagacccaaggccatgccaggtaagggttaagtcatatacccctacacttaaagaataaactgtgttctaactgccccagggttttcctttttctctaacagctaaaccatcactggcctacagataagcaatattaaaacaactgtagctcaccatcagacactgaataactgatccccgttccaccagctttgattggataagagactgatttcagtaactttctcctgataagaagaccgccaaccatggactgattctggcaggctttcagaggctgcacacttgcatgacttcgtgtcttgaaaagagcttttgacatataggacctaattataatacatttaagtattaaatatccactccaaagtgaacatcggtaatatgttacatgcatgtttgttcaatacctatgtgtcaggatcacctttatgaatattcagagtttctccagtaacctgttgaatgtgtacgtttaaccaaactgttcagcataaagctcctaccccaaccactcctcctttgaagtgcccgtctctagtctttctggaggctatccttctcagcctatgggatggacaccttgcaggctgtaaaccttttttttttttgagacggagttttgttcttgtcgcccgggctgcagtgcaatggcacaatctcagctcactgcaacctcctcttcc

SEQ ID NO: 3905 - DNA, 1215 bp, Homo sapiens
ttccttaaagatcctattaatataagggaaggccttttgaaagaatgggcttatcacctacaacatttcccttttattttagcatgattgctacttttttctttctaactttgtgtttaaaaaattgaatctttagaaacattgcaggaataataacaatgaactcatatacctttaacttagattcactattattgttttgacacattttgctttatctttctttgtgtttatatgtatctgtgtataattttttcccctgaaccacctgagagtatgttgcagacatcatggcactgcactccataaatatgcctctcctaagaaaatggactttctctaacatataaccataatgatcacatttgggacatttatcattgttatagtactgttatttaatatgcagttcatattagatattcaagtttcttcagttgtcccaataatgacttctgtagctatctttttaattttaactaatctaatctatgcttactcagtgtgtttggttatctctttaatccaaaagaattctttagcctattttgttttgtacaacattggcaattttgatgttgctgttttgtagaatgtccttttttttttttttgagatagggtgtcgctttgtcatccaggctggggtgcggtgcagtgatctcagctcactgtaaccttcagctcacttgacttcctggggtcaagtgattcttgtgcctcaccctcccaagtagctgggagtactaggcacgcaccaccatagctggctaatttttgtatttttagtagagatggagttttgccatgttggccaggctggtctcagactcctggcctcaaggatatctgcccgtcttggcctcccaaagtgctgggattacaggcgtaagccaccacgcccagtctgctttggatttgctttattgttttcactttccatgtgattagattgaggctaaatattttggcaggaaaattatagaagaagttttcctgcaaatatttttacaggaaattatgtttttgtaagaaaattattattgtacaataataattatataattattataactatagacaagtaaattgtatatttttttcttaccataaaagtctaaactcatgaaagtagtttatatgtgctctcttaaaaatcactttatttaagctatgaaatttgattatgctgtaatgtggccaggcctgtacactt

SEQ ID NO: 3906 - DNA, 1197 bp, Homo sapiens
ataattttcctgagaggttcgtccttaccttgtttgcttcctcctcctcttcctcctttctgccatcaaatatttgttgcacatctactatatgcaaagttccatattaggtgatagagagagaccaatgagaaagactgttcttcactttcaaggaagttccattctcatttggaagaaagagagtgaacagaatacacaattgatattttaattacaactagtcagttctttaatggtgcttcttaatgtcaatcttctgaagacatcttcgtggaaaaccataaaggtcttggtaattttctgtaaattcagctgtgctggactcatgatcaattttatatgccaactttgttttgcccaattaataatctattaaaaaagtgtatttttatacttttttacactgtacatttttatacttagtaaaatacatttttataatttttatatttagtaattatttgctgcattaaaatggaaagaacccaaagaactcttcggtacctgttattataaagagagagatatatatatactttaggtcactgtaataagaaacctcttctaacatttataggaggaggacagggctttcttttttttttttttttttttgacacggagtctcactctgtggcccaggttggagtgctggagtgcagtggcacgatctcggctcactgcaagctccgtctcctgggttcacgccattctcctgcctcagcctcccaagttcctgggactacaggcgcctgccaccacaccctgctaattttgtttttgtatttttagtagaaacagggtttcaccgtgttagccaagatgttctcgatctcctgacctcgtgatccgctcgcctcggcctcccaaagtgctgggattacaggcgtgagccaccgcgcctagcccagggctttctatattgtttttaagaatgaggcagttcacttgagagtatatgacttgattcagtgtaactgaatgctccatgaagtgaggcgtgttttataatgaaagtcttatagtataggcacaattccttactgttgaaattttcattttatttggtaagagttctttcctatgtttcacaggctggtttgaaccttgtttgcaaggaatgtactatctgatctaatacatttttattaccttttggctggaagttttaattaaggcgcagtcagaaaactc

SEQ ID NO: 3907 - DNA, 1151 bp, Homo sapiens
taaatgagcagtcaccaagagccagtgaagaaaccttgcttggaatttcaaaaaaagctaaacaaatgaagatcaatgtacagaataatgtggatcttggacagccagtaaagaataagagagtcttcaaaggtaatttgctttgatacagcacatactctagtaaaacaaaaaacaaataaaaagaaaccttttgaaagtaatagtcatgcattgcatagaaagaaattcaacatctcacatcttaattttgactcatattgattagagaggtatggtaatacctgtgctttctaagcttgagtactttaagttgtttatttgtttctgtagttgcttcctagttatttgcttgctttattcctttattttgtggtaatttggcaagaaatgtcatgcacttaagaatttgttgtagatttgaaaatagtatgcctaaggttttgtatctgcaatttttccacctccacagaagagtcatcagaatttgatgtgagggctttctgcaaccagctgaaacacaaagctactcaggtttgtctggcttcattaaatttagcttatgatttctgctaatttgtagaggatgcttcttaccaagggcagagattgaatcttttcattttatccccagctctaagcttagtgccttcttagttgtcagtgtgtgcttctgaatgaatagaggcaagggatttttaatacatctagttaattcagttaatagagtaccttcagaaatattttagtaggagtttctctagaattttaaagtaaccgtaagatctgttgttaagtatggattgtactgcagcttaagagtataggctttgcagtcagacagttggtttgaatcctggctttggtactagctgtgtgaccttctgtgagtttcctgatctctccgtacctctattttgtaatagtaatatgtgcctcatagggttgtgctagttttaatgcatgtaaagcgttcggtagtctggagtatggtaagcatttaattggagttagatgttattagctacggtcattttggtcatcatcctcatcattttgtcatgaagctattcctttactcctgttgaggttcaagttttaacatgattgattaatgtctgtaaattctgtttgttctggacctaacagca

SEQ ID NO: 3908 - DNA, 1163 bp, Homo sapiens
gttgatgaaggttttgggagcctgcaagttgttgctccgcttgttggactgctgctgcaaaacttttctgtatccttgaatatcttgaaatataccttcttttgatttggaattgtttggatatttttaacagtatttttgtttgaaagctaacactccataggagttacaacctacaggaattcttaaacttttgcttcttggcctccttttctcaggaattgcctgatgcagccattgccagagactgcctgtcactgttcagcacgtattatcctaagagcattgatagctagaaattcttaatcttagaaactaaactttaagaactaaatttaataatgggaactctagcagagtgtttataaccatattttaaagttttaaattcttaaatagaatgtgttttaaggctttaatacctttaagaaaattctctttacttccaatatatttcttcattcatgattgtaacttacaaaacccacattactttgattttgttttctaccttaaattgattttccagtttgactgtgaaacatctaggtttgcaagagttcattattttaaaccttgtgatggttgggctggtgagcaggttatggtatgtacatacctctgacatccttcatttctttctcatctcctttcagcctaggtttcttattagtagttttcaaacttattttcttatggggttatggaaggtgcaggtattctctttcttggtttgatcagagttttttgagggtagattgggaagccgagtgctgatggctgtatcaaaggagtaggctttgtatctcaatccacaagatcagcccaatcactgaacaactaaaaaaatcgggagtgactggtgtcacactgaaatctgggtcatggtaggttgtagtgaaacatcagtgggcttttactgaacattaaaaaaattaatgcctgtgactgggaattgcagtaataaaaaattgttggtagtagtcatattgcaacaggccgtttaaaatgatgctaatcctgggctggctgtatcacttgattctttctgtcactcggtttctaatttttaatggcaatgataaatgcaatttttgaccttcttatgtgctagactattttcttccatctcaaacaccactgcttttttgagcatatttagt

SEQ ID NO: 3909 - DNA, 1231 bp, Homo sapiens
gaaagattttcaaatcagggcaagagaaaactgatatacaatctcaacatggctcactcttgagcccctgttttatatttaaatcttgacttttttgtgtgagttatgactctaggtccttgaagcagaatattctccaaaataattcaaacgctctctcttttagggtgctacaacattaccatcccagaaagaagtgggtttgcattttatgatttgcattaaattgcttatctgaacctttcacaaggcaccctggtactaggcaggcctctttgaggaaacaggacatatttaggcatgaggtttactctgcgtttatctcaacatgggataccttgtgaagtaataagctttttgagggggtgcatttcccctttatcctctcatcacatctctgttcacttacatagaatcagaaatacacctttagtaaacagtcatgaaatatttgggctaggcactgtgagaaaatgggcacagcagtgaacaaaatgcacgtcagtgaacaaaatgccgggcgcggtggcacgtgcctgtagtcccagctacttgggaggctgaggctggaggatcgctggagtccaggagttctgggctgtagtgcgctatgccgatcgggtgtccacactaagttcggcatcaatatggtgacctcccgggagcaggggaccaccaggttgtctaaggaggggtgaactggcccaggtcatctacagtccgttggggaagatggacatgaaaaaaacacatgattataatctgttaatgataatcaggcaaaaagctacaagaagagaacatccttataagactcttatcattatgtgcagaacagaaaaaaaatccaagtaattgtcagcaatgtttatgcttagatgtaaagccctaattgctgatagcatctctctcacagctgaattcctcgagagcatatttggttctggaggcctccctaagagacctctttagggaggttcaggctttctctgtctatggttcccagttctaccacaaaaccaaacacagaaataaagtaattagggtgactctgcttgggctctggtatcagagaaggatgctggttctcagggaagggtgactttgaagaaataggcttcttgctgagattcctccaaatgtgtctgagaatttcaagttgactttcaaaggctagaaccttataataattatgtggatggaacattcaggaaaaggaaaactgagatgc

SEQ ID NO: 3910 - DNA, 1182 bp, Homo sapiens
cctgtcagatcagcggcagcattagattatcataggagtgcgagccctattctgaaccacacatgcaagggatctaggttgcatgttccttatgatcatctaatgcctgagatagatggaacagtttcatcctgaaaccatctgctccactccctgtccatggaaaaattgtcttccacgaaaccagtccctggtgccaaaaaggttgggaccactgctctaggggtcagagaaatctttaaagaggataatgaagagttctcaggaattccttaaacagcagaaaccaaagagaaggagataaggagaagaaattgtagtgtcaccgctgtctacctctgtgtcatttgagggaccagtttctctttggttataaacaatagagattgaatttggctaagcagcaaatggatactggataaactcacagaaagaaagggagatagaataatgaaggcttgggaaggccaggaaaacagaagctcccaggatcataaggatccatggggctaactcagcctcagcaagatattctccttgtgcagggagtcttattagttagccccatgcccaccccagaggtgagcctgtgtttgatggtcctatcagatttcaggaatgggacagagaagatctccgaaggaaaggcaggatattattgtcagaaggccaaaacaacagatttattacaaagttcatcggatttggcagtgtggaagtcttttgttgagcttggtttaagcagttttaggaataaaagtcaggtaacagctggttgaagagtgaataagaagtgaggaagagggggtagtaagtgtaaacaacttgttcaagaagactggtggttgggaggaagaatggggacacctgtggggagttgcaaggtcaggagaaaaatcagtttaggtttttacatggaaaaagttgaataaggatttatttttatttttgttgagatgggatctcactctgtctcccaggctggagtgcagtggtgcgatcttggctcactggaaccttcgcctcctgggctcaagccatcctcctacctcaggctcctgattagctgggattacaggtttgcagcaccacacctggctaattttttgtatttttggtagagatggggttttgccttgtttcccaggctggtctcaaactcctgagctcaagtgagccacc

SEQ ID NO: 3911 - DNA, 1150 bp, Homo sapiens
caaatctaagcttagaagaaaagtttagcgttaagcacctttatcttcatgaataagcttcagcttgctcttggcaagagaagagtgcttgagttacagaaggcataagtagtttgaagaatgcagcagcctttttgtaaacttcccagatatcaaaatagactttgatatataaatggttttctgagatgacactgcctctatttctataaccatttcacctggactatctaatcagtcctatgaatgtatccctaaatgtggttattgaaaacctaatagctgcctcatgacaagtacatgttatttaaggaggaaaaaatattaaattttgaattgagtgtgtaggctccctatcattatatatagagtttctttttccacggtagtcagtgacttaacctgaattgtaaatgtttgtaaagggttaattgtcctacatcaaacttagttaaataattccatccacttatggaggaggaggagaatgtggaagaggtaaaaagctgggcacaagttcatatgcctatgagtcagtaaagactgaagtaatgtcctatgttgagctggttattttgatatatgataataattatctttgaagtagaacaattctgttaactggaaaatcacaggatatatccatcatatttttcaggacagatagtttttactgtggggcaaataggttaaaattacactatgttagttgcatttaggttttaaagcaaagaatctgtagagaaatctatgcaatatatagtttgtccagattagctttcatttggggaatgaagttctgaaatatctaaagcagtttactcatcaattgaaaagtcctccaaaaagagaactattgggaaaccatggtgtggtggtggaaaagaaaagctccctcagttttttggagggaataacttaaaaaaatacttaaatggctaagtttacttggtgcagttaagaattaaacttgtcaattttaacattgctgttacatctgaaataaacttatgtgatgttctggtagtgatctgtgatatctgtaaatgtcaaaactgtattgttgaattctgcagccagcaaccgtacatactcattgtgtagtgtttcccttactgcttttatttactttcacatttaagatctaatt

SEQ ID NO: 3912 - DNA, 1177 bp, Homo sapiens
aatgtaaaaattagattaaaagtgtaaaattgtcatcaaaaggttttaggtaagcatgcctaacccttgttgattactggtagttgtaaagagaatgtaacagatgtttggagctatctgtggagaatgcttaaaacttgatgaaaccttaattttaattttttttctgatactctcttatatctcaggcatgtccagatcagcaatgagtcggcaattgacttctacaggaagtttggctttgagattattgagacaaagaagaactactataagaggatagagcccgcagatgctcatgtgctgcagaaaaacctcaaagttccttctggtcagaatgcagatgtgcaaaagacagacaactgaacaaattacaaatgaactttcttgcacttgcttgtcgccaaataaaagagaggcccattgattcctcccccaccccaacacttttcttttaaagcttttctccctccttgttcttgtttttctttcttcctttccttttctctgagagttttaatactttcaaggactttaaaaaaataatcatgtttgaattgttttctcttatttttgtgaggtggtttgaaggaaggacaaggtagatctgtttagttttgcagttgaagttagatggtcctaaacatttaattgtcaaataatttcaaatttaatgtcctgctttcacattgaagggcagagcctacaaaacattgtatatttcaaaagacaaaaagaagcagcagcagtatcttgttctctaattcatagacaagttgagtgtgtttgtggtactttgggtttttaaacactttgggatactaatccctagacattgccttcactccacctttagtccttctgagcactctctcgggagttggaacattgttatccttgtaagaaatactaagcttatgttgatttttaagtaattatatcttctcttcttgctggtgggtggggcagtttggtttagtgttatactttggtctaagtatttgagttaaactgcttttttgctaatgagtgggctggttgttagcaggtttgtttttcctgctgttgattgttactagtggcattaacttttagaatttgggctggtgagattaattttttttaatatcccagctagagatatggcctttaactgacctaaagaggtgtgttgtga

SEQ ID NO: 3913 - DNA, 1988 bp, Homo sapiens
ccgggttcaagtgattctcctgcctcagcctcccgagtagctgggattacaggcatgctccaccatgcccagctaattttgtatttttagtagaaacggggtttcaccatattggtcaggctggtctcgaactccagacctcaggtgatccgcccacctcggcctcccaaactgctgggattacaggcgtgagccaccgcgcctggccagggactatactctttttaaaatagacatttgtggggctcacacaatatatgaaatagtaccctctaaaaaagagaaaaaaaaaatcaggcggtcaaacttagagcaacattgtcttattaaagcatagtttatttcactagaaaaaatttaatatcaaggactattacatacttcattactaggaagttctttttaaaatgacacttaaaacaatcactgaaaacttgatccacatcacaccctgtttattttccttaaacatcttggaagcctaagcttctgagaatcatgtggcaagtgtgatgggcagtaaaataccagagaagatgtttagtagcaattaaaggctgtttgcacctttaaggaccagctgggctgtagtgattcctggggccagagtggcattatgtttttacaaaataatgacatatgtcacatgtttgcatgtttgtttgcttgttgaatttttgaacagccagttgaccaatcatagaaagtattactttctttcatatggtttttggttcactggcttaagaggtttctcagaatatctatggccacagcagcataccagtttccatcctaataggaatgaaattaattttgtatctactgataacagaatctgggtcacatgaaaaaaaatcattttatccgtcttttaagtatatgtttaaaataataatttatgtgtctgcatattgcagaacagctctgagagcaacagtttcccattaactctttctgaccaatagtgctggcaccgttgcttcctctttgggaagaggaaagggtgtgtgaacatggctaacaatcttcaaatacccaaattgtgatagcataaataaagtatttattttatgcctcagtatattattatttaattttttaggtaatgcctatctcttggtctattaaggaaagaagcaatcagtagagaattcaggatagttttgtttaaattcttgcagattacatgtttttacagtggcctgctattgaggaaaggtattcttctatacaacttgttttaacctttgagaacattgacagaaattatgcaatggtttgttgagatacggacttgatggtgctgtttaatcagtttgcttccaaagtggcctactcaagaggccctaagactggtagaaattaaaaggatttcaaaaactttctattcctttcttaaacctaccagcaaactaggattgtgatagcaatgaatggtatgatgaagaaagtttgaccaaatttgtttttttgttgttgttgttgttttgaatttgaaatcattcttattccctttaagaatgtttatgtatgagtgtgaagatgctagcgaacctatgctcagatattcatcgtaagtctcccttcacctgttacagagtttcagatcggtcactgatagtatgtatttctttagtaagaatgtgttaaaattacaatgatcttttaaaaagatgatgcagttctgtatttattgtgctgtgtctggtcctaagtggagccaattaaacaagtttcatatgtatttttccagtgttgaatctcacacactgtactttgaaaatttccttccatcctgaataacgaatagaagaggccatatatattgcctccttatccttgagatttcactacctttatgttaaaagttgtgtataattgttaaaatctgtgaaagaataaaaagtggatttaaattaacatttttttctttttctcttttttatggcacaatctgctagaaaatatgtaccttgtatcttgac

SEQ ID NO: 3914 - DNA, 1099 bp, Homo sapiens
cagagtatggtatgctataatgcttaagaaaatgggatctggccgggcacagtggctcatgcttgttacctcagcactttgggaggctgaggtgggcggatcacctgaggtcaggagttcgagaccagcctggccaacatggtgaaaccccatttctactacaaatacaaaagtcatctgggcatggcggcacacacctgtaatctcaactacttgggaggctgaggcaggagaatctcttgaacccgagaagcagaggttacagtgagctgagatcgcttcactgcactccagcctgggtgacagagcgagattctgtgtccaaaaaaaaatgaaagagagaaaagaaaagaaaattggatcctctctgatagctcatttgtcaactaataaaactgggcctggcccagtttttaagaattccagaagatatggtacttgctgtagagatgtaatgaagtatttgtaaaatgttggtatgtctggtgacatttagccgatgatgtgtgtgcttatcaagttctgtagtgcattttaaaagtggaacccagtattttgcttcactgaatactaaatcatttaggagcacccaacaagtaattgataatgttttctgattttttttccctgtatatctatagaagttagaaagtgtatctttatttttttctttaaacacatattagtctttcccagttataaaagtaatgacactttgcttatggattgcgtgtatgctccacacagtttctcacttctgtttggataccatataagaacaaattgggaaataatccgacctcagagatctgtttatgttttgacatttatttttccatatattttcataaacaccaggatgctcttttcttcacttaacagcattattaggaaaaaattgctatattgcttagccttccctcaaattggagaaagaaaaaagtggattatatcaataatcagtatggcctaagcagtgttactgttctctgtatacattttcaaggctgagagagccttggcttcatggcattctttccatgattagtctttctaattctgttctttcatttgtttggttttcatcagctcagacaaa

SEQ ID NO: 3915 - DNA, 1176 bp, Homo sapiens
tcgggcgtcagctcctccataggcaccgagcctgactcggtggagcagcagtttgggcctggggcggcgcgggacagccaggctgaacccacccaacccgagcaggctgcagaagcccccgctgagggtggtccgcagacaaaccagctagaaacaggtgcttcctctccggagagaagcaatgaagtggagatggacagcactgttatcactgtcagcaacagctccgacaagagcgtcctacaacagccttcggtcaacacgtccatcgggcagccattgccaagtacccagctctacttacgccagacagaaaccctcaccagcaacctgaggatgcctctgaccttgaccagcaacacgcaggtcattggcacagctggcaacacctacctgccagccctcttcactacccagcccgcgggcagtggccccaagcctttcctcttcagcctgccacagcccctggcaggccagcagacccagtttgtgacagtgtcccagcccggtctgtcgacctttactgcacagctgccagcgccacagcccctggcctcatccgcaggccacagcacagccagtgggcaaggcgaaaaaaagccttatgagtgcactctctgcaacaagactttcaccgccaaacagaactacgtcaagcacatgttcgtacacacaggtgagtgtcaccccacctggaggcctggcagcaggggctgagggggctgtgggaaggcaaggtaagagagcaggtagaagggaaggtttgggatcatctttcagattttaaacagaccccaccacaagcctcttctagaaaccccaactgtgttcctcccatcataagaacaaagcaccctgccaccaagagacaccgtcacaggaaccctttatggagaagggatgtcctagggatgtccagactgcagaagagaagactcaggtcattatataagccatattcaagtatttgtgtttcagaggcagcatactgtagtcaggaagagcttgagctcttacacccagccagatggcctgggtgtaaattcaggcttagctactactaaaccttgtcgccttggaaaaattacttaacttgtctatacttcagtttccttgtgtataaaatgagaataatcgtgatacgccttccttatagtgctgttttgagaataaatt

SEQ ID NO: 3916 - DNA, 1206 bp, Homo sapiens
gaggctgaggccggataattgcttgaacctgggaggcggaggtgcagtgagctgagatcggggcatacactccagcctgggtggcagagtgagactccatctcaaaaaaaaaaaagaactaagaattggtttgtgttttgagatggagtctcactctgtcacccaggctggagtgcaatggcatgatcttggctcactgcagtctccgcctcctgggttcctgggttcaagcaattctcctgcttcagcctcctgagtagctaggactacaggtgcacgccaccatgcctggctaatttttgtatttttagtagagacagagtttcaccatgttggccaggccggtctcgaactcctgaccttaagtgatccacctgccttggcctcccaaagtgctgggattacaggcatgagccaccccacccagcccaagaactgagaattggtgagatcacctgtagccatgtagtttctcaactgtattagtgcatcttgccctcctccaagaaaatgattcttggcaccaaaatttgtcaatttgccttttctctaactccaaatcaaaattagaatatcagcaggatggtggccatggaagttggaattcactaaggagtgtgtaacaactcacctgccaaatcgactagcccttaaaaaaaaattagaatatcatttagcatcagaaacgttttcaaattagttagcaaaccccagtctccaaaaatatataaagtcagggaaaaaataaacagactaaactagaatgtgtcttgagggcagtgacttcttgtcattgtaattccagtgcctagtagagtgccacacacgtaggaggtgtccggaaaatgtccagtgaatgaacagaacttgttgagacaagtaaaggagatgctcatgtttccataggcttgctgtaaacatgagaagcgaataggctaaaacctcagagagatgccgaaccatggtaataaagtttgatcttccagaattgagatcaggatgatggtatgatagtacttacagtaggtcaggcagcatatcacaaaaattccatttactgagattaaggtaatggcccaggatgggagcaggttatcaggaaaatgctcttgcttggctatggagggaaaagaataatgtcagctgtaatgtatttcctactgcctgatactcattctgtgccttttctattgatgcaactgtgga

SEQ ID NO: 3917 - DNA, 1219 bp, Homo sapiens
tggaaggcatgtttaagtgttcacataataaaacagtacatttcttccttgcaaacagccctacaccacatatttttccatttctggctctgtctgccaacttcaatgggctgtcctcagggttgggttggctggagtggccctgtgtgacaggcatgtgagtgtccctgagcaccgtacagatactagtctgcattgtcaaggagtgttttaagtctccacctcagggtgatgactgctttggtaggaaaggaggcaatctaaaattcacctgatttctgattcattccaataatgttttggtgtctttgaatatggcagccccctgggcagcagtccagccagcagaccttataacttagctctgtctgtatgtctgacatccagactcactagaagaggatctaaatgggccagggaattacttgtccctgggacagagcaattacaccatccctcataggccccagaaggcctatggacctttgcttgggcaccaggagcttctctgagagcaggtttggggtgggcttggcctccagagtggcctcctcctgcaatgtcaggctagattaacatctatgagagtctcctgtacaaggagaggtgggaggctgtgaacactcctatgtaacaccatttgtccccttgtgtgattgcttcaccaatgttgacagctcatgtgacacacctgtcttcttctgatggaggaaggaagtaataccattttctatcaaaagcattctttgatcatccctgtcctaaaaaaaagttacttgatgggtctcttgtcaaaatcagtgatatggtttggatgttttatcccttccaaatctcatgttgaaatatgacctctaggccgggctcagtggctcacaactgtaatcccagcactttgggaggctgaggcgggcggatcacttgaggtcaggagtttgagaccagcctggccaacatggtgaaaccccatctctactaaaaatacaaaaattagatgtggagttcagagtggaaacaggtgtgagagggttcaacagaagaaaacatagctgccaagtgtttgagtccatcggcaagtttggactggccttagctgttgcagaaggcatggtgaactctgccttatataacatggatgctgggcacagaactgtcatctttgaccgattctgtggagtacaggacattgtggtagggtaagggactcactttctcatac

SEQ ID NO: 3918 - DNA, 1113 bp, Homo sapiens
ggtgggggaggaaggaggtggaggacgagtaggaggggggaggaggagtggggaagtgcaaggcggctgcgcagacagcgctcctcacacagagcagctcctgacccgggcgaatgcgggcttgtgccgccgccgccgccgccgccgcccgggccaagtgacaaaggaaggaaggaagcgaggaggagccggccccgcagccgctgacagggctctgggctggggcaaagcgcggacacttcctgagcgggcaccgagcagagccgaggggcgggagggcggccgagctgttgccgcggacgggggagggggccccgagggacggaagcggttgccgggttcccatgtccccggcgaatggggaacagtcgaggagccgctgcctggggtctgaagggagctgcctccgccaccgccatggccgctggatccagccgccgcctgcagctgctcctggcgcaatgaggagaggagccgccgccaccgccaccgcccgcctctgactgactcgcgactccgccgccctctagttcgccgggcccctgccgtcagcccgccggatcccgcggcttgccggagctgcagcgtttcccgtcgcatctccgagccaccccctccctccctctccctccctcctacccatccccctttctcttcaagcgtgagactcgtgatccttccgccgcttcccttcttcattgactcggaaaaaaaatccccgaggaaaatataatattcgaagtactcattttcaatcaagtatttgcccccgtttcacgtgatacatatttttttaggatttgccctctcttttctctcctcccaggaaagggaggggaaagaattgtattttttcccaagtcctaaatcatctatatgttaaatatccgtgccgatctgtcttgaaggagaaatatatcgcttgttttgttttttatagtatacaaaaggagtgaaaagccaagaggacgaagtctttttctttttcttctgtgggagaacttaatgctgcatttatcgttaacctaacaccccaacataaagacaaaaggaagaaaaggaggaaggaaggaaaaggtgattcgcgaagagagtgatcatgtcagggcggcc

SEQ ID NO: 3919 - DNA, 1194 bp, Homo sapiens
gttcataactgaattgaaaagaaaaggaagaaaagtttaattttgtggtattcttcattcattcctgtctttaactttgctgtcccaagtctaatgggagtaaatacaaatacatggctactcttaattatgaaaacaagacttaatgaatttagaatttagtcttttcacaaactataaataaggaaattgatttgtcatttctagttcactttaatggtaatttaactctctaatttacacattgcatacaattgatatttattgaattcctctttggacagcctaacaatgtacagacactgggaagaaattagaggaatagtctctatcttcactaagcatatgaggtgggacactttttattgcttactttggctaggcatccatttacatactaattcatttaattctcacaacaaccctatgaggcaggtactgttagtgcccctattcatttagcgtggaagcaattgaagcacagaggcactacatgacttgtcctggatcatatagttagtaagttatggaactgcgattcaaacccaggcagtctgcttcaagaacctgtgctcctgatcactactctgtactgcctcttgttccagaacagtattaagaaaaaaaaaaatctgatactgttcaatatagtagccaatagcctcatgtggcaatttaaatttaaatttaaattgattaaaattaaaaatctagctcctcagttaaacaagccacatttcaattgctaagtagtcacatgttgctaatggttaccgtattggacatttcgttctttctttttttatttattattattattattattttgaaaaagagtctcattctgttgcccaagctggagtgcagtggcaccatatcggctcactgcaacctctgcctcccaggatcaagaattcttgtgcctcagcctcctgagtagctgagattacaggtgcgtgccaccatgcctggctaattgttgtatttttagtagagacaggtttcgccatgttggccaggctggtctcaaactcctggcctcaagtgatctgcctgcctcagactccaaatgtgctgggattataggcatgagccaccacacctggcctgtattgggcatttctatggctgtagaaaattccatgggacagcactgatatagaaaacaagtgttatagtagttcaagaaagtaa

SEQ ID NO: 3920 - DNA, 1209 bp, Homo sapiens
agaaatgagtgatgggtagaggttggaagagtttggagagctcagaagataaaaagatgagggaaagtttggaacttcttagagattggttaagtagttgtgaccaaaatactgacagaaatatgggcagaaaaggctatgctaatgaggtctcagacagaaattaggaacttattggaactggagcaaatatccccattgttgcactgtagcaaagaacctggctgcattgttgcactgtagcagagaatttggctgcattatggaaggctaatcttaagagcgatgacctagagtatctggaagaaaaaaattctaagcagcaaagtgctcaagaagtggcattgttacttttaacagcttacactaaattatgtccacaatggaatcacctaaaggaagaatctataattaaaagggacacgagcattaacatttgaaaaatttgcagcctggccatgtggtagtaaagaaaagagtgttttcaggagaggaatctaagcaactacttcctaaagagattagcatgaccagtaagagagcaaggtattaatagtcaagacaatggacaaaaggcatttcagaaatctttgaggccacccatcccatcacaatcacaggagcctaggagaacagaatggttttgggggacaggcctagggcaccactgccctgtgcccctttgggtcactgttcctcacatccctacaactccagctcccactatggctcaaatggacccagctactgctggggttgctgctccagagggcacaagccatagctttggtggcatccacatggtgttaagtctgcaggcacccagaacacaagagccatggaggcttggcagctgccccctagatatcagaggatatatcaaaaagcctgggtgcccatgctgaaacctgccacataggcagagccgccagcagtgtgcaacctcagtctggaaaagcctcaggcattcaactccaacatatgaaagccacatgggctgtgcacagcaaaaacatggggacaggactgccaaggccttgggagcccaccccttgcaccaatgttcccaggatgcaggacatggagtcaaagaaaattattttggagctttaagatttaatgtctactctgctgtgttttaaagctacatgagacttgttacgccttcctactggaatggaaatgtttacccaatacctatacaaccat

SEQ ID NO: 3921 - DNA, 1202 bp, Homo sapiens
ctttgcaatcaatttattgtccactgaaacggttatttattttcctctctctctgtgtccttatgtattattcagtaaagttcagcttcctgggtttcttctctctgcttctgtaactactgctggctttttttacttacttttccctcgcttctatgccactctgctttgtggaacaacctttgtgtgtcgggccattctagctgtgttctctggtaagaacagattcaaagtcctggctgggcatgctggctcatgcctgtaattccagtgctttgggaggttgaagtgggaggatcgcttgagcccaggagttggaagccagcctgggcaacacagcaagacctcatctctaccaaaaagaaaaatatactagccggacatactgccacatgtctgtggtcccagctaatcaggaggctgacagcggaggattgcttgagcccaggagttagagggtgcagtgagctatgatcatgccactgcagagggagttttaggggattccttatatgagtcagtcttagtatttagctacatcgtcggttacccagctactaaaatactctttctgattcagggatagtggacatgtggacccctggagccagaatatgttcagaattctgagatgatgatccagccaggctgtgggtaatggtcaccaacaggaggaaacactggggagacacagcacggcctggaaggaggagagttaggcaggtgcctcgtttctcatgttgtgttatgagaaccacacggcctccctggccacatataagctgtgaggtttggaaacgtcacactcaagcctaggtgagcaaaccgtgaggtatccaggaaggtgtctaaggacgttgtacagagctgaattggtgtatgaaagccacttatttccatagcctaggaaagagtacaacccgagttgacatgaacagagaaataggcgtaacacatccttggcagtggcccctctctgagagtaatgtgaacttgatggcaaggcccggcttcttctgcaaccctcagaacgttggttttgctctggggtggttcttcctgcagggaggcagagggagcaggcgtgcggagtgcagcactcggcccagctgcctgacttctccagcgccaggtcatgattcccggctggcttcgctggccttgtttctcagcagccctgatgcacatcagtctgtggggct

SEQ ID NO: 3922 - DNA, 1177 bp, Homo sapiens
tgaagtctccctctgttgcctaggctggagtgcagtggcatgatcatagctcactgcagcctccacctcctgggctcaagcaatcctcctgccttagcttccttgagtttctgggactacaggtgtgcaccagcatgcctggctaaagttatttttcacagtagtttcttatttttcttatttgtccatagtatggtttggtttgcctttttaaaatattttcaaaaactgtagaaaatgtactctgaaacaagataagtttctctactctttgacttgttaacctgccttcctttaatgtagggccccctgaaaaattattttacattctacagaagatgaaacattcattcagttgggtctagatataatgctttgttttacaaattatttcacaccatattcttttggaaaaatactcaattacttctttaaactcaaactcctgaagacctcaggatttttgaatattggaagcacaccaccatgcctgggtaatcttttttaattttttgtatttttttttttttagagatggagtctccctatgtatcccaggctggtctggaactcctgggctcaagtgatcctccgattttggcctcccagagtgctgggattataggcctgagccactgtgcctagcttcagtgtgcatttttaattattccagaaaatatactcagtttactcttaattacctaggagtgaattgacgaggtcataggttaattattaaactttttttaattaaaatttttactttagattcagggggtacatatgcaagtttcttacaaggggatattgcatgattctgagatttgggcttctattaatcctgtcacccagacagtgaacatagtacccaataggaagtttttcaggcctttcccccattccttctcttcttccttttggagtccctagtgtctattgttcccattttttacgtctgtgtgtacccaagatttaacgcccacttataagtgggaacatgtgttatttggttttctgttttttatgttaattcacttagggtgattgactccagctgcatccatgtttctgcaaaagacatgattttgctctttttgtggctgtgtagtattccatggtgtatatgtaccacattttctttatctagtccactgctgatggttacctgtgttgattt

SEQ ID NO: 3923 - DNA, 1194 bp, Homo sapiens
aaaaaagactgaaaacttgtttgatttacaaatagaaattactcgagtatgtgatatgaaatgaattaactcagttttccaacaagttgtaggagttctttttccattttgaagataagttcgtattagagattctgtttctcttttcagaagcattagacatttgcttatattagccacttcccaaaatagtgtcatattttctcgacttcttaattattccaaaaagcaaaacttagtgtaccactaagccaagtacttgggttttcagattccttccaaactcacattttaaagtttttatttttatttttagggaattcaagtttggaccaatgctaaggaatgctttagcaagatgtaatcctgtgaattgaatttctcttcaatcaaagtgccccaaaacagaagcacaagtaaataaaagaaatttaagtcactacctagtatacataaacatatacaataagttaaataaattcagctttctttaacttaattgtggtcgtgttaatgtagcacaaaaaatatattttaatgaagattaaatattataatttgaggttttggggactggtgctgattccaaaaagttaatttaataatatataccaacagattgtttgtcacgcttctgaaccaatgactgaatgtcaagatgttcgttaatttctagatgtttgtttcaagaccagctgtttcagatctattaatgtagggaatttttccctaagattgaattcctatatttacttggtaagatccactaatctgttatagggagttgttttctcttgccttatagttgagctatttggtttgacaaagctcagcagaaacttgatgtgaaaaatctacgattttcttctacattcattgatgccccttgtaatgtttgcatacactagaaaatgccttcaatttgtgttttaccagaattttgatactggtcagaaattttatactgccaacaaagaagactcaacttctcagatctataatgggatacattgtcatcctctagcaactcctatatagaaagttttaactgaatatgttacatataagaattaaattcttctcaaataattcttaacctcagtaatgagcctaaatttactctgcttggctctctacacatggcatttcagggtataagatgtagcatttcaatgtgtaagatatatgtactaa

SEQ ID NO: 3924 - DNA, 1220 bp, Homo sapiens
accatgctgatttggttactacagctttgtagtatattttgaagtcactatgatgcttcaagctttattctttttgctcaggattgctttggctatttggggtctattgtagttacatataaattttagaattgttttttctatttctgtgaagaatgacattggtattttggtagtgattgcattgaatctgtaaattgcgttgggtaaaattgtcattttcattgaaattcttccattcctcaaacataatgtatctttccatcggctttcatttttatttccctaacctcttctcaggtggctgtctaggctgcctttgtgtttctccagctgagctcttgttcccatcctgtgtcagtttctccatggttttctctgtaggagttcttcattctttttgcacacttatcctttgtctcttgtattgggtccaactattttctcctaggcttttgcttgcttttaaattttatttagaagttttgtcctacagaatatttaaactttgatgtagctaaattaatcatttttcccctttggtttttgctttctattgtgtgtgtgtgtgtgtgtgtgtgtgtcccttacccttaaggaatttaaatccctgatcgtgtgtgggtgtgtgtgtgtgtgtgtgtgtgtgtgtttcccttaccttaaggagtttaaatccctgatttaggttcaaatttttttctggctgtccacttccctggttgctcaggacatccaagccctgcctttctggcagagggagctgggaaaagttaaccacctctctttgttcctgtccataagccttgggcgtctgggtgcctgtagcattgctcgggtgaccactggccttggcaagaacagtttgcatcaggagaagaggaggggaggtgagaacacactgtgggcatgattctttgtatagttttgccatgaagaggaggaggggaatgaagtgagagatagcttgacgtcaaggctgggtttatagaggcagatcctagagcaagtttctgttctcatcagatgatcccacagaggtagaggggagaaactgaggaggcaggagagaggggttccttgtaggtgcgaccccttgagaggaccctggtagggtcccaggcctaggggagacactggcctttctggtgctcttttaattctctgtttcctcttctgcgtaaagtgatcgttaatagtctagccttcccacagtcccg

SEQ ID NO: 3925 - DNA, 1287 bp, Homo sapiens
aagctgagatcacaccactgtactccagcctgggcaacagagtgtgactctatctcaaaggaaaaaaaaaaaggctgggtgctgtggctcatgcctgtaatcccagcattttgggaggccgaggtgggcagatcacctgaggtcaggagttcaagaccagcctgaccaacatggtgaaaccccgtccctactgaaaatacaaaaattagccgggcgtggtggcacgtgcctgtaatcccagctactcgggaggctgaggtagaagaatcgcttgaacccgggaggtggaggttgcatgagccaagatcatgccattgcaccccagccggggtgacaagagtgagactccatctaaaaacaaaacaaaacaaaacaaaacaaacaaacaaaactaaaaaacgaaatcatgctatgaacctcaaatatacacagtaaaatttattaaaaaaaaaaaaaaaagaagagcaaagcagagctctgagcagcttcctgccccagcatccctggttctgctgctttcttcttcccaggcagccgtgtcacacagacctgcagctgagatgggtgccatctccctgggttgcttctgcagaggaggcctctcctccccagtggagcctcctacctgccggctattgactgagtgtccagctgaggacagcatccctgcagtgcatttcttgcccactgatgtgatgtgttcatgactcccagcctctctgtttgctctgccactaatacaaggaggtgccccagcctctgggcccctgcagctgtgccagcggatggtgctgttttgtattccttaatttgtgcagcaccagctgcgtgcaggcactgtgcttggcaccggggctgtaataggacccagacagatgcgtgcctgccctggccaggctcatgctctgcaggtggggtcagaggtcaacatgcagtagaggaaaggacagcagatggggtgcacaggcaggctgtggttttatacggggcgatcagggaggcaccccagagaagggaacacaggcctgcaggaaatgaggtgtggagtgggcagcaggaagggcagtccagggggcagtggggcacaggcctggtgtgtacaggccagaaaggaaaggcaggtggccgtgtgaagccgcaaggggtgggggggagtggggaggcactggccgggtcttgcttcttgcagcaaagcatgctttgggcctacccaggtccctgccacctggggtcccaatgcccctacctgccctggagggaccggccccaccagccctctgttccttg

SEQ ID NO: 3926 - DNA, 1421 bp, Homo sapiens
gctttgaagccagaaagacatggatgcaagtcttactttgcttcttgctgttaccagttggcctgaccttaggaaatgttatttaatctctctccagttgtttcccctggagaaagccctgtcagcctgaggatccaagacgcgtacgtaaagtgtctgatttcagccagtgtcccttcctgtcccttcctggggtgtgtgtcggttgccctgagcgaccggccatgggactctgtcgtgataaccaagcttcagggtgtgggaagaggacagtcagtgcttccttggggcatcactcggtaacatcatgggcataaacaaaagtactcagtcttcaaggtcataaagtaaccagagtgtattcctttttttttcagatctcttacctcagctagaagctccgagttctcttactcccagcagtgaactcagcagcccaggccaaagtgagctcactaacatggatcttgctgcactcttctctgacacacctgccaatgctagtggttctgcaggtgggtcggatgaggctctgaactccggaatcctgactattgacgtcacttctgtgagctcctctctgggagggaacctccctgctaataatagctccctagggccgatggaacccctggtcctggtggcccacagtgatattcccccaagcctggacagccctctggttctcgggacagcagccacggttctgcagcagggcagcttcagtgtggatgacgtgcagactgtgagtgcaggagcattaggctgtctggtggctctgcccatgaagaacttgagtgacgacccactggctttgacctccaatagtaacttagcagcacatatcaccacaccgacctcttcgagcaccccccgagaaaatgccagtgtcccggaactgctggctccaatcaaggtggagccggactcgccttctcgcccaggagcagttgggcagcaggaaggaagccatgggctgccccagtccacgttgcccagtccagcagagcagcacggtgcccaggacacagagctcagtgcaggcactggcaacttctatttggtatgaagcactctattcagtcaccaccatataggtcacttctctcatactcggtcttgaggatattctggattaatcctttctatgcagacgtttctggtttacaaaaggacgcagccctggactacaagtctggaactgacaagttcttatgaccttgacaaatcaccttaacccatctgagccttaaattctcatttatttcctgcataaggagatttggctaaatgctttctgaggtcctttggagtcctgtggctccatggtaatgtgctcctttccttgaagattgggggttttgtaatgttgagatactttgcctctatgcttgtcagctcatgaccagtcctagaagagg

SEQ ID NO: 3927 - DNA, 1199 bp, Homo sapiens
ctcttttgcactctctgccactttcttgcctttgaccctctaatccctcccatgtcttttgttttttgagacagggtccctctctgtcaccctgactggagtgcagtggtgtgatcatggctcactgcaacctcaggctcctgctcaagtgatcctcccaccccagtctccagagtagctgagcccacaggcatccaccaccatgcccagctaatttttgcattttttatagagacagggtttcactatgttgctcaggctggttttgaactgctggccttaagcagtctgcccacctcagcctcccaaagtgctgggattacaggcatgagccaccatgccctgcccctcccatgtctttgaaatgctttcctggaagaatgtttcactttgttgactttccctagcatatgtcccctaagcctgtgtctctcactgggacttttgtcctgaattctgaacctgcccctcctgtgtttccgtctgcctcagctattctatctccaagtaacaaaggctagagcagagttgtgtttcaggagtggactgggagtaacgagggctggagagggcagggttagagaggaaagtgacggtggcctggtgacctgtgaggggaatgctgagtgtgtgagtgcctagtcattgggcagctttgcagcatgggactaggaaacctaccccactaggccttctccacagtccaggatacagaagtgcctggcagctgtggtggcggcccctctggggagcacacccatgtgccctattctctgggccctggtgcggttgtcgctcctcaccgggcctggctgatggcatcctagctggccctagagttacttctgctgctcagtccgtggaggctgtgtgtgtcaccaactgggtcctcacgtctcctgtgtgaccagcagcaccacagcagagcaccggctttggggcgcagctgtgtcacagctgccgcgttggcaagggacaggcctccatgcctcgcacagagtttggtgaggggttgggctcagggcagttctgtggcctttgctttcttgtgatcctatttagaagtggtcatgaagcccctccttgggatcttggacactgatctttcacagtttacagcagttgccgttcagctttatatttaaataaattgcccttctggctttagtagtgtcttgaggacacggaatgtgcgtgcc

SEQ ID NO: 3928 - DNA, 1205 bp, Homo sapiens
gattgcagcttaagttttggtcaccctcatgcactctctcaggtcacttgttttgcgagaaggcagctatcatgttttgatgacgctcaggaatcctatggagaggcccatatggtgaagaactgaagtctccaaccaacagtcagcaagaaactgaggtctgccaatgtctgtgtgaacgagcttggaaatgaatgctactccagtcaagccatccctgggccagcagcttgatagtaacctcttgagagactttgaaccagaaccattcagttggttactccaaattcctgatccttagaaactgtgagagaataaatatttgcaatttaaactgctaattttcagagtaatttgctacacagcaatagataactaatacattcaccaaggaaaattaaactagtacagacctgatgagttaataaaatgtcttggggactttattcctaggacagataaaataaacctcatatagattttaaaattcaacaaaaagggattagggcacagacttagcactgaacttacttcataattgcaaacaaggaaaccccaagcagagaagttcatggggtctagtggagtgccctctgagttggtgatcctgagctgtggctgtgacaggttcctgctaaacttcaattaaagcatccttgtcaaagcttgcaccaaagattactagggaaacctgttcatcaaacaaagctgtgtttattaagcttagcaaggaagagctcagccttgacagagtcgagtctcagtatcattgcaaatgggagttaggagagagtactttgtgagactagggttagtcatagggtagttataggagagagattagtaagtgtgtcttggcagcagtgggtcagagtttgaaaactatttgctggaatggtctgttagtggtcttatttttagaattgggggtatacgagaccatattgagtttctgttactgtagtcttttcttgaaacatggatctgaatgagctagtgtaaaagattttcaacttagataatttgttgtacaacatggcttagtatggttcatctatttttgagtaatagtacacttgttaagtagttggctttattttccaatggagaaccatccagtgcttctaagcagggaataacaatgagacctgttaggattttattgcaaaagattattaaatatttattgagacttatgtttcgag

SEQ ID NO: 3929 - DNA, 1211 bp, Homo sapiens
ccccttccgcaccttctcggccagcgactggggcctcacccacctagtggtgcatgagcagacaggcgaggtgtatgtgggcgcagtgaaccgcatctataagctgtcggggaacctgacactgctgcgggcccacgtcacgggccctgtggaggacaacgagaagtgctacccgccgcccagcgtgcagtcctgcccccacggcctgggcagtactgacaacgtcaacaagctgctgctgctggactatgccgctaaccgcctgctggcctgtggcagcgcctcccagggcatctgccagttcctgcgtctggacgatctcttcaaactgggtgagccacaccaccgtaaggagcactacctgtccagcgtgcaggaggcaggcagcatggcgggcgtgctcattgccgggccaccgggccagggccaggccaagctcttcgtgggcacacccatcgatggcaagtccgagtacttccccacactgtccagccgtcggctcatggccaacgaggaggatgccgacatgttcggcttcgtgtaccaggatgagtttgtgtcatcacagctcaagatcccttcggacacgctgtccaagttcccggcctttgacatctactatgtgtacagcttccgcagcgagcagtttgtctactacctcacgctgcagctagacacacagctgacctcgcctgatgccgccggcgagcacttcttcacgtccaagatcgtgcggctctgtgtggacgaccccaaattctactcgtacgttgagttccccattggctgcgagcaggcgggtgtggagtaccgcctggtgcaggatgcctacctgagccggcccggccgtgccctggcccaccagctgggcctggctgaggacgaggacgtgctgttcactgtgttcgcccagggccagaagaaccgcgtgaagccaccaaaggagtcagcactgtgcctgttcacgctcagggccatcaaggagaagattaaggagcgcatccagtcctgctaccgtggtgagggcaagctctccctgccgtggctgctcaacaaggagctgggctgcatcaactcggtgagttgggcaggggcgcccctcctcccgcggccccatcccctccagggacgacggcatcggtgtcagatgcacgcccagtggtgcctgctgtgtgcctggcctggcttttggcttggccatccccatggct

SEQ ID NO: 3930 - DNA, 1115 bp, Homo sapiens
ctgaagtgctgggattacaggcattagctaccgcacccagcccacacttagacttctgcactgattctaccagcagctagagctagtggctgacctgtgctttccccatcccatctcaccaccctcctcctccccaccgacacccatgtgcatagcaggcacaagtcagtgttcacacccactgacaccgcaaggaaaagaaaggagccccagaatattaacaataaacttgcccttgaaagccagcatgtggggcaagctctctgcagcctggcccctttgatatagtcccctacttcctgggaataatgcctggcctcctcctctcactcaatacattccctgcttggtccccaaagacattcgagtttgtactccttggcatggtgcctcacagaggctgtcagcagccccctcgctgtaatacgcctccactggcctccaccttccagcttcccaaaaggcctccgaccggggctctctcccctgtccctttcctatgccttcgtaactgtcgcccttctttctgtctcctcgcacaggtgatctgcaaggactggagcaatctggctgggaaaaactacatcattctgaacatgacagagaacatagactgtgtgagtgcccagccaggctccgaaccgcagggaaaggctgcaggcagtggacagggtggggcagagggcaggctggggggacaagcagtgcgtgggagaaggcttagtccttcagttggtggcccagggatataccagcagccatcaacattacacacagagagctttcgtattttaaaatgtccaaaggctctttggttcttgcttccctctctttttaatttaaatgaatactttgttcatgtgtgcaccatcttacctctcccgtgatattgaaacctttctgtcttttttagagttgttttcttcctgtataggttgcttttctccgttttgggtctcagccttttcatatatatacatgctctccacacatgtctggtggagtttgttcatagctctctctatcgaaaaagtggctggaagctttgagcatagtgctagggttgtcagctatggcttctcatgagagtggtctggctgggccgtatcacttag

SEQ ID NO: 3931 - DNA, 1500 bp, Homo sapiens
agctctcatcatggcgcgtgctgctgcggcatatggacttttaataatgtttttgaatttcgtattctttcattccactgtgtaaagtgctagacattttccaatttaaaattttgctttttatcctggcactggcaaaaagaactgtgaaagtgaaattttattcagccgactgccagagaagtgggaatggtataggattgtccccaagtgtccatgtaacttttgttttaacctttgcaccttctcagtgctgtatgcggctgcagccgtctcacctgtttccccacaaagggaatttctcactctggttggaagcacaaacactgaaatgtctacgtttcattttggcagtagggtgtgaagctgggagcagatcatgtatttcccggagacgtgggaccttgctggcatgtctccttcacaatcaggcgtgggaatatctggcttaggactgtttctctctaagacaccattgttttcccttattttaaaagtgatttttttaaggacagaacttcttccaaaagagagggatggctttcccagaagacactcctggccatctgtggatttgtctgtgcacctattggctcttctagctgactcttctggttgggcttagagtctgcctgtttctgctagctccgtgtttagtccacttgggtcatcagctctgccaagctgagcctggccaagctaggtggacagacccttgcagtgatgtccgtttgtccagattctgccagtcatcactggacacgtctcctcgcagctgccctagcaaggggagacattgtggtagctatcagacatggacagaaactgacttagtgctcacaagcccctacaccttctgggctgaagatcacccagctgtgttcagaattttcttactgtgcttaggactgcacgcaagtgagcagacaccaccgacttcctttctgcgtcaccagtgtcgtcagcagagagaggacagcacaggctcaaggttggtagtgaagtcaggttcggggtgcatgggctgtggtggtgttgatcagttgctccagtgtttgaaataagaagactcatgtttatgtctggaataagttctgtttgtgctgacaggtggcctaggtcctggagatgagcaccctctctctggcctttagggagtcccctcttaggacaggcactgcccagcagcaagggcagcagagttgggtgctaagatcctgaggagctcgaggtttcgagctggctttagacattggtgggaccaaggatgttttgcaggatgccctgatcctaagaagggggcctgggggtgcgtgcagcctgtcggggagaccccactctgacagtgggcacacggcagcctgcaaagcacagggccaccgccacagcccggcagaggggcacactctggagaccttgctggcagtgctagccaggaaacagagtgaccaagggacaagaagggacttgcctaaagccacccagcaactcagcagcaga

SEQ ID NO: 3932 - DNA, 1175 bp, Homo sapiens
cagagtcgcgcccgtggcgtttcgggcccaggctccgcccccgccgcgctgcccctccccccatgggggcgtggccaggcctagcccagggatccgagattccaagtcacacccagcacgacttgggaagtcgcgacgaaagtgcgcgacttcccagcaagcgaggttgaagtcccggcaggcagggaggaaggcgtgtgtccccccgtgcatgcggggaaggagcagtgggggaaggctgagttgggctttcaattaaaaaaaatgtgcatacacttagttttttgatgcaaaattgccaaaggcgtgtaccgtgaaaacctacctcgacacctgccccctgcctcctgttccctttccggaagcgcctgccttacaccggtgtgttcctctagagatggccaggacctgggtgaggcagcacacactcacaggaccttcccaacactcattatgaaacatatcacatggaaaactgcaagaattacaggcaatcgcctctcagcctttggctaagatcaagtgtagtgttcttatcactttaatatctgctatctgaggacagtatgttaaatggatttttggagcagggagatggaataggaccttgctctttccactccatgcatccacctggtattgcagtacctccaggaatagtgcaccccctttgggggaataaaaaaaaaggattgcaggtgagcccccatatccctgtcatctaggcactgcactgcccatccccctgtctgcctgccagtcagtcttgtcagtcttctgtgcatttcaaagtgagttgcagatacaacaacctctgtaaatagttaagcatgtgtataattatctagagttcagtacttgattatggttttttaagtttttttttttttttttttttttgagacggagtttcgctcctgttgcccaggctggaatgcaatggcgccatctcagcttactgcaaccaccgcctcccgggttcaagtgattctcctgcctcagcctcccaagtagctgggattataagcgcatgccaccacacccagctaattttgtgtttttagtagagatggggtttctccatgttggtcaggctggtcttgaactcctgacctcaggtgatccacctgctttggcctcccacagtgccagaattacaggcatgagccactgtg

SEQ ID NO: 3933 - DNA, 1175 bp, Homo sapiens
gaagtcatcccccttcagtgcagctgccctggctggacacatggcacctgtgggccacctcccgcccttcagccactccggacacatcctgcccactccgacgcccatccacccctcctccagcctctccttcggccacccccacccgtccagcatggtgaccgccatgggctagggaacagatggacgtcgaggaccgggcactcccgggatgggtggaccaaacccttagcagcccagcatttcccgaaggccgacaccactcctgccagcccggctcggcccagcaccccctctcctggagggcgcccagcagcctgccagcagttactgtgaatgttccccaccgctgagaggctgcctccgcacctgaccgctgcccaggtggggtttcctgcatggacagttgtttggagaacaacaaggacaactttatgtagagaaaaggaggggacgggacagacgaaggcaaccatttttagaaggaaaaaggattaggcaaaaataatttattttgctcttgtttctaacaaggacttggagacttggtggtctgagctgtcccaagtcctccggttcttcctcgggattggcgggtccacttgccagggctctgggggcagatttgtggggacctcagcctgcaccctcttctcctctggcttccctctctgaaatagccgaactccaggctgggctgagccaaagccagagtggccacggcccagggagggtgagctggtgcctgctttgacgggccaggccctggagggcagagacaatcacgggcggtcctgcacagattcccaggccagggctgggtcacaggaaggaaacaacattttcttgaaaggggaaacgtctcccagatcgctcccttggctttgaggccgaagctgctgtgactgtgtccccttactgagcgcaagccacagcctgtcttgtcaggtggaccctgtaaatacatcctttttctgctaacccttcaaccccctcgcctcctactctgagacaaaagaaaaaatattaaaaaaatgcataggcttaactcgctgatgagttaattgttttatttttaaactctttttgggtccagttgattgtacgtagccacaggagccctgctatgaaaggaataaaacctacacacaaggttggagctttgcaattctttt

SEQ ID NO: 3934 - DNA, 1200 bp, Homo sapiens
ggtaattgggtaactggaggcggcttctccggccgggcggccccgccaccgcgacgccgagcccctgacgtcacccgattcgccaggaaatgaactttttaataatccgaggagggaggaaagccctcggtcccctcggctccgggggcgcccggctgggcccagctccgcgggcgcgcccccgtcaccccctcccaggccagttcagggcagcgccaaggggccgcgggctcaggctgaggcctcctcctgcctaggcgtctggcgtccgtttgtctgtccgaggcctcagcgcaggtaaagcgcggggctggggggcgcagagctccattgggctgggaaccagcgcgtctcgtgcccttgggggacccgcctgcccgagccgcctgctaagcctcccgctcccctccacgctggagcgcgcggagcccggtctgctcggaactccactctgcgggagcggaggccggcgccagcccgggaagccgcgcagggggcgggaggccgagcgcgaggcccttggcgccgggcctccgcggccaggccgggcaggtgagcagtctccgtgcctcccggttggcgttcccctcaacgcgtgcggtcccgccggggcccactgtctctccgtccgtctgtctctcaacttttcccatcctttagcttacgattcttcatcaactcgtaaaatgagatcgccgcggagctcgagcctatttggcgtctccggagactagcaagaccctctgaaagacaccgcgtccccagggataatcccccgtgtccggcaaagctgccccgctcgagcgcgaaccctgggacccagcgcgggaggcagaccagcagctggccgctgggctgtgaacgccaggaccgagcggaagcttcccgcccggccgcgatcggtgccgcggctctcagggaagtggctacgcgcgtccctcgggaaagcaggtaattcgcctttttctcccaccggcgcggtaaaaattaccctccccctccccgttccgtgtgtattcccagtttcagcgcagcgagctcggcgtctaacccctccgcggcagggtcccggccactgcggtagtggaggtggccagcctggctgagtcccctgcccaaacgtcagccctgtgctgccgcctgcctgacgcagagcggagcgagggaggggatttaattaccccgctcggcagctcagaa

SEQ ID NO: 3935 - DNA, 1176 bp, Homo sapiens
gctggatgcacaggtcaaggagctggtgctgaagtcggcggtggaggctgagcgcctggtggctggcaagctcaagaaagacacgtacattgagaatgagaagctcatctcaggaaagcgccaggagctggtcaccaagatcgaccacatcctggatgccctgtagcccctgcccgcatcctccagggggcccagggtgcctgcactttgctgtggcaggcagattgggtggtagtgggaggttgtgcatggaggccagtgaaagctgacatctgtaaaaggccttcaaggaagagaaaccaggccctgcgtcaggcagtgtgagtttgccgtttgtccttaactttctttttttttttttttaaaaaaagaaaactttaaaaaaactcccattaaaaacaaaacatctttgtgttttgaacaaaggaattttcaatatttgattggtattctgttctgaagtctaagatatttttcagcctataaagccccctgttttatgcccttctaattctgatgtttgggtattgtgtgagtgcatgtgtttttttttttttttttaaagcgtgtgtgaacaaatggaaataaagcagggactgtgaacatttgtttttggtctgttgaagatctctcataatttaattcttaattttgggaatagtgcttttatcaagtgctttttattcattaaataatggatttgcttctcagcaggtttgcaaggcaagcatttacattttacatattagaacactgagttattctagtaccagagtgttgaaagtggtgccagagtgttgaaagagttgacgtggcttatgtcacagaatggagtagtggagtgaggcctccatttttgtagtttttgcatccttcctgtgagtcatgttttactcagcatcaaggaaacagtgatgagcaaagcagagatggttcctctcaagaggcaagggattgaaaggtcatgtggggaatcgacagtgccagtgagtgccaggctttctgcccctctttcctctctgcaggagttcgctccctgtctccacctaatgaattcctgctcagcctcaggatgtgttacttaaggttactgtgtcagggagccatccgtggcctgccacactcagtcaagtcctgtggtaccctctcgttttcctttgtacctcttctccacct

SEQ ID NO: 3936 - DNA, 1406 bp, Homo sapiens
tccaggagtttaaggctgcagtggtttgtgttcgtggcactgcactccagcctgggtggcagagcaagaccctgtctcaagaaaaaagaaattgaactctccccaaaaatgatgtgagaatttaactgtggaggagaccagatactcttgggtgatgtgacctgtgatacttctcctagtagacactgaatgatgagaagctggggatcataggaatagctgtatttttcaaatgtttgttggtaacgagtgaggaacctgatgcatccagctccagagtaaggtttatttgccatggtaacactggataagtacattgttgcctgtatttccaagtaatttatcatttctgtattttagtaaacatacatatatacagaaaagtgcacaaataagtggacggcttagagaatttttataaacccagaggccctcttagtctcctttaagtcattatcatcgatgccctgatgcttgcgtagtgagtcttctgatttctagaactgtagactaattttgcctgatttggattttgtgtaaatggaatcatacactgtgtattcttgcgtatctggtttctttgactcagtgttgtttgtgagactttgtgttgttgtgtacagttgtaactggagtttccattgctcagtagtattatgtgatatatcataatgtatttaagtaaaaagactgagttttagggtatgtgtctgtattcatttgctagggctgccgtaacaagtatcacagatagagtggcttaaacagaaatttattttctcaattctgaaggttagaaatctgaggtcaagctgtcgggaggattagtttcttctgaagcctctccttggtttgtaaatgactgtcttctcttccctgtatcttcacaggatctttcctctgtattggctgtgtcctattctccttttcttttaggacaccagtcgtattggattgaggcccacccttatgacctcacttaacctcagttacttctttaaaggccctgtctgcaaataagtcacattctgatatattggggattagaatttcaacttaaaaattttaggtggacacagttcacttcataagagtatctattctgctctagtagatatggccagttttcaaaagttgtaccagcgtattcttccaccagcagtatataagaagtccaaatattccacatccttgctagcacttgtaactttttctctctaattttagttccctctggtagaaagccatttctttatggcaccatggtacagcttgtttactcaccagtgtaggggaacctcaagggactggggaaggttatcctggagtaaaacgtgtcagtttgagactacctcttgtaaatgctacttaaatccattggggttaaaagcagaggttcggccagg

SEQ ID NO: 3937 - DNA, 1242 bp, Homo sapiens
agcatctgaactggatgtggtagagctcccagatcatgatctgattgagaatgtccatgaacttctgtcctgattgctcagtgcagactgctgcttcttctggcaagactcctctcttcacattgacctggagttgtcacaaaatctgtttttctcttgctactcccctgagcatggcaccttctgccagagcgctcccttaactgtgtgggcaggctctgcttcacagctccccgcccactctgcccaagcagaagtgagcccctcctgggcagaaagtgcccgcaatgagggctgaaatgtttctattccctgagtaaccaacctttctctgtttccttgtccaggaaacggaggtggagctgtacaacgaatttcctgaacctatcaaactggacaagaatgaccgggccaaggcctcggcagaaagctgcagttgctgagggggcagtgagagttgagcacagagtccttcacaaaccaagaacacacgtaggccttcaacacaattcccctctcctcttccaaacaaaacatacattgatctctcacatccagctgccaaaagaaaaccccatcaaacacagttacaccccacatatctctcacacacacacacacacgcacacacacacacacagatctgacgtaatcaaactccagcccttgcccgtgatggctccttggggtctgcctgcccacccacatgagcccgcgagtatggcagcaggacaagccagcggtggaagtcattctgatatggagttggcattggaagcttattctttttgttcactggagagagagagaactgtttacagttaatctgtgtctaattatctgattttttttattggtcttgtggtctttttaccccccctttcccctccctccttgaaggctaccccttgggaaggctggtgccccatgccccattacaggctcacacccagtctgatcaggctgagttttgtatgtatctatctgttaatgcttgttacttttaactaatcagatctttttacagtatccatttattatgtaatgcttcttagaaaagaatcttatagtacatgttaatatatgcaaccaattaaaatgtataaattagtgtaagaaattcttggattatgtgtttaagtcctgtaatgcaggcctgtaaggtggagggttgaaccctgtttggattgcagagtgttactcagaattgggaaatccagctagcggcagtattctgtacag

SEQ ID NO: 3938 - DNA, 1205 bp, Homo sapiens
aatggtacacccctatagtcccagctactacagaggaggatccttgagcctgggggttggaggctgctgtgccctatgatagtgcctgttaatagcactccagcctgggcaacatagcaagatcttgattcttacaaaagagacagaaaaaaaaaaataaagtgggaaaatgaaagatagacagagacagtaagtatctcttgaaaaataggaggaagcatatttctttttttgtcattgttgttgttgttgtttgagatagggtctttgtcacccaggctggagtgcagtggggtgatgacggctcactgtactcttgaccttccaggctcagatgatcgtcctacctcagcctcttaaaaagcgtatttcttaatgaatatgaataatacttctatattttactcacttgccttctctgcttaagatagttcttttttttttaaaagcttataaataacacaaatttatttctcacagttctagaggttggaagtccacagattcactgtctggtgagggcctgtttcctggtttgtagatggtatcttcttgctgggtccttacactgtggaaaggctgagagatttccagtgatctctgcctcctggggtttatggcctgtgtcaactcctccctttgaaagtgggctggacctagtgactttattctacccaatagactatgactaaaggtgatgggatgctcctttgtaataaggttaccaaaaattattacttccctctgccagcagactctctctcttgccttcttggttggcacactggggagaagcgagctgcagcgttggagaggcccatgtggcaagggactgagagcagcctctggccaacagccggtaagcaaccagtgagcaaccgaggccctcagtcccacagcatgtgaggaactgagtcctgccaatgatcatgtgatactgaaggagggtctttctttagctgatcctacagatgagaatctagcccttgtgctgcctcatgagagaccctggagcagaggccccagctgagctatgcctggattcctacccacagaaactggaagacaataaaagtgtcgtttatgtttttttattctggtaaaaatcatataacatgaaatttttccattctaaccattaaaaacatgtctttttgtgtgtgtgagacagggtttcgttctgtcacccaggctagagtgcagtg

SEQ ID NO: 3939 - DNA, 1173 bp, Homo sapiens
cttcaactaccaaaatgttatctccacttccccctcacccgtagaggatcctggccacagacagtttcaagtagtgtcagatttttgttgcttgggcggctgttggtagagtgggcagtgcccgcgccatggggtgctctgtgggcttctccaggagcagggagggtggaggggagggatggggggcacaggagctgggagccccgtctccaggaaaaggagaggggttaagatgcaccgaggctgtagctgggctacttgatcttgctgaaagtgtttctaaagatagcaccacttttttttttaaagcttttatatattaaaaaacgtatcatgcaccaactgtgaatagctgccgcttgcgcagaggacccggggaggggtcccgagaggctccccatgcaacactggaaatgactgttccagagagcgggcagacctggcagagcgcccctggcgcctgagactaccacccactccgttcctgccagaaacgaccctctgtggccgatgggccatgcgggcccctcgcagccaactcagccagtgttgggactggctcagagcccatgggggctggaggggggcagctgggactctggaatcttctttataataaaagccttacggacaaacctactgtgggctccagcctttgtcctgagatagccaagcgggagaatgggcagtttctttaccagtttgtgagagagaggagggagggagcctgccgtccctcctgtctcagctgcactcttgaggtttgggcagacacctgactagcttctgagaaggcagtcagaggccaggagatgaaacgagacggtgcaggctgcatgcatgctgtgggcccggcccagagctgccattccttaagctctgaggacaccccgggacctccaggaagatttcacagctgctgtgtgctgcctgcaactgggtgggccctgctcctaacctcatctctaacaagcccgtcaggaatgtgctagcatccctgtatgacagacgcagcaacttgaggctcagcacagctgaagcaattctcaaggtcacacaaccaggaagggacagaataaggaccaggtcccatggtccttccgggccagagtctccacagtggtccccaaaatgggcggggaggccaaaggtgaccaccctggaaagggaact

SEQ ID NO: 3940 - DNA, 1350 bp, Homo sapiens
ggtggtatctggccctctgaaatgtcctcctggtattcagagccctccctgtgcctttcctatgggctgtttggaagcccaaggtttctcttttctgaatcgcttaacacgggtcagtcaggaagctggagtttcagccctgggggcatctcagggagtgggtgcagcccccctgttctactattgggaaaggtgaggcccagagacagggaggagctgggcctggagttcagcctcccagcctcgtctgaggccagggagcactcatggaggaaattggccccaccactgggcgggttatgccatctgcctgtgcccaccttcctcatctttaaacagggccaatgcgacctgcccataggatggagggtggtggcgagtgggaggcacggggtggggctggtggccgttaggactgaatgactagtgttttctcctcaggaaggcaggactgaaccaggcaggctggggtgcagtgagtcctcctgcctcttctctgaaatgcccctgtgtcaccctctccttctgtttcctctgcagagccctcaggactgcccccggaccctgctctcacccctggcacccgtgcctacgggtggctcccagaacatcctggtgcctctggccaacactgcctttttccaggtaagtagaagccaggccagcgccgggtggggccaggaggaggccggggagcacgcaggccactaactgcccccatgtcctggtgtgacccctgctctgggcccactgcagtgctttcgcacctgtgtgggctttgcttttctttctctgagtttccaccttctgcatgaggaagccccactctgactgcacggggctgcaagaagaggaagtggtgagggccaggccaagggggacagctgggggccaacagctgccaagggaaagccagtgcccccaggctctcctgccccgtgccacagccggagggtggacgctgccctatcctgtcctcccttagcctgagctgtgaccctggacacacccacccaccgccgagcccactgccccgtgggtggcttccatgtcttccctgcagaatgaccagagaaccccttggccaccccattccccattgtccagatggggaagatgaggcccaggaaggaaaagtagatgacgccagatcacacaacacagggctggacttgtgcttagctctggactccccaaccagtgctcgtctttgcaactagccccgcccccaccatctgggctgggggttggggacgcagctcctttctggacccctcctggaggcgcgtcctgggtgggaagcgttgacgagtcctggaggcgtgccagccacccccctccccacctccc

SEQ ID NO: 3941 - DNA, 1239 bp, Homo sapiens
cagaggctcagagcaggactcagggaggtcaccggaaggcagcattggaaccatctttagggcaaagctttaaagatttttctttttaaatttcttgtctgtgctttttgcaagcttaagccactgatgatgtgcctgcctggtttttgcacaggctcagctagttttcaaaagaaagcaataaatagtgggtccttctgtgcttgggcaaataaacacagttacggccggatgggcttctaggctggggctgtttccagcatgtccctgggggccaagccctgagcccagaggtgtgatgggctggggatgccctggaccaacatacaggagggaatggtcttccggaggatgacggcgggtgacccaggcaaggcacttcgcctctgagcctcattttactcaactataaaatgggtatatccatagtgttttccgcatagaggctgggatgaatcatttgttttaaagtgttcccaaacgccgggcgtggtggcacgtgcctgtagttcccagctacttgggaggctgaggctggaggatcacttgagtccaggagttctaggctgtagtgtgctatgctgatcgggtgtccacactaagttcagcatcaatatggtgacctcccgggagcgggggaccaccaggttgcctaaggaggggtgaactggcccaggtcggaaacggagcaggttaaagtgttcatacagtacctggcccacagtaagtgtccaggaagtgttagccgatactattgtgtttcagacatgactgctgcttatgttattattatgaagtaaaagttacccatgttcaactgctgatcaaaaaagaaagaaagaaaattcagggcaaatcatgcctaccttaaagcttttgagcagccatcctctcacctggacagccctcccagccctcttcattttccaagaccactcttgccccctacactgacatttcctatctgctaacacagctgccaaatgagccctttaaaaatgtaaagcaggtctcccccgattcaagccctcccatggtttccaggacactcagaataaatcctgaatcctaaatcctcccgtgggtcccctcatcttctaactccatttcacacctcccttgcccttgctccttcaccccagccacactggcctcatttctgtgcctcaaatatcacaagctcgttcctgcctcaggacctctggcctggccgctccctctgcccaggaagccattccc

SEQ ID NO: 3942 - DNA, 1138 bp, Homo sapiens
ttcagatattcatgactttgaatatgataaaagcctggggagtactcggttttttaaagttgctcgagccaagcaccgagaaggcctggtcgttgtgaaggtttttgcaattcaggatcccacattgcctttaaccagctataaacaagagctggaggaactgaaaatcaggcttaattctgcacagaattgtctacctttccagaaagcatcagaaaaagcatctgagaaagcagctatgctctttaggcagtatgtgcgagacaatctctatgatcgcatcagtacccgtccattcttgaataacattgagaagcgctggattgctttccagatcctgacagctgtggaccaagcacacaaatctggagttcgtcatggggacatcaagactgagaatgtgatggtcaccagttggaattgggttcttctaactgattttgccagttttaagcccacttatcttccagaagacaacccggcagatttcaattatttctttgacacatcacggaggagaacttgctatattgctcctgaacgttttgttgatggtgggatgtttgccactgagttagaatatatgagagatccttcaactccgcttgtagacttaaatagcaatcagagaacaagaggagagttgaagagagcaatggacatcttttcagcaggtatttgagtgggtcacatttgctaagggagcatgtgtttttcttttaactgttaaacagaaatgtggctttttttagtcaccagatattgaaaagttaatgtcttggtttgtcctcagacgctatttcagttagaggcagcattcctgcattggatatgtttaaatgcctaggaaatgcaaacagcagtttatttacacaaacatataaacatatttgcttgcctacttttattgtatgtgtcaggcactgtcctaagtgctagggatattggtggataatatattttcataatgcttccattttaaagtgaccgtggatattgcaaaaggacatttcaatgcggtgttgattgctgtggtggtgataagcatagggtgctgctataggaacacatagatatttaaattagtcctcatggtggtgttgagtcaagaggtgggatcaagaaaggcctctttaat

SEQ ID NO: 3943 - DNA, 1281 bp, Homo sapiens
gcgcgatctcggcttactgcaaactctgcctcctgggttcatgccattctcctgcctcagcctcccgagtagctgggactacaggtgcctgccaccacgcctggctatttttttgtatttttagtagagacggggtttcaccgtgttatccaggatggtctggatctcctgacctcgtgatccacccgcctcagcctcccaaagtactgggattacaggccgtgagccaccatgcccggcccgatttcatcttaattctaatctgttttataggttcatttcagctcagtgttgattttagctagaaacccaggtgaatctccattttcctgtgaatctccattttaccataacagagaagctgctttttaaaccagtaatttcttcaccttcccacccccacttctatttattaaattttaaaaatgtagcctgatttgggtgtattcttaaagaagtcaagtgtcctttctccatttggtacacagttactggttttttgagtgatatatgtacaagtcacttaaacttcttagagcataaagagagaaagtgaaaacttaatttggagggcatactcgtagaccttgcctgactgtgctcatgtccaggcaggggggacagtgtatgcaagaataatttggagttcctgccagctctaaccagcttcatcagtggctggataaattgcaggactctaaacatttccctgaagaaaaaaagaaaacttaatttggaaatggttctaattgaaaaacctctacttagagtatggattttgatttttaaaaattaaaaatcaaatattttgggctgggcatagtggctcacacctgtaatcccagcactttaggaggctagagtggacagatgacttgaggccaggagtttgagaccagcctgaccaacatagcgaaacttcatctctactaaaaagacaaaaaattagccgtggttgcaggtgctacttgggaggctgaggcctgagaattgcttgaacctgggaggtggggcttgcagtaagccaagatcacaccgctatactccagcctggtaaacagagcgagagtctgtctcaaaaaaaaaaaaaaaaaatcgaatatttcacaggtgatgcaacttgatattgaatacttggttgttttttcatgacaatagtgggaagatagacaatgtagtatgaagggtgtttgaggcagaaggaacaaaatgaacaaaggcatggaagagtggcttatttagggactcatggagtaatctgctatgactaagatttttcag

SEQ ID NO: 3944 - DNA, 1201 bp, Homo sapiens
ggttgagttcttagattggaactcaaaggaataggaatcagaggtgttcaaaattgagttttgggctttggaacattcagggtgctttgtttttctttttggtgtttttttttttttttttttacactgaagtgagatagttggtcctggatgaggtccctgttgaaaatctgataaaaatatgcacaatatacaatatgtgcaaatacataatatttgcctataatttcagaattgaacatgaacatctgaagtcaatttgtggattcccacttcagatctcctccatgtccaatacttgttggtagcccctaatgctcaaaacattcattgacgtgcccagagatctatgggcagctggtggtgtatttttttaaagctggaatattagactgaggatacagcattgagcttcaggtgctgggaagagaatgagtataaatgctctgggaaaaacaaaagatggtacggctaggaggaaactggggatgagtttaaattcgaaaggaatgttagacaccaaaggtatttatgaggtgttttgcaggtcataaaaatggaataaatggttttttgaaggttattggcatcaagggggtgtagctcagtggtagagcatttgactgcagatcaagaggtccctggttcaaatccaggtgccccctatgacatacttttgctcctcttggcagcttcattaaaaatcctggactagggtaaggcaagcaaggtgcgtaaggctcaaaatttaagcagatacttactctcaggttcatgcaagtgccttggctcactagttcccttatagcagagctaccatctcacataaactcaccctgcctctaatatgcacacacaaacccagtcataaaccatgacacatacacacacacgtgtgctttcttacatgtgtctttatctcttctttcctgtatattcaatcttattaaccaggcactttttcctctccctttcttcaagttttaaaatttattttagatttcatggaagagtttataaattctgtaaattttagatttacagaagaattgttaagatagcaatagagaggttttgtataccctttacctaccttgtaacatgttaacatgttacataatcatggtatatttatcaaaactatgaaatgaaatgtttgaggtgatggatatgctaattacccccaatatgatcattatac

SEQ ID NO: 3945 - DNA, 1174 bp, Homo sapiens
cacctctgcacacaagagtgtagacagttccttcaactttctcagattcttgttctttagagaacctggaacattagagctccctgtggacatgaaggagctgtcataaggaagaaggatttgccttgtccattggtttcctagaaggaattaggacacataagtgtaaagttacaggaaaacagcccaaaactcagggaaaggagaaacatgctaataaacctaaaagtggaatcagcttcttcaggaggacttgaattctgtcactggagaaacacaagtagaaatgggaccaacattttgtgagatattcatgactttttgaattatcatctgtaaattatatactactgagtctgttgttacaaatcactgtaaacatagttacatgtggcccatataataaaaattaggaaatatggccaggcgcagtggctcacacctgtaatcccagcactttgggagaccgaggcgggtgggttgcctgagctcaggagttcaagaccagcctgggcaacatggtgaaaccccgtctctactaaaatacaaaaaaaaacaaaaaaaattaaccaggcatggcgatgtgcacctgtagtcccagctactggggaggctgaggcaggagtattgcttgaacccgggagacagaggttgcgttcagccaagatcgtgccactgcactccagcctggcgacagagcgagactctgtctccagaaaaagaaaaaaaattaggaaatatgtattgagatgaaatagaaggtattatttcagacttccttaaaaagtcttctacagagaagtaggatatccacatcatctcccttctaagttttaagaaggcaagaaaaactattattaaatgttcactctttattattgctaacatgttagtgttaggtcaaatctgtggtgatggaattgtatttgtgtttgctgcacatgtatattttagtatgtcggtctccttatacatttttgaccatcttatgaaatttgcagtatgtattttttaccttaaattattataatctatgtttgctttttgtaaagtattattcagcattatatgatttatttgtatagttttttaactgaaaagctacagcccgctttatgacactacacctgggaataatttgtcaggagcccttttagtatacagcgaaggcaag

SEQ ID NO: 3946 - DNA, 1174 bp, Homo sapiens; identical to SEQ ID NO: 3945

SEQ ID NO: 3947 - DNA, 1136 bp, Homo sapiens
gaggtatgcagtgttaatatgcaaatatttatagcttaaacttttaaaacatagaataaaatggttttgttcactcattaatgaaccaagtatagtagattttgattaaatgaagatctcatttttgtttatcggtagttttagctacgatgtcgtttaaaaagctagagctgtcaagaatattgaaattactgccttgtaaatcaaaagactggtgaggaatgtaaaagactctgtctttcttctaaaaattagaagatagttgttaaagaaaatttactttataaccttgttgagcatggtcaaaacttgctgattatatattcctaagcatcaagaattctatatggttcttttttcactgtatttcccttatttgtcaatagcaagaagattctgtcactgagttaacagtggaagattctggtgaaagcttggaagacctcatggccaaaatgaagaatatgtagataatggactgggatatattgtatttctcatgttaaagcctcttcccttgaaattaaaaaaaaattttaactgataaaacttagggcaacattaattaatgtatattcttacctgaattgttatactttttgaaaatcctgtgacttgcctgtttctccccgctccaacgaaatcattaactctcctaaaatgtgtttcattctagtaagaaaacctcaaaggatattgtaggatataaatcttacttgaaaacatagctgttgaaatgttttggccttttggagtgggggaaggacaaatctgatcctgtaatctttttctttccagtaatcccttgtgtctgttgcatgaggacatggacaataaagtagtatatgatcctcagatacagggagaaggacaaggcatacagcttattgattagagctggcaagcatctgctcattatgtttggaattgctttctataagaaaattgcccactactactaacttgatcaacaatgaattcaaaatagttaacctatgaaataacatcctctcaaatgtttgctgatgaagtacaagttgaaatgtagttattggaaaagtctgtaacctgtggatcatatatattcaaagtgagacaaaggcaaataaaaagcagctattttcatgaatagacaa

SEQ ID NO: 3948 - DNA, 1198 bp, Homo sapiens
atctcccatgcagtcagcatccacagaaactcattggttagcagtttggagtttttccttccggtataatttacatgcatatagggatatatttttattttataaaattaagatcatactgaatttaaggacatatatcttacattttcacacatcttataatttactatgtcactaaatattcttagagaacttgaaagtattctattatatggagctcccagaatttattaacatactgcttttgttaaatgatagttatctgctgttttttacttttataaaagtgatgatcatccttgcacattagattaatatttgtgaatttttagggtaaatcactgtaagtaaaactattgggttaaatatatacatttttaataaacattgccagaatacttccaaaaagctgattccaatttgtaattcctgtagaagtacatgagagtatctatttcaatgtagtctactgacactgttactgttaaaaatatttcctagattcttagataaaacatggtatcttattttaatttgtatatctttgattacctgagaaattgaacttttccatatatttgttacttgtatttattattgtcctggctttttctgtactctagatcctctttacagggatcttctgttcaggtaggcttccccagtgagtgtgaattatggggcaataatagattgtaactaaccacaaaccaggccaagggacagctattcttatggacttgttgactagatcagtggcttttatgtctacttaatgcacatctgtcataactttctgtttcttatttattcttcccctgacatttattgattatgatgcataatatggtttagtaagctgctaaggaaaccatgtgatgggtgggataatttttcttatcaggaatttacaaattaattagtatcatacttgaaaactttgcatttgtcattaaagaagttaaataccactctacttattcaccagctacttattcaaatactttggcctagggaagactgtgagaggttatcaagttcatttttctgccattaggcaaaacctaatcaaacgaggctagaagaggcagtagagaaatgtaaagtattgcctctcccagcctcatttgattaggctttgactaaaggcagaaaatgaactgatgaagaaatatttctctgatttgagagacttctt

SEQ ID NO: 3949 - DNA, 1212 bp, Homo sapiens
gaagccactgtgggagaagttgttacaaatacatggctggtaagacaacactagtggttgaaataaagtatcgaaggatatctgaatgccaagaaggttaatgtttatttcttagacagttcagttacagtaaatcaatgcttggacttgaacactcttgattttgcttttagcaagggaaattcaaaattaaatgtgcaagcttcttggcctaatcccgatacagtagagattactgtttcccagggccacagcagcaacattccttcttaggaggtcactctagggtcatctcatactatttgtcttgttttctcataaccaaagcatcactggtaatttcactgttgatttttttttttttaacattccaagaattatgagaaaaatagtataaactaatacattagaaggaatgaaatttaaagcaacattcagtaactctaataatagatcttaccgattttaatagcctaatgtaattagtcgatgtatgtatatgtgtgtatgtatatatatactctaacattatgatatgaaatgtattgagaatgagcatacacaagtttgtattaaagtaaaatttcttcttatcaaaactaaattattgcttctgtacctgaaccagtgttaaccactggttgcttatttcaggttggctttactatttcttttgtttttaaaaggttacttgcatagactatcagactttgtttgatccaaagtcgaatcctctcttcacaccagttccagtaatgacaggaatgactcctttagaggattgtgttatttcatttagccagtgtgctggagcagaaaaagagtctttaacattcctagcaaacctccttggagcaaggtatgtaatatttttaatgcacctgttgtattggtgtatctttttatttattttgacttcttggagagcattcaaattagaatttggttgggtgtctttattatatttatgagtgttatgtggttccttctccactcccactgcttcacttgactagccttaaaaaaaaaaagtgcctctgttgtccaaagatgaaaacttaggtatcattagaggtaataactgcagtgggtccaaacacatgaaatagtgtttaagttgtgacttcataatgacaccaaataaagtaaggtaattggtcatctttgaaagatgctagagaaccagtccattactttgaaagctgacaaaag

SEQ ID NO: 3950 - DNA, 1196 bp, Homo sapiens
aactttttaagacagacttaataatgtggcatattttctagatatcacttttattaggttgaactgaaagggtttttgtaaattttttggccaaaattttttaaaacatacttactttggactaggggtacattcttacaaaataaataaacagtttttaaaattgtttagacacagatatttggaattagctatcttagtgccaactgctttttatttttttacttcatcaaggtgatgtaagtgactcacctttaaagtttttttagtgttattttttatcactactctgggaaatggtttgtcttcaagatgcaatacttttcttagtaaaggaaaaacagcataaaaagatacctggtctgccttgtacaagaaaaggcaatattagaggaagaaaatttaaagaaaagctagaggaaaaaaaaatttttttaaaaatacttattagaagcaaactgcccttgcatggaaaactgtttatttttttcagtgaaaaggaattctgctttcgtgtttttgggaaagcaggaactgagttcattacatctttaatttggcagaaattagcctttctgtgaaccagatgtggtttggggcagatctgtagtaaacaatggtgattttatttatttttactctctggaaaaggagataatacaattccagaaagtgaactcatatttctaaggttaagattcccttttattgcacctagaatagtgctatgcacagagcgggtgcttgagttgttgtcgttttttgtttgttttttaaatgtaaactggtaaattttgtgcttatcttcaaggctggcttaagtataaaattgttttttaaacacttgaaaaattaaaggatttgttttatattatgacagtattgaaattatttttcataatgaatgattggttattgtgtctggtaagtctttgaacattcaacagccagacatttgtgttttatttcatgatgttccagtcaagttccaaagccctaacacagttaagctggctcagactccaggttctagtaaaaagttggaattaatgttataaggaagtattaaaacactgaaacatttctccagaaccagcaagtaagggatatgtatgtatttatgctcagttttagttggcctaaagcagagttgaatgggctttctaaatagctaggcctgcaggtacctgccacta

SEQ ID NO: 3951 - DNA, 1214 bp, Homo sapiens
attttaaagtaagactgagggaatttaccactaagacactatctctaagagatttactaaaggaactatttcaggaatgaaggaaataattcagaaaagcaaagttagaggaaagtttacttgtttacccaatggtaaacatgtgggtaaatcattagtgtttctaaaaacaaggtaacactaaaatgttgaataacagcatttaagatgggagttggaaagctgaaagttttctaatgccctggtaccattccgaaagcaagcagaaatattgaataattttagatgttgtcaaatcaaccatgctttaaactgttaaagttgaccactgctagataagcagaagaaaaaaaggggattaatgaaaattaatcagtacaatagaaagtaggaataaaaaagcaaactgtatataaagcacaaactgagataatggaaataaatctaaaattactagcaatcagaataaataaaactgaaataaactcatcatttaaaagacaaatatcagattggttaagaataaatccagttatatactattggaagaaatacatccaaaagtctacggccataccaccctgaacgcgcccgatctcgtctgatctcggaagctaagcagggttgggcctggttagtacttggatgggagaaatacatccaaaaacacgatgactcacatgtattcgaagtaaacagataagaaaaaaaaacaggcaaatattattttttaaaactgggataactagactaatgccaaacaaaataaatattaagataaaagcattattaataataaaaaggatcattacataataataaatggaataattcttttaggaacacaataaattctgagtttctatgtacctaagacacagcctctaatcatataaagaataaaaaggcagaatctcaagaaaaaatggacaaatctctcattagaaagtgattttaacataattcattttgttatttataaatcaggcagatgaaaattggtaagtaaatggaagtaagcaacaacttaatttaatttagtggatgtatagagccctatccaatcacgagcaattatacattcttctccagtatatgtggaacaattgcaaaacctgatgacttaccaccaaacagcaaggctcaataaagactaaataatttgtcacacagatcatattctctgacctcaacacaatttaatcagaaatcaa

SEQ ID NO: 3952 - DNA, 1226 bp, Homo sapiens
agatacagtcatcacccactgatgccacatccccatcttctgtcatcccgtgcctgggaatgttcttcttcctcacagtacttccagactcctcaagtcatagcctcttccacgaaggaccctggaatttcttgtctggcaaaatacccattgtgcctgccccaccctcaaggtctctcagtattccttgcatagctctgtcttcatttattatttttttagaactgaggtcttactatgttgcccaggctggcattgaactcctaggctcaagtgatcctcctgcctcagcctcccatgcagctgggacttcaggcacatgccacagtgcccagcctatatagctatatctaagcactttctttgttacattttcattgcatattttaatgtttcattatggttttctaaaactttttattgagataattatgtattctcacgaagttttaagaaatattaagaaaaacccatttacccttcatccagtttatgctaatggtaacacctcatgtaactatagtaccaaatcataatcaggaaattaactttgatacaattgattgactttagtcagatatcaccagttttacatacacttgtgtgtgtgtgtgtgtgtgtgtgtgtgtatttagatctgttcagttttatcacatgtagagttgtatgactaccgccatagtcaagacacagaacagtttcatcacaagcttccctggtgatacccttttatagccatggccagcacctttcctccttcttctccctgatcactgacaatcaatgtgttcttgatctctataattttgtcattacaaggtgctgtataaatggaatcatatggtatgttaccttcagggatgggcttttttttcactcaacataatctcaacctggatggatctcatttccatacaagttgttgtgaatattaatggtccattccttttattgctgagtagcattctatggtatggatgtactacagattgcttcaccattcatccattgagagacatttgtgttgtttccagttttgggcaattaagaatgaagctgctataacattcatgtacatgtttttttatgtgaacatatattttgttttcatttttctagagatgactaatgagcatatgaaaggaagtttaacatcattagccattagaaaagtacaaattaagacaaatgcaaattaagaccacaatgatatatcactacacagc

SEQ ID NO: 3953 - DNA, 1220 bp, Homo sapiens
caaagttacattttctctggaactctcctaggccactccctgctgatgcaacatctgggtttgggcagaaaggagggtgcttcggagcccgccctttctgagcttcctgggccggctctagaacaattcaggcttcgctgcgactcagacctcagctccaacatatgcattctgaagaaagatggctgagatggacagaatgctttattttggaaagaaacaatgttctaggtcaaactgagtctaccaaatgcagactttcacaatggttctagaagaaatctggacaagtcttttcatgtggtttttctacgcattgattccatgtttgctcacaggtaagtatgaattagaatacatccaatagtttgggccttgaatataggttaagaaggcaaaaaatactttcccagggcctggggttgaaatatgtgtatagaatatcgtatatctgttttacaaaagatttatcacctcctaaacctctattcccacatcccaaagaaaaggcctgcattctgtttggaaatctctcttcttaatgtccacacaacaatctagaaagagaaatcatcaaaataaataaaagcagagctctgtgcactttgttacttatctcatcgtctggttttatatagtgcaatgtagttctttcagacttactgtgtgtgtcttggagatgttaactgtaagaacaaattaaaacaaagattctagcaaaatacacatgaataaaaagacaatttgtgagcttaacattggatacgagacttataaaaattggatttctctactggtcattgaagaaaaggtactccatagcattctaaaaaatatttggtttgggacatttcccctgccagtgagattacatagttttctctgctccactcctggttgcttgtacctatctgctttattgtcttaaaattggaactctgtagcctttgatgtttgttcatgtcaaatcacgtttaagagaaacttctaattttgatactccaagacactaggcactttgcagtgttgatgggagccttgagtactttctctctctctctctctctctgtctctctgtctcactctctgtgtgtgtgtgtgtgttttacacagaactaatttaattattctagttagtttacatcaggtaacaaatcagtactaagacaatttgcaaaggtgtagaactggcttaaacatcaaatttatggtgttcttt

SEQ ID NO: 3954 - DNA, 1188 bp, Homo sapiens
gtatgtgcattctttgtgtattcaacaaatctaaagatagaaactccttgaaaaattttaaaattctctgactataatgccccctgtaaattagtacccaaagacataggtctcttcccccccaatttcttaaactcctgatttcctcagatgttatcctcctttgttgcacatatgtctcttcttcagagtgatgagtttccttaactggtgattttttttttttttggtgttttactcatctttgtgttttgcagtccatttacctacttgagtgttgagtagcttactgccaatgattatgagggagggacaggacaagctgctgaggggcaggagtgctgttgcttgtcttctggtgtgggtattctctccttcccttctgagagttagcagctacctgtgacattgcactgctctgcagcccagtatgcatccttgctgctttagcctgtgaatatatgcctctgttgactgctgcttagcacaaacctgggaatggggagggcctgattgacccagctgttccacatgcaactcaccgattaatcatcctgatgtatgtctgagtgcccccaaccttcagctgtctgtgtccactggctctggcttgaaactcttccttaaccactcctacttttgcagatgtcttattgtacatctggcttagactatggcttccttcagttactgcctccctgccccaccattcaattccccacccccataaatataatctcgtctgattctaggagattgctgatagtctttccttattatctcatgcatttatgatttatatttgttaactgtaaatgtcatttcctcagaaagttttttcctagccacccaatttaaagtaatttctcactttctatcacatcacctcagtttattttcattgtagcattcatctctatttaatatttatggtcttttgtctttccagacctaaatgcatactcctttaggagccttatatgatctatttacagctatatcataagtggttagaacagtgcctgatatataatagacattcagtatatgatagttgaattaagtgactttatcttttttaaaaacattatatgtcacatttgcttgaattacataaattttagattttataccagaaaccaggcttatcaaatattccatcttaacatctctgtcaagacaaaaaaa

SEQ ID NO: 3955 - DNA, 1102 bp, Homo sapiens
gagtttgagattagcctgggcagggagaccctgtctctacaaaaaaatttaaaaattagtgggctgtggcggcatgtgcctatagtcccagctacttaggaaactgaggtgggaggattggttgaggcttcaatgagccataattgcaccactgcactgcagcctgggcaacagtctcaaaaagaaaatttacagaataagccaattcctggtagagagaagtattaagtttccatagagtttgaattaatatattttccttttattgccaggttgggtatctacagccattggttgctgttcaggtcagctttgctcctaacaacactgggaaagaagtaacagttgagtgcaagattgatggatcagccaacctaaaaagtcaggatgatcgtgacaagtttttgggacgagttatgttcaaaatcacagcacgtgcatagtatgagtaggatatctccacagagtaaatgttgtgttgtctgtcttcattttgtaacagctggaccttccattctagaattatgagaccaccttggagaaaggtgtgtggtacatgacattgggttacatcataacgtgcttccagatcatagtgttcagtgtcctctgaagtaactgcctgttgcctctgctgccctttgaaccagtgtacagtcgccagatagggaccggtgaacacctgattccaaacatgtaggatgggggtcttgtcctctttttatgtggtttaattgccaagtgtctaaagcttaatatgccgtgctatgtaaatattttatggatataacaactgtcatattttgatgtcaacagagttttagggataaaatggtacccggccaacatcaagtgactttatagctgcaagaaatgtggtatgtggagaagttctgtatgtgaggaaggaaaaaaagaaaataaaagtgtgtttgaaaaatattatcttgggttctttgtaaaatttattttttacatgctgaattagcctcgatctttttgattaagagcacaaacttttttttgtaaaacatgtaaaaaaaaaaactgggattaatttttagtgttggaactgcctcttattttaggctgtagataaaat

SEQ ID NO: 3956 - DNA, 1112 bp, Homo sapiens
tcttaggatgccacaggtatagtatactactgttctatttatataaattatttaacattaagcttaaataaattggttgaaaatgtttagctagaaaaaataaaatggggcctatttttcttaactttatgagcagcatagatttatgcttcttaccctagctctaatatttatacataaccaaagccctaagagaagctgacagggaggaactgggcagcaggtatcctggcaagattcctcaaactaatagagccagggatcttggcctacagtagcaattttcaaactttttggtctcagaaacttcacactttttttggaggaccccaaagagattttgtttacttatatccatatttactgtgtttgaaattaaaacaaaaaaaattggccagttgtaatgggtcatgcctgtaactcagcactttgggaggccaaggcgggaggacagcttgaggctgggagtttaagaccagcctgggcaacatagcaagacctcatctctacaaaagaatataaaaataaaattagccatgtgtgttgtgagcctgtagtcccagctgctcacaaggctgaggcaggaggacggaagcccaggaggtcaggacttcagtgagccacgattatgccattgcactccagcctgggcaacagagcaagaccttgtctctgaaacatatatatatatatatatatatatatatatatatatatatatatatatatatatatatatatatataatattacaagtaaacctatatgtttattaatccattgtttattaaaaataactttcacctaatagacatctgtagaacatttcatccaacagctgtagaatatacattcttttcctcaacaaatggaacattctcaaggataaaccaaatgttaagccacaaaacaagtctcacaaaattcaaaagattaaaattcaatcaagtatattttctgaccataatgaaataaaaccagaaatcaataacaagaggaactttggaaactatacaaataaatggaaattaaacattatgtttctgaatggcccttgggtcaatgaagaaattaagagaaaattttaaattttcctgaagcaaatgaaaatg

SEQ ID NO: 3957 - DNA, 1321 bp, Homo sapiens
tagtggcctttcatttgacaggcttcttcactggtgtaatattttcaaggcttatccatgttgtcacatatatcatacttcattcctttttttctgactgcagcctcgacctccagagttcaagggatcctcccacctcagcctcccaagtgcataaccatgcctcccaaatgtgtaccaccatgcccagctaatttttctatcttttgtagagatggggttttgctatgtcacccaggttgatcttgaactcctgggttcgagcgatctgcctgccttgggattacaggtgtgagccatggtacctggccccttcattcctttttattgctgaatattccattctatgggcaataccacattttgtttatcctttcatcaggtgatggacatttgggttgtttctagtgtttggctattataaataatgctatatgaacactcatgaatgcatttgtgtgtggacatatactttgaattctcgtaggcatatacttaggagtagaattgcttgaatttttgttaactctatgtttatcatttttaaagaactgccaaattgttttccaaagtggctgcacttgtgagggcgatctggctgcgacatctgtcaccccattgattgccagggttgatttggctgatctggctggctaggcaggtgtccccttcctccctcagtgctccatgtgagtccttcccgaagctgcgtgctcggttgaagaggacaaccatcccaatagaagaggactggtctttggtcaagggtatacgagtagctgcactcccctgctagaacttccaaacaagctctcaaggtccaaagtggctgcaccatcttacattcccaccagcaatgtatgagggctccagtttcttcaattctcaccaacacttgtttttgtccatttaaaaaattacagccatcctagtggttgtgatgtggtatctcattcctggttcctatacctgaaacatcctttctttccttgcctatattcacctattgaaaaactatatttcaaatagtacctcctctatgaagccttttcttgatcaccctaactaaaagtgattgcttctttttttaaattctgcaaacattgcatatatatttctggtggtgtgtgtatttcccttatatcacatttctttgtatatttgttttacaattacactaaaaaattcctcaatggcagatacagtattttagtgatctctgaattcctagactccaaatccttctaaggaggtgtgtatgaggaggcgagaagataaggcagattatgatatgtacaaagaggaaatattagtacatatt

SEQ ID NO: 3958 - DNA, 1161 bp, Homo sapiens
ttagttccatcctccagagattttgattcagtagagcagtgataaggcacagaaatctgtctttataaacaagcgctctactgatgatcattgatgcagtgcatagtaagtacaaaataatctgtgtgtgtgtgtgtacaatagagtttaaattttagaagttcatagtcttattgcagtgatttttcactgtgccctgttaaagatcattttcgatcgtttaaggataaacagttttgatcacatgagtactttatcaattgggatttttttgtttgtttccttagatcaccatctggttcaaggacacctaaaaggtctaggcgatcacggtctagatctcctaaaaaatcaggaaagaagtccagatcccagtccagatctccacacaggtctcataaaaagtcaaagaaaaacaaacactgacgtaaatttttaagatgctgtcacttattggaaatgcgatttgttttgtgcctgaacggtctgttttttaaaaaaacaaaaaatcaaatgaaagagcattcctggggttttttgtttgtttgtgtatgcatgtgtaaactcatgagcaactgcatctgtagatctgtcattgttttatattgtgtaaattactttcattgtggctatttctcaagatgaaatttttattgttctaatggatttcatcagaaatgtgtataatggatctgctgacagtagtagtattttgttttaggatgttgtgacttagcaaaaataatacagatgtcttccccccttttgtagctttgacaatttgaattagatttcaaataaaatctgaacagaaaactataatgttgtttttttgccccaccggtgatattaagtcccttaaagtcctactgagtttcacactactgttgtgcttcttatacctgatgcactttataagccccagtgttcaagtagcttaagttttatatttactaagatgactatccaaattaagggacctgagactcctatttggtggtttgctaaccatttgcttttgataagtttctcttgggtaatactaatacccagatatcaaagactaggtagatatggcatggcgttttgttagtggaatgcctggctaaaacatttttttcacagaagcaatatgatttccatacatccaacccatgttct

SEQ ID NO: 3959 - DNA, 1156 bp, Homo sapiens
gagtgcatgggttttttaaccagatgtgttaggaggctgagatttttcacactggctcttaccatctagcaagatgttgtttcttctcaacccttggggtttggggaaaaggagggctgaagccttttggtgagtgtgttaatttgggtcctccaagaagcagatgctagaaagagattcattgcacaaaagattttcattcctttagagaatgtggggagtgagcatgaggatgccaggacagctgtcaggttttgatgcaggcctgatcctgtgaagagagagaaggaaggaaagctgggtaggaaatctttaggctgtggtgcaattctaggaaaagtttggcaagattaatgatgggtccctgagccatggttgcccttcagaggagtccccatctgcttgccttagtatccctgctgtgttcagtcatcggctgggagcctgacctcagtgtgaaagtggtgatggattccagagcagagaagctgagaccactggtcaattgcctcctcagagtgggaggtacattttcatctatctgagaggtacattttcatggatattacatctggtcacctctgccacaatggcagcaagcagcttcctctgttcacttcaatgtgcttcttctcgaacaatgaggccagagctagtgcagagggatagtcagggccatttaggtttggaggtcttgtatgaatttaaccacactaggcaccaggccatcactattatgacaaagacttgctttctctgcttgggaactaatagtggacacttcatgtttatttcttgttgtttcattgaaagcattttgtaaaaaaaaaaaaaaaaaaaaagagtgcctcgcccactaggaattacaaatgacattaatatggattctttccatttaggccccatgcagatagtatcttgtgcttcccgtctttgtagaagtagaaagaatagtaatggtgtcattcatggtacttgctgaataacttttaggaattaaatcctttctaagcaacgtgtgttgaaaaaatgatgttcttatgcaagcaccctaagccacgtagagtgtagatgatctatgttcccttcttgctcctgactagttttattgtcgtcattcaacactgagcatggaaggttgcctactgtgctgtgg

SEQ ID NO: 3960 - DNA, 1151 bp, Homo sapiens
ataaatgacttggagttttatgttcatgaaaaaattagggattatgttaagagtactattttttccattttagttaagtagtactacactcattgtttaaatgtaacttgctgtgtctgaggtataaatatagtctgtgggagtgagaggcaaaccagtcctacccaatttgatttgaatattttaaattatggaactgctaaatagatatttctataaatagataatttttatttatgtagctttttttggaagtaactttataaatttttataattcagaagactactatatgtgagaggcgtgatatctggatggaagttgggctggatgatctccaaagtcgtttcaactcttaaagacatcttaatcctgaatgtaaacaattgttatgtgtttagaatcagaatttgattttgaacttgagtaattcatccttacagctatctgtagaattagtcatcttttttcttttcttttttttttacttttttgttaataagcaaacttatttgctgcagaatttgggttgactcctgagcatatttaaaacaaagaagctagaaatttagcagtcagattaggtaggtggttttatttcaaagggaaactttaatccaaagaaagattaattactctaacaaacaagagaagcttcatgtttgatgatacagatttaagaatacctgagacttaagagtgttggaagtcatttgatagaaagatgagatcggagacaatgttgtgttatagggcacacattgaaggtatatgccaaatctctcaccagataagtccttttctccctgtgccgttttcttgctcaaagggaacagtgaattagccagctagaatcttcctggtccctttttgaggcagtagcaggtaaggaaagggctgattttcatcaaaaccaagacctttctgcagggatgatagtggaataataatgtgggattagcccgctagcattaggagcagttgggaagttacctggtagatcaagcattacacacaaaaaatcaagttgatcagagtatgggttctccatatagcaatacttcagtgagattaagtataaacagtttttggcaaaaaacaacacagtctactctttctgcttacaaagacaaagccttacaaactcacta

SEQ ID NO: 3961 - DNA, 1327 bp, Homo sapiens
agtacaggttcagtgtttgatagagtagtgtacctgtctttaatataataaaagatagtatatggagttttgcacttggatttaataatatacctttgatagttaattattccagtattttaataggtgatatatttcttctaatgcaacatttgcaacataaaaagatgttcacagtcaatatcttaattccgctgtttatatcattgctgttcaataaatggattgataatgtgagacacaaagataattttcagttttctagtagtcatactcttaagtaaaaagaaacattaagctaattttaatacatttgtatttaacccaatatatctaaaatataaaaagtattaatgtgctttttacaaaaaactaaatcttcagaatttggtggtggtgtatacttacagcacacctcaatttggcttagccacatttcaaggacgtaattgccccatgtgattattggctattgtgttggataaggtaggtctagattcttttgtgtggtagaatttttttgaagttgactagtctgttaagcagtcattcagctggggtagaatttttttaaacattttaaattgatatataacatatgtagaaaaaatgtataaattcataattaaatagctcagtcaattatgaggtaaacatattcctgtatctgctgcctaggtccccttgtggcccctcccaaccatttaccctctccctcttccccaaaagtaaccccactgtattgacttttaaataattttagcttcagaattatttaattgtaatggtgttttatatatagttatttaagatataatcttattttattaacaggttcaaacgggtacaacagatgttgctttggaatgaacttgataggatttaacagatcctagtagctttataagctattataagctttataagcttaatagctttataagccattaagatggatttttttttaaagaatagtactaaatagtgtagctgtattgtatttaggttcaataaattgttattcatagattttttttttaaacttgcttacaatgttataatttttggtttcttgctcttgcttctagctagtccagatcacatacttttgctccctcctttatccgttctacttaccacattatgtctggagttcagcatgttcagatgtctcttaaatggatgaaatccattaaaaggtttaataaaatgttagctatgagagatacagattttagcatacatttaaaaatttttaggcatatttatatttgttcttctgttaagtgttgctcatacttcgttctttcttatatagccacatgct

SEQ ID NO: 3962 - DNA, 1176 bp, Homo sapiens
taaaagagattgaagattcagggttaaatacatatagatttcactagtgatactgactttacatatgcattataaataatctgcctagggatgatgcatcattagagtcatgagttgccacttactcgctgcttctgccagtgaagaaaacaatagcagcttttttttcttagtactgaattctttttaattgccctgtagtccaaaagtgtgtttggtatgaatagcagctttttttctagcaaataagaaataaatgaatcttattttttattcttcttttccctgtaccagttcccaagaaatctcaacaaaatacaacaggataaaatattttaaaaagccagatttgcctgagaactctttctgattatttccaagccctgggcaaaggaactaatatttattattaaggttagattaaaagctgttaaaatgtagttataaaaaaagaagtctttaatagctagagtaaaattttataagtaaaaaattataaaatttaaaaaaattataaaaattaactattactccatttttatgaaatctactaaaatgctatgttgcttttttccagtctctgaaataaaaatctttcccctcctgtacatataatcttcaaaaatctcaatgattaagccataaaggaaaaatgcctggtaacttaaaatgtcagatatgaaatctacttttatcatttatatttcagggatctggctgctttaacatactaatggggcaagggagacagctcccagagagagctgcttaatagagggatgttaagtgaaaacataaggattttccatctgttaggaaacagtgtgtggtatctagttcttatggttagacttggagaaatacattaattgaatgacacaggaaatacaggaaaccacattttgcttgaagagcaatttttgaggacaataacgagtaatgaaaaaatgtgtaaggatgctggctgcttcagaagcaagaaaacaactaaaaggctactactatattatatatgctagaaatgggtaagttaatacttaaatcatttaactattaatcagcatgaacatttctgaaagaacttcaaaagtgaagatgaataagataggaagatttaagatcctgtccccaaagtgtggtaaataggaaagtttacagatactatattcaagttgt

SEQ ID NO: 3963 - DNA, 2084 bp, Homo sapiens
ttgattaacacttcttttgaaacacttttcttctttctctttcagtcttggtctttgtaatgggaaaagaaggggtccatggaggcggattgaataagaaggcatactcaatggcaaaatacttgagagactctgggttctagctgctaggcagactgttaagtattaggggaaaattgctcttaaactttcctagctataagcttaagtcttaattctggaaattttattagcaatgcagggtgatggggtatgaacctgtgtctcctttgtatccctctgttggtggggaaaggtgtctttctttctgccctccccccccaaaataattctgttcacttttgttttgtttccttgtgtactccagcattggttatagtcatgggaaaggaaggtgtccacggaggcacacttaacaagaaagcatatgaactcgctttatacctgaggaggtctgatgtgtaagcagcctctccccatctacctagcaactgtcttcatcaacaaccctaattatggtcacaatgctaccaaactgtagatggtagctaatttttctttacctattttctaatgtcatgattcctgtttgcccaatggatcatttgtatgttaaccactgtatgtaaccaacccttatctggcaacataattgcagcacaataatgatttgcatgataccttgaaattggggggagggggcatgccaagttgggcatcactttgtcttagcaattaatgggatattgattactaaaataagttaatattaagcaaggtgccggttgtacaatctctgatcagtgtcttttcagcactttgagcatttacttggctcatttagtcttccttttgtagcgcatggttgggaggaaaaagtgcatgcatcattccttcactcttctctttttcccgccccccctcccttcgcacataggcatttggtttgcttccatctttttttatgcagtgcctgtttttttttaaccaattaaaatcccttttgttgatgagctattgagagctgcagtagtttgcttttagtattgttgttgcacttgagcagagacaaacctttattcatagtgtctacaggacatatgaagagtgcaatggcaaaacaagagcaaaaagcacttcctcccatgaccttacagtaaccatactgattgaatccccagggacattccatcattgcaatagctcagatttttcttcctttttctttgcacaccagctctactctttagtaaaattgtaaaaggctgccattatggacattaggtatcccaacataaccatctggagtgtgtccagtttgttcttcataggaccaatttttatttgcagcttgagtttttatatgaagttgcattattgtggacttggctgtcttgtgatgaatttttttcatatgtattctgtgccatactattgttaaaatgaactgttgctattgtgagatggattttaactgacctattaagggtttctttcgaatggcactactttagggacattctagtatttgcttctattgtttgggccttgtggataatgtacagatttaaaaacaaatcttgttgctgatttgtccatttctttccctgcactttgttacatctgggatacagtctaactcatctgatttaatatgcatttaaaaaaatgccataactattaaacaccttgtttacagacagatgaaataaatttattccaaccaaatactctaggctcctgttgtttatatacattgtttatataaactgttaaaagttgatttttgacaaagtgggaatacacagaataggccaaagtctgctgcaagcataaaacttcagcaatattaggtgatggcctacttcaagtaatattacagataaaattagtgcctgggaatttctttttaatggactctgatctgttacacatagcttttagtcatttcaggctcatcttcaggagtatgtgagaagcaactgacttatctgctagaaaataagtattttcctcttcttgctggtttctagatgtgaaatctaatagtaaagggagtaccaagaagggtttctgcactattg

SEQ ID NO: 3964 - DNA, 1143 bp, Homo sapiens
aagcaactttaaatttgatgaaacatgatttactgtaatgggactgaatatgatagaccagctttgttcagagttgatagctgaatttttaccattacgtgaacactttcaggcaccagctgacttaatacagtttataaataactctttaagtttgcactttgtctagtgtcaactgtcaactctttacagtttctttgtatagactggtcttggttaagagacgacatcattaactgaagtcaaatcaactcatgtaaaatatgtgattatataggattaaataattatttagaaaagactgaatcttggttttacattagtgaaatgtggctatctggcagtggtagcataagcctagctacagcccttcctgttacatcaagccctaaaaggagttaactacaacttaatgtgtgtgtgttttttttttttctttttggtggggggcagccaatagaaatagatatgattgtaggaaaagaccgggaaggtttctttaccaacggtttgactcttggcgcgaagaaatgctcagtgatcagagatagtctatacgtcgatggtgactgcacaatggacatccggacaaagagtcaaggtggggagccaacatacaatgtggctgtcggcagagctggtagaggtgagtaaggcattcttttggttaaagttgcatgccacattacaacttattaagcagtttcttttaacattttgaataaaagttagtccataatggctattaaggtggtttttgtgaactgcccagcactatggagaagcactgctttagttttacctactctacagcatctatgacctggcctcttagatcctgattttgtttctacgatagaatattcgtatgaactcactttcagctttattaaacttaaaagtctcttaaactgcttgacatgtcaaatcataatcctgtggtgtttcagattgttaaattgttcgaatcacttggttattttagtcccttttggtgtgtgtttgacctttggatctcttttcttttttttcttgcttgtattctaaccatttcactactcagcataaagaaggaaaaattaacatccgttcatttttcagttaggaactttgctggggaaaagataattagatgaggatttt

SEQ ID NO: 3965 - DNA, 1193 bp, Homo sapiens
actgtctccagaaaaaagaaaagcaagagacacaaagaagaactggacggggctggaggagaagagtatcccatggatatttggctattgctggcctcctatatccgtcctgaggacattgtgaatttttccctgatttgtaagaatgcctggactgtcacttgcactgctgccttttggaccaggttgtaccgaaggcactacacgctggatgcttccctgcctttgcgtctgcgaccagagtcaatggagaagctgcactgtctccgggcttgtgtgatccgatctctgtaccatatgtatgagccatttgctgctcgaatctccaagaatccagccattccagaaagcacccccagcacattaaagaattccaaatgcttacttttctggtgcagaaagattgttgggaacagacaggaaccaatgtgggaattcaacttcaagttcaaaaaacagtcccctaggttaaagagcaagtgtacaggaggattgcagcctcccgttcagtacgaagatgttcataccaatccagaccaggactgctgcctactgcaggtcaccaccctcaatttcatctttattccgattgtcatgggaatgatatttactctgtttactatcaatgtgagcacggacatgcggcatcatcgagtgagactggtgttccaagattcccctgtccatggtggtcggaaactgcgcagtgaacagggtgtgcaagtcatcctggacccagtgcacagcgttcggctctttgactggtggcatcctcagtacccattctccctgagagcgtagttactgcttcccatcccttgggggcagcctcgagtgtagtccattagtaatcagattccagtttggacagggtggctggattgtatatctcgttagtaatgtacatgctcttcaggttctagggctcctgttaggggagggagaaatgttgaatcaagagggaaaacaactactatgatttataaacatattttaatgtaaaaatttgcattcaaaaggagtggccctgttttctgtgttaaaaccccatttggtgctattgagtttgttctttattcttttatcccagtgaaaattgttgatcttgctgtagggaaaaattaaactctttgaatctccaaacaaggaagtttcagcattcccttatggatcagaggaaccttagaggcctg

SEQ ID NO: 3966 - DNA, 1179 bp, Homo sapiens
atatgcaagctgttaatattgaagtagatgtttgttttccacattctaaaattactgagatttctgtttaacgtttcactttgcctttcttcttcacttaccaattggaagctttcctgataaatggatgagagccaagcagtttatataacctgaagatgattgaatttcagctttgtgagaatgaggaaacatgcatgtgttacaggccaggccttaaaaggatgcttataaaccaaaataattctatgctggaaaaacctgttggctttggtgctttaagttctttgtaaaatgattacttatctgcaagttctcttggatacttagacataaagttcagcgaagctaagataaaaaaataactcagggatatttcattgttttatttattcagacaggcctgtcttcacttcttattatactgaagttatgtaccatttgcaaatgtaagagtacctttggattcttcagctaccttaataaatatttgttagacaccagacctattttattcaaagcttattttaatatttgctctttctttttacagcaattttccagattattcaaagtatcaggatgggcatgtgaagtgactgaccttaagatgtttccattctcctgtgaattttaacttgaactcattcctgatgtttgataccctggttgaaaacaattcagtaaagcatcctgcctcagaatgactttcctatcatgcttcatgtgtcattccaaggtttcttcatgagtcattccaagttttctagtccataccacagtgccttgcaaaaaacaccacatgaataaagcaataaaatttgattgttaagatacagtagtggaccctacttattcagtcaattaagagtaagtttttttatgtggttattaaaacagtatgaacaattagtctaactctgcatagacagggtctagattttgttaacccaaatgtataactgcagttagcttaaattacaatttgaagtcttgtggtttttatatagctaggcactttattactcttttgaactgaaagcacactcccttataggttcatgtaactgtcctgtaataaggtgcttataaatggaacaactacacagcctagttttgccacaacctttagcatctaaaaagttttaaaagcttctaaatgtctaatataaagggaga

SEQ ID NO: 3967 - DNA, 1234 bp, Homo sapiens
agctctgggttcctccaatatttagaaaaaggggagatgaagagtaatcaggccagaaaaatgagaagaaacagcctgtgaggtacagggaaaatcaggggagaatagtcttggaagcaagggaagaaatgattccaggaagaagagatcatcagtgtttaatgccactgagaagtcattaaatttcatataaatttaatatttatattgaattcaatattcttcaaaatgtagacacaaataaatcttcaatacttactaagtgggaaacaaaaacaaataggaacccccatcaacaatataatctgtatattatctaatttttatgttttaaaaaagatgtataaaataggctgggcacggtggctcacgcctataatctcggcattttgggaggcccaggtaggcagatcacctgaggtcaggagttcgacaccagcctggccaacatggtgaaaccccgcctctactaaaaatacaaaattaactgagtgtggtggtgcacgcctgagccccagctactcaggaggctgaggcatgagaatcgcttgaacccgggaggtggaggttgcagtgagccaagatcactccactgcactccagtctgggcaacagagcgagactccatctgaaaaaaaaaaaagatgtataaaataatttataaatacatagtaagaaggaaggtacacactaaattttgtgtggtgcttactttggggaagggagttagaatagaagaagaaataaagggaatctcattttttaaaaaattatctttatttctgtattgtttgaatctttaaatctttaaatataaaaatatattcacaagttgcttgtaattaaaaaaaaaacctaaagggtgattatgagaacaatgagaaaagtaaaaaactttaataatgaactcttccttttgcatcaaaatgactcttttttgattaaaattaatttctaagtggggagaggaagggaggtgcaggggtgggggaaggaagtagagggagagagagaggggagaaagaagtatttttatattttgtgtaagaatgtatttactatggatgtaatgtaacaaaaggaggggatactgcagatttctaaccaagaaagaagtttgtctggagcctaaaaatttgactgcagtttccagacttactgaaaggaactggaaaagtgcttagcacattgtagaccctcgctctatgttgcctgaatttgaaatctccccttt

SEQ ID NO: 3968 - DNA, 1229 bp, Homo sapiens
cataattagtatcttgatattaaagagtaatgaaaatgggaatgatcaaaggaatataacaaagaatagaaaacaaggttctggtcctgtgtaagttctgtctttaagaaaatagaagttaaataacttccctagaggtacttcatgaactgtggacattcccagaggttctgagagatcttattggcggaatgtgatgagtaagtgaaagaatattgttaggggaattatgttagccttctcatttgataccatgtttctccaaaaacacaaataaacccttctgacaaaaacagttcaataatatatgccccaatattttccagggagaatacagttaaacatgaactatttaaaaatgaagacaacctcaaattatttttagcaattttgcatagggataatgaatagtttgttgtaccataatatatttagtgggcactcatgtaatactgtgcagagtttatagttcacatgaataaatgtttttcaggggtgtttttgaaatcctttgagttgttctggggtagttttttccaacttttagaaattatattcacctgtctacggccataccaccctgaacgcgcccgatctcgtctgatctcggaagctaagcagggtcgggcctggttagtacttggatggagaaattatattcacctgaggtgcatggtcccttaaataagtacagacatatcaattaattttacatgttttacctgagcacttaaatgccaataaaaaattaacaaattcatgatctgttatgactatacttctgtaattaactttgttatttatttttaatctgtagagatgtggtgaatcagaagtcttagatgagaaggagtctatttcttcatcctctcttgctggatccagtttgcctgttttccagaatgtgctgttaaggtttttagatacacaggccccctctttgtgtaagtagagaaaactctttgcctctagatcttaaataagggattgattttttttttctgattccttttttaaaaatttagatcttatttaatattcttggcactgaatataatgtatgttttactgagcaaaattttgtggcatgttttttcatggagacttttaggcaattttaaaatcagtcaagcttcaaagactttaaaataattgttaaaagtcacctcactccttcatgtaaggaagtaaggtcttgtgacatttgtctgtatattgaatgtgatttg

SEQ ID NO: 3969 - DNA, 1197 bp, Homo sapiens
tctcaaaatatttttttttagttgctgctcacttatggccacagaacagtccctttttgagtaaagcagcaaggttgcttaatgacatgctatgtggttaacaagattcaactgccacatcaaggactttaaataatttcaagattttaaatgtatttatgaaatgaactcattacagcagctaatcaatgcaaactttgtcctttttctttgtctttctaagagaaactgaatttaatttaaatttaaattacagtgtctaaaacttggtaaaatattttaaatttgaataagaggaaaaaaaaaacatgaatttatttatgatggagcttcatacccaggacagtagcttcttaaatgttagtaaaataattatgttaagcattaaaacaattttgaatatgtaattaagcatttatgttaaaaaacatgtttcttacgtgtgtgtgtatatatttataactgacacatgtgattctttgtacagtatttagaatccttcccttcagatagcagtcctcttgtattcagtcttgtggctaaaatagatcaaaaacatattttaaaactgttaaagtaactgtatgactcatgcttgaagttctgaaatttgggagcgttatgaggtttccatgccattaaccgctagatcatttgcattctctcacagagtaaacggaaaaaaatttagaaaacttgtaataatcctgacttctttaataaaatgtgtcctgtgtattgcttaaatccatagtccagccttttctgagttcttgagccatgagatggaggtggcctgtgtaatctactatttttagaaagttaggaaagcaaaccaaatactctctgagaggaccctatgaaatggctgtacccttcagctgtgctgcttcagactttggccaggctcccaggtgacttacgttaatagcagacttctagttagaagaggagaatttatttcattaaaaaaaaaaaaaataagtcaaacagttcaagaaagtattcatttatgtaaaagaagtcaattggtatgttactaaagataataggaagaaaattagctcactattttagttgcatactgatgattttaaggtttaaataattagatttaaatataccgtatgtaaatgtagaagtctgtatcgtaataaatctgttgctaagtaaaatgggaatacatgacaacgagga

SEQ ID NO: 3970 - DNA, 1158 bp, Homo sapiens
ccaaagttcttcctgaagatgtcaacactcttcctataaggccatctgtgattcaatatttttatcatgtaggtgaaaaaatagatgtcagaatcaactgagaaaggggtgagaggggtacgtattttccagtggaaatataggaccattcgaatagatcccttttatactgctgggtcaggtagtatgtcttaggctgtgtccattatgccacccaacacacagccactatcccaactaaacagatgcatgaactctgagggttaggaaatggatattccagtgtaagaaaacagatttaaataaaaataaaacacgttggtaagtgctttgaaaacacatgatctcatttggataaatctgtatgttttgcaccaaatattcttctctaattttggtctaatcactttacttttcctgcagtcatgcaacaatggttttgactacctttgttgggtcagggattattttacttgggtcaggcattattttatgtatacatcctgagtatactcctctgagtatacagaggaggtccttgtccactcaaagaaagataataaacatatgaacaaattaatgaactaattcaggttgtgatcatttctataaaggaaataattagagtacttaaatagagagtagtttgggaatactcttttagaagtgatggtctgaaaagttctccaaagctgtaggtctagcatctgagcgaaaactttaaaaaggttggatttatctgaaaaactggttaatcatcattcctggataagagagtaagaatgtcctgatatggaaacatcttggcaaagatgaagaattaaaaagaggttagtgtgtctggaaagttgtgagggtgagggaaaatggcattgagtattggagagttattcagaaatcgaaacctcaaaacctaaagggccttataatccaagttggaggtttgagctttattacagaagcatttattatggagtcattgtgattttatgacaatactctgtttaagcaaatggataatataaaatttgaaaacatgcttcagaagttaccatttcttaagtagttgcaaaacaaagttgcttgatctaaatttgttttgtttttaataactttaaaaataaagttactatgtaaacctcagtatttgttagtagt

SEQ ID NO: 3971 - DNA, 1183 bp, Homo sapiens
tcttatcattgttcaaaaaatgatatcattcatggctctagttacatacataaaacagaaacttttaatatccctctgaaaactcactaaatatatagtacttaaaatgtttttcagtaatatagacaggttagcataatgccaggattcattacataataagattgatcacaaggcatacttgacgttactattcttaaccttaacctaggtagactgctgttactgagcacagtaatttggaatctgtcagaaatagggaagcaaattattggcatggggaggaattactgtgtatctttcttaaaactgtgatgagggtagagggtataacgtttttctaaacagaagaaatacatgattcataaaaaggaaaaaataattacgtacattagctattatgtggcatgtaagaaattgatattggctacttccctgcctagtattttctctgcagttctaaaaagtcattgatgactgtccctctttgtttcattttgttttgttttttttttaagagttcaacctggtcattgctatcatctgtataatggtcttagagcaagtcttctagatgactatcaactgccagaaattttgagaactcctttggaagaactttgtttacaaataaaggtaaattaggtgggagaatgaagaaactaaatggaagtgatctcattttcaacatcttttgtagaacaaagtactgtattaatctccaagaaacaattattaactcacaatttatttcatgtgtgcattagtaaattgtgtgtttaaacttccttcaaatgtatattcaacacttttaaattatatactgctctagaggaggcaggctgcctgtgtttgaatcctgcttctaccccggaaaagctagttctgttatattgggcaggttgtttaaattaacctcctaaaatccttagaacagtgcctggcacgtggtaagtgtttagtaaacagtagctactgttattacatgttaacatgttatccttcattataaactacttatttcagtatcttgtgtcttttgatatagttagacttgttttgaagatagtgagtaatcagcttgttcactgagattttagccagctacttttgaagatagtgggtaatcaacttgttcattgagattttagccagctacttttcctattaatagagttgatgg

SEQ ID NO: 3972 - DNA, 1144 bp, Homo sapiens
tataaaatgtcacagattttagctaaaactagagtttcaaaaaagtgaagatattcaagaatgtttttattttaggtatgttccagaacaaaaagaacacagatcccagtttaagaggggtttcatgcaagggcatgtaaatagacaagaaaaagaagaaaaagaagcaatatataaagaacgttggccagattatgtaagggaactgcgaagaaggtaagtttattttgtctgaaggtgagaaatcagtggctaaataaaacaaaaagccagaggctgggggcatcttcttgaatctgtacgtacttaaaggagagcattgtgagtctcttattcgagctaaatattgtgctgatttgacttttaagcagtaattaccccagtaattctctccgatctgtagattatgttcctccatttgcagattgagttaattttaagcttttgtagcaagttaacagaaaacttgattaagtatttcatgactttgtgtttaactttgataggtattctgcaagtactgtagatgttatagaaatgatggaggatgataaagttgatctgaatttgattgttgccctcatccgatacattgttttggaagaagaggttagttttatttttctttcttcagttaacataattttaattttattaacgtatcaaggccatgaaaaatacagttttcttaaatgcttatgaaatagactggaagaaattacttttgatactagaaatcatctcatagtagcaaaagatttaggcatttgacctgtttgaagaaaagactaaacaaatatatggattataaatctcattttttaaaagtgagcttagctggatgcagtggctcatgcctgtaatcccagcactctgggaggccaaggcaggtggatcacttgaggccaggagttcgagaccagcctggccaatgtggcaaaaccctgtctctactaaaaatacaaaaatttgctgggcgtggtgacacaggcctgtaatcccagctacttgggaggccgagcatgagaatcacttgaacccaggaggcagatgctgcagtgatccgagatcatgccattgtactccatcctgggtgacagagcaagactctctcaaaaacaataattaaaaaaaaaaagcttat

SEQ ID NO: 3973 - DNA, 1100 bp, Homo sapiens
gtcaaacttctagtttccccatcagtatatatccctcataaaaatgttgtgcctattgatagggtgaccgaataacttattgtccaaactgggacactttgagattgaaaggatgcactgttaataataatgcccatgtaataaacataaaccaggactatattttggcgcagctggattgtgtgctcatcctaccattagatcatgcatgtaagatatatatacacatgatcactatattacatagtcaataagtggtaagatttattaagtttaagtgtttaatatatgcccatgcatggatatatattaaaatcttccctttaaaaggggtattttgaattggtaactcagaaagtcctaagttttcattcctatgtgtttttggagctgacagtgatcattaatttttttttaagtactgtagctttaattttcataattaagactttgtatttgtattgatatttgcagctggagaatgctggaggagaccttaaggatggccaccaccactatgaaggagctgttgtcattctggatgctggtgctcagtacgggaaagtcatagaccgaagagtgagggaactgttcgtgcagtctgaaattttccccttggaaacaccagcatttgctataaaggaacaaggattccggtagacttttcactaatcttttcatgaggagattgaacttagattgtggaatattttattattaattttcttgagcactgaatttttctacgaaaataagatatggaatggttttatgagaaatttcccatggctctgatttggggagaaaaaggaaaaatttaagctttcagtttaaaaagattaattttaattgtacagttaaaagaacttatcatttgagtattttatgttttataggatttgtgggtcagagttagatgtagctgttgtggccattcattcatttacttaaaagcatttcatcaaaggaaagtaggaagttggctagaatactccaaagagaagaaatctgtgtacaataagtgtttttgcttcctatcccaatagactagtttctaaagtatggagatttcttaaatctaatatatgggctaattttga

SEQ ID NO: 3974 - DNA, 1176 bp, Homo sapiens
aacaaaaaaacccaaaaagttttctttactgttggttaaaaaaaaaagccagaccatagtttgactggtggcatggaatttgtgtatcaaataaatgcatttgcttatttgacaaaccatcagtgtccactatttgttaccagagttgggccactatcttttaaaattgctggtgaaaacttgccactagatggcagtgcctgtatagatggggaaaaaattgccaccattcttggtataatacagtgtagcttagatgaggtggtgaaataggggtatcagccgaatattcctaatatagtttctcttgaattaataaactgaagatttgtaggaaaatgagtgagcaaaatttgtttactgttgtgaatttttcctacagcactgtttttaatcttgatgttttccaactttctgtactaatagatacatttctgtgcataagattataaagcatatactcacagttcagtagttttcgttaaggatttactgtgtgagtactttactgtgaggaattgcagaaccttttcccctctactcttgtctaaaagttctgtgtggcacacagagatgcgacctactcaatctgacttagtaaaaccatgctgtagaatttttgtcttaaaaagaccacatacccagcacccatgaaataaaagattcatctgtaattgggattcaaagtgattaaattcctttgttcatactcataaatagcactaaagtgttataacattttcatttacctatttttagttccttcattttaacttaataaaaatcttggattgatattcttttttttttttttttttttttgagacagcgtctcgctctgtcacccaggctggagtacagtggctctatcttggctcactgcgagctccgcctcccaggttcacgccattctcctgcctcagcctgccgagtagctgggactacaggcgcccgccaccacacccggctaatttttttgtatttttagtagagacggggtttcaccctgttagccaggatggtctcgatctcctgacctcgtgatccacctgcctcggcctcccaaagtgctggaattacaggcgtgagccaccgcgcccggcctagattgatattcttaagcaataaaagtttactggttgtcctatttgccatattattgaaacttggaaagga

SEQ ID NO: 3975 - DNA, 1181 bp, Homo sapiens
ttgaaattaaatgaattgaaagggaaactcagagtactaggacgtttattaaaaggaaaaaaatgtcttgcaatgtgctgtaatcacaagaggagaaaataacttgtttccttgatctgtcagaggtcacagtaacctgggccgagctgttattatttattatataatagtagtaggaagttaataactggttctctgtgttccaagcacaatattacaacttcttttgaaccgtaaatatcagaatgaatcctcttcccaggggattgaacagaagcttaatgtttacaagtgtttgaatttgtgatctgaaataacacaaaattaaaaacatgatttctctaattttccaactagaggaagagaaacttgtggaaaagttctttttttttcttttttttttcttaaagaagggcagccaaggtagtaacctaaaaatagtgcccaggcatatgagagttgtcctacgaggttaaagaacacactgttccactgtatggctttggccctgagtggccagggaggtcaacttgaccctgccatgttggtttgacttactaagacacaggaatcactgttttccttgaccagggtctcacaccctggaggaatgttaagtaagagaaagaacctctttcctgaatattgacatgtaaaagaccaaagtaatttttctgaacttctgcaattctgagaactctccaaggaatttacagtgattttagtgcttgtcagcatttttccatgaggactttcatacatttgactctttagttcacaggttcccattgattgtgagcaagatatttatctctttagcccttggggatccagctgagagcaatctcttgcatttttttacccgtgtatgtacagatatcatttcttgtgtatgccatgacttgaaaaagtttgggaagctctttagcaatatcagctaaaaggatatgaaatcacaggtgatagcagttgtcattcagtaatttcctacaagcagcaccccaaaggaaatatagtcctaatctttactatccacttctaaatttaatgtgaatttcatacatgttattagttgttttctttataattttataaaaattattcatcgggagtttaacttccacttccatgctatcggatgtgttgggctccatgcaagaacttggaagaaaaacaggcag

SEQ ID NO: 3976 - DNA, 1186 bp, Homo sapiens
atataggatacgagcctctgcctagccttcagtcctttttgtttggtttaggtgttggttgtctttgtaaacactggaagctgctgagtcatctccctcggctttttccatcacactttaccccacatacattcatacacacttggctcaagcttttcggttctttctctggacactagatgactgtcagccttacctgggccctgccccagaggctgccccagcatctggtaggagcttagtgagcggaatggattcctagtgaaataatgaatgtctttccttgtattctgtgtttgaaacctccaggatagcaattccatctgctatatgaaataagaaaaagtaaatattctttggttaacctttgtcattcgcctacttaaacctcaatcacatttctttgaaatcatgccagatttgtggagagcaaattgccaggtaaatggagggcaaattcaccaaactaattcttagttttttccttctctaagggaaggaacactttgcagcttaacagcattttcaaagtttcaaacaggactggctactgagttgaagaagcattagttggcccttaagtcctcccctctggccactgttgtccacttcacacatttggaccaacttccctcatctgagcctgaatcctattagccagcactgaaaatctggcatggtttcaaagaaatgtgattgaggtttatgtaggggaatgatgaaggttaaccaaggaatgtttactttttctgatttcatatagcagatggaattgctatcctagaggtttcaaaataatcttatcgagatgacttttgacccgtcttcaatagcattacaacaatccccgcagcctggagactaagctctgctgctgttttgagtgagctggccccacagagggtgtgacgtgggagtagagatgagtgtcggcctcaaagtctgctcccatctctcaggaaagcaccttctttagattaaggtattggggctgacactaaaatagatgatatttgaggctaagttttcaatttcactctttccagaaaaacaaagtactgatagggatctactctaaaagctggttttaaatacaaggcgttacagaagtgccaaatgcagtcactgcacttaaaatcatggcctgtggatagaaacaaagctgaagagtggcctgccgagtgta

SEQ ID NO: 3977 - DNA, 1186 bp, Homo sapiens; identical to SEQ ID NO: 3976

SEQ ID NO: 3978 - DNA, 1127 bp, Homo sapiens
gtggctgtttacctaaattgttttaaagtatttaagatcatgtgttgtaagtaattctccaaagtgaaccgtttgctataaatcttattttaaaattcttactgacgtttttcttactctacttaagtactatacttaaatacttaaaaagcagtttttgtttactttagtaggatcttaaaaagaagctttttttttttttttttgagacagagtctcactctgtcacccaggctggagtacagtggtgtgatctcaactcactgcaaccctctacctcctgggttcaagtgattctcctgcctcagcctcctgagcagctcagattataggcacccgccaacatgcccggctaatttttgtatttttagtagagacggggtttcaccatgttggccaggctggtctcgaactctcgacctcaggtgatccacccgccccagcctcccaaagtgctgggattacaggcatgagccaccgcgcctggccaaaatgaagcattttttaaaccaaactgtttctttgctagtgtgatctagcatgtattcattccactgtgctctatttctttacattcatgataaagtgaaggacaagttggggaaatctgagcagtcagatcctcattatttcacatgggaaggtggcaattaataatattttctcaaacacatgaccctatattttgtcagcaagagtccccagttatgtgtcaaggagatatgacaggccccactatcatcattcttagacatttagactaattctgctcaaagtatcctttgtagactttattgcaggtctgtgaaagaataggtaaataaattgaaagtaagggctgagaaatttttgtagcaatttgacattgttataatgtccaatttttctaatattttatttttattgtatcttacgaaatatccatatgcaatggattcgaaataaagaaaaatctggtccttcatcagaactaggaaagcactgatttaaacatttggtcagacattttaaattggtaggtgttttcatttatattatcttgtttgcttatttaactattaagtgaagatgtaattatttttattcccccttaaatagtttttactgtcttttcaaaaaaaatgtgc

SEQ ID NO: 3979 - DNA, 1168 bp, Homo sapiens
acttaatagagtctgctttggaatatggacatgttctaatgtcagattataaaactttacaggttagaatacctgtgtgataaagtgtcaatggataatgcagtagctttcatgatgggatacttcatagttagtggattttcactgtttgcttatttaatatatattgagtactcatgtgccctgcaccccatgttaatgacaaagctaggcctcaaatgtctttattcctcagcgtaatgatcgatctcacaaagctcttgtgaaatcagttgggaaaagactatgtacagtgaatattgacaactaggcaaaaactgaatctagtccacttgtgagaatttcttatttctatatactgtgcttatagaatctcctttcttaaatcgaatataaaatgtatggtttcatttcagtgtaggtttgaaagtaaatatctgtccagatttaatgaactcatattttaacagagtcgagagaaagaacttatgggtttcagcaaatcggtaaatgaagcacgttcaaagatggatgtagcccagtcagaacttgatatctatctcagtcgtcataatactgcagtgtctcaattaactaaggctaaggaagctctaattgcagcttctgagactctcaaagaaaggaaagctgcaatcagagatatagaaggaaaactccctcaaactgaacaagaattaaaggaggtaaatctttgcttctctgttgcatcagaacatcattcgtccacttcagctttatacatttttgtttttaatctccgcgtcagaggtgactagtgataaattttcttcattttgtataatctcaaaagaatgaggtcagcatttcagtattccatatgtgaactgagactatcaagaaactatattatccccagaagcaccatatagtaagtaaatcaccaccaccaccccactgtagaaataatttaaacaaaagaaagtttgtgtttctttaaatcttaagtatagacaatttaaagataaataaaaaacaagtgtatatgtatttatataatgaatatacaaacaactatcttaatgtgttttgggttttgaatttatggatgtagtttctttgcttgcattccaaaatgttataaactaactaagatgtatagcttatcggtgcctgtcccccatccttg

SEQ ID NO: 3980 - DNA, 1197 bp, Homo sapiens
tatgccttccaaattatgcaagtacttttgattgaattgacctaaattatgtctaaaccctagccacagaggaatctgggaaatgttaacttttactcttcgttgtcacaggaaggaacgctaattcatcttatatcctccactttgttttaatgtggagaactgcgaagttatgttagcagaagaaaataaccacaatttcttcattgtgggcaagttaatattgagttaggcacatagtgtatctaaggctaaaaatcattatgaactcagtagtcaaggaagtgccctaagaaaaagttgtaaagatattttaaaagaagctgagaacatgaagccattaagaaatggtgtgtttacagccgagctagtgtgtttaactttgtgcattgttgtaacaccatttgttttgatacaggatatcgtttttttttttaaggtgctttttcccatatgcctaaaatttgttttaatgcatcacgtcaagtcatagcaactgaagaaatgtacatctaacaaatgatgttcattagcataaaaacacaaattaggttctttattttttaatttcagaatatgatgctgtggctgagaaagctggtaaagtagaagctgaggttaaacgcttacacaataccatcgtagaaatcaataatcataaactcaaggcccaacaagacaaacttgataaaataaataagcaattagatgaatgtgcttctgctattactaaagcccaagtagcaatcaagactgctgacaggtagagtatgcatgttaccctaacttgttttccctttccctgccttcacattggaaagggggttactatgtaatgttccataaaatgtttctcttactgttaatttattgaacctgtctgacacattacctaatgggacttccatgacggaaaacctataatgaacatttatcctatggccaattaaaaaggctggtaaacaggtatgccataggaaagtacaggtagactgtaactccccagttgctgtgagggcatagaaatcagttttgtttctctggtctcggggagggagtagttggtccttaatttaaatagatacaggccttaaaagaataagtaaaagaggtaaaaatgggatcacttagcaaaattaattctcttggtaacttacattttagtttttatttttattttttgatacagagtcttgc

SEQ ID NO: 3981 - DNA, 1099 bp, Homo sapiens
acattacacatggaattctttatttcttacaattgagctttttctttattgtctaataactccatctccatctcctctggtatcagtggagaccaaattattttttatttgaaccaaatatttccattttggaggagtaaaatataaattaaaaatgcaaattagtagcagaatcacagctagaatcctaggtcatcttcctagatcttttccactagaagtcaaaataaccaaattcctttcacactcaaatactgttttatgaattattcctgccatcattcctttacatgttatcaatgtaatgtttattgtccaaaaaatatttgaggttacatgtttgtgtgatttacctgttattacttaatgtttgacttttctttgtttctctttaggaacaaacaaaaaatgcacagttcataataatttctcttcgaaataatatgtttgagatttcggatagacttattggaatttacaagacatacaacataacaaaaagtgttgctgtaaatccaaaagaaattgcatctaagggactttgttgaactttatgctgaagattcttcaagttgattcagtgtattactgatttttttctatttgtaaaggattatgagttgtataaaatacatactccctaaactagatcatgaaactggtttctgttttatgcagttgtcatttgtaaagtctaataaaatattctctataattgcttctagattacaaaaatatgacaatcttgtaagtagcagactatggagaaaaatgagttacctggagggtcaggtaacttgccaaactaaaaagtatgttagttgaggcaaagtcctaagcaaggttgtgctatcaaggctcagcataccttcgtgggcctttgatttaccaacactggaaatgcctgccaactaatcttggatagattctttaaggcattccacttagcttgccagttgagacaatcaccacagttattacccaaatactatgaacatatttttgtaaaccagtcattctgaattatagtgatgagaatttaaatatatgcttttctagaatttgatgtttgaccatttatgacttaattaccagagag

SEQ ID NO: 3982 - DNA, 1334 bp, Homo sapiens
aaaatacaaaaattagccggacagggtcgtgcactgctatagtcccagatactctggaggctggggtgggaggatcacttgagcctgagaggcagaggttacagtgagctgagatcgcaccactgcactctaccctgggcgacagagcaagaccttgtctcaaaaaaaaaaaaaaggatttcacatagaatgtcatctcattgtgcatttcagactgctgcacttagagctgtgggcaacattgttactggaactgatgagcaaacacaagtagttttgaactgtgatgctctttcacacttcccagcactcctgacacatcccaaagagaaaattaataaagtaagtactattaaatactacttaatagatagcacttaaaatgttaacagtttctatttgtaaaattagagtcttagaaatgtctgtaatattgattcttaatacaaactgtcatttagacatcaagagaaaataaaaattttactctccataacaagcattaataattttttcatacataaaaccagttatgaaaagtgcaattttggctctcttggaaatgatgaaatagagataattgggtgttgaatgttgtatgactggaaatttttaatatgtatattatgtaattcttataagtttagtgttttataggtacttaatagagagtgtgtatgcatgtgtgtgtgcttgtggtggctatggaaagggggcactgactggtgatgctgatattggagtgcatctgaggctgttgtagaaataacatgggttgttgattacaacattgccaatgattataacccaagaacagctcacctaactagcctggcaccctaaaatctctaacaggttcattaaaatggtcctgtgatctgatccaaaagagcctagtatacattagctaatactaatattttttagagtaaaacttattagttatctatgattataacgcgtaaggccaccattattttgtcaaaagtagcaccaactgtgatgtaaagggtaacataaaaagattaagataggccaataaaacaatcaaatatctggttccacttttccttgagagaaattatgcagtgaatgactattacaaataagtatactaaaacaatgcactttgttttttatgtctccattgttgtggataattgatatttatctactttggctaagattcttcatcagaatagaatagagaataaagcacattatgtgagggaagggcactgaatcttatttacagctgttttaggatttgtatttgtattatactcattattcatatttgctcattcattatttcatatttgctcattcaaatt

SEQ ID NO: 3983 - DNA, 1334 bp, Homo sapiens; identical to SEQ ID NO: 3982

SEQ ID NO: 3984 - DNA, 1227 bp, Homo sapiens
tttgtcttactaacttcccatgaataaggggaaagagccaatatattacaaaatttaattggaatgcataagagaagataaaagcaaataagatttcatttgatatttaaaataacaaggttttgcatttaaataaaaatctaccttaaaacacagcatatggacccttttcacaacatggcgccgaaagcgaagaaggaagctcctgcccctcctaaagctgaagccaaagcgaaggctttaaaggccaagaaggcagtgttgaaaggtgtccacagccacaaaaagaagaagatccgcacgtcacccaccttccggcggccgaagacactgcgactccggagacagcccaaatatcctcggaagagcgctcccaggagaaacaagcttgaccactatgctatcatcaagtttccgctgaccactgagtctgccatgaagaagatagaagacaacaacacacttgtgttcattgtggatgttaaagccaacaagcaccagattaaacaggctgtgaagaagctctatgacattgatgtggccaaggtcaacatcctgattcggcctgatggagagaagaaggcatatgttcgactggctcctgattacgatgctttggatgttgccaacaaaattgggatcatctaaactgagtccagctgcctaattctgaatatatatatatatatatcttttcaccataaaaaaaaaaacacagcatatgttcaagttagaagaaaaacaagttttctcttactttgtagagaggacagatgtgcccagaactatttattccaaaaactttcactaagtatcataacttacatatcattttcttatggccaaatgttatatattgagtggattaagttataaattttagcattatggaacaatctatgggaagctatagagtttaaaattgctatttaaaaaaaccacaaaacttagtagaaattccaaataactcgaagactctgttcaacaagtgaatgaaaaagaaaataatatttcctacccaggaaaatctacttgacttgataaattgacttcaggttacaaaatcaccagatgtcactaaggctatcctacagtaaaactttccttccattcttaaaatgataaaaaataggctaaaggatttttgccatgttcttcagagtctcatcgcaacacatcaatttcattaggagaactatcatttactacaagcacagactaccaatg

SEQ ID NO: 3985 - DNA, 1172 bp, Homo sapiens
tttgctcctcttttgctttctgttgtgattgtgaggcctcctcagccgtgttgaactgtgagtcaattaaacctcttttctttataaattacgcagtctgaggaatgtctttagtagcagcgtgagaacggactgatacatcatgccatataaaaatttaaacactgtaaaaatacatcaaaacttactataaaggatgcattttagaaagaaaatttaactaaatgtatagccattttgattgagggagaaaggaaagaaagttatccagggacctacatttttaccaaacaattccaaataaagaaaataaaagtagtaagaattttatatttatctttgtaaatcaatgagttttggagtggtatggcacatgattgacaactagaaccattactctcctttattccagtattttaaataatttgggattatatatcaaaatatgatcaggtaattgttcccaggtcagcagttgtatttagtcagctcaggctttcctaacaaaataccacacacaggatggcttaaacatagaaatttactatctcccagttgttgaggtgagatgtccaagatcaagacgttgataggttggacagtcttggtatcttctgaagcctctagctttgcattgcagatgagtccttctctctgtgtctcacatggtcttttctctgtgcatatgcatcctggcgtctcttcatgtgtctaaatgtcctcttcatataaagacaccagtcagattggttcatggtccaacctaatagcttcattttaacattatgtcctcgttaaagaatttatatacaaatataatctcaatctgaggtactgggggttagggcttcaacatacaaattttgggaagacacaattcagcccataacaactgtgaaatttgaaacctccctcagaagcaaggctgtgggttgtttgagatttaggacccaggcgtagagttgaggagagggtcaagtttgaaagagacaggagagagtgaaaaatttgtcaccacaaatctttcctgatttcccgttcctttttatctttttgtggcaaaattttatctatatatctttctatctgtctatctaccatactaagtgtaaatatttcttcccttctacttttttcttctatatctgttcttccttaccccttggttttgc

SEQ ID NO: 3986 - DNA, 1223 bp, Homo sapiens
cgggcccaatgagcaaggaggccgagtgggacttcctcccggaatcccgttggccagaatagccgggccgtgggtgacacgtaagttgggcaggaggtggcggggcggcagaggcaccagccgacccgtcagtgacaccgctgtgccgtccccaaaaccagccgagacagctggcccccacccttccacccattgggcaggccgcacgggggcgcggcccggagtcctggtccctttgttgggcgcgcaccccctcccttaggtggcaacaaagtcgtgcagtgggagccgccgcgatagggcggggagtggccagggcgggactccaagaactgcccgggggcagcggggccaaaaagtgggaagaaggaaaaaaggcaggaggcatctggggacaggcgcgagggcagccggctctgaagtatgcggagggcctcctcccggccccgggcattcgcggagaacgagcctcgcagaagtttggctgcagctgcccgggcggcgtcgatggctgcgcgccccgcgccgcgcgggggctgagcgggcgccacttcccctccgggccggcttttgtgtctggcatctcctcctcatgctgcgtctggccacctactgcggcggccgctgctgagacgctcgctcggaccaaggggaggagacggcgggggcggccgcggctttgggtccaggcgggactatgggaaacgggatgtgctcccgaaagcagaagcggattttccagacgctgctgctgctgaccgtcgtgttcggctttctctacggcgcgatgctctactacgagctgcagacgcagctgcggaaagccgaggcggtggcgctcaagtaccagcagcaccaggagtccctctccgcccagttacaaggtacggctaacgggacgcgcgcagccggtggccaactttgccccgcgcctccacccgggcaggaaaagtggctttggtgagctattggcactgtggttgccacctctgaccttcagggacgtcagaggtgagcgtttcaggactgccggcaccagagtgtcaggggagatgacattctcatcctcccgcttcttcctcccagcggttaggtttagaacttcgtagcaccagcccatcgtcccgctgggcgtttggtgggcgggtgcacagatagtcctttacccgagctcttgtcaaaggcccagctgcaatcggggcagggaaactggtagccctccg

SEQ ID NO: 3987 - DNA, 1149 bp, Homo sapiens
catttttccccacgatttttccttttctgccaatctccacttcactgtgaacaaagagggcctctatcatcaggaaatctactcagctctgctggggtgctgacggaagagaaagagcagaagtaacctcaaagcaggttctaaataaacagtctcctacttaatgtaggataagtctttattttgctcttcattgcttccaaaattaatttctacttcaaatatattctttggggtttaataagtatgctccacatgttctgaaatatcagttttaaattgacaaataaatggccagtagaggtgacattggggacacatgagtggctgtcaataaatgttcagtaaacaaatgaataactccatgtggactgttatatagaccacacttattccatcttcttcatctaaaaaactcttattctgtctcttgggtccctatttaatttttttttccacaggaaggattttcctgactgctcttcccaaattaaattatgtcccaattatttgttaccgtagcacactaaaatgctgcttgatcttttatcatattgtattgggattcactgtttaatgtctacctcctccactgcaccggcctgttatgtgtggtattctgtccccactgcctagtacagtaattggcaaatagatacttgaactaaaaattttatggggaagagtggtcaggaagtaaatttcaacttgaatcagcaaaaaagaaatgaacagtgggtaaggtatgcgaaggaaaaagaatctgtggcaagagaagaaattaaataaaagaagagatgcttggaatggaatgaggggaaggtaaataatgactttgccatcagaacttcatgcctaaaccatggaagaagtaatgggcaccaaagcaagggaaggaagtagttaaacaaaaagagagcacagaataatttacagtaataataatcagaaattaaaatagaaatgtactttaacaaggaagatttcctccacctgtttttattcctgactttttcttttccctagggaaggggagagcaatgtgaagtgaaagtttgatataaagatttgatttaagacatgagtttttcttcaaaaataaaaccttatttcatagtaagtaaatataagacattgaaccattttaat

SEQ ID NO: 3988 - DNA, 1319 bp, Homo sapiens
tttataaatgttttctatttgaatgatttataagagaggctatcatctaagattctaaggtttcttcttagtatgtaaattatgattatttactataaaatatcattcattttcttactgtgagagcagaaattcaatctttagtggcttgcattctctttattaacagagtcaaatctgtaattatgacagtgggctaggctgctcttaaacaaaggttatgacttcatggcaataggctgagggccaagagataataatcttaggctgacataaatctgaaacaatccatgaaattgttgaaaaacattatcagagtgcactcagttaggctcacctctgaagcacagcacaaacaatgagtcccttaagttttgcaaggtttctatgagggactcgtggctgtctcagacatgtgagggagtggaggggaaaggaaagtgaaatgatatggaaggaatcaagaatcaagagctttgtgacatcaatacttatccacattcatagtgaaggctctctccagcctatttgtaaaaaaaattatgcaatttgtttatttttatatttgatttctttgtggggcaaagagcaggagaccaaatagcatcagaacttgaggtacattaaccagaaaaaatgtttagctattctagtgaatacacagtttgaatgaaaatgtggtcattaaaattccatagtggctgagcagtgtgctgatatatatggaattatgcatatggaatggggctgtgattcatgaagttcagtagaaaagagctctgtagatcagattccgggttcaggggactttgagatggggtctgtctggtctgactggggtgaactttactttgaaaggtcttgagtgatttgctgaaggaaaagctgttagtaaatgatacaatggcgactcaaacccaaatcgggtgacctaatcttatactccaggcctaatctttacttaattttattccaagaacattttgatcctggtagaatcaggtgaggaaggaagagcaaccacagcctgggcgggaaggaaaatcttgaggagctctggcgtgggtgtgcactgggtggggaacccagcccctcctcttggcctcggtttgggcggcgggtttacagtcttcatgctgggagagctgctttttgaaccatctgtctgcaataaacgggcctcctgagtgtggtgtcttgggctctaatccttgagtaatgactataggtggaaattgtctctgaggcaattcctagtgagaactaggagttctaggaaggatctatttgttaaaaatcagccaacagcaattttccct

SEQ ID NO: 3989 - DNA, 1199 bp, Homo sapiens
ctttactgctatacaggctttattttcatgtgatttaagacttgtaaccatttgtgtggaagggtttggacccatgagtagtcattaactctcctgctgaaggtcaattttagcagaaaatgagaggtggcagatgtagaatattggagcgcacttgtaccaggagttaggaggcctgggttcaggtctttgtagtttgatggccatgtgactaagtcatttaatttcgctgaggttcaatatttttccatgtgtaaaatggggaaaaatgtcttgcctctctgatgaggttatggagagggtcatatgagagacagtggaaaaagatatcttgaaactccagagtatcctttaaatttagagttttgttactgttaatataatgaggagacaaggattcaggataaagttattcaccatcctcagtatcagggcttctcttcctctgcattggtttgtttatgctagagagatcaggagcctcatgaaacagttaagtgtgtctttggcagataaattaattgtattcaggaacagtgccaacccttataagtcataatggcactgagatagtttggtattgtgtatgatcaggaaatatagaactggtgaagagctgtcaggtttgcaggtgatgatggtgggaaggtatgtcagaccagggagctctaaactctagacaaaggctaatgatcagggatgggacccacactagaaaataggcaaagggtctgtctatctgaagtgctgacagctaggtgacatttaggtgtggtaacctgcaggagaggctcagtcatggcgaaattctacatctttgtcgtgcaggcaaaacatgactccctctatttgaaatcattttttttttttgctgcttatctgaattttcaataaatggtaggtaatatttttactattaaaactattactatgagtaaagtactgagataggtattacatggacattataccatttaacctttagactgaccttggcattttggagttattattctcatcacagaggaagaactgaggcccaagatggttaatcaattgccaagtctatagtcagtaagtagcagaactgggattgaaacattaggctgtctacgctcctcctctctctctctaccctgctgacaccccagtgcggcagacacccaagtggttgcagctatagagactagatccaagcc

SEQ ID NO: 3990 - DNA, 1176 bp, Homo sapiens
ggaggtattacatgaaagcctgaaagaacatgaaatgtgcagaaaatgatgagatttcaagttactggaggccaaatgtgtgggtatattgcagcacctggggatgggcttaataaatgtagcaatgttttctgctccatctacatagtaggtgatcagtgaatacttgtgaaaagaatgaatgaaaaagaaaaaaaaagaggagagataggcaggatctgattatgaagctaatgaatgtgggctttattttaaaggcactagaagcttttaagcagggccatgacatggccacattgaacatggtggcagcaaagcaaatgatcaaagttaggggagactggaggcaaaaaatccagggaagagactgcagccctaatgcaggggagagataacacatgtctgaacaaaagtagtggcatttgggcatggagaacatgccaagttacaagatgtttagaaggcagaatgccagaactcctgcttggttgtgggagtgagggaaagggagaaaaaaatctcaggggtgtttattttctagttcaggtgaatggtgagaggtaacagcagaagaggaattggagaaagacatttaatctggttgggaatgcacccttttaggtgcctacagaacatctgggagatatccaagaggcagctggaaaatgaggcctgaagattcagatgtgggagtccttggcacaggaagagagagcgtacatgagaagagcagtgtgataaggacggaagtctggcatgcagacatttatgggacaaacagaggaggattcagccatgaagcaaaaagagctccaccagaggaaaataggaaggcagtttcagagtccttctttttacactcttgtagctcttcatttttcttcatagcacttaatgtagctatagttgcatacttgtgattattgatttgactgtagagggtagggggttttgtcacacaggatcttgaaggccctgttaagtacatggatctttattatgaggaccctgaggagtcactgatgggttttatataggaaagtgctgtggtctgatatacgtttttaaaagattactctggctactgggcagagcatggatcttgagggatcagctgggagctgttatagtatccaaagagaatagtctttgcactggggatagtggaaatggaaa

SEQ ID NO: 3991 - DNA, 1170 bp, Homo sapiens
gcagatatattgttttcacccaccaaacaaataactgttaaagggcagaacatggtatatcactggagcttcaaaatggaaagtgtacaccccaggaggtgtgcaggtgtggagtttacagacgtatagtagaatgcctatgtatattatttctttcttatcctagtattattttttgtgagtttgcatcacagcagaatacctatataatttgtaaatacatacacacacacatacatgatgaatatgctcatgataatttttaatgtattgtttgaccaagacagtttggagcccactagttcatttatatcttcacccagtcaagaatatagagcccggctatgaaaagtgatataaattaaatagataaaccaagtttatatgatcttcatttataacattatttctatgcaaagtgtacctcatgtaactctagctttgacaatacaatgtcttttggcatccaaacttcgcccctgctagtgggttgttggcagtcctagcttaggagattctgggtatgcatacttgtgtgtgtgtgtgtgtgtgtgcgcgtgtgtgtgtatagtgtgtgtgtgtgtagatgctttgagaagacagaggattgtagaatatcagtaactttatacattagcatgaaaaatgatgagaagatagttctctctgactgggtctatcatcattcattattgtttttttctagatgtctggggttgagagggaatctagatgcttttttcccaaaggtttaagcattggtaagttgaatacttctgaccgatgattcctggaatcttaaggatgagagtaggaggataaagagaattgtagcagctgtttctttgtagttactgattttagactcctgaatcaggaaaagtatacaattgaaaaaattattaaagcagtgtattgaaaactgtcaaaaggcctcattgttatttcatgtaagtcagttttctgggctgaggcccagatggctaagtgggtgctgagatactcgctggataaacaatgatatacaattaatgcaacaaaggagatttgtgccaattatttccagaaccaaaggccagtgaaatactttaattttatcacacacatctattttggcagtgagcacttagagttttataggaaaaggtaagccatgccttggggtccgaa

SEQ ID NO: 3992 - DNA, 1150 bp, Homo sapiens
ctcccaaagtgctgggattacaggagtgagcccccgcgcccggcctttcttctgtctttattaaacttcattttgtttcttaaaaaaacaactctttaatttaaaaaaatttgttctaatgtctattactgtcttttaatgttagctttggttcctagaatgagaatatcttctatgtctttatttcagtaacaataacaaaacttgcttatggactgaggagcctcattaagacaaataactgaaataatattctctcagcaggaattcatagagtaaatgcatgcatatttagaataattggggcttgcagtggccaggatttggccagttgtgacaaactgaaagtaaccacaattgatcaatttttgagaattaagctacggtaaatatttctcaaataattgattttaaaatatttactggctggacacggtggcttatgcctataatctcagcactttgggaagccaaggcaggagaattgcttaaacccgggagttcaagaccagcctgagcaacatagtgagacttcgtttcttaaaaaaaaaaaaaaaaaaattagccagacgtggtggcatgcttggatccaggaggtagaggctgtagtgagttctgtttgcatccaatctgggtgacacagtgagactctgtctcaaaaaacaaacaaacaaacaaaaaattaccaatcttcaactattatcaagtcatgattatgaacattaatccttagtttgtgcttttttagaagtagtaaatataggagtttgggttggcatgcactaatccaagcatttaagtggagatttggaatgtgatgggcagttctacaggaagagaaagagagagggagggaaagcgagagatagagggggagagagaggacaacatgtttcactttgttagttgtttggatttcaggtttttgggagtagaatgtacaaccccaacagatgcaatgcggttagtttatggagtctatgcatgttttatcctggattttcagtgttatcgagggatataagtagaattattattgatttctttatgtatgaatggtaggtgagaaatacttccttgaaaggcaggcacaaaagagagtattactactctgcctgctcattcattcattttagctactcatggtgtg

SEQ ID NO: 3993 - DNA, 1167 bp, Homo sapiens
ggggccctttcagagggcagctcttctgggagactgcctcttggtagccctggggaagtaagtccttggtcccactcctggggtttggagaggacagctgggtccctgacacttcctgggctccctgtgtcttcagctgtctgaccccatgatctcccagctcttccctgcacaagtccagtcctccagtctagttttctgcctagctgcttccacagggctcaggggtacaaatgcaaagtagtcccagccagagtctttcttccagcccatcattaacaagggcatgggccagtcacttaatctctctacacctcaggtttctcgtctgtgaaatgagaagcatgaactaaattggtggttttcaaattgtactcctcggcatcccctcaggggagctagtgagtatgtgtatgtgaatgagagaaggagggagggagggagagagagagagaaagagagagagggagggagggagagagagagagagagagatttctctctcttttgtatatttaaatcaaagctcagttaatttaaactgccttgcaggtaaatctttctcatgcttacacacaaatactcattaatacttttctctttctagctgctcccctccactccgtatcatttttctttctctaagggaaattttcgcttagagaaaaaggcaattacacaaacttccttagaaactttaaaaactgtccctaaagaatccagggctcctaactgccaaagatcttagagtgccaaaaagcttcttcagactctctacagagtctctgtcagtctgataaatctagtaaaaatgacattttcttaagttttgagataagcaaacacagtcatgcatagttatgacaggggtatgtttgggaatgctttctgagaaacgtggcattagacaatgccattgttgtgggtacatcattgagtgtacttacccaaaccttaatttagcctattgcacattgaagccgtatggtgtaccctgttgctcctaggctacaaacctgtacagcatgttactgtactgaataccataggcaattgcataacatagaaaatgtatagtaaaaatacagtgtaaaagaaaaaatggtacacctgtatagaacacttgctacccatggagcttgcaggactggaagttgctctgggtga

SEQ ID NO: 3994 - DNA, 1552 bp, Homo sapiens
aagattaataatgtagtagttacacttgattaaagccatcctctgctcaaggagaggctggagaaggcattctaaggagaagggggcagggtaggaactcggacgcatcccactgagccgagacaagattctgctgtagtcagtgctgcctgggaatctattttcacaaagttctccaaaaaatgtgatgatcaaaactaggaattagtgttctgtgtcttaggccctaaaatcttcctgtgaattccatttttaaggtagtcgaggtgaaccgcgtctggtctgcagaggatagaaaaaaggccctctgatacctcaagttagtttcacctttaaagaaggtcggaagtaaagacgcaaagcctttcccggacgtgcggaagggcaacgtccttcctcatggccggaaatggaactttaatttcccgttccccccaaccagcccgcccgagagagtgactctcacgagagccgcgagagtcagcttggccaatccgtgcggtcggcggccgctccctttataagccgactcgcccggcagcgcaccgggttgcggagggtgggcctgggaggggtggtggccattttttgtctaaccctaactgagaagggcgtaggcgccgtgcttttgctccccgcgcgctgtttttctcgctgactttcagcgggcggaaaagcctcggcctgccgccttccaccgttcattctagagcaaacaaaaaatgtcagctgctggcccgttcgcccctcccggggacctgcggcgggtcgcctgcccagcccccgaaccccgcctggaggccgcggtcggcccggggcttctccggaggcacccactgccaccgcgaagagttgggctctgtcagccgcgggtctctcgggggcgagggcgaggttcaggcctttcaggccgcaggaagaggaacggagcgagtccccgcgcgcggcgcgattccctgagctgtgggacgtgcacccaggactcggctcacacatgcagttcgctttcctgttggtggggggaacgccgatcgtgcgcatccgtcacccctcgccggcaatgggggcttgtgaacccccaaacctgactgactgggccagtgtgctgcaaattggcaggagacgtgaaggcacctccaaagtcggccaaaatgaatgggcagtgagccggggttgcctggagccgttcctgcgtgggttctcccgtcttccgctttttgttgccttttatggttgtattacaacttagttcctgctctgcagattttgttgaggtttttgcttctcccaaggtagatctcgaccagtcccctcaacggggtgtgggagaacagtcatttttttttgagagatcatttaacatttaatgaatatttaattagaagatctaaatgaacattggaaattgtgttcctttaatggtcatcggtttatgccagaggttagaagtttcttttttgaaaaattagaccttggcgatgaccttgagcagtaggatataacccccacaagcttagcgttccaataacggaacactaggcataatgaaaga

SEQ ID NO: 3995 - DNA, 1200 bp, Homo sapiens
gtttatcaggtcatatgaaattcaagtttggaaaaatttgaaagtacattgcatgtcaataaacgcatcttggtgtctgattctgcatacatctgtagagaatttgaaaacaagcagtcaatttagaacttctgcttggtcttcggaagcaaaaagaggaaattcaaaagtaattttacacgtccttccaccagaagctgaaaggatggctttttcgcggctgaataacgaaagccccctgcttcgccccggactctgagcagctcaacctgcggaaaggatgtgtaataaaacgcctttccagggagacaaaaaaaaaaaaggccacccaaaggaagggcaactcgggagtgcctggtttctactgcggtacccgggcactttggaagaaagtgcgtgcagattcaagcttttgaaatggtttcagctctgttcaattgggcataggctatttttccttttctgtttttttctttaaatacattatattcattcctctcaatttgataataatcacttgagaattgcgaattgacacttacatatcaaggactttacaaaaccctctccaaagtggggtttccgtagtgtagtggttatcacgttcgcctaacacgcgaaaggtccccggttcgaaaccgggcggaaacacactaaaaaatccctttttttttttttttttttttccttcgcttggaagaaagcgtgagatcacgctttgttttcttttgttgtttgttttgtttttttttctgagggaagccttagcttaatgtatgccggtccttcaaaagacatgatagcaatttgagagtctgaactgtaagtttttgttactttattcgttcaccaaatgtttttatggaagccttgccacgtggaacatgtgtcccgggttttaaaaaatgaatttgactcaccagctaacactgaaaaaataatgtacagcctagaaggaaagatcaaagtgtaaaagtggttagtcctgtcgcctcctgagcatttttgtattatatcacttggtttttcgtctgaagtggctgtaaataatcgtattaaaaatcttctggtccagacgcaggaaaaccttttccggtataaagcccaccttcctctaatgttgcgcatgcccactgtgcccagctgctccgctttcgtgcatcccagacttctgtcaccaggtaagggcatcttggaagc

SEQ ID NO: 3996 - DNA, 1125 bp, Homo sapiens
agtcacagtgagagcatcttgctttgtggttgaaataggtagtgtatgtcagtctttgctttaggctgtttctcatctaagtgtttgaattaaagatgttaaatttttctaattgtgaaaaatatgttttctgtatcgacacattttattaaacttggcttgattgcttctttatagtagtccctgtaagtggacataaatgtggctatttgatgttaatgcaactatgtcaaggctgcaatcactttaatagtttctttttagcaaataaatgttcattgatgaagtgcctgggtattttcccgtcccatttgcagagctctactacttcatttccacagtaagcatatatataatgatcacttctgagtttatcaccagtaacattgatacctattttggggtataaacatggtgtttttcagaaataaaaattatttcattaacctttactattactgtgataatacccaggcactcaatattcatcctgaaattttttataatatatgtaatttgtctagtcttaaagacatttggagcatggccaacaggaaggtcagcttcttactgatgtgtgtggattcttacagaatgttagtacaaatttttataaatatttggtgatccctggggggaaatatcattcttactatggttagaaagtgaattagaaatttcagctcagtttctattttactattcaagttgtgtactttaaacaaatataaaaatcaaaaggctgcctctattacaatcctcagtggaatagatggctatctttcttggctaacattaaatattcttgtaccagagcatggaaaatcgtttataattgttaatagaatggcgatttttttttaagaacttcagatttgctatgctgctgtaagtagaaagcatgaagctttttgatcatgtagggcttattgtagagggtatcaattggcctaactaagcaggattgaatttaccagaggctaagttcagatagtaagaataatgcatatgtgattgttcttaaagtcaatgtattaaataaggtatttttccttttccctcttactggatttttcaattttcaaaccatatggcctaggtaactttaattgaaataatatagat

SEQ ID NO: 3997 - DNA, 1218 bp, Homo sapiens
cttcctacttttgctacctaagtttgcattttctgacttccttgcagtgttgcactctttgtcccattgggataaaaagcataagtttgaaattttgctttaagccttgtgttcctggggaagttaaacaactaagagagctgatttgtaaaaattattttttatatgacattaatattcatcaagccttgtgtaggcatgtgtaagacacagctatgcagctttgagtagtcaatatagtatgagatagagtgttgtcccaaatcctcctgtcactttttaagtagcatattatttccctgatggtcctgttactttgctgttgaatgctctaaacagaactttttaaaaggtgtgttttaagagcagtcacctaggagtagacaaggtggaatgggaggagagaaatggtaatgcaaaagcttgagcatgggaagagtcagaggaggaggccatcatccttgttagcttagcctacttcaacactgagcacatttctgcacttttgaagtgaaattcatgttttacttagaagaaataattttctttcattagggatcccagttgatttttgtttcctggtgtatcaaaatacttagaactatgaaacaagtattattgtgatcatgcctttgaataatttttgacgtagcttatcttcatgtatcaagtataaaattataatgagacatctattcacaaatacaagtcttagattgaattgaaatgtgttatagtgccctgtctcccactgacttgttcagttaaatgtcttaaagtacattatgtacatcttcaggcttttggtaccacaatggcacaagtatggtagggaggcaatatagtcttaggctatatgcctatattaagtgtgtataaacaatttttgaaagaatacactattatagatgtatgtgagtgatgctgacctgacagccatatccagtggatgaaactgactggacacactgttaaaatgttttaaagatgtattttcagccagaacagcctggttatagtttgtggttttcaccttggtggattgcaggaacacatgcagcctactggcattgagcattagctaatggcatgaaagggcctcatctcactacctctctaaggcctctagctccaagaaaaccatgaaaacttctttcttggagagatctttgtctcagaatccttagagaggatttcgtatgggggctaactttagga

SEQ ID NO: 3998 - DNA, 1156 bp, Homo sapiens
gctgttattgaggaagctcttcaactaccctaaatttcacaaatgtaacttataacactatgaaaagatttgaccaacaatttacgtttgctgtgtgctttagtttttgtttaagcatattcttttgcttgaatttctgtgttcatgagagttagggtgttttatgcttcttgaactaattttataacatatttaatatattaccagttaagatataaaatcatttgtacatagcgaattgtaaagcagctattaaagtaggtgaaataaagtatatatttgccggttatccatatcttttagaagtcctgacagaacaaccagtttatttgcacataggtagcttctgtttgaaggaaggtaaagttataaggaaactcaaatactataagatgtgtcaaggtatttctccagaattaattgcaaagctagtgctgaaggattttaatcagcttctaaaattttcttctcaataaggcatatgttttgattacttagggaagattcctcatttttatttgccctttatgcatttaatccacatgataggacattaaaaattaatataaagaaaaatcgtgctcatactgtacatctgtttctgtgcttggaactacttgttaatagtttttatcgaagctgtcagcaataagggacataaaactgctgtattatacattgtggaattgaataaacagcctaattttttttttctagtatagggtacttaagcatttccacttttggaagaaaagtgtattagtattttatattgcatttcatttaaaaggacagttttttttttttttttgtaaatccattcattgaaatggtttctaaactgtataatgtaatttggagcctatttagtaatagaattaaatgtcctatgtagtgctacaatttttgaattagaaagtgatcaaatgtaagaaaaaaatttaaaaattcagcccagaaaacaaaatagtgtattaaattagtttaatgtaaaaggaatttataagatttttttcctcaatatagatacctcacttgaaaagaaagcacagcatacttaaagtagttctagtaaacatgtcctagaaaacagttgctaaatgtaggacatcttttgaggaattagtttatgagaaataaaattttacttgttttt

SEQ ID NO: 3999 - DNA, 1187 bp, Homo sapiens
aaccttctctggccctggaaaagttgactggatgaaatgttaccagtcagttatccctctcctaaacctaggatgtttgccaccaagggtatagtctgactggcaaggctaagaaggaatggaaatatgattcaagctagaaaaaaggatgattccaatcaagtctcttaataacttctcctatcatcaactcaggttcaactggaaagtgtgaaactcctctctaaggcttttactttttcccatcatgcctagctttttgagtacatctttgctcctttctggtctgataatttaatgctgggtatattaactatgtaatttgtagactgttagctccttgaaggaaatggtcatgccaaattcacatggggtgtacagagttggtattcagtaatcatgatttgtataaatggatgtgtaataaagagaagagttttaaccaaaaattgtatttgttctgtctggctaggattctttgggtaactttatatttgacaaactttgatggtgaagagaaaatgagatggaggtcacttactgaataatttggacctttaagccccctttacctggacttaaatggaaatttgattggattgctttcttccaatctgggcttcatttgacctgatttgaaagtcaataacatggtttgatagaaggactttaatctatgcctcatctgcttgatttcagaagtctttggaaaatctgaaaaaggtgggtgttttccgtcatgcctggtctccctttagagggggtggtgggaacaggaaccaaaaactctgctctctggtgatgttggttacatctgtgcagctatcagtgtttcctcctacacctctatcctaacaaatacattttttgatgtgggtgtaaacctaatttccctgtgcataatgctagtgcctctggagtgtgcagagctggctggaatgtgctctaagtggtttgggaataaaggcttttcttgtcattatttgcagtctgtagtattcagctgccaacccatgccatattatttgtgtgatgcttggtgacagtctgtgttgagttttagctatgatttttgacataatttaatgagctggaatgccattttcccctgtaagaaatatgtacatattttcaatgccagtgaaaagttgtttattttatacatgtattatttttctgaatccaga

SEQ ID NO: 4000 - DNA, 1216 bp, Homo sapiens
gacagcggaagggcgccggggctgcgtttcccgcgcaggtgaagcaccgtcagggcacagcgcgcctgcgcgctgtggactgcccccagcggctacaagagcaccgtgaagggcgctatccactacccgggctgcggcgcgcccctcgccaaggtggtcttccggaatgcaccggtttaagaagtggacgcagctgttcattgccgctgagggtattcacatgggtcagtttgtgtattgcggcaagaaggtccagctcaacattggcagtgttctctctgtggacaccatgcctgagagtacgaccgtgtgctgcttgaaggagaagcctgaagaccgtggcaagctggcccgggcatcagggaacggtgccaccgttatctcccacaaccctgagactcagaagacccatgaagctgccctcctgcgccaacaaggttatttcctcagccaacagagctgtgggtggtgtagtggccagaggtggccgaaatgacaaagccatcttgaaggctggccgggcccaccacaaatataaggcaaagaggaactgctggccacgagtacggggtgtggccatgaaccttgtggagcatcctttcggaggtggcaaccaccagcacatcggcaagccctccaccatccgcagagatgcccccgctgaccgcaaagtgggtctcattgctgtccgccagactggacgtctccggggagccaagactgtgcaggagaaagagaactagtgatgaggggctcagtaaagtttgtccttctgccaccaaaaaataaataaataaatacaaataaaagataatattcattcccaactctcttaaatgtttttccacagtcgaaacagatgtattatgagttttttgttacataaatataggattattgtaaaagagttgagtggtacataaaagtgtaaagaagagattatatatcacctaaaaccccaccagcctgagataaaaaacattagtcatttagtaaccatatgttcgtgcatttctctatcaatataaatctacacgcacatacgtagttgtgtgtgtatatatacatacatatacataattttatattaaaaatcaatcacattgtatatgttgttttactttgaatttttataagtgctgtcttttgtggggtttttgcttgtctctcttcttcctctagttccccactctatctctatacattcccaatatta

SEQ ID NO: 4001 - DNA, 1174 bp, Homo sapiens
agataaagccagtgtgtaaattaccaaactacaaaacagtgccataatggaggttaaaaacagtgctatatgccttctagcaaaggagcagtcacaaccagtttaaattaagtgggattttttttttttttttttgagacagagtttcactcttgttgcccaagctggagtgcaatggcacgatctcagctcaccacaacctccgcctcccaggttcaagcaactctcctccctcagcctcccgactagctgggattatgggcatgcatcaccacgcctggctaattttgtatttttttttagtagagacagggtttctccatgttgagtctggtctcgaactcctgacctcaggtgacccgcccacctcggcctcccaaagtgttgggataacaggtgtgagacactgccccaggcctaagtgggattatttattcaaccaaaaccctttgttatagattgaactaggtccccatcgaaatttacatgttgcagtcctaacactcagtactttaaaatagcattgtatttggggatacagcttttaaagaggtaattaaggataaataagatcataagggtgagccctaatacagttgactaatgtctctataataaaagaaagagatatcaaggatgcaggtgtagagaaaagactagagagcgcagagagaaggtggtcatctgtaagccgaggaagggactcaggagaaacaaaacctactgatacttagattttggacttttagccttcagaactgtgagaaaacaaatttatgttgcttaagccacccagtcaatggtttttgttatggcagcattagcaaactaatacattctttagcacaagaaaaaataatggtaggtttaacaaactgaaagacaataaatcttgaaccttagattctatttccctcataaaactgattaacttataatactgaactggtctctagattaggcatcacaaacttaaggcctatggggctagacagttcaatcaatgaaaagtttctgtgagtaagaaaatatggaggggcggtgactgtgaccaatgaggtagggtgttcatgggcaggataaagaggctgacaccactcaaatttagtatgttatgtaggtgaaagaaaacacggctggacgcggtggctcatgcctgtaatcccagcacttt

SEQ ID NO: 4002 - DNA, 1170 bp, Homo sapiens
aactcaatgtaaggtttagaagtgtctatttatggctctgaggttcaaagaggctagcaattgtatcttagtcatcactgcgtaacaaacacctaaaatagaatctgtacaaagtattgaataaatatttgtcggaaaaagtataactggctatctgagaacattcaattctgtggaattcttttgctgatgatattggataaaataaattttaaggtttaaaaaatacaataaaatataaagaagcaaaagtctttaaatttttattttttcagaaataagagtcgtcagcatgcaagttcagacagtcacaaaattgaaaacagttactaatgttgttggatttgtaatgggcttgacatctccaggtaagtagggttgaaaatttataatctacactttatatgaaactatacaaggaaatgctctgtaataatttaatattatacttaaatatcctacttgagatataactagaaatttgtcccactcttagagtagataaatttgaaactaagaagtgggtcttccttctctttcctaccgtatctcttctaaaataaatcttagtcgggggagagagagagagagagagagagagagagagagaggtggggatctctcaggaggagatgaaacaagaaacagagtttagatttggtaaactggcatgttctaaaaaagccaaagttttcttttttcttatactcaccataacaccactgaaaattttattttgatcaagaagacattttaaagaatgattttctttttcctcactgcagcctctgcctcccaagttcaagcaattcttgtacctcatcctcttgagtagctgagactacaggcacccaccaccaagcccggctaatttttcattttgtatttttagtagagacagggtttcaccatgttggccaggctggtcttgcactcctatcctcatgtgatccaccagccttggcctcccaaagtgctgggattaaaggggtgagccagcatgcctggctaagaaagattttagtttttaatgatttttttttttaaataaaagttttggtctccaaatttagttgtccagttttattctatgtcccactctgtatccttggtccattgccaaatttgtcaaatgtctgcatggctttaggttttcaatgtgcttatgaa

SEQ ID NO: 4003 - DNA, 1145 bp, Homo sapiens
ttaaaggaatcacaaatgatcatacttaagtgagcaaaaatgacaagttttactagctaagtagagaaataaatctcaaatgcagcgctacaattttcattatcttaagtacattgtacatttctacagaacctgtgattattctcgcatgataaggatggtacttgcatatggtgaattactactgttgacagtttccgcagaaatcctatttcagtggaccaacattgtggcatggcagcaaatgccaacattttgtggaatagcagcaaatctacaagagaccctggttggtttttcgttttgttttctttgttttttcccccttctcctgaatcagcagggatggaaggagggtagggaagttatgaattactccttccagtagtagctctgaagtgtcacatttaatatcagttttttttaaacatgattctagttaaatgtagaagagagaagaaagaggaagtgttcacttttttaatacactgatttagaaatttgatgtcttatatcagtagttctgaggtattgatagcttgctttatttctgcctttacgttgacagtgttgaagcagggtgaataactagggcatatattttttttttttttgtaagctgtttcatgatgttttctttggaatttccggataagttcaggaaaacattctgcatgttgtatctagtctgatgtacttatccatctcattacaaacaaaaacacacagactgcatttgtagctctgtaatccttgaatacggaagtaaattttcttctttcctgactttgacattgtagctatactgtttccatttttgtttttacaaatcctttgggtctaattctgtgagcctacctatagcactggattaaaatgtctgcatcatttctttagttatccagttaactttaaaactgttgtaaaagtgtaaaccagcccatgacaggtttttgtacatgttaaagaacttcattgttcagttttcatgattattgtgtaaggaagactgatgtagatgttctgtgctgtcctggaccatgttaattacacttacgacgtattttagttccacatcacaatgatttgtccccagtgacccttttatcctttctaggcacatttcttgttgttgttgttgttgc

SEQ ID NO: 4004 - DNA, 1224 bp, Homo sapiens
taggtaaaacgtggttttttttttttttttttttgtaggtgacagatcaatgggtctttcttttttttagttcattcaaccactctgtgtgttttgattggggagtttagtccatttaatttactgttattattgataagtaaggactcactcctgccagtttgttatttgttttctggtcttctcttcctattttcttttcttcttgtcttccttttattgaaggtgattttctctggtgatattatttagtttcttgctttttagtttctgtatctgttgtatgtttttttgtttgaggttaccgtgaggcttgcaaatattatcttataacccattattttaagctgataaaaatttaacactcttttcataaagaaacaaaccaatgagcaaaaagaaaactgataaaaattctgcactttaactttgtttccatacttcttaactctttgttttttatatttacattttattttactgtgtatgtcttgaaaagttgttgtagttactatttttgattggttcattgtttagtctttcttcctagaatgagagtagtttacattaccatacagtgttagaatattctgtgtttttctgtgtactgactgtttccaattagttttatgccttcaattgattacttattcctcagtaacatccttttctttctgattgaagtactccctttagcatttcttgcataacaggtctggtgttgatgaaatctctcagcttttgtttgtctgtctgtgagtctttatttctccttcatgtttgaagaatattttcactggatatactattccaggataaagtggtttttgtccttcagcactttaaatatgtcatgccacactcttgtggcctgtaagttttccactggaaagtctgctgccagatgtattggagcttcattgcatgttatttgtttcttttgctgcttttaggatctttttttttatccttgacctttgagaatttgattattaaatgccttgaagtagtcttctttggattaaatcttggtgtttgagaacctccttgtactgggatattgatgtctttctctaggtttgggaagttctatgtttttatccctttgaataaactttctaccccatttatttctctacctcttctttaaggccaacaactcttagatttgctgttttgaggctactttctgtatcctgtaggtattcttcattgtgttttatt

SEQ ID NO: 4005 - DNA, 1194 bp, Homo sapiens
tatttggataggaaaaacatcttgtaaagatgtcagttctccctgttctcaaaataacaagaagttttgccttgatttttgtttttgaatttagcaaaatattcaaaagttcatctggaattatcagccaagtttaataagactgtgaagggactttacagaagctacttgggctgaatttaaaggatgagtatgattaaaatggcaataaatgtgaatatgaggtaaaagattatggagcatatttacaaaggcaaaaaactgtaaagggaaaagattgatctagtaagattagagcttggagtgtgggaaaaataagagaagagcacagttgtaatgtttgaggcttgagtcaaggctgtattgcatagttactagagatccacaatattgtcttaattgagtaatggtgtaattagatatatgtttttagatagccaattctagtgacactgtagataatgaagtgggtggggagaaattggatactttgtgctttcagggcctcttgtcttagttcatactgtctacttaacctgttgcactcttctcattctgtacctgtcagaaatcaggcccactttctcctaaaattaccacgttctgccttgtagattgttagataataaggtcttttcaacctcatttatatacttcatttatatacttgtatgagtgtttttctcctcctttcctttccatcacccatccctttgcttcagctgctagtgtcttaatagaaggtaattgcttaatgaatgcttgttgaattagagacagatcagtcctgcatatgagaactcttttagggtctaatagtgatagagaagattgaaaaaaaaaggtgatgaatttgagggtaatttaaggggtggaagtgatgtcatgcaagagaggagttgaaagcaccaaatgttttaaccttggagattgagaaagtggtgatgtcatgaagaatgtattccacatttgaataatgagcagagtaagaggtaccaacaaatgaaacaattaaaggaggccataaaaacaacagagatcatttcaacattctattgaggaaatttggggggacacactttaattaaataataacatcagtatttctttacctttgtaacttttaattaatgaagatgttttaagatgaaatataaaatgtgaacctgagaactgtttaacatttaacattat

SEQ ID NO: 4006 - DNA, 1196 bp, Homo sapiens
ctgccttgcctaacctgggcaagaccactcgcgtcctttcccttgaggagcagcgtgggaaaggtgccgctgcgcgccacgtttctcccagttccccagggcttgaaggggcggtggaggcgggcgggataaattcgctggccgcctggcgtggagtaatcctagagggtgggatcgccctcggggctcgggaggggctcttccccgcccagaaggagactgcggcggcgcaaggcctccggcagggggcgcgggccgctgggcctcccccggggctgcgggccggtggtccctcccaggccgcgtgtgcggtgcgttcgcgcagcccgctccctgcccccacctcacctcgtcacctccccgccctctcggcgggcccctgaggtgcgcggcgcaggcgcggagcgtggcggccagggcagtgcggccgcggagcctaggccaggggcctggcgctcagggcgtggggcgcgcggggagggagaggggtcggcccagcacagcgtccgggagcgctagggccggagcagcgctgcccgccgccgtgcgtccgcgggaaggaccgcgcggcccctccgcctgcgctctcggccgccgccgcctctgcgtgggccggccgggagggcctcgggggactgactggtgagtgtgagggaggagcgggtgggtcgggcgctggactgctccaggggacgcgggcgtgcgggcgcatcttctaacgggagagggcgggagagaccggagctccctttatacggaaactctgccttcgttatatggcgggatggcgttcccctcccccatcccgaaggcagttccaccccctgcgcaggacgccttggccgggctcccctcggccccctgctgccgttgtctttacggaacctttggtgtcggggcttggaagtctccttggcgccggcttctgggcccgggcgaagctggtgcgtggcgccggggtggaggcggctaagtcccagggacttctgccctgcgcctccgacgggcatttgtctggctgcgtccgggctcgggacgatcctgggtcctcgctggcgctgcggccctgcccggcggcttcgtgacctccggcggcgaatccccgggctcgcgcaacgagttgtagccgcggagagcaggcgtcgatgctggcgcccaaagcctccagcctgagagtcgcctcactcgtgtgacgg

SEQ ID NO: 4007 - DNA, 1190 bp, Homo sapiens
taggagattgagatcaggttgggcaaaaacatgaaaagactaaatcacatctctagcaggaaaaaaaaaaatccagatatgatagctcatgactatagtcacagctaccccagaggctgaggtagaaggccaagaagtttgaggctgtggtgatggtgagctatggaggtaccactgtgctccaacctgtgtgacagagtgagactctcttttctttcaaaaaaaaggaagaaaggaaaatcaatgttagtctgtcaatacattttcttattgttttaaaactgtatttggaaagtttcaaaatgcatttggactgcattgttctaaaggcaagttagaaatccaaatatcttttgcacagttatttcaccattaattcttactagttttggttgtatgatgggagatagacgtataaaaataacttatttaaaatgtcagtggatttttttgtaatggacattcctggatgataggtgaaatttgaacatgaactgtttgttagataatagtattgtctcaatggtaaatattctgaatacaattgttttgtgattgtgcaaatgttttctttcttagaagacaagtattgatgtgttaggtaacaagcttgtgatgtagtaatgacctgtcaaaatgttcaggaaggaaaataatacataagtatatataaaaatatatgcctctctttatatatatgggggtcatacattttatatattcattgcaagacatgtattatatatattatatatatttattatatattatatattatataatacatatataaatattatatataatgttatatataaatattatatatatatgccctcacacaggagagagagtatcgagcgcgagtatggagggaggggagaagtaaacaaaaggggctgaatgttaatatttgatatatctagatgaaaggtctatttcttgcactttctattgaaagtatatcaaaataagttggcagtgatgagtagcatgttaggtgtttgtagggtctgttttcaagggaaattgacaagtttgttggttttatgttttaattacatatataaatttatattattaatgtatgattagagttcctgataaaataaatctgggaactgctgcatattatatatgttccccatagagattaattagcatattagtgtagtaaggatgctgagaaa

SEQ ID NO: 4008 - DNA, 1149 bp, Homo sapiens
cataataggtactcaatgaaatggtttatagtagaatatctaagctagcactttattttaaaaagtaacttattaattaatcacacattgatggtacaccttgtatttagcaaatgtttgcatgttgataaaatctcctatgtcttctttcttaaatccagttgctgattttgtaaaatacagttgtgataaagcagcattacgggggggaaaaagctatattccaactggtgttaaatgtattcaacaaaatcttacatcatacagtatttatttcttaattaatagaacttcagtgatatacttggtagatatctcaagccttttgtcttttacacaatggtgctctatcctattgttttcttttcaaagaagcatctgaacacttgcatttctattttcctatccaaaggcatccacatctaagtgtgtttttaaagttgattaaaattatttttctgttaaagcattctgaaagtgtttgtctttacctagaatgatttgtacacactcgtggtcaactgaacatgaatgtcagtagtagtctaattatgggaagggtaaacgtgttagattaaggctcttaaagctctaaaccatataaactatggacttgtatcatgatttaactgttcttagatctttcttacacagtgattcattcctctatttgtacagtggctttatgaaatgttgtgaattgatactgtaatcaataaagtgcttttaaccagatttcattgtatttttttatgccacaatttttttttttttttgagagtgttactctcttgcccaggctggagtacagtggtgtcgtcatggtttactgcaacctcagcctcccgtgctcaagtgatcatcccacttcagcctctggagtagatgggactatgggtacgtgcatgccactatgcccagttaatttttatattttttgtagagacagggtctatgttgcccaggctggtcttgaactcctgggctcaagagatctgcctgccccagcctcctaaagtgctgggattataggcgtgaactaccatgcccagccaattttttataaaaagtttttattgagacaggggtcttgctttgttgcccaggcatgtctcgaactcctggctttaagggaccatcccaccctga

SEQ ID NO: 4009 - DNA, 1149 bp, Homo sapiens
tttggtaaacattgggattgtccctgcatctgaacatctttcccagtgctatcagtatacatctagagaggaaatgcaatgtgacagtgttacatttggagagaagtgtgaaatctaaccaatcgctagcacatatttgttgtaatacggtggtttatttcatgtttgcatactataaaatctgaattgatgtgaaatatctgtgcctttaaatttcttaaacctttaagctttttgttctgttttgcaacattttgtagtatttcttcccttccttagcacaaaatactggtttctaagtggttttgcttcaaaggatgtctagatgtaagtgattccacttaaagccaaaataaaaattcctaaagcagttcttaaaggagttagagagctatattaaacagtttttctgtggtataataatgtgtctcttactagaagtcccccacgaccaagttaaagatacttttcctgttggattctcttttacaaataagtctaaatgactgataatagaagattgttagtcttgcttgatggtaaagtcttggattattctgatatatagacgtgcattgttttgtaacttagttacttttcagataggtctgtgttaacttttgaacatgtgtaacttaacctaaatactcccaaactttacctctaaatttttgtttttatgttgtgaatgtgctaatatgtgcatcaactgtaaagatgtatcagttttattaaaatcagttgacaattagaataataaagtggataaaggcaaattaagatataggaccaaaacagaatattgtagatggcagttatgaatgtatatttatattttgattaagatttctattaactttttggctgggcagagtggcttacacctataatcccagcaatttgggaggccaaggtgggcagatcacttgaggtcaggagttcgcgaccagcctacccaacatggtgaaaccccatctcttctaaaaatacaaacattagccgggcgtggtggcacattcctgtaatcccagctactcgggaggctgaggcaggagattcgcctgaacccgggaggcagaggttgcagtgagccgagattgtgccactgcactccagcctaggcgacagagtgagactccatctcaaatt

SEQ ID NO: 4010 - DNA, 1158 bp, Homo sapiens
aattaggcaaggtggcatgcccctggagtcccaggctgaggtgggagcatcccttgaaccaagaagttcgaggttgtaagctacaatcacgccattgcactccagcctggctgacagagcaagaccttctctcaaaaaaaaaaaattttttaagccatttctagtaagaagtaaggcataattatataaatttctttccattttacagggtacctttcaacagatgtggatttccaagcaagaatatgaagaaggagggaagcagtgtgtagaaagaaaatgcccttgagaaagagttcccaagcttctaccttccttttgtcaccttacgtttcatagctttagtatactcaggaaaagaatgaccatcttttgtagaatgtttatacatttttgcatatttcaatttccacttaaattttttaaagctttaactggctctataaattaagtttgtgctttccttgaaatgcacttattcttattacaagcattttataattttgtataaatgtctattttctctaaatattttgctttcagtaaaatgctttccaactctgtttagtgtattaattaccagtggattggtagaactgctttttattgactagtaaaagttactgcctatgctttttaccttaggcttacagaattaaataaaaattagccattccagaaatatattttggactgttgtgcactgtgattactactttaaggactaaatgtatttctcattattttgaatcaaagtcctccgtttattaacagcaatacccacatcctcttcatagcctattaacaacagaggtaaaactattattcaaattcaaaaactacggtattgcctttgctgtggcagttaccatcaccttcacactctaaggtagcaggtgacatttaaagcctgcttaaatgtcagaatttataaagtgggaatctcatctgaactttatacctgatttttagaagcaaattagcttctaccaaattagctaattagcatgccatattcacacttagaacaactgattagtaaagtcacttgactaaaaacagaatttctttataaaccacttaacatatttactcctgtacacagactattcaagaaaaacaaaatggtaaatttaatagttcagacatcttagacaa

SEQ ID NO: 4011 - DNA, 1223 bp, Homo sapiens
gaattctaccagatgtacaaagaaaagctggtaccaatcctactaacagtatttcaaaaaatcaaaaatggagggactcctccctaactcattgtacaaagccagcattaccctgataccaaaatatcacaaagacacaacaaaaaaagaaaacttcagaccaatatccccaatgaatatagatgcaaaaatcctcaaaaaataatagcaaaccaaacccaacagcacatcaaaaacttaattcaccatgatcaagtaggcttcatttctgagatgcaaggttggttcaacatatacaaatcaatagatgtgattcaccaaccacataaacaggattaaaaacaaaaaccatacaatcatttcaatagatgcagaaaaagcttttgatagcatccaatatctcatctcttcatagtaaaaacgtttaacaaactaggcattgaaggaacatacctaaaaaacaaaagagccatctattacaaacccactgccaacattataccaaacaggcaaaaattggaagcactctccttgagaaatggaattagacagtgattgctgtctacggccataccaccctgaacgcgcccgatctcgtctgatctcggaagctaagcagggtcgggcctggttagtacttggaagggagacagtgattactcgctctcacactcctattcaatgtagggctggaagtccttgatggagcagtcaggcaagccaaagaaataaaagcatccaaataggaaaaaaagccaaactctgtctcttcatggacaatatgattctatacctaggtaactataaagactctgccaaaaggctcctggaactgaaaaacaacttcagtaaggtttcaggatacaaaatccatgtgcaaaaatcggtagcattaatatataccaataatgtcctgagagccaaatcaataacacaatcacatttatgatatctgcaaacaagcaaactagaaatacctctaaccaagaaggtgaaagatctctacagggagaactacaaaacattactgaacaatatcatagatggcacaaagaaatgaaaaagcattccatgctcatggaataaaagaatcaatattgttaaaatggccatattgaccaaaaaaatttacagattcaaggctattcctttcaagctatcaatatcattattcaaaaaactagaaaaaaacttctaaaatttatatggaacccagaaaaagc

SEQ ID NO: 4012 - DNA, 1178 bp, Homo sapiens
agaaccatgaaataaagcaaaataatcactttattttttccaatatgcaagaaaaaatgcatacctcccttatacaagaactacagggccaaatagtgagaatttaaaacttttcgggaaaggggtggggggtgatgcaaaacgacttatctacaattgataggaaaaacatagataagtctattcttttcgccgtcttacccagcgaactgtatctgcagtagtccagggaaagcaaccaccaggtttcaataacaacaaaagtcaattaactatgtactcaaatttcacctaggtcattggtctgacatcaagtcttaaaccgagaacgtcaatgttaactactcacgcattaacataaagtctcatttccaacaggcactgttcctactttaagtttaccacctaaggagatttaaacttgcaaaaagcttagggggatcctttatacgctgtgattccccattatgctggtaccacgtgacagttaaaccaaatccacagagctaatcagtaaactaagaaaagaaaatcaaaatgctgaaaatagaaaatcgtggccaaataaaataaaaacccataggataaaaggtacgctgaaatgaaaacctgtgagaattcactttgcatacgcacaatactcatgtattagaagaaggcccttcataaaaatagccaagactctcaaacatttgagatgctggcttagtgagattgactgacagacaacagctggggagattctgtattgatcttctaacaacctggcgtatttcgggaaaataaggagaaaagaacgctatagtggcaaaaaataaactattaggatttcattttcagatatgtgaacgctgaatgccccaccaaattcctctactctattcctcttacgtttttcagccccgattccatagtaatggatgtccttcctcccaagcaaacaaacaaaaaacctcgtgggagaaaaaacaaaacaaaacaaaacctccctccaaaaacaggggcagtgatataaagaaattagtcacctctccacctatctccctgatccatttcgcattttaaatcttactttaaagctcacaactctccttttcttccgtaatagaggggctaaggcgccgcccaatttcccaggccgcaaaaatattccaacccgccacaattcaaggttttct

SEQ ID NO: 4013 - DNA, 1269 bp, Homo sapiens
taggagacagggttctcactctgttgctcagactagagtgtagtaatgtgatcatagctcaccatgacttccccagctttggggctcaagcaatcctcctgcctcagcctctgagtagctggcactacaggcacatgctaccacacctggctagaaagtttttttaaagatctggatggctggggatggtggctcatacctgtaatcccagcacttttggaggccaaagcaggagggtcactttagcccaggtttagaccaacttaggcaacatagtaagacccccccgttcccaacctatacagaaaaaattttaaatcagcagtgtgtggtggtacacacctatagtcccagctactctaaaggctgtggcaggaggattgcttgagcccaggaactagaggttacagtaacctatgattacaccattgcactccagtctgggcaacagagtgagaccttgtttcaaaatcatcatcatcaacatcatcatcatcatcatcatcatttattgtatatttcaaaatggctagaagagaaaatttgcaatgttcccaacacatagaaaaaatagtctacggccataccaccctgaacgcgcccgatctcgtctgatctcggaagctaagcagtgtcgggcctggttagcacttgcatgggagaccgcctgggaataccgggtgctgtagggttggccgggcgcggtggctcacgcctgtaatcccagcacttcgggaggccgaggtgggtggatcacaaggtcaggagatcgagaccatcctggctaacacggtgaaaccccatctctactaaaaacagaaaaattagccagtgtggtggtgggcgcctgtaatcccagccactcaggaggctgaggcaggagaatggcgtgaacccaggaggcggagcttccagtgagccgagattgcgccactgtactccagcctgggcgacagagcgagactccatctcaaaaaaaaaaaaaaagagaaaagaatgtttgagttggtggatatcccaagtgccctgatttgtatacaggtatcaaagtatcataggtacccccaaaatatgtacaactatatcaattaaaaaacacaaaaaaacttaaaaactctacagacatacccttctttaatttttctttttccctcattaaatatatctaataggacaaagtcctatggattctatccctgaaatttacctcatgtctcctcaccctgccttttgtcatattttctaactgaacttctcctaactgaaatt

SEQ ID NO: 4014 - DNA, 1182 bp, Homo sapiens
taacttcttgtgttgctgtcactatcactgtgtattcctattcctagctctgcactatttctcctcactcggataccctttcccattctacattattaagcatcctttccaccctgctttagagataattcttagagtcctactacttaaaataccttagccaagaaaaagaaaagaagcattaataccaaattctcgtcaattctacagataaacatgtacgtaaagatgccacaaacttcaaaatctatgtagctttaaactattttgtgttaccctgttttctttccttggcatctatatttatttaattgtgcttggattataagaatctcagcatccatatatcaatattaatagataaactggacttcaggagagcgaggacagagatttttttcttgtttaacataggaccatgaacacaaaggtttattttcttttgttttctatctctataggtagagtacgtgtttacagataaaactggtacactgacagaaaatgagatgcagtttcgggaatgttcaattaatggcatgaaataccaagaaattaatggtagacttgtacccgaaggaccaacaccagactcttcagaaggaaacttatcttatcttagtagtttatcccatcttaacaacttatcccatcttacaaccagttcctctttcagaaccagtcctgaaaatgaaactgaactagtaagtaatttttaaattaataaataagggtttcatatgaaataattctcttcagtagttgatgagttgcaggaaaaaaagtttgtgtcagtagagcaaggaatatacatttgaaattcatatatttgattcaacaatataaaatataatcctaagaatttgttgttacagcccagtttaacttgttatttaatacgtgtctgccttagctctttgagtatttaaatggaacgtagttaagaaaagcccttactgccttgaagtgaagaagactttctttgaaaaatagagcttaaatttatttaatactttttgagacctcacttcttctataaaaaagtgttcccctctacttgcaatgtggttgtacctcctaaaaagatgctcacgtgttgaagggtcctaagcaaatgtgacattttactttttgaaggcagaaacaaccaactgttattcaggcaatcaaggttgtagcact

SEQ ID NO: 4015 - DNA, 1175 bp, Homo sapiens
atctgatgtaagtttttatcttcacaacgtaaatgagggggagtcgctgttatacccacgtatggaagatgaaagcatggatggtaaggcacagaagtgaagtagtttagtcaaggctagtgagtggcagaactaggattcacacctactctttgtgacattgactcttaggctgtttccaccacttttccagtagaaaattgatttttgattgtaaactaatttgagttggctcgacttagtgactgattttctttaactgatgtcaaaagaggctgacgcttaagccagaaggcagtttataaacttttggctggagcagtgtagcagcaggaccagaattctatgatagctggtcactgtatcccttctgctgtgagacagtttgtgtgggaggcccaatgggcagagtcagagctcagaatcctggctaaccttgaatgtgacatgtcattgaactgtgacagttctggtataaaaatatgcctcccaggtagagcagaatactttcaccagctgatcacagaacgctcttccttggacagaggaaaatctcttttacttcacctctatgaagacactcacccagtaacaaatttttttttttttttttttgacacagactctggctctgttgcccaggctggagtgcagtggcacgatcttggctcactgcaagctccacctcctgggttcgtgccattctcatgcctcagcctcccgagtatctgagactacaggcacccaccaccacgcccggctaagtttttgtatttttagtagagacagggtttcaccattttagccaggatagtctcgatctcctgaccttatgatccactcacctcagcctcccaaagtgctgggattacaggcgtgagccaccatgccagccagtaacaaatattttgttcacacaagtttattgggttacagctcttcagttatttttcaatcctgagcctagatggtcattatcttaagtgcattgggcatattgttaagcctttataatgaaaatttgtaaacatctttatatagtagcattctgcaaatggttaacccatccatttatgctcatttcatcctaaaaaatacaaccccccaaatctggaagtatcttattctagactcctatatgctgaatgcaaatatcaaaagcggtaaagtttcac

SEQ ID NO: 4016 - DNA, 1206 bp, Homo sapiens
ctgcctcagcctcccgagtagctgggattacaggcatgcaccaccatgcctggctaattttgtgttttttgtatggggtttctccatgttggtcaggctggtctcgaactcccgacctcaggtgatccgcctgccttggcctcccaaagcactgggattacaggtgtgagccaccgcacccagcctaaaatgtgattctcatcacatcagattgagagttatgatggttgctgttgaccttaattacatggctgaggtagtatttgaaagggttctgtgctagaaagttactcttctaccctccttccactctgtactattaggaaggatatcacaatgtccaactcacacttaagtgaaacattttttcctaacttttcaaaaggagcaggttgttttggatgaagcagataaaaatgttgaaccaaggaattaaggatcaaatccatgagatttactagaaattaaatacaagtactcatgtgtgcacatgagttttctccagctggcaggttggattcattgttacaatatagctgtgaagtgctatgttgtccttgccccctgctcaaagcaattgtttcccacaatctctgtctcactcggttctatagtaagacatggacgcttggtctcaaacattatttctctaagtattgttatgaaactattacatctccttaattgatttgccaatataattagtcattgtctttttttttttttttcagagtctcacttcatcaccatgctggagtgcagtggcactatctgagatcactgcaatctccgcctctcggattcaagcgattctcgtgcctcagcctcccgagtagtagctgggagtacaggcatgtgccaccatgcccagctaatttttgtatttttggtacagacctggtttcgccttgttggccaggctggtctcgagcttctgacctcaagtgatccgcctgcctcggccttccaaagtgctgggattacaggcgtgaaccactgagactggtcagttattggctctttttaaagattgtgttgctttctgcctcaatattaatatgttggaagttaccaagaagttcatgacagatctatttcaaattctggtgaagaaggaagaattggcccttgaaagaatcagtgttttacaataattttgaaagagggtaatgtttttctaattgatatacataaaaaccatagcca

SEQ ID NO: 4017 - DNA, 1124 bp, Homo sapiens
gcgaggaaccggtcagagtctgagtcctcgggggcggaggggcgacggcggtcctgaccaccggggtgtctgcgggagggcagccagcggcggccggcctctcagagccagactggcggtctgcggagaggctgcagctgggctacagggcccctttctgaggcgaggggcctccagggttcacctggggggtcttcctcccccgcttggtagctacagccctgagggagggcgcgcgcgcctcctggcactacggcccggaaccgcggcgcggctggtgcggcctggctagggcggggtggttgccgggactgggggtagccgcaggtgcggtaggctagtcgccgcggggccgggcgccgccgggggaggcggctgggcagacgggtgctgcttgttgccgatgggctgcgaacggggcgctgctttttatttcaggaagcccgggggagtgcgaccgcctcaaatccagccttcttgtttggtgggacgaccgtcggttctgtccgggaggaatgacggggtcaaggtggggtccccagggccgcgggcccgtgaagccccattaaagcgattgcgaaatgcactcggcactgtcacctgaccgttacccccgcccccgtcccctgcgagcctttgtttaccacgatcgcgacacccggcccgctgcggccgtccccggggagccggggcgggcgggggagcgggcgttccgccggcgcagtccccgcctaacctccccaccttcttaccactccaggactcagtttcttaatttagttcctaatggacccgccctcaagttctggacaccccgggtgaagactgttaacgcggcggggattgggcgcctgcggcagcttgtgggcggtacccgagggagagttcgagtttttattggcgagtttttattgtcactaggtgggcctgccctgggccattcttcccgcccccttgaaggtgatctggaggacgcgcgggagcgcgcgctgtcgctgcttttgcagctgcggcccgagtggagccgggtggcgcgggtgcgggaggcgcgcgctcccgcccctgctgcgggcggctggtagcctcggtggccgccgccgccgctgctgctgcctgatcctgca

SEQ ID NO: 4018 - DNA, 1119 bp, Homo sapiens
ccaggagtctgaggctacagtgagctatgaacgcacacggcaccctagcctgggcaacaggttgcgacactgtctcaagagaaaagaaaaagaaaaatagggataggttttccttcctagcccagtagagtttgacctcattagtatggtgctttgggtgaggacctcttccttgattatcccactttctagtgaacagctaaaattcctgagagtctctactgttaaggtacctttaataggataaagcagggaccacctatctcagtgggtccatttttcttttaaaattagttatctgaaaaaacttagcagtagttcccatctttaaggtaagtctttcatttggtccccattgtgtaaaatactaatcaacattttcaagcttctgtacaacagactgcttttgtctagatttctcaactccactttataaagcttatcagttttcagagaggaatgtgaattttttttctaatgcaaataaatggatatggcaggaactacagcataagtgattattgtgattctgggtggacggatataatttacaacatttagggatgttctaggtagcctgctgtagtttgacttccagtcactgttgtctttcacattataatttgtatatttcttgtgatagaagggatgatgcaaatatgtaattaaagtgtcaccagatttctgttaaaaccaaggttgaaataaaaagcctaacattggtaagctacattgttttctcattttagaatgattcagagatttcagatagacattttttaaactttaatgcttagctagaatctacattctgaggaaaactctaaaaaacttaaaaatttttagggaatttttatttttcaaatcataattttaaaatgatagataccattttgtgataacaacaattcagaaaacaattttctatcctcttagttgaaagaatgtaggtacagtttggatacttgtactttaattttagagtaaacatctgcattatactcttatagataatagaattatttagttaagaaattctttacagtaaatgagataatgtgtgaaaaagtattttgtaaatgctgaggattctacaaatgatagttgttattttcatgt

SEQ ID NO: 4019 - DNA, 1138 bp, Homo sapiens
tgagaatggtgaaaaatgatacaaacagtatacataatcttcatttaaagattgatttgtttataatataattaaatgataagttgaatgtataaaacctatgcccattaaagaagtttgaaacaatgtgtaaatttaacatggaaacatgaaagtcctgggaacccctttcgtgccactatacacgaagttctgggagttcatacacagtgcaattataattatagaaatggaatcggccggggcggctcatatctgtaatcccagcaccttgggagactgaggtgggaggattgcttcagcccaggagttcaagaccagccttggcaacacagggggaccctgtctcttaaaaagaaaaaaaaagaaaataaatggaactatacatactaatctgtagtttcttttaccttggattttttcttttaataacaaaatctggttcaatttcttagttggaatatattttttattttaaaactttaatcatggaaaatttcaagcagatacaaatgtagagagaatagtatgatgaatcattatcgtccagcttcagtgttccccaagacagggccaatttttttttcatctatttccctttttttcccttccctttccacccttgtattattgtaaagcaaattctagacgtatttcatgcataaaattttcaacatgtatccctgaaaaattaggaccctcctctttttattaaactccagtaccattactatatctttaaaaaagtgcaatttagtagacaatattctcagaattttaaaacataagaccttggtatgaataatcacttccttggtacctgtctgtatctgtgagtgtgctaggggctttacattattgttattccttgtgataacactgctgggtacctattattgtcccatttcatgtgtcaagaaactgaagtttagaaataattgtctgaggttccagagctatccagtggttggttctgtgtggagaatgtgggctgcctgactataaaacatgtgccttttccactctaccacgtatttattatgtctgtgaccaccagtgatttttgcagaagaggaattcctcttatgtgcgaggcattttcttctggtttttcatttttgtagcctgaaatttctca

SEQ ID NO: 4020 - DNA, 1206 bp, Homo sapiens
aaaatgtctgggttcactgcagcaaccccagttcctgtaagcataaggcccttttctcttagcctcactcagctggatactgataggattcacccttctgctgtcctcagcatcactctttatcactggagaatctctgcccctttggaaagtttgttgttgttttttttttcttttttttaaaaagtgacagtactgtttttcgcaacaggtttgccgctagaacacaggtgtcatgaaaactcccaagccaaatgggaaaggaaaagacgcatatcaacattattgtcactggacatgtagattcaggcaagtccaccactactggccatctgatctacaaatgcggcgtcattgacaaaagaaccattgaaaaatttaagaatgaggctgctgagatgggaaaggcctccttcaagtatgcctcggtcttggataaactgaaagctgagcatgaacgtggtatcatcattggtatctcttttgtggaaatttgagactagcaagtactacgtgactatcattgatgccccaggacacagagacgtcatcaaaaacatgattacagggacatctcaggctgaccgtgctgtcctgattgttgctgctggtgttggcgaatttgaagctggtatctccaagaatgggcagacccgagagcatgcccttctggcttacacactgggtgtgaaacaaccaattgttggtgttaacaaaatggttacactgagccaccctatagccagaagagatacaaggaaatcgttaaggaagtcagcactacattaagaaaattggctacaaccccgacacagtagcatttgtgccaatttctggttggaatgatgacaacatgctggagccaagtgctaacacgccttggttcaagggatggaaagtcaccggtaacaatggcaatgccagtggaaccacactgcttgaggctctggactgcgtcctaccaccaactggtccaactgacaagcccttgtgcctgttcctccaggatgtctacaaaattggtggtattggtactgttcctattggctgagtggagactggcattctcaaacctggtatggtggtcacctttgctccagtcaacgttacaactgaagtaaagtctgtcaaaacgcaccatgaagctttgagtgaagctcttcctggggacaatgtgggcttcagtgtcaagaatgtgtttgtcaa

SEQ ID NO: 4021 - DNA, 1150 bp, Homo sapiens
attatcctttgccagcagtgaactgccattctgtcacagctctgtgtctgatacaaggcacatagattctgtacttaccatccccaaattgcaatgtctcagactcaggcttagagcatggcatgaacatcaaaggcaggaacctgtttatctttgaattggaaagatacagcaaaattacactgtttggaaatacgaatagaggagtgaaaattgttgcagtggggtacccaaagggattcgagacctcaagttttttttcatcttgtatccttcaggtcctcttgcccctggccaatgtggcattaattgactacactctggaattcctgactgccacaggtgtacaggaaacatttgtcttttgttgctggaaagctgctcaaatcaaagaacatttactgtaaggccctgcaacttttctttccatgtttcgccatctttttccagttttttcaggatgaatgtaactaaggggaaatgtgagaggggaaaaatgtgtctacttagatgtcattgtaagttctaagggtattttctacacttatcaggaggtgagcagctgaaactttgtatctgtctgtcttgggttttctgtgacaaagattaaagaataaacttgggttttttctgaatctcattataaagtttggtgccagtggactttgcttttatttaatggcttcagtatggaagttacaatgataacatctttgttttcccactgagtttctaaatcttgtttgttctcaccttcaaggatataaatgagctccttgtcatctttgtattcccactgcctagctcagtcccaagcatatagtgagcacttacatgtttgttgaaatcttgaaaactagggaatcgcattgcttatggaagtccaggatgtaaagactaggacattagcatggtctccatcagacagttcctaaatgttatatggattgcagaaggggaaagctgacgtgaagcgtgttcccaggctactttgtgtaccctaggcttcagcaggattttgagttcaaattgatgtttagggacaaggggtcaaggtatggagaggaaataaccatgtttcctaacccataaaacaagactggtgacacaggatgctgaaagcattcattatagttcataatactctttg

SEQ ID NO: 4022 - DNA, 1456 bp, Homo sapiens
ttaaattatcagccaagggtggtggtgtgtgcctgtagtcccagctactcgggagactgaggtgggaggatcacttgtgcccagttcgaggctgcagtgagctatgatcacaccactgcactccagccaggaagacagagcaagaccttgcctccaaaaaaaaaaaaaaaaggctgggtgtgatgtgactcacacctgtaatcccagcactttgggaggccaaggttggcagaggataacttaagcccaggagtttgataccagactggccaatgtggtgaaaccctgtgtctattaaaaatacaaaattaggcctttcctttcagtggagcgtggcggcaagatggctgtgcaaatttccaagaagaggatgtttgtcactgatgacatcttcaaagctgaactgaatgagtttcttactcaggagctggctgaagatggctactctggagttgagatgcaagttacaccaaccaggacagaaatcattatcttagccaccagaacacagaatattcctggtgagaagggctgacggattcgggaactgactgctatagttcagaagaggtttggctttccagagggcagtgtagagctttatgctgaaaaggttgccactagaggtctgtgtgccattgcccaggcagagtctctgcgttacaaactcctaggagggcttgctgtgtggagggcctgctatggtgtgctgcggttcatcatggagagtggggccaaaggctgcaaggtcatggcgtctgggaaactccgaggacagagggctaaatccatgaagtttgtggatggcctgacgatccacagtggagaccctattaactactacgttggcactgctgtgtgccacgtgttgctcagacagggtgtgctgggcatcaaggtgaagatcatgctgccctgggacccaactggtaagactggccctaagaagcccctgcctgaccacgtgagcatcgtggaacccaaagatgagatactgcccaccacccccatctcagaacagaagggtgggaagccagagccatctgccatgccccagccagtccctacagcataacagggtctccttagcagctgtattctggagtctggatgttgctctgtaaagacctttaataaaatctcatacaaagacaaaaaaatatatacaaaattagggctgggcatggtggctcacacctgtaatcccagcactttgggaggctgaggcgggcagatcacctgaggtcaggagtttgagacaatcctggccaacatggtggaaccctgtctctactaaaaatacaaaatattagctgggcatggtggtgcatgcctgtaatcccagctactcaggaggctgaggcaggagaatcgcctgagcccaggaggcagaggttgcagtgagccgagatagctccactgcactccagcctggatgatagggtgagactccttc

SEQ ID NO: 4023 - DNA, 1201 bp, Homo sapiens
tttatttttcaccttattctctactttaaacaaatcataactttctctttaagcctctgctataaattctcctggctctcctgggcttccatattttgggggctggggtgtcaaaagtgagatgaagttcttagctccaggttttggggtaaaccaaggtaggaacattttggcatttatttcaattaacaatacttccttggacgggtgcggtggctcacgtctgtaatcccagcactttgggaggctgagacaggtggatcacttgaggtcgggagttcgagaccagcctggccaacatagcaaaaccctgtctctactaaaaatacaaaaattagatgggtgttttggcacctgcctgtaatctcagctactcaggaggctgaggcacaagaatcgcttgaatccaggaagcaagcggaggttgcagtgagttgagatcgcactccagcctgggtgacagagtgagattctgtctcaaaagcaaactaacaaagaaaaacaatacttcctggggttttggtgtgcagagggctttgttggaagtgtgactcaatcttgcctgccttctgggagctctagaattgttcccaacccagtccatggcttctagccaccactacagggctgtttcatgtacttctctctctgactctgtcttgtccgactctcttgagaatttctcaacgattgctcatgcctgtcagtatcagtgcttccatcgttccatctttgattcacttctctttcctttctatttactcccaaaatggagtcattcatcctgatgtcctcaattgctgctgatatgctggtgattcccaaatacatagctccaacccccaacttcccccagactttagatctgtattggtattacctactggacatctctatggacagttccgtatagactcaactcatctgcccaaccaagtatgttcctcctgaattcctctcctggttacttcatcacaatctacataggctcaccagctagaaacatttatgagcttacattccttcttcccatatcttatcagcatatcatatccatttcactccaacactctgtcttgaatttggccctccctctcccctctctactttaattcattggagcatgggatttggagttaggtggttttgggtttgaattccagctctactatttttggttgtgtgatagagttatttaacc

SEQ ID NO: 4024 - DNA, 1475 bp, Homo sapiens
tagaggtgaggaaactgaggcctagaaagaagaactggctttaattcatagatccattcttcccctttcaagcctcttagtagaaattactatttgtgatgaggcaaatcttttacttctctcggcttgtcctaacacagttctttcaaaaaacttagattgtttaaatgccaggtaagacacaaagtttacttacagacaggataatgggctgactttgctttgcgcatgttagacataattttctccaccttatttttaagttcataatattgagcaggataagtatgttctaaagcagttctttggttgctgtctcctgctgattaaaggaactgattcaaggtgtcacaggtagggctttcttctttagtcacctcttagaaggtcccacgccgccccagcttctttcaggaccccagccatacaaacacctgtagtagcgatgaagtagggcagggcaacgggacttcccagaggagagcggctgtaagaggaaggccacatttctaactagctctccttgcccaggtgccattcgcgccctctggcctcaaggtgcgctacttgaaggtgtttgaaccgaagctgaactacagcgaccatgatgtcatcaaatgggtgcgctacattggccgcagtggcatttatgaaactcgctgctagctgccactaggcagctagcccacctccccagccaccctcctccacaggtccaggtgccgctccctcccccaccacacatcagtgtctcctccctcctgctttgctgccttccctttgcaccagcccgagtctaggtctgggccaagcacattacaagtgggaccggtggagcagcccctgggctccctgggcaggggagttctgaggctcctgctctcccatccacctgtctgtcctggcctaatgccaggctctgagttctgtgaccaaagccaggtgggttccctttccttcccacccctgtggccacagctctggagtgggagggttggttgcccctcacctcagagctcccccaaaggccagtaatggatccccggcctcagtccctactctgctttgggatagtgtgagcttcattttgtacacgtgtgacttcgtccagttacaaacccaataaactctgtagagtggagttgctggcttagtgttgatgtgggagctacatggggagggaactggtgttgctctccgtgcagttttctgtactgaatactctaaaggctctttccttgtcttgtcccagttaggcccctcctgggccatccaagcccttatccttgtgggttctgggcccaggtttcctggctcctcttagaaagcctcaagggcatgcagccgcagcgggccccagtaccctggggatagattctttccctagctcctttttattccccctggtcctcggactcctaggctcaagagatcttacctgccccagcctctggagtagctgggatcacaagcac

SEQ ID NO: 4025 - DNA, 1148 bp, Homo sapiens
agccagaggagcaggccaaggaggtgacagcatcaatggcgccccccaccatcccctctgctactccagctacggctccttcagctacttccccagctcaggaggaggaaatggaagaagaagaagaagaggaagaaggagaagcaggagaagcaggagaagctgagagtgagaaaggaggagaggaactgctccccccagagagtacccctattccagccaacttgtctcagaatttggaggcagcagcagccactcaaggtaaggtgtggttggacggtagaggtagggcgggctaggggatatcgttccttgccctccttgatgaccgcccatttttgacatgtttctgggtccctgcaatggaatctaagaactagattaaggacttttaagcctaaaaagggtgatgcaaaggggaaatactgttctttggctgctttctatttcccagggattaagggtactccttaaattattggcaaagatccatgcttttatttatttatttttaattagtggcagtatctgtgccaaagaggagacggaaaattaaggagctaaataagaaggaggctgttggagaccttctggatgccttcaaggaggtaagggagcagaaaatgggaggggagagggccaagttgaggtatggagcagtggtcattctgcaaccaaaactggatgttctgttgttctaggcgaacccggcagtaccagaggtggaaaatcagcctcctgcaggcagcaatccaggcccagagtctgagggcagtggtgtgcccccacgtcctgaggaagcagatgagacctgggactcaaaggaagacaaaattcacaatgctgagaacatccagcccggggaacagaagtatgaatataagtcaggtatgctgaagaaagggttgagaatggcttgagttttcttattagggccagaggaggcagtatgattgcttcattctgttttccttgcagatcagtggaagcctctaaacctagaggagaaaaaacgttacgaccgtgagttcctgcttggttttcagttcatctttgccagtatgcagaagccagagggattgccacatatcagtgacgtggtgctggacaaggttagtggcttcagttggggaggggacgataagttt

SEQ ID NO: 4026 - DNA, 1214 bp, Homo sapiens
tggagggggatgggctgaagcatatgtggggctcactgagcccacaatgatggggcggaaggcctgaggaggggtggggcctgcagttataggtgggacatgagaagttcctggtctgatgcctttctccttcctagccccgaatggatcagtatttcaaccagatggaaaaaatcattaaagaaaagaagacgtcatcccgcatccgctttatgctgcaggacgtgctggatctgcgaggggtgtgtgtccccctcctccccactgccagcctgctgcctccagtttctgacactgccttgtcttgccttccctgacatcatcgtgactggccctctgtctccacagagcaattgggtgccacgccgaggggatcagggtcccaagaccattgaccagatccataaggaggctgagatggaagaacatcgagagcacatcaaagtgcagcagctcatggccaagggcagtgacaagcgtcggggcggtcctccaggccctcccatcagtgagttccaagctgggattgagaagggagcagtgaagggaccgggaggttatactttcctctgatgacttcctgttagtgccacgtgtctgggccactgagacaccatgatggaactgaggatctgaggaagggaggctgggggtggcccaaggggaaggggctgctaggatttattcattattccagtatgcccctctttttgtgtcaggccgtggacttccccttgtggatgatggtggctggaacacagttcccatcagcaaaggtagccgccccattgacacctcacgactcaccaagatcaccaaggtaggggtgtgtgtgggagtgggtgattcagctcaggtttagatcttagtcccttcacttttctaaagttgagaaggtgacagctgaatgtttcctcttagactaactggttggattgctggagacaggactgccagctgtagagggagggtggtactcccattagtctggaccagtgtttggcaaacacacacacacacacacacacacacacacacgtgccagatccagcccattcatacatcccaggacccagtagtggtttttacattttaaagttgcgaaaaatcaaaaagtgaatggtaatttatgctgtggaaattaaataaaatgtaaatgtcagtgtccatgaagttttattggaacacagtcacagcatgcctttatcatctac

SEQ ID NO: 4027 - DNA, 1214 bp, Homo sapiens; identical to SEQ ID NO: 4026

SEQ ID NO: 4028 - DNA, 1538 bp, Homo sapiens
agtcctgaaggaacaagacacgaggaagtttccggcaaaggatatagcatccacaaaagtgtcaaggccagagaaggtgtgtatgtacaggaaatgtgtggggaaggaagggaaattgagatcaggagttgtcaggatctgtttggggggcagtgaatgttcaggttacatgtaggatatatataggactttatgtatgatatatataggacttttagcgatttcctgaattcaggagtaccaattctgaatatagttttctccattaaatacatcatgggcagagaggtttcaggctgccaaggtgaggccaagcaagtttgtaaggtttttctgatggccaagtgactcattgctgtgcagcagtctcagatcatgagattagcatcctgtcagaggcctagtcactctggaatggccacaaatgtcaggctggtgcatcagggccttgtttgaacagtggaacttgggagggttccctggggtgggctggggtggcggtggccagtcacctctaactgctgtcccgcctgcttgcagacctgctgcggatgttctttgacgcactgtatgacgaggacgtggtgaaggaggatgccttctacagttgggagagtagcaaggaccccgctgagcagcagggcaagggtgtggcccttaaatctgtcacagccttcttcaagtggctccgtgaagcagaggaggagtctgaccacaactgagggctggtggggccggggacctggagccccatggacacacagatggcccggctagccgcctggactgcaggggggcggcagcagcggcggtggcagtgggtgcctgtagtgtgatgtgtctgaactaataaagtggctgaagaggcaggatggcttggggctgcctgggcccccctccaggatgccgccaggtgtccctctcctccccctggggcacagagatatattatatataaagtcttgaaatttggtgtgtcttggggtggggaggggcaccaacgcctgcccctggggtccttttttttattttctgaaaatcactctcgggactgccgtcctcgctgctgggggcatatgccccagcccctgtaccacccctgctgttgcctgggcagggggaagggggggcacggtgcctgtaattattaaacatgaattcaattaagctcactgcctttctgctttatgccctgctccctctagagaaggtgtttataggtggggatccttcccagagctggtactgtagcgctgttccctgtaacctggcacccctcctgcctcttcccctgtccatgattgcagggatctgaggtttcctggaaggttgggccctcagatgggcttgataggtgccttcctggtccggagaaaagggagattagtgataggacatccttgctaggctctgctctcctaccagaatgattcaagcccctgtgtggggaaggcttttgggtttcgggttgtttatagctggagaatccctttatggcttgaaggtgtcatctgtaaaatgaaggggctggatgcatg

SEQ ID NO: 4029 - DNA, 1216 bp, Homo sapiens
tgtgttagccaggatggtctcgatctcctgacctcgtgatctgcccgccttggcctcccaaagtgctggggttacaggcttgagccaccacgcccggctgaccagtaaccatttttaaatgggatcttttatattgttaattactgttaagaataactttgctgctattgctccatagggctgaccagtttgagtatgtaatgtatggaaaagtgtacaggattgagggagatgaaacttctactgaagcagcaacacgcctgtaagttacgtaatcttgtgaggattcttttcctcttccatgttctgagactttgagctatgctcctgcttcctctgttgagtccctctcctcaggcacctcagaccgaggtgggaactagaaagaaatagttctgggagcagtttccagtctgaaatgtagactgccctttgtcaggccctcctggcccagtggtccacatgagaaactgattatctcactgtgtaaagtgcaaaggagacttgcttccccaggaataaatgcagcattaagtgattagactgttaggctttgtgtgtgtgtgtgtgtgtgtgtgtgtgtgtgttttgctactctgtaaaaggctgtgtgtgtgtgtgtgtgtgtgtgtggctactctgtaacccaatccctagttccttggttttcctgtccagctattttttcttttctttaaagtcttattaaaacaatatgtgctttttgtaagtaatttgaaatgcagaagagtaatgtgaagaaggaaaaaaaagtcacctgtaattccatatccagagagaaccttttacatagacttttttgcatatcctggtgttctgtttttttcttggagactgtggtgtttattatgttttcttctgctctttttgcttaacattatgtaaaacatgtttccccatgttagtgtaaagcttttcttttcttttcttttcttttttttttttgagatggagtcttgctgtgttgcccagcctggagtgcagtggcgcgatctcggctcactgcaagctccgcctcccgggttcacgccattctcctgcctcagcctcctgagtagctgggactacaggcacccaccaccatgcctggctaattttttttttgtatttttagtagagacagggtttcaccatgttagccaggatggtcttgatctcctgacctcgtgatccgcccgcctcagcctcccaaagt

SEQ ID NO: 4030 - DNA, 1252 bp, Homo sapiens
gccccagattgggtctgttaatgatgatcctgggccttatctatatgagaggtaatagcgccagggaggcccaggtctgggagatgctgcgtcggttgggggtgcaaccctcaaagtatcatttcctctttgggtatccgaagaggcttattatggaagattttgtgcagcagcgatatctcagttacaggcgggtgcctcacaccaatccaccagaatatgaattctcttggggtccccgaagcaacctggaaatcagcaagatggaagtcctggggttcgtggccaaactgcataagaaggaaccgcagcactggccagtgcagtaccgtgaggccctagcagacgaggccgacagggccagagccaaggccagagctgaagccagtatgagggccagggccagtgctagggccggcatccacctctggtgagggttggtgaaaagttggccagtgggtccccgtgaggacgaactactgtcctgagtcataagtaatatgggtggggcgagggtcttatttctgtagaaatcgtgtgactttaaggatttagattttgtatcttatgttttgtaacatttaataattactgttaaaatgctgtttgtaaatgagattggtctactttttcctgtaggattttattgtagagttttgctggttttgtaaaatggatggaagaactttgtatttatactgtgattttgaacagattatgcaacattggaaggaaggctgtactttgatggtttgaaggaactcagcagtatgatgatctggttccaggggaaaaaaatagctggttggtgtctagccccccaacacttttgtctgttgtgtataaaagaagaaagactggcatgtaccttcatttgcttagctatttgagtatctagagaaaaattaaaatgcaatgagttagcagtataccctggcacacttaataaattaaacatttgtggagcatcttgttttctgtgatgcactgtgtgggcacttggggatagaatactaaacaagataaaggtcctactttttttcagaattgaagagtaagtaaataaacaagaaattagcagtgcaatgagttgaagtctacaaagggatacttaacccagctgggatgattgagtgaggtttgctgtaatcccagcactttgggaggccgaggcggactgatcaccggagtcaggagttcaagaccagcctggccaacatggtgaaaccctgtttctactaaaattacaaaa

SEQ ID NO: 4031 - DNA, 1155 bp, Homo sapiens
ccgctgcagtattttctctttacgtccagaataaatttcagtctccctagcatcctttactaattggttcgcacagtcttacctcgcagccttcaccgtgcactctgcacaagagccccggtaaagcactgaaaatcccagatacacacactcacaaataggcacttgcagaaagaacgtggggggcactccatccctatttcatctcttgtacaccgaaacattccccagtctgcatgccttggatgggagagtcctggttacattcccccgcccccgacttttcaagcctaaaatccgtcacagggcgcacccccgtccccaccctccagggcatttccacttatagcagcctgggcacacccccaacccagaagggaccggaaaaggaggggctgcgcgcggcactagggtcgccgtcctggctgaggtggccggaagtggcccctcgcgcgggcgcggactgaggctgcgcgccgcaggttccggctgctggcggcgttgcggccgcaggtttgactcccgtgcggtgcggcccagcagccacaaagctcccgctgccattgctccttgtactcccgccgtcactgccgctgtccaacccctcccccggggcttgcgcggcggctcccacacccctcggcccgtgtacgcgctctgcacctgcctgcccgaaaacatgttgcagacaccagagagcagggggctcccggtcccgcaggccgagggggagaaggatggcggccatgatggtgagacccgggccccgaccgcctcgcaggagcgccccaaggaggagcttggcgccgggagggaggagggggctgcggagcccgccctcacccggaaaggcgcgagggccttggcggccaaagccttggcaaggcgcagggcctaccgccggctgaatcggacggtggcggagttggtgcagttcctcctggtgaaagacaagaagaagagtcccatcacacgctcggagatggtgaaatacgttattggagacttgaagattctgttcccggacatcatcgcaagggccgcagagcatctgcggtatgtctttggttttgagctgaaacagtttgaccgcaagcaccacacttacatcctgatcaacaaactaaaacctctggaggaggaggaggaggagga

SEQ ID NO: 4032 - DNA, 1222 bp, Homo sapiens
gttttatgtttattttggtcaaatatttcccagaattgtccagaattttctggactacagaatgtttagttactctagcaggagaaacctcttcaataagactgctttcttctttccacagaaattctaccttttctgaatttagtctaaattatataacagcaagtttgttaacatggtactataaggataggacatatgaagaggagtggccaggcacagtggctcaagcctgtaatcccagcactttgggaggctgaggcaggtggatcacttaaggtcgggagttcgagaccagtctaacatggagaaaccctgtctctactaaaaatacaaaattagctgggcatgttgatgcatgcctgtaatcccagcaacttgggaggctgaggcaggagaatagcttgaacccgggaagcagaggttgcggtgagcccagatcgtgccattgcactccagcctgggcaacaagagcgaaactccgtctcaaaaaaaaaaaaaaaaaaaatgtatgaaggtaccaataagagcttgataaatatctttatggagtcaaagtagattacatttgttacactgtccatcatgtctctcaccatcactgctgtttttttttaagtgtatatatgaatgtaatctataaattagtttgtgatgagcacttagtaatattcaagggacactgaattggttcctttgtgcattatcttactttactcatttattcctcttagcaacacagtgagataatgggcattttctacattttacagatgaagatagggaggctaagtgaatttaagaaacattcctaaaattaccaagacatactgtagttgtaaggcttgtaactatctgtggggtaggggtggaattaaaatccaggtatctggtttcatagtcatgataccttctaaaggaacattataaaaacaacaaatatattgtaaaaaatccagaaaaaagttgagaatgtttccattaacagatttgtgggctgtaaatttaatccatattgcaggaatggctaagattgataatttacttccctgtcttagctagttgatggtatgtgggaacaacagtcaggaaagcacagtcatgtttggtttttaatctacaagttatgtccttttccttccctcatttcatccattgccactcttctctatttcctcttcatggcacccttattctctttgttatcatattctcagttctc

SEQ ID NO: 4033 - DNA, 1283 bp, Homo sapiens
catttccatatacctcatgcattgtgggttaaaaagtccctgcatcacttctgttctcacaggtactgagctgtcaaaagtgcatgaaggcctctcactgtactctagtcctgacttggggtgcagagggctgcttgcaatcctgtttgtaaggctgtgcctgctcagagctttggactgttcaacccacacaagaacaaacgctaactaatattttttttaagagattcttttccctatgaatgtgggaaatgcaggatttattctgtgaattgtttgtttctgtgtgtttgttcagcgtattcattcactcactcgtttgcaaacataatgggcagtggtcatttactgctgctcttttacagttagctctaaattacttgtttgaactatttatttctgaaaggaatgttactcaagctgccactccctgctgaagagcaggagggaactctcactgggggcggaaggaagtggagctggagcagtaactgccaacatgaagctggagggtttgggattttttttgtttttgtttttttgaggctcaaaaaatgctgggagaaatgaaaatgctgtgggatagggctcctgttgcctttcagaggaagtctgacactacagcgttggcacagtgccgtgaacagtggaactgtgcccaagggactctgattatccaagcatcttccgaagagtgttgtggtcaccttaaagagacttccccttctggaaatgtggtgacttggcttagtcttcaaactggattcatggatttgaagtaactgtaaaccctaaatcttcattttcatcccagatctggttgagtataaacctcagaattgtaggggctggcctgagctgtttatttcaaaagatactattcaatttaaagctatttttcctcagagtttttgttttctatatattaagtctaaattaagttttctactcattaagactaacatctccccactccatccccactgaaatttgtggaagaaaatttagtacttggctctgaggttgccagttatacaataatctattttgcatatgaaagtttgtatttaacttttttgttcattaaaaaccttactgatatggttataacttcagacagtttagagttggtcagaacatattttgcaagatctagtgcctagtgttgcttttctgatgtaataaaaggtggtctggcagaacctaaaaaagtatatgctgaaatgatttctaaccctctccctacttaaacctcccagacttgttctggttcataaaagcaa

SEQ ID NO: 4034 - DNA, 1325 bp, Homo sapiens
ggaggcggccagggactctgccgaggccctgagaaccccaggggccgaggaggggcggggaaggtcagccaggtttgccagaaccaccgagccccgcctcccgccccccagggcttctgcaggcttcagccatccacttcaccatccactcggatctctcctgaactcccacgacgctatcccttttagttgaactaacataggtgaacgtgttcaaagccaagcaaaatgcacaccctttttctgtggcaaatcgtctctgtacatgtgtgtacatattagaaagggaagatgttaagatatgtggcctgtgggttacacagggtgcctgcagcggtaatatattttagaaataatatatcaaataactcaactaactccaatttttaatcaattattaatttttttttctttttaaagagaaagcaggcttttctagactttaaagaataaagtctttgggaggtctcacggtgtagagaggagctttgaggccacccgcacaaaattcacccagagggaaatctcgtcggaaggacactcacggcagttctggatcacctgtgtatgtcaacagaagggataccgtctccttgaagaggaaactctgtcactcctcatgcctgtctagctcatacacccatttctctttgcttcacaggttttaaactggttttttgcatactgctatataattctctgtctctctctgtttatctctcccctccctcccctccccttcttctccatctccattcttttgaatttcctcatccctccatctcaatcccgtatctacgcacccccccccccccaggcaaagcagtgctctgagtatcacatcacacaaaaggaacaaaagcgaaacacacaaaccagcctcaacttacacttggttactcaaaagaacaagagtcaatggtacttgtcctagcgttttggaagaggaaaacaggaacccaccaaaccaaccaatcaaccaaacaaagaaaaaattccacaatgaaagaatgtattttgtctttttgcattttggtgtataagccatcaatattcagcaaaatgattcctttctttaaaaaaaaaaaatgtggaggaaagtagaaatttaccaaggttgttggcccagggcgttaaattcacagatttttttaacgagaaaaacacacagaagaagctacctcaggtgtttttacctcagcaccttgctcttgtgtttcccttagagattttgtaaagctgatagttggagcatttttttatttttttaataaaaatgagttggaaaaaaaataagatatcaactgccagcctggagaaggtga

SEQ ID NO: 4035 - DNA, 1286 bp, Homo sapiens
tgactgtaggctgctgtggacccaagcagtgagttctaagtattggaaatatgatcatttccaagggatagaaatcaatatcatgatttccaagggatagaaacttagctgtttgcgtaattttgattgtgcccctaatgtggagctgtggccgactggatttgatggaatcataaacatgttcacaaacctttcccacttcccacataaacctcagcagatctcaattctgaagacgtaaaagtctctgttgatttgtattggttctctccagcttagccaacgagaaacgtttcaacagttttcaactcttatttagcaaaggcagaacaaaatgacatacccctttgggaacaaaacaaagcatgtttttatggccaagagttttctctatattaaaatgaaggctgattttgaaaacactctatcatagtgggttcttgtaactcaattataattacataattatgtatcatttgtgcatttatatgtttatagcacatatatatgtgtactgtgtatatgtatatgtgtgtttgtgtatttgtttatataattataaaactatataaaaacatagcatcaggccagagttctctacccgccagccctgacgtagaaagggctgttcctacagttttccagtgagctgtgagcagctgaggtgtcatttcccagagtctctgtgtaacctccaccagattgatttttcttagtttgattatcccaggtctggatcctacaagcctctcattttaccttccctgtttccaccttcccaccttcccaccatatcacttacttccaagctcactgtaccgcctccagaaagcacaaaatgacataaaattgaaaacttaaatccatcaatactgctcctcataaaagttcatctcccagttggctggtggaggaagtagaaggcaatgctgtagtaaagcgtgattcagttcttgttgcagtttcttccttactttttgaaaataacccatgaagctgaattactctcatcttatatctctctgcagtggcatatcctgatggtgatttcctctttttgtgcctcagtttcaccccctatggaatggggataaacacttgcggctgggcatggtggcatgtgcctgtagtcccagcactttgggaggctgaagtgggaagattgcttgaggccaggaatttgagaccagcctgggcaacatagtgagacactctctctacaaaaaaaaaaaagaaaaaaaaaatcagatgtggttggtgcatgctacttaggcgactaaggcagg

SEQ ID NO: 4036 - DNA, 1183 bp, Homo sapiens
ggcgggaggatcgaatattcgcagtggcctgtgaatagacacttcactccagcctaggcaacatagtgagaccctgtctcaaaaaaatagaatgaggctgggcacagtggctcacacctgtaatcccagcactttgggaagcaaaggcaggcagatcacctgaggtcaggagtttgagaccagcctgggcaacatggtgaacaccctgtctctactaaaaataccaaaattagctgggtgtggtggcagtgcctgtaatcccagctactcgggaggctgaggcagaattactttgaacccaggaggtggaggctgcagcgagctgagatcgcgccactgcgctccagcctgggcagagtgagactctatcaaaaaaaaaaaaaaaaaaaaaaaaaaagtcgtttgtcagttttggactttacaaccagtagacttgagattacatttctattttactctgtttgtttttccacaggaacccagactagcacttatgctgtagtgtgttctcaaaaactatggttgactgactgaactagtgaaataaacatatcaaggcattgaaacatacaactttattattattattacttttagagatggggtcttgctctgttgcccaggctgagagtgcagtggcgcaatcatagctctctgcagcttctagctcctaggctcaagtggtccttccacatcagcctcctgagtagctgggacaacaggtgtgtgcccagctaattttttattatttatagagacaaagtctccctatattgctcaggttggtcttgaactcctaggctcaagcgatcagcccacctcggcctcccaaagtgttgggattacaggtataagccactgtacctggctgaaacatacaactttagagatgacagggatcctagaatccacctgccttcagtagtttcagttataatgtggggtctcccaaatactaaggacccagcagtaaaagagggtaaacacttttttcacatttctaaatacagagccctgttgtaggaacagagggtactttgatgaaacagacagataaggaaagtccttgctttcatgcaacttagatttacatgaagaaaatcttgacgtgctaactagaatgcctaatttctttttgatttttgccacgaatgaatctgaagctctgattgtctatattacc

SEQ ID NO: 4037 - DNA, 1187 bp, Homo sapiens
agttcacttaatattaaagcatgttcattcttttcttcccaggtcgctattaaagcatgaagactttctgaaacctgccctagagctgggatattgtttgtgggcaatattttttattgtctcttgtttaaaaagtgaacagtgcctagtgaagttaggtgacttttacaccttttacgatgactacttttggtggagttgaaatgctgttttcattctgcatttgtgtagtttggtgctttgttccaagttaagtgttttcagaaaagtatgttttgcatgtatttttttacagtctaaattttgactgctgagaagtttctattgtacaaaacttcatttaaaaggtttttctactgaatccagggtattctgaagatcgaagcctgtgtaaaatgctaccaaatggcaaaaagcaacaataaacagtttgatttttacttttctttctaacatatcaatgcttagcagaactattcagattgtcagtagtaaatttaaagacaaatgcccgttttcctccagtccatgaaacataccatacttatatacctgcaactaagtgtttaaaattatgctctgtaactctgtactgctagtattagaactaaaaatcttaaaatacagccagtgcttaatgcttatatcaatgtggatttgtcggcttttatgtaatctgtaatatgtatagcaggaaatacgaagagttacacagtgtatgccttaaaaggctgtttcttaaaggtgttacaaggggataatggtatttcaactagttatcagcaagtgacaatacattccaccacaaatacactcttgttcttctagcttttagactatatgaaaaaaccgggtgcttcaaagtacatgataagggaacactatacctgtcatggatgaactgaagactttgcctgttcattttttaaatattattttcaggtcctttgcttaccaaaggaggcccaatttcactcaaatgttttgagaactgtgtttaaataaacgcaaatgaaaagaaaaatgttggtgcagctgttcacaaagaagtgttcttgttctattataattagagttcttctgtagtttaatcgttagggcagtgtgttccttgggctgaggtgtatctttgctattttgggctgggttgagggggggatgaatttctgtattcctggaaaattcag

SEQ ID NO: 4038 - DNA, 1129 bp, Homo sapiens
tttttttcaggaggaaaaaccaggagaggaagtaattgacaataaaatgaaagatcatcaaagtgaaatgtaggataacaagaaaaactagcatgttttatgtaggcagtattttattttgtttagtatgttcaacagacatttacagatcaactaaattcaatctttttaattatttgaggaggtgagctgtaatttaaatagtgccaccttttaaagtagtatttctcctttggacatccagaagacttaatattttctaaattgagggggaaaatgtacaacaaaactctttgaaaataccagtgttggattcaagtttgttctgctttccttcatagctactggcatattgtaggtggttgacttgattttgtctttttatgattcatactataaaatctcactagagcagcttttccagggggtgggttacacttaagctccaaattgtcaggttccctgacaccgtctttctgcagagctctttaaatacagtacaaaaatgtgtgacgctaaatacgtttctttatcctatctagacaagtcacaatactgtaaacctcttcaaccctgagcgtttgtcattgtacaaatgaattgtccgtgctttcctttcatgcacttatgtattaatgtgtcactttttgactagaggtgtgcttttgacacttaacctattttctattgaatataataagaagtgtgaaatgtaactaatagttcttaaaatgttaaatgaacagtaaatgttcagtggcgcacttcacattcaacttaagcatgataagtctatttggagtagagaaatgagattaccatatattctagaaccagcagaaaactatgtagttttcagttttttgagctgcatattctagtttctttttttttttttttaatccaaatcaacaaagggattttttttttctagtttcagttttggcactggattttatcctggagttttaaaatattcttcatcctgttctttttctattaaggttaatgttgaagaaggaaaatgcggaagtcgtcatttgacaagttttataaatgagtatttgaagctcaggaataagtgaagctgaaatttgaaaaaataaaagaaagaatgcatgctaattat

SEQ ID NO: 4039 - DNA, 1089 bp, Homo sapiens
ctgggtattggattcggaaagcattgaatgatgcgaacatacgaggcttgctagaattaagaggaatctgttagaagggtgatagaaaagcaccatagaaattgatttttgaggctgtgggaataatttgtgcttttttaaaaaaaaaaaacaatttgttacctaagtttccccttgttggtaaagctaccttaagatctgaatatgatttatcaggtaaataagactattaaatgtcttagcaaacttttgattaagattttatatgattcctcagagtattttaggaagaaattttcagtgatgaagcgtgagtttcctgcgtaattttggagcccaaactgcttaatttggtttgaactaatcaagccttgcgtttacatactcggatgagcatagagtttttagtttttgatgtttttcccgaagccgattgactccaatgtcacgagtgttttagatttttttttaagttcttgctttcttgggtaagaaagttgggattgagctcaaaagttgttaaaaagtcgtgacttctgatcattggcagttgaatctgttataacagtcattggtgtttggactgcaaagtaagcgattttaaagtcttttgttattaaacagaaaaattcaattattgggtacctttctactcttcaaaaatactaaatgactggcttctgactagagctctcgattgaatacacgtgaagaatgcttgagaatggaaaattgcccagagttcattagtatattttacgtgagaagggaaacaattgaaactaggttccagtttgagactcggctcaagagaaatttgaaattttctgatgggttatctttttactagtaaaagtacactgtgtttttcgcaatctttgaattgtagagggaggttaacttaatgtgttaaaaattgagttttttttcttacataagagtcttcgctttctggccgagatctctaaacttttacgttgtgaaatacttccatattgttgtgtttggtgtttgcgtgtttgtgttccaattggaacctttaagggttggaatacacctgaatcaaacacgtgtctaggcttccaaagc

SEQ ID NO: 4040 - DNA, 1261 bp, Homo sapiens
cagtatgactttgtttctaacagctccaaaatggatcaaaatgtttgttttggatgaagcagatgaaatgttgagccgtggttttaaggatcaaatctatgagattttccaaaaactaaacacaagtattcaggtaagcattacttcacccccctcttaaaggtagagatggggtttatttaatgcaggtactgttacaatacaactgatgtgttttgttgtcgttccccctgcttaaagcacttgatgcataactctgtctaccttcattccgtagtaagacagagacgcttggcttcagacattttcctttgggtattaatgtgtaagttgtgctacaacataattttctctttttaaggttgtgttgctttctgccacaatgccaactgatgtgttggaagtgaccaaaaaattcatgagagatccaattcgaattctggtgaaaaaggaagaattgacccttgaaggaatcaaacagttttatattaatgttgagagagaggtaactgtctgattgttagacattattttaccttcttgtataagcactgtgctaaaattgcagacactaggaccatgtcttggtttttgcaataatgctagcagagtacacacaagaagaaaagtaacagcactagattgtaaagactggggtggacctctttcttaatgtccaatgtcctttgtcttaagatttggtgcaatatctcattagacctaacagaatgaagttaatttttataatttctacgttttgagactgggttatgagactggctaagactggccaattttggtattttgggtagagacagtttcactttcttgaaaccctggtctggttggaactctgggctctaagtgctaggatcccaaagggctgggattacaggcattagcactgtggctggcccagaatgaatttttaactgaagagttggaaaaactaaatgactgttaactttaacttctaaacattacaggaatggaagttggatacactttgtgacttgtacgagacactgaccattacacaggctgttatttttctcaatacgaggcgcaaggtggactggctgactgagaagatgcatgccagagacttcacagtttctgctctggtaagaggtgttctaaaatgtctggatttccactaaagcaggattcagactacaatatagctgctaagtgctgtgttgtcgttccccctgcttaaaataaagttgtttcttaactatacctgtctgctattctcctg

SEQ ID NO: 4041 - DNA, 1261 bp, Homo sapiens; identical to SEQ ID NO: 4040

SEQ ID NO: 4042 - DNA, 1261 bp, Homo sapiens; identical to SEQ ID NO: 4040

SEQ ID NO: 4043 - DNA, 1261 bp, Homo sapiens; identical to SEQ ID NO: 4040

SEQ ID NO: 4044 - DNA, 1132 bp, Homo sapiens
gttctcccaaagccttcccaggaaagtatggaacttaggtgtggaacagaaatgactgggggcacgggggccagttggcagagtgtatgtctagtctcacctagaaacatctttaataccgaacattcaattacctaggtaataccagctgagaaaattgatggagtatttgctgcctgtcagagtggctcttttgacaaactagaagctgtggtcaaggtaaagtcagcttactaactttggggaaaggaatattaagtcatcataccaaaagttttttttattataggatttaatagatgagggtcatgcagcaactcagctcgtcaatcaactccatgatgtggttgtagaaaataacttatctgataaacagaagtctattatcacagaaaaacttgccgtaagtaggtactttgcacatgtcaatggaacatttaactacctgaaggatgctaatttcttaaatttttctcgtaggaagttgacaaatgcctagcagatggtgctgatgaacatttgcaactcatcagcctttgtgcaactgtgatgcagcagttatctcagaattgttaacgtgaatatatctggatggggggttttgtaaataatgaagttgtaataaaaataaaatgaccaaaagcacctttaaagtgaatatacaatttatttaacattcaaacttcattaagacatgtgcaatatggcaattttactggggattaaaccctacctaggattgcttgctggggcttagcaacagggtccagttcacacttagcactaattaaatactttattgaataaatacaataccaaacaaaatgcattcaaatgctttctaaaaaaattttaaaggcctttctactcaggctaatgacaaacacaataaaggcagatatgctagtttaacataattggctgattttatacagcacttatatcttttagtccacaagtatattattaaatgatagagaacatctaatacaaccatttctacagaactaggaaataaatttctaagaaagaaagattttacagaccccatcttttatacccaccccaacagtctaactctaaagaggataaagccaatgactttcctcacaagagctcacgactaacgtcg

SEQ ID NO: 4045 - DNA, 1400 bp, Homo sapiens
cccaatcaggagaataattcctaagactggaacaagccttctctctctcccaaccccaccgatcacttgccaaattcttttatttctacatttttttttctcagagatagggtcttggtctgtgtcacccaggctgtagtgcagtggtggtgtcacagttcactgcagccttgaactccaaaactcaagtgaccctcttgcctcagcctccagagtagctaggactacaggtgtgtgccaccaggcttggctaattaagaaaaaaaatctgtgtgtggtgatctggtgatcttgctatgttgcccaggctatctcaaactcctggcctcaagtgatcctcccacctcagcctctcaaaatgttggcattacaggtgtgagccaccacacccagccattatttctaccttttaaactagtgagtctcaaactttggtctctgaatccttttacactcttaaaaatcattggtatctcaaagagactctatgtaaatgagccatatttatagatatttaccatactagaagctaaaataaaaaatttaaaaatatttctttaagaggaagacgcggtcgtaggtgcgaggatttctggtccgcatgctcctgctcctgactcaccgctgttcgctctcgccgccgaggaacaagtcggtcatgaagccgcgcagcagccatggcttttaaggataccggaaaagcacccgtggagccggaggtggcaattcaccgaattcgaatcaccctaacaagccgcagcgtaaaatccttggaaaaggtgggtgctgacttgatcagaggcgcaaaagcaaagaatctcaaagtgaaaggaggagttcgaatgccttccaagactttgagaatcactacaagaaaaactccttgtggtgaaggttctaagacgtgggatcgtttccagatgagaattcacaagcgactctttgacttgcacagtccttctgagattgttaagcagattacttccatcagtactgagccaggagttgaggtggaagtcaccattgcagatgcttaagtcaactattttaataaattgattaccagttgttaaaaaatatatatatatatttatttaaaataataaacccatcacatattgacataactaataagcccaccacatatttacaagaatcacacattgacacattaacactaacatttctattagaaaactattttccaaaacaaaaaaaataagaagagttgcactgctttacatttttgtaaatctcttaatgtcgcttaacagaaggagctgaattacaatatctgcttctcttgcaatatattcagttgcaaccaaaatgcaatgattttgtttgaagtatacagagaaaaattcatcctcaaacaggtaagtagatggaaaaggtag

SEQ ID NO: 4046 - DNA, 1192 bp, Homo sapiens
atctataacgagaagtctttttctggccattttgaaggggtgttgggccacttactattttaggaagtttaggtctggtgatgtaaaacagtcagcctgcttttttttattctatttttttttcaagcatgcatggcttcatttaacaaatgttacaaggccctaggaactgagtgatttgcaagatgtggtttctgacttcaagaaactcagagtgcagtcagagaggtagaccaaggcaaccagaaactaatattcagcatagaaaaagtaatgatgggaggacatataaagtgttcatggctcaagaggaagaagggagtggaagagtggaagaggaagagggactgctgtccacgttcaaagcccaaattgagtctgacttttgtcgagaattgcttaacaggctgcagaggtggccaggaggtagaccagggctggaattcaagtcacctcatttcaaatctattgctcagtccatcgctccgcctcatgccacattgggtttttctttacatcatttgtttttccttgtctcactttttttaggcttgttttcctgctcagaacaaagtgacttccctgaacacatcttcattatgattcacaccaacctgaagaaaaagttcagctgctgcgtcctggtctttcttctgtttgcagtcatctgtgtgtggaaggaaaagaagaaagggagttactatgattcctttaaattgcaaaccaaggaattccaggtgttaaagagtctggggaaattggccatggggtctgattcccagtctgtatcctcaagcagcacccaggacccccacaggggccgccagaccctcggcagtctcagaggcctagccaaggccaaaccagaggcctccttccaggtgtggaacaaggacagctcttccaaaaaccttatccctaggctgcaaaagatctggaagaattacctaagcatgaacaagtacaaagtgtcctacaaggggccaggaccaggcatcaagttcagtgcagaggccctgcgctgccacctccgggaccatgtgaatgtatccatggtagaggtcacagattttcccttcaatacctctgaatgggagggttatctgcccaaggagagcattaggaccaaggctgggccttggggcaggtgtgctgttgtgtcgtcagcgggatctctgaagtcctcccaact

SEQ ID NO: 4047 - DNA, 1183 bp, Homo sapiens
gcagcgatggctccgaacctcgctcctaaagcggcttgtgtgctctcaaccgtctccctctgttttaaactctctctctgacgtcaggctaggaggcgcccccagatctcaccagcccttttacgcaccattagcctcgcaaaatcaatcacagaagacaggggaggtgacaagatctaaagtggcttacttaaaaaaaaaaaaatactgcacacgcacaggcacacacaattccacatgccccacgatttatacaatcttttattttcactcagtgctatgagcatacacattccacaatttcactcccacacatgcacactcaattacacacaaacagaggctcaaacactcagctcttaaagagcaaatacactatcacccttaaatgcacacaaatgtacccagacaactccatctgtcatcatactctaacattttaggaaggcccaacaagcaacagggcatgtgtatggtaggtggagatcagaatcattcctctaataacagatttgagaatgaaatatggacagtagaaggactgagccctctttatttcctccattatctcataaaaagccttgaagatgtaacggggctctaaaagaacttcacttttctctacaatgggggagaaggtacctctggctcaccctccctccctctttctcagcaactgagacttctgatctacctgcctttctattgtgaccatatatatgtatgagtgtgtgtatatgtacgggagggaaagagagagagagagattgaaatggacttcattttggtgctgagaaatttagagctggaaggcaatctaagaaattattcaataaacctcagaatttgaatcagtaaggcagagtaatggtcagtaaattgttctccttcacatactgcacactttgagcaaaaccagacctccacattccaaagccagtgttccttctactgagctctgagttttctaacagattcctggccggtaagcatagttttatgtcaggaagccccagtttagacatataaggtctaggaactcccagaacatatgtgaccactattgtatatctatatgtggaaaggatcaaaagattcttggttaaattcagctctgcctgatctcctagaaacaaagaaagtttaagaaaacctgtccttgaattctgattgaactctggtt

SEQ ID NO: 4048 - DNA, 1176 bp, Homo sapiens
agtgcatctccagcagcctcatgcaggcctatcaggcctgcaaagccatcatcattaaactgctgtcccggcccaaggctattagcccctatcacctgcggagcatgatgctctgggcctgcgacagacttcctgccaactacttggctcaagaagactatgcagcccactttttgctgggcctcatcgatgacctgcaacactgtctggtcaacaagatgtgccccaattatttcatccctcagtgcaacatgctggaacatctgtctgaggagacagtcatgcttcacgcccggaagctgtcctctgtgcgctcagacccggcagagcacttgcgcaccgccattgagcatgtcaaggcagccaaccggctgacactggagctccagaggcgaggtagcaccaccagcatcccctctccacagtctgacggaggggaccccaaccagcctgatgaccgtttggcaaaaaaactgcagcagctagtgactgagaacccgggaaagtcaatctctgtctttatcaatcctgacgatgtcacaaggccccatttcagaattgatgacaaatttttctgagtgttagctgacttttttttttcctgattcttaaactctgataatgtgtcgtgtggtttgtgatgctatctttctgttttttacatatccagcctagattggatttgttaagaacaaattttaagtttcctggttctgcaggatggtgcaggctctgaaacagtatattactatttcatattctgcctctgatttcgttgtttactttttgtagttattgtcatgctctttagtttgttggagttttttttctttttaaggagatcttaagccatagatgaaaatgcccatgaatcctcttgcttttttctgtttcatacttggtgcaaatttgttcatgggtatggggaaacaaatctctttctgatgcttaacgattctatcctattatttttattattttgtttttgtcttttttcttatgagctttcaccactactgatatttgagaatcatatgaacctgggaactacttggcatgttagctggatttatttattttggccagtgaccagagtagtttccccccttttccaccaaacaatgtaaactttgaaagtgataatactacaaattgtgttttggagcaacttcattg

SEQ ID NO: 4049 - DNA, 1196 bp, Homo sapiens
ctggccaactgcatgacccagatcaatgccatgacctaccccgggcagccgcaccccgccttgcaggcgccgccaccgcccccaccgggacccggcggcccccagcacgcgccgttcgcgccgccgccgccactcgtgcccatccccgggggcgcggcgccccctcccggcggcgccccctgcaagctgggcagccaggctggagaggcggctaaggtgtttggaggcttccaggtggtaccggctcccgatggccagtttgctttcctcattcccaacggggccttcgcgcacagcggccctgtcatccccgtctacaccagcaacagcggcacctccgtgggccccaacgcagtgtcaccttccagcggcccctcgcttacggcggactccatgtggaggccgtggcggaactgagggggctcaggccacccctcctcctaaactccccaacccacctctcttccctccggactctaaacaggaacttgaatactgggagagaagaggacttttttgattaagtggttactttgtgtttttttaatttctaagaagttactttttgtagagagagctgtattaagtgactgaccatgcactatatttgtatatattttatatgttcatattggattgcgcctttgtattataaaagctcagatgacatttcgttttttacacgagatttcttttttatgtgatgccaaagatgtttgaaaatgctcttaaaatatcttcctttggggaagtttatttgagaaaatataataaaagaaaaaagtaaaggcttttatgtcttcgaactgattcttccagaatatgtaaaaaggcttttggtggaatttgaattacatgtaattggtaattcaggaattgactcttttgttattaaaagaacatttgtaaaaatccatcaaacttttcaccaatcctccatgaactaaaaagactaaattccatttactttacaagcagccatctggtaaggcttccctgataaacttgtggtcagtctcttaaaggatttccaaaaaaaatgtttttaagttgcagtcgggtaagtctgcagcccttgttcttctagctcctcctgaggaagattgaacaggactaaattcacgaagctaatggatccaatcctattgcccattgcacgttaagggtggttcctgcagctctcctctcagggtagc

SEQ ID NO: 4050 - DNA, 1134 bp, Homo sapiens
cttgattgttactttcagtgatattctttatattgggtacaggagaagtttggtgtttggtaggtttttcaacattagtttttgagactagtttacctcttcacatttatgctcacaaccctcttgttagaaaagtctgtgtttatatacaggctgtaagtttgtgattgataaaaagaagatgagtgttaattagcctccagtgaaaatatactgaaagcctgttttcatttgattccaatgtttcttccaaagaattctgtataaacatatgccaattccctatgatggtctagagttaggaatgagtgtttatggtgttgcttatagaacaactcaggtaatctccatttctggttttatattttctgtacaaactgcctgggttttatttttctaatcagcaaggtgcttcactgccttcttgagacgcctctcaaagctcttaaatggctcctgtgctatgtgtggtgttggcagtctaatttgcttctgttaaatgttgtagaacctttttcactaggaaataagattcatttctttcggcagtagatgtagattcatcttttaacgtttcttcaaatttgtttctgtcaggctttgtgttattttaaatggttttttaaaattttcttctatgttttcaattacctaaagacataggataatagttttttttaagttagaattttacctcataaaattttttgaggtttgatgtatgtctctgtcttatcaataatgaggcttaaaaaatactggatttgaatggctgccgttttttcaaagcaatatgaatttgatgagtttgttttatgccattaggtggcgccagaggtcagaacatgtctattttgaattggatcgttacaaatgagcatatttgatgcggaaatttctgggagaaaaaaaattgaggaaataaagttaaaaaattgacattcattgagccaaaagagatgtggagaaacatttttcacctttctgtttggcctgattaacatttaaattcttgccaaaattaaggtaacttttaaaaaacaccttttataggtggatccagcagtctggcaacgcccacagttaccacaacacagaaaactgatcgtgctataaaatggacgctaaactatg

SEQ ID NO: 4051 - DNA, 1140 bp, Homo sapiens
gctaggaagatctgcctcccttagctgaagtctaagatgtgtagcttattgatgcctctcctcttcttgttctgctgttgctgaatataatggggatgccagggcagacataccattcaacttgaatcttccttacccactttgtatagtcttacatgtcattgataccttgttttctggtacgcctaaaaggagtagaacttcaagtggtatttaaaagctttaagaaaagtcaaatttttacttttttcttcccatctgaggaatggatttattttctttttaaagaaatccaaatttttaaaagaagggatcttatttttaaaacgaagatcgataatatctactatgtactaaatgtcattctttaaaagttgttccctcataatttagtaaattacttccttttttaaaaaaaggaaagaaagagtgtttgtcttacaggctaacatcacaaacaataagtttcttctcatccatctccatttataaactagtgtgactgtcttctgagcacagtattaaacctggacagggagagggagggtgttagagaatgagaggaaaagagagagaatacctacatataaggtgaccctaaagaaaagcctttcacccttcggaagatcttttcattttcatttttctttttttcaaacaccaacttgtaccagagggaagatctttttttaaaagtgtttcactaaaatttgtaaggaaataatgagctagataaaatattacagtgtttatttaatgaatttactcatatttaaaataatatctaaaaagagtaatttaggaatattgaggcaatgagacttgaaggttataaatagtggcagtgagaaaaggaatattatagataagctgttgaaaagaaaagatgctaagttttctagtgcttccttctgtttccaagggattatagaaatcggagtttgtttgacctgtttcacaggcatctcctttgtggactcattgtgtctcttccttaggctaatagtcaccatttatcatggacggttgtcatgagtgttgaagcacacttaacctgcttcgtcagagggtacttggcatcaccggtgcacagctggtgtcctagcaggagactaactagctgacacaccgtgctttgtt

SEQ ID NO: 4052 - DNA, 1293 bp, Homo sapiens
ctctttcatacagattcctggccctatcctctagactccagagcatctattcagtgagtgggggttagagctgcagcatttacatttttaacaagctaccagatgatgctgtattttaataatgaaaacttggaaactgaatgttcaatagcagggaaaatgtgatatagacacagtatgaaatactgtgtggcagtcaaaaagaatgtagtaactctggatagttatttggtataaaacttcatttgggaataataatttacccaaggctagaagaatctaaatcaagaaatcttaagttctcttaggctctcatttttagttttctcagtttatcagtatgaccaaacactctgtatctatactgcctcttaagtaatagtacttttctttatttgaacagagaaacttaatattaagtttgtgcctgctgaggctagaactggactactgtctttcgaggagagccagagaattaagaagctccatgaagaaaacaaacagttcttgtgtataccgaggaggtgagctgaagaagaatttagaatgccacaaaacatccgaggctgctgagtattcattttttaaattgcttctttttctcagctgccattattagatccaaattacctattttattttggttacttatatgaggaatttttttccttctatgattgtttcagaccaaactggaaccaaaatactaccccagaagaactcaaacaagcagagaaagataactttctagaatggagacgtcagcttgtccggtgagtattatagactctatgaagacttactttgaaatcctgagttcagatatttggcatgcttacacagccatttgtgttttgaagttttgattcttttaagaaggaaatggtagcattctgctaacaagtgcaaatagatgtatgcacaaacaagattgctaggtgcaaatgcatccttgcacagagatcgtgagttggttactctgctcagttccgggccttttcctttcattcccttctttggccattgggcatcctggagttgatcgctgctctcctgcacatttttccagtaagagtgtgggaaagaaatgactttgtgtgataggtaaacttccagggcataaatagcttcaggataaaatttgaatttggtggagtattgtctaaataaatagtatttttatggtgtctcagcaggaaatatataaaataatttgactctggatatttgtgcccagtacttatttttaatgtaataaatttgagcatttacactgctaaaaattgtctatta

SEQ ID NO: 4053 - DNA, 1139 bp, Homo sapiens
cattttgtggtcattaagcattgggtgggtaaattcaaccactgtaaaatgaaattactacaaaatttgaaatttagcttgggtttttgttacctttatggtttctccaggtcctctacttaatgagatagtagcatacatttataatgtttgctattgacaagtcattttaactttatcacattatttgcatgttacctcctataaacttagtgcggacaagttttaatccagaattgaccttttgacttaaagcagagggactttgtatagaaggtttgggggctgtggggaaggagagtcccctgaaggtctgacacgtctgcctacccattcgtggtgatcaattaaatgtaggtatgaataagttcgaagctccgtgagtgaaccatcattataaacgtgatgatcagctgtttgtcatagggcagttggaaacggcctcctagggaaaagttcatagggtctcttcaggttcttagtgtcacttacctagatttacagcctcacttgaatgtgtcactactcacagtctctttaatcttcagttttatctttaatctcctcttttatcttggactgacatttagcgtagctaagtgaaaaggtcatagctgagattcctggttcgggtgttacgcacacgtacttaaatgaaagcatgtggcatgttcatcgtataacacaatatgaatacagggcatgcattttgcagcagtgagtctcttcagaaaacccttttctacagttagggttgagttacttcctatcaagccagtacgtgctaacaggctcaatattcctgaatgaaatatcagactagtgacaagctcctggtcttgagatgtcttctcgttaaggagatgggccttttggaggtaaaggataaaatgaatgagttctgtcatgattcactattctagaacttgcatgacctttactgtgttagctctttgaatgttcttgaaattttagactttctttgtaaacaaatgatatgtccttatcattgtataaaagctgttatgtgcaacagtgtggagattccttgtctgatttaataaaatacttaaacactgagttgtcatttctttagataaattttttaaaaagagcagttttaggctcatagcaaaatt

SEQ ID NO: 4054 - DNA, 1120 bp, Homo sapiens
aactagaaaaaaaacaaaacttggatcacccagaaagagcgtcacagaggcgagggagaatgaagcctcttgttatcctgatcgcctatgacaacgacatttctaactcttctttgaagcgcagttcttactcttaaatctggtcatacaagctttggcttggaatcctgtctgtctttgaaacagctgaagttagtgttttcctgtgttacccagtgttacatagtctcatctttgaacttttctgcgtcagccttctctctttgggaatgctgcctgtttctgtctaacttattctccctggtgtggtgtggcagtgaagtctgtgctgaagcccatctgcttggttcctccaagtgcacattatgcaagtgtatttggatagacagggagatgcccggaacgtggttttcctcctccctccctattggagccatacctcctaaatatattgtctgggtcccaaatgtttgagccctcttcctctgctctcagtgggctgctcttggcatgccctgtgcttggaacgggacctgcaggctgacaggcctctgagactgctagggccagcaaacgtacatgttattgggaaactccctttccccttttggtgagcttctaccacctcagtctaatcgttttgactgaaagctatttgtctgactgaaagctaaaatcttttatagtgtggcctgttagatactttggggtaaatgtggtctgaggtgctggactagcacgggtagatggagaaagctgttgggaagttgcataatgtggtcatctgtgcctaattaaatgaggttagaggtgtgcacaccaccacaatgcctgggatctaaatcttcagatattaacgtttgaggctatggagctgtttccctgaatcacacacgagaaagcagtcaacatgggtgggccaaatgtggccaagatgagagagccagaagtgttggccttagagcagagcctctgtgtgtgagacattagaaggccagagccggggaggtgccggcgcagccactgccttccggtgggccggacggaaagcttggtcttatgctagattcagaagcactgaagaatggaggttgacactttagaggactaggaagggatc

SEQ ID NO: 4055 - DNA, 1149 bp, Homo sapiens
tctttgggattgttgagcaaggggcagctggaccatccactaaatttttttgttcaagacacattagagaccctcctgtatatctagtaagtcataataaaggtgcttgggaaagccttaaatttgaagacacatggaggcggtagaaaattaaacttgtaagaggagaaaaacatgccattaggtaacgcagagttgtaactactggctaagactcaatggaacttccacttgctctaaaaccagggaaatcttagataactgggtgtgatctacctatagatctacctagtctataggtaataatttccagaaggaggatcttgctgtcagttggggatcctctggtttggtctgtaccaaattgtgaatactcttgctgtgttgtacccagttgctttatattaatactgcaacttgaaacggggagggtggggggacaatggggtgggggagggaagggagtgggacgataagtcttttgaagacatcagctcactgtgctgagagagggaccaaactcaaggaaacctctgatctatacattcaactgctgcatttttttataaatacatgtaaatgtcctgttgtaatatttgatcttggaaataaaaacaaaaacttttcagtattagttttttttgtgttgttgtttttacaagataagactctggatattactttcagtaatacaattgagattccaaaagcttgccccctcacgttctcatttaggtcagttactattgattgacaaaggttactttgtagtcccgttgttatgtgtaacgtttgctagccttttttctgctctttgtggtatgtcaaacattcatggtaaacactctgtaaatattagtccagttgttacagaaacattgggtaagctaggcttgttaggtaagtatgattctgtgtttgacatacttgggcgaatattcagtgtctgttctttcagaccagcagtaattactaatggttaattaaggacttagcttaattgaaggaaagataattactaaattaatgggcaaaaaggagatacgattatatggtatgacagaaattgttattgctgctggatgcagtggctcatgcatgtaatcccagccctttgggaggctgagatgggcggatcacctgaggtca

SEQ ID NO: 4056 - DNA, 1117 bp, Homo sapiens
accatgttcttttggttagaaataatggttcattttttgcccctggttggaatagtctctaaaaggctctggtgactgaattgaacatgagtccgcatgctgttttctttcaaaaggtatcaaaacggaaagcctctctaaggggaagacctttcaactccattcagaagacaacatttagtaaggaggatggcggaggttactagtaattttcagatgtcttgggctttttctgccaacaaaacccaaaatcaaattagagttggtgaaagctttcttcagtgtttttagaagaggccatcttgaatctgtagaataccatttacacatcaacttcaccctatgctcatttcgtattttgagcttaaatggagtcctctgaagggggggtagtcgtgattctggtggcaaaactagaacttttaacttgtaaaatgaaaaatattaaatggacctttttgtcagttgaggatttagattgattcttttatctgaggagcgtatgttcctcagatgttgcgtagagacctttaggttttcatctactttaagattgctctcttggcaattaggggatttgggaaaagaagaaaaaaagatgccatgtgttgctagtacacagttataggatatggtttctaatggttgaattttgaggaactctccctaaagaatgagttttatatctcctcaaggaaatcatggaaaaatctgtttattcttcagtgagtccttttgaattaatgttcttaaatttttttctaagtctgtgtaagtgcttatgtataagtatataattgtataaatatttataaatatatttatataattacggtttcatttctaccttgagtcaaagttctgtctttagattggtgactgagtaatacttacactttggtgttttttcttaggttcttgaggcttacttaactagcagcttctgatttattgagtgaaagatggttttcatgttaattcctcagttgcatctctgaacttggataacatacttgccgtttgaaaaatagagctgtatactgtcaaaggtgcactggagggtaaaacatttgttggtagtagacaagctcagaaatccaaaaattcagggagggca

SEQ ID NO: 4057 - DNA, 1199 bp, Homo sapiens
acactctgttgcccaggctggagtgcagtggcgcgatctctgctcactgcaacctctgcctccagggttcaggctattctcctgcctcagcctcccgagtagctgggattacaggcatgctccaccatgcccggctttttttttttgtatttttagttgaaacggggtttcaccatcttggccaggctgatctcaaactcctgacctcaggtgatctgctgacctcggccatccaaagttctagaattatagacatgagccaccgcactcagcctctcccatgttacagttagtttctgaatatgtgaagaggttactttgattaagtgaatattttcagttaattttctttgtatccttgggatagggaataccaccaagtcttaagattcctcttatctccctttgcatttttttttttcagagtcaacattagatctttgtatttgaggtcaagcatattgacagcaattccttcaattgacagaagtttgtgtttttttttttttttttttcagtgtgattcatgattatggctaactgaaactttcatccttctgtattatagttcggcaagaacaagaattaagaaatggaggagctatcgataagaaattaactacccttgcagatctattccggccacccattgatttgatgcataaaggcagctttgaaacagtaagttgttggagagtcagtgccttaactatgaatccttttgcattttcaatgcctttttttaaaaaattacttgttttagagcaggtctcgctctgtcgtccaggctggactgcagtgacacaatcatagctcactgcagccttgaactcttgggctcaagggatcctcctacctcagcttcccgagtagctagggctataggcatgtgccaccacactcagctaattaaaaaaatttttttggtagagacagggtctcactgtgtcgcccaggctggtctcgaatgcctaggttcaagcaatcctcttgcctcagcctcccaaactgcttggattataggtgtgagccactgcacctggccttcagtggcattttttatttttataagaacaaaaaaccattgtcagtgtatagggaattggcattataataagtatatctacatgatatgcctaaaggttacattgatttatatttctaccagcaatatatgaaatatatttctaccagcagta

SEQ ID NO: 4058 - DNA, 1190 bp, Homo sapiens
aagtagctgggattacaggcatgcaccatcacgcctggctaattttttgtatttagtagagacaggggctcaccatgttggtcaggctggtctcaaactcctgacctcaggtgatccacccaccttggcctcccaaagtgctgggattacaggcatgagccaccatgcccagccgatagtaaactttttacacaagtttgattaagtctattgtaactgggcctgaattttctcatttgtaatacaagatgactggatggaagatgtttggattaattatacatgaatgatttgaaagtttttaaacttttttattttttgagggaaggcaccatatgaatcttgagtgttttaaaacaagaaatactgtgctcgctgcggcagcacatttactaaaattggaacgagacagagattagcacggcccctgtgcaagggtgacatgcagttcgtgaagggtttcatatgttttattaaaaaaatacttttagataaggacatttttagaattgtttcaaaattaatttaaaaaattttcaattctattttttctccccaaagctcctaaaagacgacggcctgcacgttcaatttttgatggtttccgggattttcagactgaaactagtaggtatctatggaccagtttatcatctccctcttctcttcctattaaaaagacaaagatgattactattaggcccaattacttttaagttttcaccttctttaaaaagtgaaattatggatccagaatgtgattaattctcccctgagctaaattgttccaaattctaacctatttggttatagaaaaatagtaaaggagatggagataatgtaggaaatatggtaattgataaacttaattcgcttgtgaataaacacttaaaatgcttactataataaaataaactgatttccctcaggatcctgacttctgtcaatgaaaggaatatataatgaaaatggttattataagagattgaaaaataggaggaaaagccatgccacccaaagcagccactattaatattttggctacagttatttgaaatatttttgtgtaataaattagaatgagaatcttggtcttatgcttttagaggatttagtattgatttagcaatggaatcctaaagaaaggacagttaggttaggatatatgagaaacccttggaccatgcttg

SEQ ID NO: 4059 - DNA, 1154 bp, Homo sapiens
atatttcacagaaagcacacaagaatggtcaattaacccgaaaagatgctcagttttttgagtaatcagggaaaggccaatttaaaacacaatgagctagtatttcacccctcccagagttgctgagggtgctcagcaatgggaacgctcatcttctgtgggtgagaatgtacactaaaaacttttagaaaacaatctgacaaacctagtcaagtcacacacgggaacagcctgtaacccagcaattctaatcctaaatatacatctctgaatgacctttaaatctttggtcaggacccacaccaagaaatacattttatatcctgactcagtatacacataactaaaacaaactgtttcataagacaacgttttcactgtgtgcacaacactctgattatattattctagcgcatttagtgtcgtccactatacagagttcataacccaccaatgcattggtttttaatatgagctgcacatcattatcatctggggtatttaaaaaattaaaaacagtgctcgcttcagcagcacatatactaaaatacgaacgatacagagaagattagcatggcccctgcgcaaggatgacacgcaaattcgtgaagcgttccatatttttcactggccatcagagaaatgcaaatcaaaaccacaatgagataccatctcacaccagttagaatggcaatcattaaaaagtcaggaaacaacaggtgctggagaggatgtggagaaataggaacacttttacattgttggtgggactgtaaactagttcaaccattgtggaagtcagtgtggcgattcctcagggatctagaactagcaataccatttgacccagccatcccattactgggtatatacccaaatgactataaatcatgctgctataaagacacatgcacacgtatgtttattgcggcattattcacaatagcaaagacttggaaccaacctaaatgtccaacaatgatagactggattaagaaaatgtggcacatatacaccatggaatactatgcagccataaaaaatgatgagttcatgtcctttgtagggacatggatgaaattggaaatcatcattctcagtaaactatcgcaagaacaaaaaaccaaacactgcatattctcactcataggtgg

SEQ ID NO: 4060 - DNA, 1176 bp, Homo sapiens
ctgggttccgaacgggggtgagctccgtctcctcacccggccccgcacccgctgggcctggggacccctcactccccgtgcccgcccctccgcgaggcagcagaaagcgcccggccggggcctctctctactccatcttgccacagttgtctgagaagccagaaaaagtttccagaactggcagcccttaaaaaaaatgaagaggaagagaagaaatgggagcaggcagccctcgtcagcagaccgggagccgcgtgggcgcggagccatttgcattccggtctgcgggggctcggggatgctggtgacaggcccggttcccggtggctcgcccccacctgcgggcgtcgggaaggatcccttccatctctcagccgcagaggaggccctggcagcgccccggctgtagccatgcaaccccgaggagtcccgggcaccttcaccccaccgggaggggccacaaggacctgggcctcggccaccaagctttgtcccctctcgctgtggggggctagtgattctcctccgacctgacgattgcttggttttttcaaaagggagttttgtgcggtgagaagtgtgtttctgtgtggctaactctgggctagcgtgccgtggccattgaaggtgtggcctgcgtgggtgcagtgtaagtgacgctggattgtcaggtggcagcaggggacccctgctgtgtcagtgctaatgaaacatgttggttggtttctaaaataaagccaaacaagccagcacatgcagaggcttggaccctgatagaaacttctgctgccgatttctttcgttttgttaggcactcaaaggcctacctgctccaccgagaagggcagattccattctccaagagccagtcagggaccactctcatcctctagtcagtgaggccccccgcgcccttcttcgacctggactggttctctggctcttgcagggcctccgctgccctggcacattccagctgcctccaccccatcaggctctggggtgtctgcccttctgtggatgggtgcagagaagggtgcaaacttctctgctgccccctgccccacacctccaaaataagcggcccacatcttttctctggcaagctcgctgctaactcactggaggggggcgtggggagcggatctcccagagaccctacagtgggtgctctgt

SEQ ID NO: 4061 - DNA, 1171 bp, Homo sapiens
ccttcatttaccagaggttagaatggggttatactctcacctcagcaaaggggcatgggattgcaataacttgtttaggttggttatggttcatccctttgagactggagaaagggcctgccttctctaagacaaaaggatacctgccttttaaacttctaagtaggggcagtgattgctttgaaggcaataaagtgtgcaacatcagcttttcatgagtatgtgtatttcctgataagctcttataatacttttaaatttccacgttttttttctgttttggtttcatttctgttttatataacacaggttttttgcttttatataaaattagattttttcctttgatttgtaggcttagaatctctttatctcgtagttttagaaaaaccatttatattttgtctagctttctttgtagtttgataacataaaaattatcagtaggtagttctcactgatagaatgtcaggttttatataaaatttccaagatactcaattttttttaatttttagggaacctagaaaagttgttcttcatcgtggctcaacgggccttggtttcaacattgtaggaggagaagatggagaaggaatatttatttcctttatcttagccggaggacctgctgatctaagtggagagctcagaaaaggagatcgtattatatcggtaagacacgttagtcaagatcacgtttttgttattttcactggacctatttttaaagcaaggtcttctgtttttttatatcctaaagtaatggggatatcttggttatcttcttaacattttacagcttaattgtagaattgtagtgtcagagaacatattatataataggtgttcttttatagaaaggggtcagtttttataaatgtgcttgaagaaattatgtgttctctatttattgactggaaagtttgctatgtgtctattaactcaagtttgttacttgtgtacttctttatactttaatctgttaccttcttgatctattgaggttttgaaagctatccaaatatgatttttttaaagctacccaaacatgggttcaacagttggtcctcatagcattaggtttttttagtatgtcttttgaaattgtattattgggtacacatagttttatagttgttattatgtaatgaacatcttgatttataat

SEQ ID NO: 4062 - DNA, 1158 bp, Homo sapiens
gcagggtgactctgcatcagctgactacaggcagatttccaggctgactggctggaaaagaaaaaaaaaaaacgcggagttcgacgccgcgcgcagcaccaaacacttccccagaagggcgcagcctggaggcggccgcgcgcaggacgcacgcccaaggcgcctgggccgctagggaccgaccggagcgctcaaacccacagggtatctatcaggcgcgcgtcagcacgtaagcagagcgcgagaacgcccgagacggcggcgcagccaatcccagagcagcgctccccaacggccggccggagggcggggagagaggggggctcggccagagccacgcttcccattggttgagacagcaccgcccagccaaagcccccttgtcctcgcgcgggtgcgccgcctggactcccaccctggccagtcccgggcccaccaccactctggcatccccagcctgtccccgcggctcctcctccttccccggccctgtggcctgcctgctgtccagcattcttccccagggcgctgtggcgcggagggaggactccccaaaccccgggaacagagccttgcggaggaccccggaggaggaggaggaggagggacgcggacgggactgggagattcggtcgggaaggggacagggcctagagcccggggctagaaggcaggacacctggcttcggtctgggctcggcctttgactacgacgtgaccttgaggacggttccttcccttcgtggggcctgggtccccttcagtaagatgcgccggcaggaaacgatgagtcgtttcacctgggagctgcagggccgcgtgtttaacccagggcctcctcctgcctggcacattattccgaataataaatgccagatcatgctgctggagacgccggcagaaaagccgagagggagactccctggggtctgggcgcgatcggccatcctacccttaccccgctgcggccgcagggctcggcctgtagggcgcgagccccccttccccacccgtatcccggcttcggagctaaaggaacacgtgaggccgaaccaaaccgagtagagggcgccagggaatcccgcccgagctgcagagacgcggacccctcctcttacccaaaaccaaatgggcagggggctccgctgcagagggctc

SEQ ID NO: 4063 - DNA, 1198 bp, Homo sapiens
agacaaagtgttgctctgttgcccaggctggagtgcagtggtgtgatctcagctcactgcaacctcagcttccccagtagctgggattacaggcgcgcaccaccacacccggctaacttttgtatttttagtagagacagggtttcaccatgttggccaggctggtctcgaactcctgacctcgtgatccacccgccccagcctcccaaagtgctgggattacaggcgtgagccatcgtgccattgcaccttagcctggacaacaagagcaaatcctattgtcttcacccactccaagccaattaaaatctctgggaaagtgttttaatcattgccccaccttttcttctacagccaatgtgttcctttaaaattttaagtcaggtgcagtggctcacacttgtagccccagcatttgagagccctaggtgggaggattgcttgatgccaggagatagaggctgcagtgagctatgattgggccactgtactgcagcctgggtgacaagacaaccccgtggtctttaaaggaaatatatataaagtcatatcctttgtacattgctcgaaccacagtagtttctctcattcagtaaaagcccgtcattaagagctccataattctctttatctcagctgggattaaccccttggtgtcttcagtctttcttccggccaggacacacactccttggccccagtgcctgcgctagtcatcccgtgatcacttcatggcatttcccctccctttccagtctttgttccatggtcacctcagtgagaccttccttggctatttaaaatggcaggtaattcctcctttctgtacacacaaatatcctcacacttgtccttttttgctattttttcaatattgcctctgttatcatctgacctatgtattttccttaaacttacttggttatcatgtgaaagatttttgttttatagctgctgtattttacagaagggcctggcatacaatagttactcgataagtatctgttgaatgaatggtgttctaggcatttaaagtttctcaggtgatgaagtgggtaaccagggttgagagccactcgtgtagaggtcaccttgaatttgtatccaactatatcagcttgtattcctcttctttccctttttaaaatcagcaacacagtcactcctggcggcaaaccaaacaaaaccagagtcatct

SEQ ID NO: 4064 - DNA, 1100 bp, Homo sapiens
gcctcagcctcctgcgtagctgggactataggcacgtaccaccatgcccagctgatttttgtattttttagtagagacagggttttaccatgttggccaggatggtctctatctcttgaccttaggatctgcccgcctaggcctcccaaagtgatgggattacaggtgtgagccacagcacctggccagtacatgttttttatgagtgccggttcttacggtatgttcacgtagagactgaaggctataaaaactttccttaccactagaacatgtaattggtagcctttcagagatttatccgtattacggttcttgatttgtagacgtatatataacattcacctaatgttttgtgttcttttttccctgcagatgctgtacccctcaaggatttaaactaacgaaaaatcaataaataaatgtggatttgtgctcttgtatttttaagtggattaaaaaacttactaccttaaattgatttgctacatgcttaaaatgatagaggttgctcagcatttttggagtacaagggggtcagagagacatgtgatgaaaattacagggcgagtacagagatttagaagggaacgggttttaatgcgagtatctttgacagagtcttgctctgttgcccatgctggagtgtagtggtgctcgctgcagcctcacattcaaaggctcaagcaatcctcccttggcctttgaagtagctgggaccacaggctcatgccaccatccctgggtcatttttaaattttttgtagagagggtctgactcttgcctatgctggcttcaaactcctgggctcaagcaatcctccttccttggcctctcctgaagtgctgggatacagttatgagccaccacacctgccaagtgctttgtgatactatgcatttgttcaatgcagattgggaaacttaaaatttgaatggagattatgttgatgggctttggcagttcatttggatagactgggatgagaagctcttgggacttgtgactggacaaagcattccagtatattaaaataaaattaagccatattactccactcataaaaagcaatcctatggtaggtacatggaggttggga

SEQ ID NO: 4065 - DNA, 1215 bp, Homo sapiens
tgcctgggatggctttctctgccgctccactcgaaggggtcaggacctgagcccagcggggcctccctggtctggaagtttccctcctgccccctttgccgtctccacgtagtggtggctggaattgagatgccggaaacattgatgggtggatcgaaaggccagcggaggggcctgggcacggaggacatgtgttgggtgggtggagacccactgaccagtccgtttgacactgagtggttcatgtcacgtcctgtggacaggctgcaggggagtggtgtggctggcagctggtgtgggccgaggggctagtgtaccctttccacccctgtgcatctcctccgccttggcagtgggcgcgttggagcggacgtggagcgctcgtgtggagcgtgcgtgggcaccttggcttgaccacagctggtgtcatccttggcagatggtcaaactgaggcacagaggccactccgaccctggctttcggggccggcctcccggccacgggtgagcaagggtctcacactgtgtcttgacgccaccaggtcgcgtggggcaggcagtggcgctgcgggccaaggccttcggcttcaacgtgctcttctacgacccttacttgtcggatggcgtggagcgggcgctggggctgcagcgtgtcagcaccctgcaggacctgctcttccacagcgactgcgtgaccctgcactgcggcctcaacgagcacaaccaccacctcatcaacgacttcaccgtcaagcaggtgcgtggagccggggacacaggactctacttctgcggggcaggtacaggtgggggtgtcaggcaggtccctcccagcagccatctgcacctgggcaagaccctgccttcagcgagccacatggcggcggctgccagccctgctgggggaagccctgtctgcccagacagcgttttctgtgttctgagttctactcaggacatctaaaatactctctggacaagacagaacctcatacctttgaacaccaaattcccctgaagcccttgctgttgtcacagtggggacagatgcagctacctgggggcgttgggtcggcccttgtgacttccgtgctgccaggttcaggtttcacatctgcagctggaacgggctgtgctcaggtcggcctctgacatctgcagctggaaagggctgtgctcaggtcggcctctgacatctgcagctggaacgggctg

SEQ ID NO: 4066 - DNA, 1189 bp, Homo sapiens
ctcgggagaaatgggatggacttgctttccaggaatggctccagcttcagtgttaccgactgcaggggtggggcatggagggcggaaggggcttcggggcccggctgggcctgggggaggcctgaggacatgtgcggatgtccacgtaggggtgtgcaggcggggccggcacccagattctgacctggccacagcctcccagcagggtacccccgagaggaatcggggtggcgaggtgacgcggggagacacgtgcttgtctcttcctgggctgccagcgctgagtcgggaggggtcagggcagcgtctcacaccccagccctaccacacaccgagcagttgccgtgtgtgtgctgccacgtgaacctaaagtggaggtggggctcctggagttgctctgttgcgcccgacctgtgagcaacgtgttcatctcgtggcctcccggggtggccttggggacacggcctttggcttcttccttgggaagcttcaaacccgctccagtcacggcggccccggtgtcctcccggaggctgggcccggcccgggggtgaccgccgtgtccttgtccccacaggcattgccgtctgcaacgtgcccgcggcgtctgtggaggagacggccgactcgacgctgtgccacatcctgaacctgtaccggcgggccacctggctgcaccaggcgctgcgggagggcacacgagtccagagcgtcgagcagatccgcgaggtggcgtccggcgctgccaggatccgcggggagaccttgggcatcatcggacttggtgcgtcggccgcagctccacgcctgtgtccctccctgtgtctggcgctgccgctcttcagctgtgcccaggaggagaggcccggggcggggtggggctgctgcaggtgtcggtcccaacccaggacaggactgagtgcgcacaggcaccagggcccgggagtcccaggcgtgtgccctacgtgcacggacgtcacagcacacgtgggtctcacacaggcacacacagataacgtacacggatgccacagcacacacagcctcacacagacatcacagcacgtgggtctcatgggcacatgcagataacacacacggacgtcacagcactcacatgggcttcatgggcacatagataacacacggatgtcacagtacacagcctcacacagaaatcagagcacac

SEQ ID NO: 4067 - DNA, 1099 bp, Homo sapiens
cctggggtctcggacggtctgggagggtctcggggggtctcagagggtcttggagggcctaggagggtcgggaggtgtctcggtgggtctggaaatgtcttggggagtctcagagggtctgggaggttctcagagggtctggagatttcttggggggtctcggagggtcttggagggtgtgagagggtctcagagggtctgggaggatctcggaggggccttggagggtctcggaggggacttggagggtctcggaggtcctgtgcccaagggagatggtagtgggtgtccacagtctgtgtccacttgagtcagcgagctgaggcacacacgagttgtctttcacgtggatttttaatttactttttacaaatatcacaacatatagaccagaaaacccccggcggtcggccctcgttggcccgtgcacagtgggtggcgtggagtgggttgtagccacggggccgcagtggtgcaaggctgagcacttgcctctgtcttgcaggcgtccgacctccgatcatgaacgggcccctgcacccgcggcccctggtggcattgctggatggccgggactgcacagtggagatgcccatcctgaaggacgtggccactgtggccttctgcgacgcgcagtccacgcaggagatccatgagaaggtaccaccacgtggtcgcctggggctggcagaaccgcacgttggggggagttggagggacgggagcacggcaggcccgggccacagcaggtctgggtgccactggggcaggagcagcctctgtcccagtcgtcccgcgccgtcaggaggtggacacggggttttccctggacaccatcaggaggtggacatcgggtttgccctgagccccatcaggaggtggacacggggttttccctgtgccccatcaggaggtggacaccacgtttgtcctgagccccatcaggaggtggacattcggtttgccctgtgccccatcaggaggtggacacggggttttccctgagccccatcaggaggtggacactcgttttgccctgtgccccatcaggaggtggacacggggtttgtcctgagccccatcaggaggtggacacggg

SEQ ID NO: 4068 - DNA, 1229 bp, Homo sapiens
gctcagtgcaggcagtgccaggctggatgctggaaagccagcagcacctctcccggtggctcctgggaagttccacgtccttgcctggtcacagaggcccgggaatcagtgacatgagatagaagcttccagaacaggaggcagagcctttccgcagtttccctgcccacagcacacaccctgtgccctccgtcccctggttcttggacactggggacatctggatgcggctagagcctgtgggggtggccgcagccctgggggactgttcccaggagtaggcctcggggccacaggggcgcggcctcgggcctggcactgcaacctcagggtgagcgcccttcgtgtgtgcggcaggagccggggcccctggctgtcagcaggcccccgagtccaggtaggtcccagacagcagtcccgggtgtggcagatgcagtgaggtccacttctgaggcgttccctggagtctgtgagttctggtcggaccttcgatggcattttaatgtgtctcttgtgtttgatttttagtaagactttgaccccgacgcaggcttcagtgattgccgcggatcagaagcctgagcactttggctcgagacaattaaggacgtgggatgaggctccgagacaggacgcggttctgcctggggatcctgaagataaaaagctttgaaaagtcgaattcatggtcgtggaagctgagcccatattaagagatgtcaggttggtaggggttcctggcgtcggcggcagagtgaagccggccggtctctttgcgaccgtgtggaggaggcactgcctcggatcaagtcgagggacctgggctgcatgggcgtcgggccggactgctgccacctgacccccggtgtgctctgggcgaggtcaggtgcccctcgagggagggcttcctgcacacctggtggcagagcacagctgtggtcaggcctgtccgtggcatctgctgtctgtttctgtcggaaagtgtctgagaggcacggagggcctccatgtggaggccgccagcacgagggtggagccccacacggaaccctggaaatctcaggtgtccacccggctggcccaggagcagggccgtggcccctgtggagctgttccttgtggttggtctgcgctctctggcccggaagtgcgtgcagtcggaaacagccttgggcttgggggatgctgcaaagcctgcttcagcacaggccgtgtgactgtgaagcctc

SEQ ID NO: 4069 - DNA, 1131 bp, Homo sapiens
gccgggcggttggcgtttgtgccgggcggtgggcgtttgtgccgggcggtgtgtgttgcgctaggtaacgtgtgtttaaagagccagatggtttgtgtttcaggctttgctgtaatgcctcagttgtgaacacagctgtagatgatgtaggtggatagatgggcgacgttccaatgacactttgtgaatgaacaccgacatttgaagtgtatatgattttcacatttcaccaagtattttttgtttgtattgacattcttggcttgtgggccacacagaaacaggcaggggctggggaggtagatgtggcccttgggcagtagtttgcagaccctgctctagaaaaggggagaatgaagatgggaaggcagtggtggtccctgccacacgtgcgtgcggcatccatgcacggagagtctccccccgcccatcctctgcgtgtggggcagttgggtcaggccagctcgcatccccaggtcttcagaggagcagctgagccgcgcctaccgcctgctgatagcacagctgacccaggagcacgccgagatccgtctctcagccttccagattgtggaggaactcttcgtcaggtctcaccagttccggatgctggttgtttccaacttccaggagttcctggagctcacgctgggcacagaccccgcacagcctctgccgccccccagggaggcggcacagaggctgaggcaggcgaccacccgggccgtggaagggtggaatgagaagtttggggaggcctacaagaagcttgccttgggctaccacttcttaagacacaacaaaaaggtaggtgggcctggcccattttttcagagactggttacctgacgtgaggagggcagacgataccagggtgaagatgcgcctcctgttgaacctagcacagcaggggcctgcttggccttgcctgaacacccaggctgccagaccatctgtggggtgtgggaaagagggcagcatctagggtcacggcctccctgagaggggcggcgcagctctgagaggaagagcataagctttatgtgtgggtggagctgaggctgcatgtgtcattttttatgtgcgtgtaggagacaaaggaaaagccaaatccaacttttcagatgcaac

SEQ ID NO: 4070 - DNA, 1192 bp, Homo sapiens
gggccgtggctgtggctgtgagctgggggctctgacgctgggacagaggtgagtcccggctgtggctgtggctgtgagctggtggctctgacgctgggacagaggtgagtccgggccgtggctgtgagctggtggctctgacgctgggacagaggtgagtccgggccgtggctgtgagctgggggctctgacgctgggacagaggtgagtccgggccgtggctgtggctgtgagctggtggctctgacgctgggacagaggtgagtccgggctgtggctgtggctgtgagctgggggctctgacggtgggacagaggtgagtccgggctgtggctgtgagctggtggctctgacgctgggacagaggtgagtccgggccatggctgtggctgtgagctggtggctctgacgctgggacagaggtgagtccgggccgtggctgtggctgtgagctggtggctctgacgctgggacagaggtgagtccgggccgtggctgtgagctgttggctctgacgctgggacagaggtgagtccgggccgtggctgtggctgtgagctgggggctctgacgctgggacagaggtgagtcccggctgtggctgtgagctgggggctctgacgctgggacagaggtgagtctgggctgtggctgtgagctggcaccccagttactggtggtttttccccagctgacatcgaccagcgtggggtgtgcagtgtggctggctctgatttgtgctccttagtttgagacaatttgaatggagccactgctgtggagaggcctccttctgaagcatcacaagtgggcccggctgaccctagcccagtgcacgacacccctcttggagtctggggttcttggctgtgggctggagatgacagtggtggctgccgagggtggtgggagtggtcagtgctgagcacgcgatttcagatccagtgagccaggcgggcacagcctttagctgatgtggtgtgtcccctggcctggaacagccccatgggtgggtggcacccgtcaggacctgtgcacagaccctgcctgggtttggtctgcccagtcccctggacctggcagcagcggggctgtgcctggtgacgggaaggctctgagccaggctgggtggcccactgtgcgcgtcgctgctgtgttggtggtggcgcctttgccctggccctcattcagg

SEQ ID NO: 4071 - DNA, 1519 bp, Homo sapiens
acatgatttaccacataaggagtggggtgtaggaaggggcccctgttttcagggtgagatgaatgtcaaccgagccatgcttctgttttccaggatgtgtactctggcacacccaccaaggtgagacacatggacagtcaagtggaggatgagtttgatttggaagcttgtttaactgaacccttgagagacttctcagccatgagctaactgccccctggcggccaggaagagaaacagctcctccccgactaggtggaaggctggccaggcaccaagcatgtgtgtgcacttgtacctggtggtttctctgttagcagtccattagctcatgctgaattatttttgccttactttcttaagaaacattaattttatgtatagtgagtatattttgcatgttttaaattgtaaatggagctaagtccaagaaagtacttgaagctctcttccagcgagcttaattgcgtaatccctgttgtcctccagggtaagctgacacgtctacataactggttttccacaggcatcttcagttattgcttgtcaggtggactgttttggatttaaccatgtaatccatgggaccaattgagagtcagctacttttataggcatcaaagtattctcagacacctttaatatctttatggaaacttaatttttggccttttatcaatatgtcataacagcattctgaagtcagacattgttaaattgagctattaaactaatgagttttatgtaagttatatggtcttaatttggtacttgtaaatagcactagttagactctttagaatactccaagagttagggcagcagagtggagcgatttagaaagaacattttaaaacaatcagttaatttaccatgtaaaattgctgtaaatgataatgtgtacagattttctgttcaaatattcaattgtaaacttcttgttaagactgttacgtttctattgcttttgtatgggatattgcaaaaataaaaaggaaagaaccctctttcactgactggggctgttgccaggtgggccagctgccgtgagagctgacatgtttggagggtcagaattgtgtctgcctttcttgtgtctgaagcaagtggcactcagtgagtggcgctgggtaaagggccttctttatttttttaattttattttttgagagtttcgctcttgttgcccaggctggagtgcaatggtgcaatcatggcccactacaacctctgtctcccgggttcaagcgattcttctgcctcagcctcccaagtagctgaaattacaggtatgtgccaccacacgcagctaattttgtatttttagtagagacaggatttctccatgctggtcaggctggtctcgatctcccgacctcaagtgatctgcctgcctcggcctcccaacgtgctgggattacaggtttgagccactgcgtgtggccgggggccttctttaataggtgtcacatgtcacatttggtctgatgcttattcatcagcactggcatgacagcct

SEQ ID NO: 4072 - DNA, 1194 bp, Homo sapiens
cgggttccgggttccgggttcccgccagggaggagacacgcccccacctgggcaggaaccaagcagagccgcgctccacccaggccggaaccaatgggagatgcgccacgacccaggccgagaaacgtgccgcttacccttcccccacgacctgcgccgcgtcgcgcgcggccgaatctcccgccaaagctgcccccgcccgccaaggcgcgacctatcagcgtcgcagaggcccgcggcggcccggccgcctcaatcccgcgggtgggggcaaccttttcctcaggcctctcctcagcccacggcgtccatctggctcccgagccgagggccgggcagtcgggcttcgcggctgcccgcggtcccgaggcctcgccctagccccagtcggctcgcgaggcgcgcacagctgagtggacccctgcggcgtggcccgatggtctcgcccgacccggcgcgcgcgggaggccgaggggcggggcccggcgcccacataaaggcggttgggggcggggcgcgcagagctcgtgagcgccggcgcggggacgcgggtttctgcctcaggccctgccctgctctactctgcgctctctgcccgcgccgccgccgcctcagcctcggccctgcgctgcgcgcccggcccgtgctgccatggcctgccgcccgcgaagcccgccgaggcatcagagccgctgcgacggtgacgccaggtgaggccgggctgcgcggcgggcgagggagcgcgtgccccgtggggcgggggttgtgcggggccggggtgtgggagggcggaggttgtaaggcggtcccgaacctcccgtgcccagccgaccgcgtccctccccgcagcccgccgtcccccgcgcgatggagcctgggacggaagcgcagagccgacggcaggcgctggaggcccgaagacgccgaggaggcagagcaccgcggcgccgagcgcagacccgagaggtgggcgcgggacccgggggtcggggcgcggtggggcccttgacgaggccgcgggctccagggacctcgtcgcgctctcgcggtgccgggatcggtcaggtcggcaccctgcgtccttttatcttggtctccgcgcggcccgtggactggggcggccgcagcaggcctgggaggcgctggaacactccggaagcctcttgccaggatgggagtcagctgaaccggcgt

SEQ ID NO: 4073 - DNA, 1132 bp, Homo sapiens
ttgttttgagacagagtttcgctctgtcacccaggctggagtgccgtggtgccatcacagctcactgcagcctcaacctcctgggctcaagcagtcctccaccttggcctccttagtagctgggactacaactgtgagccaccatgcccggccaattttttttttttttttttttttacacggagtttcattcttgttgctcaggctggagtgcaatggtgcgatcttaactcaccacaacctccgcctcccaggttcaaacgattctcctgcctcagcctccgagtagctgggattacaggcatgcgccaccacacctggctaattttgtgtatttttagtaaatatggggtttatccgtgttggtcaggctggtcttgaactcccgacctcaggtgatctgccggcctcggcctcccaaagtgctgggattacaggcatgagccaccacgcccggctggcccaaaacttttaagcagattttagatgtgcagagaaaagcataaggaacagaataccactgatgcttctcaccccctgagataaaatgtcaccagtaagtgcaggcagcatttcctacatccttctctgggccctgggtccgtctcccctctacccctccagcctgaatttgcagttcttcccatgtctgcttgctacttttcaactttgttttttgccccttttgaaatttggtcaaacgaagcgagaatgaatcaaacattggtttacaacgaccccaagaaggaagggagacccagcagcagagaagtcgcctcccagctgccatgggtgtgatccgtcccagagccacagatcccctgcctctcccctatgcctccaggatcacccagcagcctccatagggcagagggtgtagaggagctgggaggggcttgagaggttggccctgaggggctccagccagagtgactctgagcttgtggcttggactcgtggctgtcatctcctttctggaactctgctgaggcccaggtggtggtcactgtggtgctcccacgtcagtgggatgagaccaagagcagccgctgcgtgcagctgcccacgtgtcattcagaggacagccgagtggccgcctgggaaggcagtgccgccccaaggtggcagctgg

SEQ ID NO: 4074 - DNA, 1391 bp, Homo sapiens
ttgctgaagcaggagaatcgggtgagcctgggaggcaggggttgcagggagccgagatcatgccactgcactccaatctgggtgacagagtgagaccctgtctcggaaaaagaaaaaaaaaaaggctctgagctgtgaacagccccctgatgaggcagcactggctccgctcagcctgcagtgggtaatgaagcgtcaccgtgctctcccggaaggacaagcagccacgtgggatgggcaggtgagggaggggggcacggagcagcagagaggccgggcatgctggatgcgggtctgcgttttctaccactaccctgacttgagtggttttaaactaaaaagcaaagagcccggttagcttgtccacatggtcctctgtgtcctactcaacactgggagggcctagtgactgaggctgcctctgcttggtggcagcatgcacggtgcaaatgagactccctcaggacgtccgcgggaagccaagcttgtggagttcgatttcttgggagcactggacattcctgtaagtccttgagtccctcttgaactgtcttgtgtgtggtctgagggaacgagttgttttaagggcctatattttctattcctgggggtctgagcctttggttttgttgggggcatggggccgctgtgctgttccctcgccgcactgtctcgggtccctcatgcactgtctgaggctcttggcctgtgtgggcctttcctccctcacactaggtcagaggtaagaggcaagggcgaaatgggttcctgtttcatccccatctcccgcaggtgccaggcccacccccaggtgttcccgcgcctgggggcccacccctgtccaccggacctatagtggacctgctccagtacagccagaaggacctggatgcagtggtaaggacgcaggtagtagctattccacagaacctgcaggccgctctggggcttggccaacagtgggcaggggtccaacagcctgacccgccatccctgccatccctgcccctgctggttggggtggaattgcagagagctgccggcccctggcctgtcactactgcccaggtcgctgagggtccaggcttccacccagtgtccccgcagtcagctgcccaccagcagcctccccgggactctccggcctgggcatggcgttggcctctggtggccttgcagcagtgagtgtggttcttgctgccgtgagcccgagtgtcgcccctttcctcccgccctcccacgagtccagacgcatctcctggcagcttaggaagctccatcttcacccaccccacatctgagggtcccgtgccttgtctccctccatcctcactgtacatgccaggcttcagcctgttctaactccgggcctaaattgtccctaagagagc

SEQ ID NO: 4075 - DNA, 1133 bp, Homo sapiens
gagctactggctcacggctgatgccccagacagcctcgaggatctgcaggtccccagacaccaagcctgggtgctctccagcagacggcgtggtacccacagctaatgcctgccccttcctagaacgaagagtcactgaagaagtgcgtggaggattacctggcaaggatcacccaggagggccagaggtaccaagccctgaaggcccacgcggaggagaagctgcagctgtgagtgctgggcgaggccccaccctggagggagaatctgagcacctgggccccagctcagcctctgccccgcccctacccctccagggcaaacgaggagatcgcccaggtccggagcaaggcccaggcggaagcgttggccctccaggccagcctgaggaaggagcagatgcgcatccagtcgctggagaagacagtggagcagaaggtgggtgcgggaagcccagctcaaggggccgtctggcagcaccttctagaaggcccttgggcctgctgctccctccaagcagggagaagccccgcaactcatcttcctcctccagactaaagagaacgaggagctgaccaggatctgcgacgacctcatctccaagatggagaagatctgacctccacggagccgctgtccccgcccccctgctcccgtctgtctgtcctgtctgattctcttaggtgtcatgttcttttttctgtcttgtcttcaacttttttaaaaactagattgctttgaaaacatgactcaataaaagtttcctttcaatttaaacactgaagccgctctggtcttgatgaagcaaaggtttcccagctctagcctgaggctgagccgacccgcaggtgccctcccttcccctcagagctggccacttggtccctgcctaccccaggctcaggccaccctgccgaggggcagggacagccagtggatagaggaggctcaggcctgcccagtctgccccggccacctcgggttggctacatggtcctggcctcaggtacacacatcaaagtccaaatggactcgtttttttgtttgtttttttgttttttgttttttttgagacagtctctcacccacgctggagtgcagtggcgtgaactcggctcactgtaagctccgcc

SEQ ID NO: 4076 - DNA, 1177 bp, Homo sapiens
tctgtgcggtgcccgcagggcggtgctggcgctcgcctatcgctctgctctctctttgtagacggcgggcgctaacaccaccgacaaggagctagaggttctctccttgcacaacgtcacctttgaggacgccggggagtacacctgcctggcgggcaattctattgggttttctcatcactctgcgtggctggtggtgctgccaggtaccggcttctgctgctgctgctgctccgcactgtctgggggacgctggctcgggacacgccaaagctgccaggacggacgggaatcctgtgacttacggccgtcccgcttcttgagccctcactcctggccctgtgcccagtgtggggacaaagttggcctggcccggtcctggtcccagaggggccccctcagccccctcgagcccacttcccatctgggtccccaaaggcctctcctgtggctctggtgtctcccgggcgcctggtggcggtgtgggactggctggctctgctgggctccttctctccagggtctggccctctagactcactggcgttactgactgcgagaccctccagacaaggcgcgtgctgaggttctgagcccccttccgctcccagtggtgcctgcggctctgggccaggggcatccatgggagccccgtgggggggggggccaggccaggcctcaacgcccatgtctttgcagccgaggaggagctggtggaggctgacgaggcgggcagtgtgtatgcaggcatcctcagctacggggtgggcttcttcctgttcatcctggtggtggcggctgtgacgctctgccgcctgcgcagcccccccaagaaaggcctgggctcccccaccgtgcacaagatctcccgcttcccgctcaagcgacaggtaacagaaagtagataccaggttctgagctgcctgcccgccaggcctcctggagccccacctcggcccacgctggtcctgggctgtgtgagccctctctgcagccaggcgggctcccctctcctcgtctctgctcaccatgtagagcctagggtactttggggcacgaaacattctaaaaatcttcattcaatgctggtggaagtcagaacgcccccccttctggcccagcactgacccccggctgtacctccacgccctgtcgcccacgcggcgccaacctgccc

SEQ ID NO: 4077 - DNA, 1236 bp, Homo sapiens
atttggaagacaggaacggcacaggcgtccaggaaagcagctgcactcagacaatgccttctccattacttgaagcttctttctgttcagccattaaagaaacttgacaaaataggaacaggagatatttctcaattgtaaacctttgtgcagggacagttggcttccagaggctttcagctttcagttatttgagaagtttgttttagatccttaactaatatttatgaattctctcaccctgtgtaagtagcctggtgttcgtttgtccaagtgtacttacccttgagaacaagtcttgcagttgccaggtgtgtgcagacgcctctcctgtgagcggcatcgcgggcccagtcagctgccccggctctcatcctcgtcctcactgccttggctgagcactgttgacgtgaacagccactgcaacaggcagcccatcccactgtcccctctgccctggactccgcatggcctccaaaagccagcttgccctccgggtgctgcaggggctttgcaggtggggaaggctctggtgggtgcctttggtggcttccgtgacatcagccgtgctctgatgcaggcttgctccctcgtcattctccctcgtcattctccctcatcgttctgtgtgcatttttctctatgtcctgacctttcttcttgcacctaaaagtggtgtctgggtgcaaatgtaagcagtggtggatccagaaatatgagctttgtgtaataagcttcttaaaacagtcctttcttacacctgcccagggccagaccctcggtcttggcctttttcaggagctaggatatctgcgcctggtgaaaatgaaacgaattcctgatttaggaattcagtgtttcctcctcactccagctaagcactcacttttttttttttttttttttttttttgatacagagtctcgctctgtcacccaggctggagtgcagtggtgcgatctcggctcactgcaagctccacctcccgggttcaagcgattcttctgcctcagcctcctgagtaattgggattacaggcatgcgccaccatgcccagctaatttttttttttttttttgagacagagtcttgctctgtctcccaggctggagtgcaatggcgtgatctcggctcactgccagctccgcttcctgggttcacgccattctcctgcctcagcctcccgagtagccaggactacaagcacccgccaccacacctggctaatttttttgt

SEQ ID NO: 4078 - DNA, 1195 bp, Homo sapiens
cacaggctggagtgcagtggcgcgatttcggcttgaaacaacctccgcctccctggttcaagcaattcttgtgcctcagccacccaagtagctgggactacaggtgcacaccactatacctggctaatttttgtatttttagtagagatgggatcgccatgttggccaggctggtctcgaacttctgacctcaggtgatccgcccacctcggcctcccaaagtgctgggattacaggcgtgagccaccgcgcccggcccctggggtgtttttaagtgaagagttggtgccctgttctgaggcccttggggtcctcgctgtgggggttgctgacccccaagcctctctggtgttttgtttactaacgccgtcatcgggtcacgcagcacagcaacaaacagaccttgtagaacttgagacactgtcttctctgagagctattctggtgatgagatgggcggacctgctgtggggccagcagggttggggggctgcccatctgctgaacctggccttggttgcagtggctggacctgcacctgcatcaggagatccccacatcgctgctcatcctgtcccgggccatgtacctcccggacaccctctctccagccgaccagctcaagtccacactgcagaccctcccagagattgtggtacgtgctgtcggagaccccttttacctcatctcttcataggtggctccgctcttctggggtggggggaggtgtgcaagcgcactcattcctcaaccatgggcgaggagcctgcctcccaccccctcgcgagtgcccccacccagccacctgtccccttccttccatccctcctcaccagccccttgcctgccatcccccgtgtggcacagttgccagtggtcccgacctggccacgtgttggctgctgtggatctgggccgcggcccttggagctgtgtcagcagcgcctatgctccttcccacatgtcaggagtcatcgggcgagcgcagagggcggcccaggggcctcccagcaattgcgggcagcacctcggcagtgccttctgtcctgtgtgtgtgaagcccaggtggtgacggggcaggggacacaggacacaggacagaggtgaggggcagcaggggcctctggtggcttctgggctcacccacagatgtaccctcttctgaaggcaaaggaagcacaggtgaaagtggccg

SEQ ID NO: 4079 - DNA, 1195 bp, Homo sapiens
tcacccaggctggagagcagtggtatgatcttggctcactgcaacatgtgcctcccaggctcacgccatcctctcacctcagcctccagagtagctgggactacaggtgcacaccaccacacccggctaatttttgcatttttcgtagagatgggcttttgccatgttgcccaggctggtctcgaaatcctgagctcaatctccctgcctcggcctcccaaagtggtgggattacaggcgtgagggactgcgcctggcctggttggctttctttcccattcaattttgaaccttatctgagtctcttgtaagttaattagtttccctctttggcatgtggcatggaagggataagaagtatagaatttgttttgaggttaacaggctcagacaacaccaagggaaacaactgcaaaatagcagtagatttgactagtttcatcccagattctaactttcattctctaacattttattttaaaaactaggtcagaaaaagagtgcacgccagtatcacgtacagttctttggtgacgccccagaaagagcttggatatttgagaagagcctcgtagcttttgaaggagaaggacagtttgaaaaattatgccaggaaagtgccaagcaggcacccacgaaagctgagaaaattaaggtgatagatgacccttcagtctacttttagaccagaaatttaatttttattctttaagttaacttatttttgttttgaacttatacttgctcgaaatattgtaatggcttaacaatctctttcattgttgacttttgcccaaggatgccatgttacaatatgataaagttcttttagagacacaactgatttttttttgctcatttgatgactctcagagataacttgttttagaatttatatatacacatatatgtacgtatatatgtgtatacacacacacagacagagggattaatgtaatgtgataggaattgatttctggtttaaagaaacaataaaggtattatgttgggctgaattctaaaattggtttttaaaagtttttatttctattattttttaaaatttttttgagatggagtttcactcttgtcgcccaggctggagtgtaatggcatgatcttggctcattgcatcctctgcccctccgggttcaagcgattctcctgcctcagcctcccaagtagctggaattac

SEQ ID NO: 4080 - DNA, 1166 bp, Homo sapiens
aaaaattagctgggcgtggtggcacgtgcctgtaatcccagctactcaggaggctgaggcaggaggatggcttgaacccacgaggcggaggttgcagtgagctgagattgtgccactgccctccagcctgggtgacagagcgagactccatcttaaaaaaaaaaaaaaaaaaaaaaaaaaaaaaaatatatatatatatatatatatatatatataaaaaacagataaaacagatgctaatataatccctaaggttagatatagtcaccagtttttttgttgtaaagagatttgatctgtaagacataagccctggaaatcagcagggttacaggaaacccatcatgggctggatctgtatgttgaatgccctgggtaggttctcacagtgcttcaaatgcagcttttggagtggttttcatgtacattttccccattccccattccaaggtaatgtaaatgggaaaaaaagaaaccacacaaagaggatacaggaccctacagaagatgctgaagctgaggacacacccaggaaaagactcaggacggacaagcacagtcttcggaaggtaattgtgttccaggtttgcttgacctgtcagagtgtatgctctgtgactcttggtgccactgtttccctgcatgggagcacacatgagatgcaggtgtcagtgcacccagctccttccaggctggtattcagcagaaggcttgcatttcttacagaaccccattgagaaaggctgcttgcaggttcttaccctccaggggtgttatcacagaaaccgatggtgtgttgctctgcaagaaaacagacatccaaatgctttgagtaatacttgttttttagattggacaaaattgtcactaaaaataacctctttggccgggtgtggtggcttacgtctctaatcccagcactttgggaggccgaggcaggtggattgcttgaggtcaggagttcgagaccagcctggccaagatggtaataccccgtctctactaaaaatacaaaaaattagctgggcatggtggcgtgcacctgtaatcccagctactcaagaggctgaggcaggagaattgcttgaacctgacaggcagaggttgctgtgagctgagatcatgccactgcactccagcctgggcgacacagcaagattctgtct

SEQ ID NO: 4081 - DNA, 1208 bp, Homo sapiens
ctaaattaattgtaatcatttcgcaaacatacaggaaattatttgtggtgaaaatgacatttgctctcgtgctgatgtacagatcgctgttttaaaactgatgtttataagttaaggctgtaataagtgtagactgtgaagcactgaatctgggctgagccatagcagacaggctaagcctggccgcctcgccctcctcttgcaggggggagccttctgtgctgtgagtcctgcccagcggccttccaccctgactgcctgaacatcgagatgcctgacggcagctggttctgcaatgactgcagggctgggaagaagctgcacttccaggatatcatttgggtgaaacttgggaactacaggtgtgagacatagaatcgtatgcttttatgtcttttctgttcacatgtgttcgctttacagtacttaaagtattgaaattattatcgctgtctctgaggagtctgtgaatcctgtttttaatatttataatagatggtggccggcagaagtttgccatcccaaaaatgttcccccaaatattcagaaaatgaagcacgagattggagaattccctgtgtttttctttgggtctaaagattattactggacgcatcaggcgcgagtgttcccgtacatggagggggaccggggcagccgctaccagggggtcagagggatcggaagagtcttcaaaaacggtacggagatattcagatagagagtgagacagcactctcgtgcattttcttacccctaatttctattttttaaaatttgatctttatagaaaatactggactaagcattcaatctgtttttttaaattaggaaaatgtttgcagtctggtttatttgttgagcatagaataagatacactgataacttttgtaacattggtttgtgattaatttcattaaaattctgtaaacctattattcagaaattatttttaatactaatttacagaaatgttccatggcttgcctttatgtaaaatgcagatctgaaggaagggtcctgttgtctcgaccttgtgcagcaggctcttgggggctcgctttacctttcagtgcatgaggaatcaggggtggtcaagcagacaaggtgcttggcctctgattccccagctggggtgggaggcaggagcaacgatgtggcatggctggctgatgacccacgtttgagggaggcaggatggggatgt

SEQ ID NO: 4082 - DNA, 1220 bp, Homo sapiens
ccatgggtgcaaagtcagagctcactgtcactcggatctgcatttctccacctctgcctggatttgctctttgggaattgtttctttgcatcctttgctggttttcggttgggtgagtcttttttttttttgagacggagttttgcttttgttgcccaggctggagtgcagtggcgcgatctccactctctgtaacctccgcctcccgggttcaagtgattctcctgcctcagcctcccgagtagctgagattacaggcagccaccaccacgcccagctaattttttttgtatttttagtagagatgggggttcaccatgttggctagtctggtctcaaattcctgacctcaggtgatctgcctgcttcagcctcccaaagtgctgggattacaggcgtgagccactgcgcccagccagggtgagtcttgttcttgtccttgagtgccacttggctaggctgttgctgctgaccttagctcccttgtttgccatcatggaggatgctgggagctccagctccctgtcctgtcctccccggcgctcactaaggctcggtcctctccacgtggtcctgacctgtcctctgtgagcaagagaaacaggactggtttgggggtgtcctgtctcagtggacacaggacaccacggttttcagtacaacaaggaacacaacttgttcaatgtgctttatgatggtgaaaattccctttaaaaataacatgcgattgctaacacttgaccgaatatatcacttgaccttacaggaccgtataatagacgctggccccaaaggaaactactctcgatttatgaatcacagctgccagcccaactgtgagaccctcaagtggacagtgaatggggacactcgtgtgggcctgtttgccgtctgtgacattcctgcaggtacaagctctggggaccctgcatggggctcctggctatgggggcagagtggccatcgctgagggctgcgtggggctggactggaaaggctctgggggaggtgggtgctgatgtggagtctcttttggtttgaatatctcttttaccaagcaaaattgaaaggccatgggtcaagccagtacagatacaaaaataataagagtatttttgttgacctaatacacgccccttagcttttgaagagaaaggcaggtgtttccaatttggtgtctgtctcctcttctcccagggacggagctgacttttaactac

SEQ ID NO: 4083 - DNA, 1220 bp, Homo sapiens; identical to SEQ ID NO: 4082

SEQ ID NO: 4084 - DNA, 1197 bp, Homo sapiens
agggcacctactgagaggtgcggtcctgggggtggaggcctgcctggcaggtgtgcgtgcctcgtacgtgtgttatgggcactggtctaggccaggtatgacacccactctcctgtgagatttcactttagtttttaaaaggtccagttctacagagtgagacctatctatctgagtactacatatgttttaagacttggttctttttttgagggatccttgaccctgggaagtctggagcaccctgagaagggggcaccatgtgtgcctttgcccacgtgtcctgaggggctgcttgtctgggagggagggagagaacattcagcagcaggtgcttttttatggccttttcttaaaataacctaagggggacacatccatcttgcagagaagtttacagaactccccttgaaaactgctgctgaggctcctgttaaattttctgtggcatcttttatgccttggtaaaaactgcagtgtctttggacctgagagtggctactccgtggttttgtgacctgtaagcgtggggttcaggggtgtgtggccctgcagggtcccacgcctccctgagcactgactggaagtttcactggctggtggctgtcccttctcccatcagggtccccagcaaagttaactacacagaggacccaggggaaacgagctgtgtagccactgacttgctcgcgcggccgtggcctctgaggggcactcgccggttaagacagggtgggagtagtgctttccagttcagactctaacttctcccaaagtgtcctaagaaaatactggatcggctcatagatttatgctccttatgatgccctaacttggaaggttgttctagggacaggccgggcagtgtccccacacacaccttagagtcgaaggccccagggccccgctgtcacttgcccaaaagatcccttccggcaggtaagggactaccaatgcttacgtcaaaacagcagaatcggctttgcagtgcactttggggagcagatattaacttatttttgtgttggacagtagtgaaatcttgtgatttttaatcgctttgataatacttccaaattttatgatttttctgaaggaaataatgcaaacattttaaatatgtttctccccctttccaaaaactgttaaactaatgagcaagtaacactaactttgaatgtctctacaatacccgtt

SEQ ID NO: 4085 - DNA, 1244 bp, Homo sapiens
tagcagatccccctcctgggggttctgagagtcctgggcagtgtggccttctctcattctggtggcatctgcgcccgtgagtgacctcttccttggctgcactgccctgtgggtggtgagacgcttggccttttttgttgctgccaggacttggtagagatggcaggaagggtgtgcggggtggttgtgtgcagaaccctgccgcccctgaggtgagcagaggcactggtgtgcctgccaggctggggcggagctgcccggaacccttgccaggccaatgtgtagcttggtggcgcccttgaaggccactggggggtaggtgtgtcctcccccggggctggaggccgggtgcctggtgggtgggcctgacctggcccacctcatccctccagcctgggatctcactgctctgcacatgtgcactgacgtgaattttatacgtttgtagaaactctgatgtaacttcttctacctctgaagcgccctcctgggccctgctgtcacgtggctggtgcggcttccccgagtgctggccccctgcccgctccccatgggcacccaccactcaaactctgcgtggtgaggcccggggaaagccaggccgggccctagcactgctcaggggcctggggctcctgggatttctgtgtgtttggaagcctctgtttttggagtggggggcgtggaaggcgggaggggctgacagtgcctggggccagagctgggcgaaggaggacatcctcactggacgagcactgcaggcctgacgagaggctccgggcagctgagggctgaagcgcctcgggatgccccacactgcccagagccacgggtcttgctgtgctgggggtggggtggccccaggcagctgccactgcccaggtgtgagtcgctgcagacctggtccctgagggtgggaggcctgcttgtgctgaagctgccatgtggtctggcccccagaagggctcctgagcgtagggagttgagccccgcagccgtggcggcatctcctcctccttcctccgccccatgcccagccttgcttccggctggtggcatgccttggggccgggcagcaggtgagaagctgcccccggagggaggggccaagggctgggtcagtctggcctgaggggtggatggctggccctgggggaaggctgggcctgggaggccctgtggacagcaggcctgaggccacgaggtcctggggccacccctctcctgctctgggtgtccttctc

SEQ ID NO: 4086 - DNA, 1178 bp, Homo sapiens
cccctcccgggggcacaaggcgagctgcctgtgtccacctcacaggagaggctggcagtaggtctgggggcagcaggcctcagcagaggtctcacatcaccaagatttgaggcatcatctgcccaaggtgtgtgtcacccgtttccaaggagcatgtggagccgcagcgccctggcggaatccagccccagtgcggtctgtgtggccagcgtggcgccggcccttaagagctgattgcccggagccatgacccgtccgccttgtgcttgcacttgaatctgtgagccccaccccagggacctgcccctggcagtgcatttcccctgaatctcctccacttgggtcccacttgctctccctgctgacgccctgggaggggcacctgaggggctccatgaaggaggctggggaagggtggggcttggctggggcctggctggggctggctggatgctcaccagagcgaggtctcggagaagccctgagggcacaagaacccatgatgttgttcgaggctcggcccatgtcagggcccccacaacagttcacaaggggctgtttttccatccctgcccagacttcagacgggaccaacctgggtggggcggacacggggcacccagcccctcctgctggttgtgccacctgcttcctcgcagctaaccagtcacttccaaccagcctgtctccctattgccccttctcccagctccccagagctgtcctggtgacagtgggtgacctcaagcagtggtgcccatgcctcacggagccacatcctcttgggcctcagtgccagaaccacctttcagaaaccttggggatgggcccccacctctgcatgcacccctgagcccccgcctcacagtcctggcctcccaggttgactccctccctccctgccaggctggtggcccacgccccacagtcctggcctcccagggtgactccttccctccctgccaggctggtggcccagatccatgatgagctgctgtttgaagtggaagatccgcagatcccggagtgtgcaggtagcctggggcaacacagggttgcttggacatcacagacagctaagaggaggctccatgccccatgggcacagcccaggaaagcccctcagctgtcttcccttttatggcccctgccccacctcattgctgctgtgtcacctg

SEQ ID NO: 4087 - DNA, 1100 bp, Homo sapiens
accagtggtggcccctcagcccaccctcccggcagctcagcctgtggctcttgaggccgtggttcccacgtggactgggaggcagtctcagccacccggggtgctgttcagctgcccctccctgccatcagcaggtgggtgaggggttgcccactgggtgggggcccgtgctaggagtcaccacatgctccaacctcccactgctccctgtcaggggcccaggctgccatcactggaggctgcagggaccaagaggccatcaccgtgtctatagagagcagacagaagcagaacagagcccggggctcctgagcctctgcgtgtgccctcccagcccacaccagtgctctcggccactgagcacccagactcaggcttgggttccccagccttattggaaggcagctcccgcataccaggataacccccgcaaaccacatagcagacccccgccatcctcgcagagtgggagaggctgcagcaaggctttgcctctgcagaccccatcttagtggcacggtgcttgggcctgtgtccccgggtggtggaaccctgtaccggtctgtggccctagggtccctgctctgtctgccccggcccgtgctgtccgctgggtgaggcaggctcccccgtgccctgcctccctctgtcagggaacctgggaccccctccccactgcctgcacagaggaccctgaccctcggccagcagggtggccccaggtccatgttgggcactagggcaggttccgtgccagagtcgggggccacacgagggcctggtgccggtgaggggggcgtgcgctagagggggaaaggggcccccggccacctgtccaccgtgtgggccgtgctgtgtccttatgtcattgtaatataaatacagatttttatatctcaccctgctggctccggctctttctgtggttgtcactgtcagcgtgcttcgcgccctgccctcggcctccaagcagaaagcctggcccaatggcaccacgccatgtggccttcgggccgtggccctcgttgccctaccacagcctctttcctgggaggcctgacggagcacggcaccccgtgccgccaaccacaccgggcccg

SEQ ID NO: 4088 - DNA, 1224 bp, Homo sapiens
agcctaggtgacagagtgaggccctgtctcaaaaacaaaacaaaaaaaaacagtgaaaacattgatttttcagcagtgagaatggctgttattaaaaagttaaaaaataacagatggtggtgaggttgtagagaaaaaggaacgcttatacactgttggtgcgagtgtaaattagtttaaccattgtggaagatgatatggcaattccacaaagacctaaagtcagaaataccattcaacccagtaatcccattactgggtatatactcaaaggaatataaattgttgtgttacaaagacacatgcatgcgtgtgttcattgcagcactgttcacaatagcagagacatggaatcaacccaaatgcccatcaatgatagatagattgcataaagaaaacatggtacatatacaccatggaatactatgcagccataaaaaagaatgggatcctgttcagggacttggatggagctagaggccattatccttagcaaagtaacacagaaacagaaaaccagatactgctggttttctgcagattctcccttataagtgagaataagcagaacagaaaaccagataccgcatattctcgcttatagccgatgagaacacatggacacgtagaggggaacaacatacactgtggcctatcaaagggtggagggtgggaggagggagaggatcaggaaaaataacaagtgatggctactaagcttactacctgggtgaagaaataatcggtacaacaaacgcctgtgacacatgtttacctgtgtaacctgcacgtgctgcacatgtacccccaaatttaataaaaggaaatgtgacccccaccccccattttggagctagggtctgctgggaagtgttggatcatggaggtgggtcttcatgaatgacttcatgaatgtcctccccatggtaatgaatgagttcttgctctgttagttcacttgaaatctggttgttaaaaagagtctggggcctcccccctctatctctggctcctcactctcttgccatgtgatacatttgttccttctttgccttttgccatgagtaaaagcttcctgtggcctcactagaagtggagcagatgctggtgccatgcttgtatagcctacagaactgtaagccaaataaacctctgttctttataagttttttaaaacccactgatttggccgggctcacgcctgtaatcccagcactttgggag

SEQ ID NO: 4089 - DNA, 1538 bp, Homo sapiens
tgggacttcctggcccgagacgatgtggagggaacaaaccttcctgtcctttcacaggtggggacaggaggcccagggagggctgggcacagccaaggctgccctgcaggtccctgcctgactccgggctcccgtcccctggtccaagctgttcagcctcgggcccagcccagagtcgcccaagccctcttgaggcaggagcaggtggagacgtgggcacagtcagggcggccatccttgtgggccagaaggggcacctagtggaggcaccacagcctccagttcttctgtctgtccttgtaactgtgtgtgcatgtccgcgtgttgctccgtgtgtgtgcatgtccgcgtgttgctctgtgtgtgtgcatgtccgcgtgttgctctgtgtgtgtgtgtgcaatgtccacgtgttgctctgtgtttgtgtgtgcatgtctgcgtgttgctctgtgtttgtgtgtgcatgtccgcgtgttgctctgtgtgtgtgcatgtccacgtgttgctctgtgtttgtgtgtgcatgtccgcgtgttgctctgtgtgtgtgcatgtccgcgtgttgctgtttgtgtgtgcatgtctgcgtgttgctctgtgtgtgtgtgcatgtccgcgtgttgctctgtgtgtgtgtgtgtgcatgtctgcatgttgctctgtgtgtgtgtgcatgtctgtgtgttgctctgtgtttgtgtgtgcatgtctgcgtgttgctctgtgtgtgtgtgcatgtccacgtgttgctctgtgtgtgtgcatgtcctcatgttgctctgtgtgtgtgtgcatgtccgcatgttgctctgtgtgtgtgcatgtccgcgtgttgcttgtgtttgtgtgtgcgtgtccgtgtgtcgctcgtctgtgtgtgaacatgtgtgcttgtcctgtatctgtgtttatctgtatacttccatgtctgtgtgacagagtccttgtgtctgtgtgtctacatgtctgcgcgtgtccctgtgtctttgtgtatatatatccatgcctgtgtgcctgtgttcctgcgtgtgcttgtgtgtgcacgtgtgcatttgtgtgtttgtcagagtatgtgtgcatgtgtgtgtctgtcagcgtatccatgtgtgcatgtgtgtgtctgtcagcgtatccgtgtgtgcatgtgtgtgtctgtcagcttaaccatgtgtgcatgtgtttgtcagtgtatccgtgtgtgcatctgtgtatctgtccatgtatccgcgtgtgcctgtgtgtacctttgtgtgagcatcaagggacctcccaggcctggtgctcaccgtccgccccaacgcaccctgcattgcagcgactccagctcggacacagacagcttctacggcgcagttgagcggcctgtggatatcagcctttccccgtaccccacggacaatgaaggtgaggtctttctccgcatccactgcccgtttgcctctccccacctggcctcctcttggccgctgtggaggagagggaggtgtgttcggctgtgctccttgctctggccctttggcagtgcgcagtagcat

SEQ ID NO: 4090 - DNA, 1218 bp, Homo sapiens
gttttgcatcttctgcacttttaatgaatggtattacatggtgtatgttctttgcaggttggtctctttcactcagcgttgccttcaggagagtcatccacgtggttggtttagagcacattgtgtcactataagccttcttatgaagacactagactatccatctcctatatggatggacttttgggttgtttccaattgtggtttacgaggagtagggttgctgtccacattttagtacctggtttttggtgaacacatttgcttctgtggggtgtaaaattaggagtggaattactgagtcatagggtatgcatgtgttcaacttttgtggatgtttccacatgattttccaaagtgaaaccctgttttgagatctggaatattgactgtctttcactctccttggaccctagggctacagaactggctacccttatcgataccctgctctgagagagaagtctaaaaaatacagcgatgtggaggttcctgctagtgtcacaggttactcctttgctagtgacggtgattcgggcacttgctccccactcagacacagttttcagaagcagcagcgggagaagacaagatggctgaactctggccggggcgacgaagcttccgaggaagggcagaatggaagcagtcccaagtcgaagactaaggtgtggacgaacattacacacgatcacgtgaaacccttgctgcagtctctctcgtccggtgtctgcgtgccaagctgtattaccaactgcttggtctgtgcctaccttactgttcatagttagatgacgtagagcaagttgggtagctggggcttcggaggctttgggaatccagcctttctgacccaggtgtaaagcgaaccttccttattcactttcttgtagtctgaacctaagtccactgaatgcattactaaaattcggataatactatctgcttgaaactgcttaagatgtaatgtaactccgcagtagttccagtatatctccgtatatagcaaaaatatacaataatttacatgtattaacctacaaataggagctcttcttatttaattcaaattatattcagggactcttaatacttcatgcacaaaaagacacttcagtcctaaacctgtattttagtgttgtgaactccagtggtttcaagtcactaaagtttcttaagtcttcagtgttttcttaagcagttttcccttgtggctcc

SEQ ID NO: 4091 - DNA, 1103 bp, Homo sapiens
aaccctgccccgcctagcacccagcgtcagtttgcacactgggctctagcatgcacacggccccccgcggcagaaaggggttctcctgtgagccttctcacgaagcaagtggctcacggcctttcgtgccaagtttgtctgggaaagaggggttctgttgacgtttctggctgtgaggagcacaggctatggtgacctccaactccccaagtcccctcctttcagagagtgctctcaggggccagcccacggccctccctcttcaagaagacagtggctttacttcgttccggctgtgccaggacttgagcagccacagccttggcttacccccccgcccaccggtaggcgcacagcaagggcaccatcctgctgcagggagctcgcagcactgtcctcacgctgccttgacaccacagaacccgtgcgtggagctcagggcacgcagcaggtgagtcatcgcagagtcggggatttcgtgtttttcaggagctgtgtcagagcacactgaccgaaatggaaagccagaagcagctctgccggccgctgacctgtgagaagagcaagcctgtcccactgaagcttttcacaccccggctggtcaaagtgtgggtgctggcagcatctccctgggaggccagggctgtgggctcagtgggagctgacggggggcgtctgccagttctgcagttgagcagatgactacggagtgaagccacactcccaagcaggctctggctgagaggtggggacagactcttgcttccttaacagtggctttctggttgtagcctcgagtttggaagaaaacaaggcagtagtaaggaggaacaggaaaggaagaggctgatccacaaacacaagcgtgaatttaaaggggccgttcgagaaatccgcaaggacaatcagttcctggcgaggatgcaactctcagaaatcatggaacggtgagggggacgtgtgtgtgcgacacgattgtggtgtcactcagctttggtgctgtgtggccctgggcagagcaccgggcacctggcatcccacagccttggctctggctgggggttggagccaggcaggttcacttccccctgtttgaactgaac

SEQ ID NO: 4092 - DNA, 1174 bp, Homo sapiens
aaggctgactgtggcagctctgaggggctgcggtgtggaagtgcttcatcagccatgacgtgcagtgcaccggtgcagcccttggccagcccagactgcagggtctggagtggaggcccccactctgctgcaccctcatctctcagcctccaggaatggagacagaaaccctcccctgggactctgaagaggctttcagcataaataatgaataacctggccagacaccaaccagagccagccagggaggtggtgcccgtgaattcctgagtcagaggggagcctgctggaacagtcgtggccacctcccactgccctctgcgtcccttcctcaccaggtgcctgagcaggactaggaggccacgggaacagtggggccgcgggcagctgcctgtgtccaccgaacctctgaagatacccaggctcacacctcagccctcacgtcgcaagccagccgctcaaacccaacatccgtcatgctcagcaccctaggtcccggctttggggcctgcctaggggcctttgggcagggccaggccccggacccctccttcaaggctcagaaaaaatcaaatcaacgcaactgaaagcggagacctcacaggctggcggtctgtccggggccttgctgggcctcttccccactcccactagggctggggactgggggttcccttctgctgtgctggaggccggctcctcgcctgaggggggcagtgggggtggcctctcccacaagtggctcaggtgctctcagcctctctgccccaggctcacctgcctgacccggaggtggagcagctgagtgaggccactcccatcctggaagctgacaggctctccggcagccccaggcccagccctgtccaggccgcccacagggccgggtgctctctgctgccattctccccctgcagcttccagctcttgctgccaccctcgctccgtgcaagaccctccccacacccaaaaccatcaccccacacctgtgaccttcaccgcacacctatgaccttcacaccctgcaagaccctcaccgcacctgtgaccttgcctgtgcctgagaccttcaccccaccatgacccctgcccacccgggaccctgtcctaatgggctggggacccacgcactttaagatgctgggtgtgtgggaccacacctgtcccctcctag

SEQ ID NO: 4093 - DNA, 1191 bp, Homo sapiens
ctgtgtccagcctttccttcgatttctgttgattgtctctcttaatagtttcattggctaagttaactcaagagtgatttcactcagttggcttactcatagaatgggaatagcatatctaccccacgggcttcttgtgaagataaaataagacaatgtttgcccagggcaggatggggatagtagtctgctgggcctcccatgacaaagtactacagacttgggggcttaaaccatagaagtgtattttcttacaattctggaagctaaaagtctgagatcaaggtgtccacagggttggtttctaatgaagcctgtctccttgacttgcaaacagcccccttctccctgtgtcctcacatggtcttccctctgtgtgtctgtgtcccaaaatcctctccttataaggacaccaatcagattagattagggcccaccctaatgatataatttaactttagttacctctgtaaaggctctatttccaaatacacccacattctgaagccctgggggttaggacttcaacatatagattttttggggaacacaagtcatcccctcacagcaggtgatgtgaagtcatgagctccaccctggccccttagtagccacatccttgatcaagtcccttccactactgggtctcagtttcctcatctgggaggtgggattgatcctaggggccgtcagtggaggaggctcaaggaagtcctgtagcttccagcagaacaagggtgtccttcaggcagctcctcgtgagcagaggggcagctgtcctttttctgccatgtttcagttggggctgtctcttctgcattctctggctggaagggacctctgaggtcaggtcaggtggtctaggtgacaagtgagggtggtgatcagttgacctctgtgacagctgccactctccttcccagccagactctcccagctatgcctgtttcaggagcaggaatggagtgcaatggatgggaaggcaggagagctagaggccgaggacccagctgcagacttaactcccagccattcatttccagagacagggcaaagacctttatattttttatttccttcttttaacttaaatgtcattattattattattatttgttttgttttgctaagagatgagttttcactatgtttgcctaggctggtctcaaactcctggcctcaagcgatcct

SEQ ID NO: 4094 - DNA, 1182 bp, Homo sapiens
tttcctgccgtgctcagaaatccttccctgcgtgagcatggaggccacacttcctgcagggtgctcccagtgcctgcaagaggcagggatgtggaggcctccttagcccacatgacagggctcctccagaggacagcctgggccccaggacttcttgctctacctgctgagatgtagaactgtgcagcaccagagtcttgcctccctccctcctttctaccctctcttcactcccttcctcccctccctcccttctttccttaccccctctgtccttcttttctccctccctccttcccctctctcccttccctccctccttcccctctctcccttccctccctcccttcccttctcccctctctcccctccctctctccctccatcatggggctgtcagctgcatcgcaaatctgtgggctctgcctcctctggctctctcctcattttgcctcacagatatgtcccccagtacacatcttgcccacatctaatcctggctcagtgtctgcgtctcagaggacgtggaccaaggcacttgccgtctcaggcttagttgacccttcaacctcctgagaactctgggcccaggcaaccctagagaactgactcctgtccatgttctcctttctctggaaaccacttagctgcctccgtcatgctctgggcaaaggcagggcaggttgggagaaggaatcagtgaggctgaggccccagcctaaaggtcacagggccgcctggcccaggagaaatcccctgcaccaggcatttgcccacatggctacaagtgaacgttgggatacggagtgttcttttttgctatgaaactggagtcatggaggtcctggtcgacattcttccttccaaatacagtggcctggatgggggagggcagtggctatagaggcttcctgcaccgtgtcggggctcttgtccattgcaagctgggaccccaagctacccacgtggtgtttggctcccgtctgatagggaaagactttgaagtccacatccaggcataatggatagccaggctgcctaagtggtttgatagatctcccagaaaattcccagatggactctggacgcacagccatgccacagctttcctcctcttgggaacagactaccagtgagaggctttactctgaagccaggtgcaccagggcccctgtgtctttt

SEQ ID NO: 4095 - DNA, 1177 bp, Homo sapiens
tccgcagggtaggtcacagtcccccagatctccgcccaggtggcaaagaagatggagctgggggccgcgccccggcggcgcggggcccgaaggcgaggccgcccagcccgcaccccaccccacgcacggcacacgccgccgcggcccctgccacgcacaccctcgcgctgctccgcccacgtgggcgccggggaggaggctcgagagatgggaagaaaggctggcacccaccctcctgccgggccggcgcgccctgggcgcactggcctccggagatggcgcgcaaggattgactctcgtggtgccagacaccttgccgggcgccctgcgtcggggccagcggcctcgctggcctgcgtcagtgcgctgcggcctcgcctcccagcccctcggtccttcgctccatcccccctgctgtgggctcctgagcatccggcctgggcagcccagatagaggccgcttacgaggctggcgcttcttttcgccttagaagcatcccgctcccacacaccccagctcgccggtctcctgaaggctgggccagcctcggctctccgccagcctctgcccggctctctgagctccagcgatactgtatctaaccgccagccctcctccgccgcccgccccatctgcgcacactcgcaggcacactgtccttggcctttgccagtgctgtgctctctccgcgaacgccctaacttcagctggccagctccttgtagtcagggagatccccttgcccctcctgagctttcctggaacgtggcgctgtcccaggatgctgttaccatctgatggcctctgccttccagagcagaggaggaggtggggaggagggcaggggcagcctcagcccctctcccagggctccacccacagtgaatgttgggcatagcagggccatcccccctaagtcagagtaacccgctggtgtggagggcgaggccatgggaggagctggcccttcctgtagcaccctgggctggtgggtggtggctccactagctgggatgggcaaggaggagggacacattcggggatagagtgggggaattagaatcctttcctagcagggcatttccaccctcctggagacctgcagctctgcagagactgatgttgtagcgcacagtggaggcttgtggcttgttgcaagatttttgttgctgttga

SEQ ID NO: 4096 - DNA, 1570 bp, Homo sapiens
tcgggcacccgcgccaggccgaggagcggccccagcttggccgctcttcgagagcgatgatttcatcgagatgcaccggaatcgggggtggggcgggagaataaaggcgtgctcgggtcagggccgatctgggccccgtcttcgtgttttgttttttgacggtggcggcgtgggataatcagagtggccgggtttgggcgtgatgcgtgttcagtggaagggtcataaatctcagagtcgccaaggaaacagaaacggacaaggtcccgggccgtccagcaagcgggggtggaaatagaggattttcggggaagacgttggacaagtcaacgttgctagagactggagtgagtcaggtggtggccagaagaggtggcgtcctgcacagtggcgttcgtgagggtttgggggtcgttgtgcctgggattaacctctcgatgatgaatttcttcccattgtgctttaggtttccagccaatggattctggtcaactggtggagattggctgacaccctggagaagccgaaaccagagagccttttgttttctcttttttcctgtctatgctctgtctcacttaacactacgttttctgctatggtctgtggttgatgacctcaatatgagtttcgattgttaacgtgtttttgtttgggaagtaattttgtttgaaaatgctctcacatacaggaattagggcctagattgtaagctcttgcagcagtcacatttgttcccgggctttggtggttatttctaaatttttgaggtgctttgctatttcttgtgtgacctgatagctccctggaactttgggtctgtgtgtgacacatgagactcacagttggagttctccagctctggaggtgctgaaggagctgcattaattctggaagacgactccatgcagcaactactgaagaaaggaccagacttcaacggggagtgtggatgggccgacctggctgggactcgtgaatctggagaagagctggagaatggatagtattgtctgtatttggagactttaatttctgtgtgagaccaaaggaggagagatgtgttttgttcaaaatttaaatttgttgtggtacactatcttatgtaacctgtctggtgagtttgtttggacaacctaactcagctttatttgacatggaacctaaaatagaagataagatcttgatattctgtacaagttgatgtaataccctgatgcgttttagaggacttggcataaaatgaaagattggcaaaggcccttgaggggcttggggatgacagtatggaactgtctgcattggaccctaaactggactagaagaggcatcttcaaggttcatacgttgtccagctgtaagttcatttgagtagcagacctaacaaatatttgaggtcagaaccctaccatgttaaaacaaacaaaaacttaccatgttaataaaagtattcatttgcttgaaaagacgaaagacctaaaaggttattgagaaatgttagtcctttaagaatgaaatctgctgtctcccagatggttctcactgtcaaatggagggtgaacatcttaac

SEQ ID NO: 4097 - DNA, 1129 bp, Homo sapiens
agaagtggcattcttctgggtggttcacatttatttttaacatcaggatatggaactttgagagtcaatgtcttcatggtaaatttctcccaattgtgctttaggttcacagctgaggactgtagtcaactggtaaggatgaactgacaccttgaggaaactgaaacagcttgtcattttctctgttttgtttttgtatgttttttaccccgatgtaacagtctcccttatggtcagtgattgatgacctcgatatggatttagattatcaaatgtgtttggttttggaaatataacttttgtcaaagaaatactctcagaagagaaatggggcttaattaagttgtttttgtggtcacgtttattcttgttacttcgctgtgtttttgaaatgttgggcatggcctcgtattttgctgttacctttgtgacctgattgttttttggaacacgtcaagacgtgggatcagaatcttccaactttagaggtgcaatggaagacactacgctacttggttgagcctggtgaagaatgtattaatgagactgctttgcataaaactgggaagaaagagaagacagttggagatggaagatggttttgtatatattttggaactttagttcctctgtgagacgaaagaggagagctatgttttgtggcacattgtctgatatatattgtgtaacctgtcaggtgagttgatttagacaacatagctgaccttttatgacaaggcagtttgaatagggactattgtaataccctcacacattataggggcatcagagaatggcatggaagagacagtctacagagagctttaagaggccggagaaaggaaaagacattatcagggcctggaaagtctcttccagttcatcagggtagtagacctgtcagattggaggtcaaagtcaaaagtataataagtgttaatttgccttgaaaaacaaagacctaaaaagccttttttaagaaataaattttttgttcacatgaccaaagcccctcctgtgtgtgttaataaaagaatcataaacaaatttttttggaatggatgttcttcattgagtgtcatcaaatggggttgaactgcttgtagttaaaggctcttggtaagccttt

SEQ ID NO: 4098 - DNA, 1187 bp, Homo sapiens
tcttccatcccagaagcccccagggctgtcccgggcgggctgtaaagccccaggctttggagctgggtgcctgtgtctctcgcagaaggctactatccattccgggtagctttattcaagagaaaagcactttgaactgacgtgagaaaagtgactgtgtaagatagaaatactagactacagaaagtttcagccatcaacgacacgtatatttctttccctctctgggttgttttttaaagttccaagaagatattttgataaaattccttgcaacacttaaactctttttctaggagattttaaaaatatataacatggatgtgagggcgatttggctgtcatatctgtcactccattgatcaccagggttgattcggctcatctgctggctagcccggtgtccccttccccactagcactccatgtgcgtccctcccgaagctgtgtgtttggtcaaagagaatgaccatccctgatagaggaccggtcttcagtcagggtatgtgagtagctgcactcccctgctagagcctccagacaggctccattcgtaggagaatgtagagtcgtcaaccttccaagactccagacacatccaaatgaggcactgcatgtggcagtctgcctttctaaaaataaaaataaaaaaggccaggcatggtggctcacgcctgtaatcgcagcactttgggaggccgaggcgcgtggatcacctgagttggggagttcgagaccagcctgaccaacatggagaaaccgtgtctctactaaaaataaaaaattagccaggtgtggtggcacatgcctgtagtcccagctacttgggaggctgaggcaggagaatcgcttgaacccaggaggtggaggttgcagtgagccgagatcgtgccactgcactccagcctgggtgacagagcgagactccatctcaaaaaaaaataataaaaatatataacaatgtggtgtatatgtacagtggaatattatttggccttaaaaaggaaggaaattctggcacatgtggccacatgaaggaatcttgaagataccctaagtgaaaccaatcaatcaaaacaggacaaataatgtatggtccacttctatgaggtccctaagagcagtcaaactcagagacaaaaagtagaatgatgggtgctaggggttggggagacggggagtaggaa

SEQ ID NO: 4099 - DNA, 1270 bp, Homo sapiens
gcctttgagccctgcacagctggacccatcctaagtgccagtgagtccctcacacatttgactttagaacgtgtgcttcatgacccgttgtacagacggaggagcgagcaacacacgtctaacagcctagacaatctcgtcagatgctcatactggaccatcagcctccccattttagctgactttcccagggtcgttggcaaattttttgttctgtcttttccttgactaattgtagaactttgtgtgaggactttggttatccaaaatcacagaaatgaaccgttttgcagctgcgcagtctaaagggcaggccagtgtctggaagcagggcccacgtggcggtccgctggcaggctggtcctggggagcattctgcggacccggtcacgggcttggttagtcatgcgtacatgtgtgccttggggtgctctgcactccacggcccttctcagccacacttcccaccccagggggtgcccccaggctgatctcatttctgatgttgagggctgtttggctctgtctgtatagcttgtaacaggagccttgggctaggggctggggaaggaaagccgagctggcattcgttctctggactttttatgcctgccatacccgctaatgctcctcgaggtgcaggagcaggttgctgagccagtggctgccccgtgccctccttcccagcactatcatgtgtcacgtttcccggactctgcccctacatctcagctgaatctccagggaggctgcagagcatcgtggagaccactttctgcctcggcctttaaatgctgactcacctcctctcggaggaggcgtcctgtcttcacgggggggtcccggtggcctccagacgtagccatttcctgacatcaagatgttgaatgtaatctggtctgagctgggcctgtgggaggggccgcctgaggcctgtgcgctgttgtcctcgcagatgtacttatttttgttcatgttacgggcgttccgttccttaaagatgtatatattttcttactgtacataaagatgttccttaagtcgtacagaaggtggcgcggcaaagggcctcgtgcagtgtgttcagattgcccctggggatcttctgtgtcttcagcgcccagccctgcgtgttcctggtgaagcagtttcacatcagtctctccagatagcactacgatgtattccgcttctgaacaggatcccatgccagtgtggaacaccttcccaatcttagttcagaagtggcttgtatgacctgttcaggggt

SEQ ID NO: 4100 - DNA, 1282 bp, Homo sapiens
tttctatatatctttatttcatagtcgagacaattttatactctgaatttttatcatataagtatctacccacattatcaggaatgctttgtaagcatcattttaatggcttcaaaatagtctatgatttagataacgatgatttggccatttttgtggtcacctaccacttattggagacatattatattctgagaatattatgccatttataggcattaattccaatatgcaaaagaactttgaaatgaaggcgttattattcccaattttacagatgctgaaactgaagctcagagaggttaagttgcccgaggccatacaggacaataggggcaaagatggttttgaatcaatggatgtctgacgacaaaggccatgatctcaccactgcactgcactgtctcctgaagccctttgtgtgaaatgattaaatacatcatgattatgtcacacttcacttacccttctccaggtagttgaacatctggatgattttacatcgtcaaatacaaggttgttaacaattaaaggataaaacagggtgcggccggaaaggcggccgccccctcgcccatcatgcaatgcacattcgtggggaacctggcgctaagccattcgtagatgacctgcttctggctcggggtttcatatgtagcagagcagctccctcgctgcaatctattgaaagtcagccctcgacacaagggtttgtaaaaaaataaataaataaaacaaaaaacaaaaaaaagcaattaaaggatataaaaaatgaagacccctgagacataatcagtgtcttgcaacctctttctctatggccacaccacatccagcaagagcgtctgcccctatttgaatgcctccttccacctgggtcagccagttcccttagcagccgtagcagcaattttaacctgcaagcagcctgattggcccagctggtcatgcccaccctgtcactcatcactgccctctctactgattggcttctcttgggtcagatccccacccaccgtgggcttattccttgaacacagggctgtggcttcctaggacttggcacatagtagctgttcaattcacatttgttgaaatgaagaaaattgggtcagcattccttaggactttggcaaacgggctgaaacccaagtctagaaaattgcccagaaaaggccctgcccaggtcagcctgggacagcagccacctctgtgggaggaagtgagggttgcaaaaagttctagtactttgtctttctgaccccatttcaggtgccttcta

SEQ ID NO: 4101 - DNA, 1175 bp, Homo sapiens
ctggccacccagaacctcttgagttaacaccaatggtgttgatgtggtctgcttgaccccaaacacagcttctcttttcagcctctagatcagagagttacaaggacctttaagcctcattatgcacagtattcaatggaaaggattggatgctgtggaagagaactacaagagagaatatcatgaaaatcctgcaaggattttaccattgaagacaccgtcattgctacagaaaaggccatgaaagctaccgagcctgaaacaaattcccgccagagaaaatagtgtccagatgttggcctgacttcacaggatttatagcagagccagtcaaggaaatcatgaaagagttgtggatatggcaaaggtgggcgatgaagggtggaagtgtcatgcctgacttcacaggatttacaacagagccagtcaaggaaatcatgaaagagactgtggatatagcaaacaaaggcaggagatgaagggtgcaagatacggatcttgagaaattcaagagctaatagactccactccagaggaattaactacagacgacctgatggagatgagtgctgccaacccagcgccagatgatgaggaagaatatgtaaaagagacagtgccagaaagcaaattaacagacagtgtggcagaagggccctgattattccagactgcatttgacttcttttatgccatagactcttctgcgatatgcactgaaactaaaggaaatgatggaagaaggattggcactgatagaaacgtttttagagaaactaaaaagtaaagcagacagaaattatgatgtatttcatgaagttacactgaatgtgcctgcctctcctgcctcccttccacctcctccatgtcttccacacctgagacagcaagacccgtcccttctcttccttctcctcctcagcctgctcagtgtgaagaggatggggatgaagatctttgtgatggtcggtccacttccactcaatgaatagtaaattttctctttcttatgattttcttttcttttctttttttttttttttttgagacggagtcttgctctgtcgcccaggctggagtgcagtggtgtgatctaggttcactgcaacctctgccttccaggttcaagcagttcagcctctcgagtagctgggattacaggtgcccaccatcat

SEQ ID NO: 4102 - DNA, 1177 bp, Homo sapiens
cccaacagtgcttatcattgtagacaagattattctgtcatagaggcagaaggctcagttcagggaaatatgtctcattcaaaaaaaaaaaaatggaataatttgataaagtacctttcagtcgtggaaaggaacagagaccccagtttgtctgttgtaccacagatctcatggaaaggaggttccaaaaagaataaacctgaaatttacagataaaatcaatagagacacttgcaaagtgcaagacgtacccagagaacaccttcgttctgggaggatgcatctcatctctctgcagactcagcccagcccattgtgttacattcctcaagtgatggcatcaacaacattcatttttctctccctgcttcttttgagtcttgtgtcaacacacagtagctggtgaatctcctcattatgtttcctaatttcagtaagaatgtatccggtccaactcctgagagcatctacattcattgcattctgtgggggaaggagaagtcaatctttctatattgatttctatgaaaatgaagcatgaagctagaagcactttttttggcagaaaatgattttacaaatacaactctctgcctgaatgtactgaaagaataaggatctctaattagttttctaatgcaattgtgttcttataatagaggttccccctctcaaaagagtaattacaaaaataattgtattgagaaatgaagtagctctttgcaggtaaggaggtccctctttcactgaatgtcaatcacttgatttgctctttctttggaaagagaccaaaaatagaagagagaaaaagtaacaaaaaataaataaataaaaacaaaacaaaaagctgttctgtggtactatgcatggtttgtttaggaaaaggcctccaggaaggctctcaattgaagttcattgaaagtttaattgaagttattagattactgcttttggcaaaaaaaaaaaaaaaaaaaaaaaaaggagagattgagcagtaatctttgagtagtatatattagcagatttctctctctctttaagtgatcagatttaccatgttcactctcagcctctttataaaaaagtatagacatgacactttgaaaataggggtagatgttgttcgtttcaaggaggggttcacagaggatattaactgtccaaagatactaaattg

SEQ ID NO: 4103 - DNA, 1212 bp, Homo sapiens
tgcaggaagtagtacctcaaagtgctaatcctatgaggacaatcacatgtatattgtttagaattgatgcagttccaaactgtgattgctgtactgtcatatttttgttgccacagaactttgtatacatgtgttacagccaaaccaaaacaaacaaacaatacaactaaagcaaatataagcaactaaagcaacagtacaactaaagcaaaacagaacaagactgccagggcctagaaaagccaagaactttgccagaggttaaattaatccccctataatgacagtatcttcaagatcttgaagaaatgcatatggaccaaatttgccgtttgctaagaatttctccttttcaattgcatgtgtacatatgtgtgtgtatgcatgcacacacccagccacaactttaatgtaggatcttgagtccttttcatgatgctagattgaatataccaatgttggggtttctgaagcagaaatattgtgttaaattattgtgaaggacttctaggaaacagtgtttgttgaaatagttttacatggaattcagtctttaattttagtattagtttaagggaacttctttgattccagaatcaattgcctgcttgctgatcttcttgataaaattcatattgtagcatcaaatagtttcttaaaagtactacatttggtacacttctaaaacatcaaaaaatgtttcttgtctagttttgataccaggagtgttggtatcaaaaatctttgatactgagtgtgtaactctggaatccagatgaagaaaatgttccaaggaggaaggattcaatatgtcaaatgctgctgataggtaagtaaaagaaaatcaataatttactgctggatttagcaacaactcatttcttatctgtatagagcaattttggtaaagtggtgaaaataaaagccagattagaatcagtaagtgtagatgattcttctgaggagtttgttttaaagaattcaggtaaattgaagtggaggtgggggtcaagagtttttaaattgctttgctttcaattttaagataggaaaaatatgtttgcatgctgatagaaatgaaatagtagagagagaaattgatgtaggagagagaggttagaattgctggagtgatgtcattaagtaattgagaagaaggtaggatccagtctacaaaaagagggtttaacttcaggaacatggatcacttat

SEQ ID NO: 4104 - DNA, 1223 bp, Homo sapiens
tgtggtacatataaaccatggaatactatgcggccatccaaaggaatgaaatcatgtccttttcagcaacatggatgcagctggaggccattatcctaagtgaattaatgcagaaacaggaaaccaaataccacatattcccacttataagtgggaactaaacattgagtacttatgcacataaagatggcaacaatagacactgaagactactagaggtagaagggagggcaggaaggagaaaggtttggaggactaactattgggtactatgcttaccacctgggtgacgggatcaatcataccccgaatctcagcatcacacaatatacccatgtaataaatgtgcacatgtacccctgaatctaagataaaaattgaaattataaaccaagaattttcctgtccttctcttttctttatttttgttttaattttttttttttttttgaggcaggttcttgctctgtcacccaggctggagtgcagtggtgtgatcatggttcactgcagtctctgcctcctgggctcaagtgatcctgcctccgacctcagcctcctgagaagctggaccacaggcatgtgccaccacacctggctaattttttgaattttttttttttttttagagacaagcttccactatgttgtccaggtctcaaattcctgggctcaagcaatcccccagccctggcctcccaaagtgctgggattacaggcatgaactattgtacctggcctaagatattagtttctaaaacaaggccgtgctgaatctgggggtctcctctagcctttgatctggtcaagaaaggacatcattccttacttcaagatcctttgcccagggcccagctcatggtgggctgatcagtaccaaactgtggaataaatgaatgaatgatactgtctctttcacaggatgttttgtattttgtaaagccttatatactttataagacattttcactgacaccatcttcataacatgtgagataaaatatgttgttgttttcccagtgtgttggttcaagaagcaggagttaggatggtattaagtatgcaagggattgattagaaaaaccactctcgaggggaaacagtgaagaaacatggagactggaataagagccatgatataggtcttattcatggggagcagagaggcaagaagttcgagtggggaaagtactagattgccatgcagtgtgaagaaagtttta

SEQ ID NO: 4105 - DNA, 1198 bp, Homo sapiens
atgtgtttttcctgcatttgctctgacttagtccatgactttcatctgcaggatgtgtcagaactaaggaatgaattacagcggaaagatgcactagtccagaagcacttgacaaagctgaggcattggcagcaggtgctggaggacatcaacgtgcagcacaaaaagcccgccgacatccctcagggctccttggcctacctggagcaggcatctgccaacatccctgcacctctgaagccaacgtgagcaaagggcagaggcagttggcctatgagtgggctgatgcgtgaggttggccacacattccttcctgtggacttgacattttggaagaactctttgccagataatgagttcattttagttttatgctcccattgaaaaattttccactatttttataagctgttaatttcttgagtactttataacatgtctgtagcttggataaaccaagtaagtattttttttttgtctttagcaaagtttagactgtgaatatgatgacacagattcttttttatggtggctttgcttgttttaaatttttgcatgacttttcatctttttatgtgtgtttcctgtagtttgatccgaaggaaaagagtatagtagcctgagaatcaggagatgggagttttagtcgtaggccttatgataattaccccgcggtggtgtgtagaaaagtatgtaaatttgctctgttttaagactttgaactacctcaagaagaggaatctaatacaatatttgtaatgtttccagagctctcagaatgaggatttttttgtaaataggtcagaagacgatggaactgtcctgggttagtatagtaatcttacagtaggatccttaggttgatgctgacttctgtttggggtatgtttatattttatgtggtgtttactttttttttttgacatagaaggatatagtgggagcagtgatacgctaacattcattacattctgcagtaatgaatctgtttaatgggtcagtcactgttttcagtagcatgacagtggggtcataggtgagctgtgaggggctaaatcttgctctgattgtctctttctgttttgagttttgtttgcgtgtatcatttttgttctacattttgggaggggaaacattttccgttaaggaaggttgttgccagtggatttgactccaagggactagagtgtcgtggtgg

SEQ ID NO: 4106 - DNA, 1157 bp, Homo sapiens
taaagcaaatcttattattctcatttttgtactcttcaattcttaatgataaaaagatcatgctttctctcacactctttcttttaaatgaaggaaattgattccagtggaaacattaactcctgaaattgctttgtattggtgtgccctttgtgaatatttgaaatcaaaaggagatgaaggtgaagaatttttagagcagattttgccagagcctgtagtatatgcagactatttattgaggtaaattttttttcttttagtttggagagtgattgtgttgctgcatgtgtcaatctcccagtccccttcctcaaagtcatgtttgattgtgaatatgttaaaaatcctttttttgtacatgtagggatagttatatacatcgagtctttttgaatatcttgtgctggtctgtatactgaaagagcaagtcactatgtttaggatcatttcttcaaaactgttaagatatgattatgaccatttctgcataaagttgatgatgatgatatattatttctgaaattggttggcacattttctgttaagtgtcagataataaatatcttagggtcctgtgggccataccgtctgtcacaatgactcaactctgccatggtattgtaaaagcagccaaagacaatgtaagtaactgtttttcaataaaacttttattgacttttatggccactaaatagttgaactttaatattcatgtgttaacaaaataagaaattttaaaaaatgatcagttaaaaatttaaaatagtcttagcttgcaagctatataacaggtaataggctggatttgatgcacggaacattgttttccaattcacagcgtggatctttgtggccagttttatttattaaaaacttactatctagcttcatgttttaaagttttttcaaaatatgcctttttaaaaaacaatttggattaccataattatacctcttaagaaattatttggattactttatttcactttaaaattatacaagaaaaacatgaatgcattcttgtcaaaattcaaatacagaggtataaggaataaaaatgtggaattccctcttttatttcctacttcctcaatcccattgattagcaactaagtgtatattctagcaacccttagaattagcaactaaacaat

SEQ ID NO: 4107 - DNA, 1160 bp, Homo sapiens
ttggatggttcgtgtaaaaatactgtaggacaggctacattgagaggcttaaaaaggagatacaaataaatttcttctaatgaatgtcatctttgttaggtatctgaacttaggactggagctgcagaaggactagccaagctgatgttctctgggcttttggtcagcagcaggattctttctcgtcttattttgttatggtacaatcctgtgactgaagaggatgttcaacttcgacattgcctaggcgtgttcttccccgtgtttgcttatgcaagcaggtattgagtcatactgataaatcaaaaatctgacttgacatcaaattcaagtcccccatgaattatatctataatgatattttgttgttgatactttttctgtctttagtagataaatgatgaaatgacaagaacgatacagattttatctatctgaatttttggctctttcctagatgaaaatgcacttaatgagtgaatttcctacatagtagttttgaatttcatactttttctctcatcaaataatgttctgccaacatactttgaatttgtttctcaataggactaatcaggaatgctttgaagaagcttttcttccaaccctgcaaacactggccaatgcccctgcatcttctcctttagctgaaattgatatcacaaatgttgctgagttacttgtagatttgacaagaccaagtggattaaatcctcaggccaagacttcccaagattatcaggtgagtgactgtggtaactgcatgcagatcactgttttggtaaaataatctctctcaaagatcccttgaaatactgaggaactgcattttggtctttagacttctgtctcaagcatataccacaaagcacgaaagaaacatgaccttgggaaatgtggagaaatcatatgaaaacagaagtaatcaatgctaacatttttgctactgaaaagaaattactaaaaatccaccacccacaccatgcccacctagtactgactgttaatctgaagtaataacctatgttatctaggactcacagagtcttcaaatgttggcttacctgctatgcttctggcacaagaaaggagaattcaaagactagaactcacctcaagcttttttggcttttaattcaaagaagataaatcaattgcac

SEQ ID NO: 4108 - DNA, 1230 bp, Homo sapiens
ggcaagaaaattagttggaaatatttgttagatgtgtaagactatataataatcataatcatcttcaatttacagagaattttctcttaattttttaggccttaacagtacatgacaatttggctatgaaaatttgcaatgagatcttaacaagtccgtgctcgccagaaattcgagtctatacaaaagccttgagttctttagaactcagtagccatcttgcaaaagatcttctggttctattgaatgagattctggaggtaaagtagtttctcattactctaaattagtttgtgtttatatttatacatgtagaatttacatggttgtattagattatacatatgttagcatattgtgacttatttgaagtattttcttcataaatttcatataatttagtgtttttaaacaacttgatatgtattggtactattttcaaagattagggaatgcggtgtttacaaaatgttaataatgttttcttttatagcaagtaaaagataggacatgtctgagagctttggagaaaatcaagattcagttagaaaaaggaaataaagaatttggtgaccaagctgaagcagcacaggatgccaccttgactacaactactttccaaaatgaagatggtaatcacatactgaacagaatatttataaggttctgtttttttttttccatctttactgagacatatttttttctactctaacatgtttggttggacatcagaaatgaatgaaattttttttctaattaatcctcttgggaaagagcattactgataaatgtttattctgcttttcaagtgttttttggcatgcatttctcaacatatgaccatctttttaagagttttgcttctttttccaatattcaaattttcgaaagggtgatttataacttttcactagctgctagaaggactttgtcatttcagttttataaaaactggtcttaaaaagacaatttaaaatatttcatgaggttatcttatttatattgttgtattattccctttaatagaaaagaataaagaagtatatatgactccactcaggggtgtaaaagcaacccaagcatcaaagtctactcagctaaagactaacagaggtagtgtgtggattgaccatctttatgataaaagttttaaattttatcttccaatgaaaaatacttgttttgcaagttttcttatctttgtttccttagggataaagatttttt

SEQ ID NO: 4109 - DNA, 1176 bp, Homo sapiens
gtggagataacatttgtcgtaaactaatttaagagctatattttgaggaagaactgataaatacagcagtaattggagacatctggggtctagggatatttgttttttagatgggcgttaccatttaccatacttagtaagatggggaatacttttctgtatcagtgataaccatgattcttttatatgttaatttcattaagctgagagctgatagtaacaaaatactgaggcaaatatattagataaagaaatgggatagagttggttttaatctcttagtatggattctacatgtatttttttttccccttcaaaaaagtttcctaatcaagttactgagatgtggtatgtgtaacattggtgcattacacattttaaaagaatgtttttttctacaattaatttactgttgtcagtcatcatttatcttgagtcctacgtgtgaccattgcttgggggtataattttatgtttcttctttactggattctgaactagaaatagactttggaataaaaaatcaaaatattagctttttaaaatggtaaggttgcattgaggaacttggcttggaactgaggccaaaattagacattagattgccctactgcctgactccctgaattgaacttatcagcctatcaaagacagtacagctggagctgcaggcgtcttaaaatacaaggaagctgtaccctagtgagtttaccatgcttgttggtaggagtgagcaggaggcttggccgtgaatgaaaaatgacttttaaaacattaatccatcccactagggaccaactgtaaggatgttgccaatattagttattcttccttcttttgggagaactgaataagtagtagagaaaagagccaagtttcttccaaagtacttcccccaagaatgtgaaaagtgtttgtgggagttctattttatggaaaagacaggaactgtggtgtggttcaaaaagcttactgtttacacaggagtaggatttaccttgcttttaaagagttcacagtgatcagggatgttaaatattagacttggtgtaatgtaatggaaagacagaagtgggaacaattaattttgacttgaaggattcaaaatgactaggcttcaaaacattgagggaaagcaaggattggcaaactttttctctaaagggccagacagta

SEQ ID NO: 4110 - DNA, 1176 bp, Homo sapiens
aaaaacctctgtgtggtagtggaaatgatctatatcttgttttgggtacataaaagtctatgcaattatcacaacgatcaaactgtcccaattatcaaacaaaatccttaagatccatgacattttattttatttaaataatatttcaatatgaaaacaggaaaagaaacatgtaagtacctagaatatattttcggagatgtttaaatttgtccaaaaattatcagactttattgaaaaacattaatgaaaatatgtaccatattcatgaaaatatacaccatatccaatctcatacatgttataaatctacatattctatgcaattgcattcaaagtctcaaaacctgtatgtgtgtgagagtgtgtgtgtgtgtttctgtgtgatcgccttgatagtggattatagaatttatataaaagaatatagatcctagactagccatggtaacattggagaatgggcacagtaaaaagatgagtagaaaaggggtacaggttagtaagatttgacttagcagattgcaacacttactatatagatacagtagtgggatcgtgcctgtgaatagccactgcactccagcctgggcaacatagcaagacctcatctctataaataaagaaggataatagagcatatgtaacaaatagatcaatgggatagggaaaaaattctttaaagtcctaatgaaagcaattatctcccccactgcataatcaaaattatcttctttagtgaataattcacactttcacacaaatgtgtcatttctcttatcctaaaaaaaatttttttaacctgctcatccttcttactaccactacatttcttcaccctcacttgcagcaaaactccctgaaaaagagttgcctaaaatcaccaactctgatttctatttctccattctttcttaaggccatgctgatcaattctttgctgcactgaaaaggtccgcagaggtcaacaatgacctcggattgattatttccatggagagttttgttttacatttcagctgcatttttaatacaactgatcacttcctttttcttgaaaaactttcttggctcccaagtcagcacactccctttgttttcctccctccctcactgattatttcttctcggcctcctgagtttctgctcttctacctgacttcttaatttttaagt

SEQ ID NO: 4111 - DNA, 2038 bp, Homo sapiens
tctgtttctgtctctctgtctcttgctgcgctgcaaagagtgagcagcccccttaaggatcgcgtggcaaaagctgcaggagaggcactggcagggctgtttatttatgagccgcgttcaaagccgacctcttcccattctcccactgcaaacgactatctccgagcccaggtcacctctggggccaaggagttgggggctggggctcgggtggctccttcttcgggccaagtttgcccgcgcgtgggagcgagggggcgagccagggcgcacgggaacgcgcgccgccagccgccgcctccgcccagcgctggcagccccggcctcacctctcccctctccccagcgaggtgcgggctcccagagcggagccagggggcgggcctgggcctcgaggggcggggtcagggggcggaggctcgggcggctatataaggcccgcgccggctcaacttcggacttggtgttatttatttgggaagcgcccggacggcggagcttggcggcggcggtggtggtggctgccgcagactgtggttaaaaaaaagaaggcggcggcggcggcggcggcggaggcggaggcagctgcgaggcatgggagcgccgaagcgcccaggcgcaggccgaagctgccgcgctttctgggcacggcgggagtgctgagcagaaaggggagcgccgggggcccgcagccggctccggaggcgcgggccgggtttttgtttggctacgctgagcgccagtcagccccagcgaacaactccagttacgacaacaacccaccttccttccagacaagcgagacttgggctgctgcgtccgtcctattgtttagacacttgccaggggctccggagtcggcagagccaccgagtccccgctctgagtcgtcgccctccctctccccgacctcgctccctggagcgggaggccaggaaagcagcgggagaggggaaggggctagaaggagaaggactacccgggactgcggccgccgcgtcaggtgcagcgccaggagccgggcggcgtcgccacgccggcaggggtaccgccactgtggccttgggggacggaattcaaagcctgggaaaagttgctgcactttgagaaggacgaaccactagtgggagaccgccgggggccggccgtggctctgcgccctccggaacccggctcttgtttcttctacctttgccatcaggtgtctgccgcggagctgcggcttatctgggagacgagcggggttgacacgcgcgcacacactactgccattcagctgccgcctggctctgcctggagtagtggatcccacccgcccacctgccaccgagccattctccagtacgccccagcaggacgctgacacctccaaccttggcctttgcctttccactccttccggtctgcctggtttttaagtccgcccccagtcagtccccactcagtcttcgcagcagctctcatcctccacttggcctcttggagttcctcgccggagtgctgactagtggatatttctgcccggctgcggcggcccgactgcccttttgtcttttctgcgtgacctcggggcaggtcctggtgcagagcgtcgccaaggacgccgagcgggaggcgggattgcccagacatccttcagcgaagtgcatgtgtgtttgtaaaccatcgttggctgtcgggagaccgcgaggaccggtccaggctgcggcggagtcgagggcgagggagaggccgcgtgagtgagcagagtccagagccgtgcgcccccagaactgcgcgtccgccccgtgcacccccgcgcgccatgcccagttgccccgcgcgctctgctacgggcccgctgggcttccgcgccttctagcttccggagcccactttgatcggggccataatacctattgagatcccctcttctgtcttgtaccttcgccactggcatcggatttgcagaagcgtgcgtgggatcagaggaccgccctccccacaacaaccggcccctgcatcttagcagccgttggaagccccagctcttttaccg

SEQ ID NO: 4112 - DNA, 1054 bp, Homo sapiens
cttttaattttagtgtgtttccattttcaaactaagacaggtgcaaagttgaggttaccagcggtacaagatcagatcacctagttagatattgatgcatagtaaaatgtagcctaacacactctattcataatgtggattgacaactaagaaaaaagtgaatgctttattcacacaaataggttaatattcctgaaatagtgtccaatgcatttaaagccatttaaaagaacatagagaatacattatttttcttagcttatttctccagtatttctccctgtattactctagctcatatttagactttttgttaatcttagaaaaaggataaacacacacagtgtatttctgcagactcccctttaatggatctctgccagtgttagccattgtttcagttgcctgtggctgctcaactgtgcaaggttgcctggaaacgctccttcttcagtgcaaagctctccggccactttccatacctcccagcccagggcttaaagattcagggactccagccactggtgtttctttttgaaatctccttagtaaactaatgatcttgtaaatgtagaaaacagaaaaattacttctcagtctgtagggcgtgcaagtttaaaacaaaacaaaacaaaaactttgaaaaaaatatgtatttgttacaagttaaaacaaatacaatttttcttctctattgaatttgatttaaaattttgttaaaccagcattttgtaatgtgtaatatttttggcaaatattttaagttaacatctaccactgtctttcagcctggaaattgtgtgctattcccatcaaggttacatcatgtttccattactcctttaattgggggaagtttcaaagtcagacaccttgatttggaatttcaatgcttttaacaaattttaaagcaagtaccactattaggtaacagaatattattattactcacttttttccttggttaaatttgtttgttagtcctaagaggctttaggaatataaaatgaatgtgatgtttgatagtatcaatacagttgattttacttgtctc

SEQ ID NO: 4113 - DNA, 1098 bp, Homo sapiens
ttcatcagttgatattttaatatttttaacaacctggtcattacaataacatctgcgtatgaacccatcaaaggatctaattttagagtttaattttatactttgtagatgtctgaaggaaaaaaaaagggacagtgtcatacataaaaatgcactatgtgctttcattttaaaaatattttatatcactgttcttcaaatattgaagcatcaggatccctttatattcttagaacttgtacagaaccaccacgagcttgtcattatgtgcattatagataccaaatttagcattttataaatttaagcagtacatttagagatttaggaatttattcaaaaacaatagacccattatatgttaacataaataacatatctataaaagaaataaaaaatttttcaaaacaaaaaacaatgagaagaatatcattgtttaacttttttttttttttttttttttttttacaaatctctttagtgtctggcttcttacaagacacctggattcttctctctgcttttactgtattcatactgttgtaatatcacacaacatggacctctgggaactccactgtacagtcatgagagattgagaatgaaaaaggcaaatgacatttcagtattgttacaaaaatagttctaacctatagggacccgttgaaaagtgtctcagtgacccatagatgaccctggaaatcactttgagaactaccattctatattttttaatatgagataattccattgtagaaagcatacttcaaaattcgaagttttgatgtatctttcagttacccaaaaattcaacttgacttttaatggtgcaatgatgccgaaatccccctgtccgtgcatcagtttatttttctactgcctatttgcatgatggttaaaaatatgggtgaaatgattttcttcccttttagcccctgcaagagaccttatctttacatatgcatcttctttactcgactataaactctgtaagaagagggagtattcctgggcagccataaaaaaggatgagttcgtgtcctttgcagggacatggatgaagctggaaaccatcattctcagcaaactgtcacaagg

SEQ ID NO: 4114 - DNA, 1148 bp, Homo sapiens
aatcatcttataagagaaattgtttttccaacaacaatttactgcatattttatttttatcctcaacctatatcagaactgctgatttaatataaaagaaaatccaaattaattgttttgtatgctatgataaaatctttcatatttatactgtaaactaacagagtagataggcaaatactattttgtcatgcaagcatcattttatttcagatatctgaggcctgataagttaccttattactcataatttttaaataaaatttttaaataaaaactttattgatatggaattcatataacataaaaatcatgcttttaacttatacaatttagcgattttatattttcatagagttatgtaatcatcaccactatctaattttaagactattttccataaccccaaaaagaaatcttcagcccattagcaatcattattaaaagacaattatttttctatggaattgtcttgggacctttaggaaaatcaatcatgaatgtaagggcttatttctgtactatcactttcttcttctttttcaagtttgttttgtcaattctggatcttttgaatttacatgtgaactttaggattaagattgtcaatttctgcaaaagcatcagtttacattttaatagtgattatattgaaactgtaaatcagtttgagtagtattggtattgtaataatggtaaatatcctgattcatgaaaatgaatgttttccatttatttactttttttctaagtgctgcatccagtgttttgctttctctgctatgattttgttttcattcaccttaaagtattacataattttcttttgttctcttcccttaaatcactgcttatttaagtatgttgttgaatttcacatatttgtgaatttcccaaattttcctttgttatttatttctaattttatttcattgtgttaaaataacatatttcaatattatttcaattcttttaaattgagacttgttccggagatgttccaggtgcatatggaattaatgtgtatttttattgctgttgcgtaaagtattctatagatgtctgttaggtttagttgatttatagtgttgtttgagtttctattttgttactgattttctgtccaggtgttccattcatagttgaaa

SEQ ID NO: 4115 - DNA, 1097 bp, Homo sapiens
tagtaacacttgcggtggtgtcttagaacacaaatacttctacagtatctagaagacatgtcaactgttgaaagccaataaatgtcacaagaacccccgtaattcctttgtatatgtgtgatttcatatcttataatttttatacatttaaattattttaataaaaatgtgcttacatacatgtacacacatatgtgtatgtatgcttataaatgtctaaaactgtataattatttaatgatttacttactactcttactatttctttctacctggattaatgtgacaagccactcagagaaactgaaaattcccatgggcttctccagttgttcttgggaaaaaggagactagaacagtgatttcagatctggaatacactggactccaacctcagattttctctttgctgcctgtattacctaaagcaattgacataacctctctgatattcaattttcccacctttaaaatggggaagatggcatatacctggctgtgttgctgttaagggtaagttttaagctgtgtgtgtgtgtgtgtgtgtgtgtgtgtgtgtgtgtgtgtgttgcaaaaataaatacagtgactgttatagagtagaagttcaaaaatggtggctgcattccgattacagcttgcattaaagttgaatattaagaacaggagagatcgatgatggtgtgttttgtaaccttcacacggttttctatatcataggatgagtcctagctttcagagatttccttgcgcctatgtctaccctttcttttggtcctagaaaaggtcacagatttaaagtaagtcaatgtggaacattaacatggctcatgcaggttctgtgcagctgtctctatgggttcttgaaataaaatagggccaaaccaggcacttcaaatggtagatttgaacaataaatgataaccactgtctctaatatccaaatcattccctactcatccttctttaggctcatagttcattgcactgtcttcttaaataactacccgaacacaactccacttttctcacttctaatgcgtacatttttagcaataggttttggttagggtcttctctgtccacatactacaact

SEQ ID NO: 4116 - DNA, 1204 bp, Homo sapiens
tgcagcttctgatgttaaacatatattattaaactccaccttttcttctctttcttttactttggcgcattatctaaaatttctcacagtagctaaaatgtttgaagctatggctttctacttaaatcattttctctccttacattgtatatctgatcttccaacctgtttttaaaatatagctaattgagctggttttaaagacagagatctttctgatgtcaaagagctagttctacatgaaatcagttacacacagaatttcattttcaatcatgaaaattacttttttatagattcttatatttaaaaactgtacttattgctttacttttgcttcactgtttatagaaaaacagcaactccctgctgaattatatgcagttgtttcttatttgtttatgactttacattcttctatatccagaattacaatataactccataaaaaagaatatttatgtgtgatgtgaaagcatcagaagttcatgggcacaaaatgccttgaataatttaggcagatggataaaatgtttctaagaaaagtaatcgcaatgttttaccacttcaatcgtaacactatcaagactgatgattctagaactagctctttaaaatacgtttctttacttatttttccttgcctgccaattgtgtaaaatgcctcttgacttgtttgttttaaaccattatgttaagtatcgattggccacattcaccgtctcttgggtatattctagactataaaaaattttaagagctatagattaaaagatatttctacagcgttagtgtacagagttagtctaactttccatattttcttaagaagaactctgggtttagtctctattttaaggagatatttgttagcttgccattattgaattacaatttgtataattttatggatttagtagatttggtgatatgacttattttgagcttgaatgatcaatagcattgtatattattatactggctgcataacaagtaacatgttgaaaagaacagttgattggccttcattgacaatgtttaatattaattactttacccaattaagtggaaagtaatctgatagctattatttaaccagaaaaagccatattctaaacaccagactacctatagaataaaacattaatatgatttaaatcctaaaattatggcagtaatgtaattggtatcaaattattcaaac

SEQ ID NO: 4117 - DNA, 1187 bp, Homo sapiens
catcacttctaatgaaacttctttgcatctgtgagtatatcccaatgctaatgctaatctcctctgcagcaggggttctttggaggtaagaataatgcattatttatatttgggtcctcagaaccttgcattgtgacttaagtcatcagtaaataattggtgaatgaaatagtaatgcactcggtgtgtttacactcaatataaacacgtctctgaaaatattaggagaccttctaaagcaacatgagtgttgacaccagtgacaactcactaaatcccagtgcacatcattcaggaaaatggggaatccccagtgtctctatttttttgctaaattgttatcctcaataaatctatggggattttctgctgagcatcactttgaattcttttgcccttaggaaataacaatacttccatacttgtgtgtgtgtgtgtgtgtgtatgtgtgtgtgtgtatgtgtgtgtgcttctgtggtgttgtttttccagagcaattggagccaaccctctttactgtgattgtaacatgcagtggttatccgactgggtgaagtcggaatataaggagcctggaattgctcgttgtgctggtcctggagaaatggcagataaacttttactcacaactccctccaaaaaatttacctgtcaaggtatggtttttaatcatttgtatttcttttaagaattactatattaagtaaaaaagaaaaagacaaccaattgtcaatccaaaggtatggttgaaatgcccagtaaatgattattttttcagcccatgcttggacaagacagagcagttacctgaggtgcccaagtaaagaattaggcttttcaaataaatctcagaaatagtccattggtaatgaccaagttttcttgaaagtgtatcaaaaaacgtagagttcacaatttctggaaattcctttcatagcctctaacaagtcaaatgttttgcttttgccctgtctgaacatgtgccctgctcctagggctgccagggccctgtggcttcctcataccaggtaaggagaaacaggccctccccagtgttcagcccaaaccttctgactcgccttatgtgctgcagccttcctgtgttgatgttcttgtttcttgcttgtttgtatccctttcttttccctttgtttgatgtatttgtgaatctaaatattgtcagaata

SEQ ID NO: 4118 - DNA, 1183 bp, Homo sapiens
gaatgatttcatttatgtcaagctcaaaaacagtcacagctagcctatggtcttgtcatgatagtgatcctctttgcagggaccggggggaaggcttctggggtgctggtacatggtgtgtttctagatgtgggtgctggtgacctgagtgggttcagtttgtgaataatcattaccaatttattcatcctttgggtctatgctatatatcaagaaaaaaaatccaaaataaacaacgccattgaaaagcattcagatttccttttcctaattcccatagtatattctgagggtgctcatattagtcacagatcacaatagtcctgttgtccaaaatcacaacactacttagcagcagactcagaattggataatggaccacctggttccatgccttgtggcttttgttttgggttttttgctttgttttgttttaaatcacaagctgccctaacctctaagacccatgacaatgacacagtctgctggcaggaagcctgttgacctttttctatgagctaacactgtttgccctgttgcaggtgagttgtgtgaggagaagctggacttctgtgcccaggacctgaacccctgccagcacgattcaaagtgcatcctaactccaaagggattcaagtaagtcaaaagctacctttttgctcacagtcagggtaggggacccattattttaggagcccttctcctccttcatccttagcttcacacctctgctcaggattaaagggacctattcactagtatcagtgacattttttaaatgtcgatatacaatatggacttttttttttttttttttttttttgagatggagtctggccctgttgcccagctggagtgcagtggcacgatctcggctcactacaacctcctcctcccaggttcacgccattctcctgcctcagcctcccaagtagctgggactacaggcgcccgccaccacgcctggctaattttttgtatttttagtagagacggggtttcaccgtgttagccaggatggtctcgatctcctgacatcatgatccgcccacctcggcctcccaaagtgctgggattacaggcgtgagccaccgcgcccagccccagactttttgtttagtacactaaagaaaaatgaaaaagtgtttccttttcatccatgattttttttgtgaagtcacct

SEQ ID NO: 4119 - DNA, 1101 bp, Homo sapiens
agtattcagtttccatgagaaatatttattgtatcaaagtacattgtacttaacattttaggccatccttttactgttccttgatgctttaatatatattaatttataattatcctgatatttttgtacatttttcaaacttaaaaatcaggatttttttttttttttttttggcaatagtactaacatagggttttatcttgggatacatatgtattggtctgtttgttgaccttgacatctgatcactgatgtcaatgacctactggcctcattcaggacacctgcagagagtatgcaaagtccgagagaggaaaacagaaatctgtatgtgagatggtcattgtacagaaagaagtggcccctctgcaacatgtcctcacagaaacgaaatggtgtgtagcaatcaacactagaaagtagaccttttgcaaattaatatgtccttgaccttttttgcccttttgtgggggtgaggtggggataaaaagactgtcatatcaagaactgtgacttttctttccctcaaacaataaaactcctttattatcttaatgctcccatgttaacatgtttgctgctaaattacaatgtagaattgataatggtttatagtgaactgtgctcttccctcattaaaatcccagggtgccctgtaaagatgcagatgtttcttcctgaaaacttctttttttacaaagaaaattagatgtacatgtataattcagtgtgctttgtctttctccagattaatatcggttacactgctgatgtttgtaaattaaacagatatttacttcattaacagcttggtggtgttcttagaaattgcacaataggccactccttaagaattttttaatcaaaatgatacagaaagaataaggaagaaaacctatacctttttgttgccaaaaaattggtttgagattcacacatcgttatttctggggactgatattggaatggccacataagagagatggatataaaaacatactatttgcctgaaaaaagatattcaattatttttttcaaaaaaattgtaagatgaagtctatctaagatgaaatgtttttgtttttgttcttctttgtttct

SEQ ID NO: 4120 - DNA, 1176 bp, Homo sapiens
ctcacggtcaggaactggagaccagcccggccaacacggcgaaaccccgtctccaccaaaaaatacgaaaaccagtcaggcgtggcagcgcgcgcctgcaatcccaggcacttggcaggctgaggcgggagaatcaggcagggaggttgcagtgagccgagatggcggcagtacagtccaacctcggctccgcatcagagggagaccgtgcaaagaagagggagaggggagaggggagagggagagggagaatgttttaagagccataaaaaagaacgagatcatgtcctttgcaaggacatgaatggagcaggaggccattagcctcagtgaactaacacaggaacagaaaaccaaacaaccacgtgttctcactaataagtgggagctaaatgatgagaacacacagacacatagaggggaacaacatataccagggcctttcagaaggtggagggtaggaggagggagagtcaggaacagtaactaatgggtactaggtttaatacctagtgattacctgggtgattgcttaatacctgagtgattgcttctctgtcttttggctaagatcaagtgtagtatctgttcttaccagtttaatacctaggtgatgaaataatctgtacaacaaacccccaagatagaagtttacctatgtaacctgcacttgtacccttgaacttaaaagttacaaagaaaaagtattactagcttctctgttaggtatagagagggactgggtgagagagggagaccagttaggaggctcttagaataatcgaggtgagagccgatggtaacctgaatcatgtggaaggaatggagatggcaagaggtggttggattctgggtatttatttaaggtagagccaatacaacctgctgattggatgtagagggtaagcgtgtgagatcatggatgattataaggtttttggcctaagcaactggaagatttggaggtgccagcaactgcaatatgggaaacgtagggatgaagcctttgggaggcgtaaaggtgaagaatgaagttttgggtagtgaagtttgagatgtctattacgcatccaagtggagatgttgaatacagttgtcgagtttagggcagaagtccaggcttgaattagaaatttgggagtcaccagtgttggtaacggagagaagaggactgtg

SEQ ID NO: 4121 - DNA, 1192 bp, Homo sapiens
tgtttttttaactattgtatccctagcacttacagcagaacctcgcacatagtaggcatacaataaatttgttgaatgaatggataaggcaagtatttagttaaaaccagactgtttaaaccagtatttgttgagtttttatgttaaattgaatatgtatgtagacctcttcacttaccgttctttgattccattgctcctggacataggcaggatattctagaatattttaaacttaccatctggcaaaagttatttaatgctaattgtgtgtgtgtgtgtgtgcgcgtgtgtgtgtgcgcgtgtgtgtgtaaacatacattcatataatacatatttataacaggtacttatcttcacagtctctgttgctcataaatggatgaaataaaaattataatgaataaatggtttaaaaaatgtcagtgaagtgaagctttttatctttttaaattggtaaaaatctctcttcttcccacagatcttaaaccttactcaggcattgagagacgggaagagtcctttccagctagtacagataccttgtgtgattgtggaacgcagtcaaggtggaagtcagggtcggattgtccacctgagcaattcctttacccagactgtcaattgcaggaagccatttttttcctcctggtagtaaatgtcagagtaagagaaacaaactgtttagaattatcatgtttttaaaacatcatagtaatataaatctgctgttaggagctccagttgctaaaacctcaatttaagtctttaaaaggttgtattttgaatgtaaccaaaagtttacagttttttgtccaaatattaaatttctatttcagggaagaagtgctatatctcctatattgtatttttgtagaaaatttgtattttatgttgttgttagtttaaaaggtaattttacacatgctggaatgactgtaattactctagaattccaagtagaatacaataacttttaatattgagaagaatgttcatgctaattcttcttacattacaaaaggcctttgaggatgcctacgtctgaaattgctcttacgaactttaataaaatagttagctaatagaaaaacaggtaagaataaagcaatgttgccttaatttcaaaagctgctattttagaatttgaataagtactcctaaagtgaccattattagggaccagaaaatt

SEQ ID NO: 4122 - DNA, 1186 bp, Homo sapiens
gatcatagggcatgtggggaagtttactgggccatcacagacttttgttctagtgattgtatgtattaggagtcatagcatgccctacggcagatctggattcttatacactaagatgtgtcttaagaatcacagtgcgtgcttcatccctttattgaagaacagaaaattatgactactctacaaggtggataatattttggtacctgtgcttgccacagccctgttcctcaaagctgaattgatagatttctctttgacttccaagacctagcagttataaggcaccttgaaataaattgtttgtgcctggaaatgcagggagggcaatagctttgtaaattggtttacatttttctccttgaatttttctagggtcctagtgcttccgaatcatttaatggcattgtcggatatcttttacatttcaattgcaatccatgaaattacatttagaagattcttagtacttaactgtagtcttctccatgaattacacgttagaatagactggcagcaacggaatatgcagcaagtaagcctctagcttatagtttcatccctacccctcatgcctgcgtgagtctgtacagggatatgtgtgtgtgtgtgtgtgtgtgtgtgttagagaggaagaggaagagcagaatgtctgtatactacatgctgctaaggtagtgaataaatcagtaatgcaatattgtgggtccaaactactctttgcactactttatttacagtagtaaataaaattatttttatacaattgactaccagaaagtggttttttttccccttttttataattactgtcaccatataaagtctaaaggtccatatattctccttgaggagggaaaaaagaaaagtcctcctggtgagagggcttatttttcataacccattaatatttgtggataggaaggtggcaggaggcttctctccaggaatcctgagctcaggtctggccttagaatgttcgcacagtatcagacattgtttcagggctttgtgctgctctgagcctgggctctatgttcattccaggctaagcttgtagttcatcctcctccttctcctatgagtgttgctcttgttttagcaaatgttgtccctcctatttgcaaaaaagccagagattgaaggctgacagtcctggattcaaattctggtcctgtaactgaca

SEQ ID NO: 4123 - DNA, 1205 bp, Homo sapiens
ctgctcataatcaggagatccatgtatttttggctcttttgcttagttttattaatattttggatgtttctactatggacaatgctctaacacaattttccaggttaattaccacattaagttaaatgcagtatccataatagtaatgtcactcattaatgattgtgtcattttgaataggccttaattagtaattacagatttttgtggtggtttatcgtgttttgtaatatgttagagtacactggatttgctgaactctggtaatttagaactctgagccatacaaagagaagttctgtactctaaaaagtatttaatctaactgtatgcataactccaatattttgcctgaacagatttagtcattgtggaagtcccgatttctgtcctgtgggcatgattatttgcattacaaaaggcttcaccaaaatttttcattggggaataggtgcatttcaatatgattttgtattcataatgttcaaggaaaggaaatgctttattgaatctaattgatttttgcttcttgtttttttttttcccctattattcttcaggtttttttgcccacctccttgtgtatatcttatgggcagtggatggaagaaaaaaaaagaacaaatggaacgcgatggttgttctgaacaagagtctcaaccgtgtgcatttattgggataggaaatagtgaccaagaaatgcagcagctaaacttggaaggaaaggtaaatcaagactgctagttcaccagaaaggggcaccatggtaccagaatgtagttttcatattcatttttgtggtggagatttttttctttaataactattggtaacaatttcttgaatatataaactaggaccaaaaaacatgcctctcatagctttggtctagtcactcatgaagcttacgctgctgacattggaaggtggcatgcagtaagcttccccagcttgcaagcagttttagcagactataaatcagatttctattggaagccagtaataaatttaggaggctgattgctcatcttctgtttgacagaggtttatcaacaaaaatacattgttcagtaatgttttactctgctattttaatcttagttttatactagacacgatgatatatacattgtggaaagcatttatctgggttataacgatcataaacgtttacttgacatcagagtgaagcagagtgatactgt

SEQ ID NO: 4124 - DNA, 1161 bp, Homo sapiens
caaagctatagttcatcaagttaatgacaaagggagaggcagtgactaaaattcatcttttaaaatagcgttaactctgatttagaaagaaaaatagtattgaaacaaaacataaaagtagctgagatgatagctgaatcacccgtaaaatttaacattttaatttatttgacaaaaaggaggtgtaccttatattgtctgtagtttgtaagatttctttattatggtttatgttaaaaatccagcattgagttttgagaagccatattatttaaagaagtaatgttctaattttgctgaaatgtatatagaatcatatcatttccctcttttaaatttcaaaaagcaatgaaagttgttttagttagaatgtctgctagtactcttaagaacatactgatttaaaatttgtacctttgtttgtgtttcattcagggaagtgccagacacagcttcagaatgtgactccttaaattcttccattggaaggaaacagtctcctcctttaagcctcgagatataccaaacattatctccgcgaaagatatcaagagatgaggtgtccctagaggattcctcccgaggggattcgcctgtaactgtggatgtgtcttggggttctcccgactgtgtaggtctgacagaaactaagagtatgatcttcagtcctgcaagcaaagtgtacaatggcattttggagaaatcctgtagcatgaaccagctttccagtggcatcccggtgcctaaacctcgccacacatcatgttcctcagctggcaacgacagtaaaccagttcaggaagccccaagtgttgccagaataagcagcatcccacatgacctttgtcataatggagagaaaagcaaaaagccatcaaaaatcaaaagcctttttaagaagaaatctaagtgaactggctgacttgatggaatcatgttcaagtggcatctgtaaactattatcccccaccctccactccccaccttttttttggtttaattttaggaatgtaactccattggggctttccaggccggatgccatagtggaacatccagaagggcaactgtctactgtctgcttatttaagtgactatatataatcaattcatcaagccagttattactgaaaaatcattgaaatgagacagtttacagtc

SEQ ID NO: 4125 - DNA, 1195 bp, Homo sapiens
catgaagaacttctactaggacactgcaacgagaaaatgtggggtaggagcccccacagagtccccactggggcactgcctagtggagctatgagaagagggccatcgtcctccagaccctggaatgatagagtcactggaagcttgcaccttgcacttgtaaaagctgcaagcactcaacactagcccatgagagcagctgtgggggctgaaaccttaaaaccacagcagcagagctactctaggccttggaaggctaactgttgtgtcagtgtgccctggatgtgaaacatggagccaaaaaagattattttggagctttaagatttaatgactgccttgctgggttttagaattgcatggggcctatggctctatttttggctgatttttcccttttggaatgagagtatttacccaatgcttgtaccttcattgtatctttggagttacctaattgtttttctttttttttttaatagtagaagggacttgtcttgttctaggtgagactttagactttggactgcagagtaacactggaaagaatgaagattttgggggactgttgggaaagcatgcaatgtgagaaggacatgagatttgagaggggctggccagaatgatatggtttggatgagtctctgttttcttctagtatctttatagatataaaactataaagatacttaaaaaaataggaaaaactggaaaaactcttctggactttggtctaggcaaataattcattactaagactcaaaagcacaggcaccaaaaccaaaagtagacaaacaggatttaattaaattaaaaaacttctgcacagaaaaacaaataattaattgagtgaacagatagtttgcagaatgggagaaaatattttcaaaatatgcatcaagcaagggtctattatatagaataaatagggaactcaaaccagtcaacacacacacacacacacacacacacacacacacacacacaaacccacaaataatcacattaagaagtaggcaaaggatatgaataaacatttttcaaaagaagatttacaaatcaccaataggtatataaaaaatactgaacatcactaatcatcagataaacacaaattaaaaccacaatgagatatactcttacaccagtcagaatggctgtttttaacatgtcaacagataacagatattggtga

SEQ ID NO: 4126 - DNA, 1197 bp, Homo sapiens
caacgggcagatcgaatacgtgttcggggcggccaccgagtcggtgaggcggctgctgcgccttgacgagacgtccggctggctcagcgtcctgcaccggatcgaccgcgaggaggtgaaccagctgcgcttcacggtcatggcccgcgaccgcgggcagccccccaagaccgacaaggccaccgtggtccttaacatcaaagacgagaacgacaacgtgccgtccattgaaatccgcaagattgggcgcatccccctcaaggacggggtggccaacgtggccgaggacgttctggtcgacacccccatcgctctggtgcaggtgtccgaccgagaccaaggcgagaacggggtggtcacctgcaccgtggtgggcgacgtgcccttccagctcaagccagccagcgacaccgagggcgaccagaacaagaaaaagtacttcttgcacacctcgacccctctggactatgaggccacccgggagttcaacgtggtcatcgtggcggtggactcaggcagccccagcctctcgagcaacaactccctgattgtcaaggtgggagacaccaacgacaacccgcccatgttcggccagtcggtggtggaggtttacttccctgagaacaacatcccgggcgagagggtggccacggtgctggcgacagacgcagacagcggtaagaacgccgagatcgcctactcgctggactcctctgtgatggggatctttgccatcgatcccgattctggggacatcctggtcaataccgtgctggaccgcgagcagactgacaggtatgagtttaaagttaacgccaaagacaaaggcatccccgtgctgcagggcagcactacggtgattgtgcaggtggctgataaaaatgacaatgaccctaagtttatgcaggacgtcttcaccttttatgtgaaagaaaacttgcagcccaacagccctgtggggatggtcaccgtgatggatgctgacaaggggcggaatgcagagatgagcctgtacatagaggagaacaataacattttttctattgaaaatgacacggggaccatttactccacaatgtcttttgaccgggaacatcagaccacatacactttcagagtcaaggctgtggatgggggagatcctcccagatctgccacagctacagtctcgctttttgtgatggatgaaaatgacaa

SEQ ID NO: 4127 - DNA, 1101 bp, Homo sapiens
ctccattatgcaccatactgtgatgacctttctactccgaaacctgctggagcctgcccttggccgtggggtgtcagccaatcactgcttgttccacttgttgtacattttatttttgagtctttttctttctcatatacagaaaaatagtatgaaaataaaataaatgtatgaaacagtattaatgcagaaatgtgctactaatggatgtctgagtcaccagaaattccattcttaaagaggcggttagcacctattagacgtaacagtgatgtcttttaaaaaatccaaaagcatattgcaacaataagtttgagactttgtgtgaacaaagggaaattcagcctcttatgtctttgtctttaatacattaaatactgattttgaataaaaatctaaattgatcaatatttttaagtgccatgtaatcacaggcctgtcagatagttttgttagagtgaaggataatatcttttgctcattctgtgtgtgtatttttaaatgctgttttgtgtgtttgtgtgtgtttccatatatgtgtgtgtgtgtgtgtgtatatatatatatatgctggaactttgagcaatatttataaaaatattgtctgtaaaacaagtttgagaaattaattttttatatttataatgggcactgtaatggattgatttttttcttaatcttgaaatagtgaccaagatatttatatcatttttgaatttattttttaattctttaagaaaatttagaacttttcactttcatttgctaaagtcactgtagtcacattcggaaggaatatgtggctttctgttctttatggactacgtttatcagaagtccatatttattaaacatcctatttgatgtcagataacgtaaactcaagcagcttcaaagagttcagcatgttacatattattgagagagcaagtgactgaattttagttgtataagcaatattataggtaggtcagggagtcctctggatggcccctctacctctttatgtttgtatgtttatgtctttatttgttatgtcgtatgtgtttatgagcctagaaaatagcctagaaaataagtgttccatatgtaaagtttaat

SEQ ID NO: 4128 - DNA, 1176 bp, Homo sapiens
gtaaacatcatgctatatgattgcaagattcgtgtgaaaaagtaggaaaccacttcttcctatttagaccaagtggcttgtttgggtttggtttttgttttcaggctagaaaattcagtctaactgcttcatctccattcattttctgctctcatacttatgggagatagaggagtacaaagaagaaaaaggggaaaaagaaagcagaaaaactgcgtggcaccatacccgactcctctctactgctgttagacaagtatagtaaaaatagttgccacttttgacacattattgccacacagtggtttcttaccctaacttaactggaggaagctgagacttaaagaggataacaaaggcctgtttttcactgttggaagaaacttgaaaaaatacaaataacaaaaatctgtggaatatttagagcagaccaaatgtaaagagctctcctaccccatactggttggatggactaaatatttcaataatttgagagataatatatttcatttatttacctgtaatcttttagcaaaacaataaagattaaatggaattaaaactgtttttaatttaaaaaatcggggtgatctcataatgtggtgtgcgactgtgttaaccaagtgtaataggcctgtgatttttatctggcacaaatgtcattttagtttttttaatttattttatttatttattttcatttattttttttttttttttttgagacggggtctcgctctgccgccggggctggagtgtagttccgcgatctcggctcactgcaagctccgcctcccggattcgcgccattctcctgcctcagcctcccgagtagctgggactacaggggcccgccattgctcccggctaatttttttgagtttttagtagagacggggtatcaccgtgtcagccaggatggtctcgatatcttgacctcgtgatccgcccgcctcggcctcccaaagtgctgggattacaggcgtgagccaccgcgcccggccacaaatgtcattttaaatgcaggttttgcatgccgcattctcagaaaatcagttctaggaagtctgttctatcgcctagaaacctgagtttttaacactaacccctattctccattctgattgcaaaatgtaagctacgctagtgaaattgggagttacagcttttgaaatt

SEQ ID NO: 4129 - DNA, 1147 bp, Homo sapiens
tggcaaagacatgtttttggctctggttgtcattcagtaaatatttattaaaccccttgactgtttttagctctgttcttattcttgtgaagcttaccttctaattttgaatgaagaagacataaacatttattacatatgcagtgcattttaagaattgtgatagagcctttttttaagaattcctcccaaaaaaataattaccagtactttctgatttcattgcacatataaatatggaatgatattggaagagaaaaacattacatttgtaacttcaaataaagcatgaattagatttgaatattatgaaatttaccaacaaaaccttgattttatagataagtgttactgatcatagaaactaccagacataacagcactgtatacttttaaaatatatttttataagttacattgaaaccctatacacacgcttctccaattgtagtcaggttgggcggtatgtgataactaaatttttatgaagcaggtagcttcttcttatctattcaaaactgtcaagatttgctgcaaacactaggtgtgtgtgtgtgtgtgtgtgtgtgtgttttttctggagggaggaggaagtagtagaagaggttactattagcctccaccatgactcattagaaaatgtcctgaaaaaagtttagctctgtatcagacaatatacagataattcccaagtcatttgtcaagtgaaaaagaaaagaggttgttataatcaagcagctccagggacatgagcagaagtgtatcactttattattttcccttctaccgaaagcatgatatattaatttattttagattgtttagggtccaaggttttctatgcttacaaaagttatgaattaaaggtcctaaattgtaagtccttaatgtgaattaaattcacacccaatacaggaaatattagttggaaacaataaatcttgtcaggctcaaggtacttttattgctgtaaaaaaaatgaaggtcacacaataatactattcagggaaataggtaagacattcaaagagattcatcattttctatatgacacacagatacccttctaaaggatttcaatattttatcttcaattcagtttggtatttaaatattttaagtcaatcctttagaaacttatatgtac

SEQ ID NO: 4130 - DNA, 1197 bp, Homo sapiens
taggaggtggggcgtttgggtaattagttcatgagggcagagcctttatgaatgaaagtcgtgttcatataaaagagatctcagagagttcccttgccctcctgccctgtgaggacacagcaagaagacagccatctgtgagcgggaagttggccctcatcagccacagaatctgcaggtgctttgatctcagattgtgaatttctgtcagggaggctctgaatacacagggctggtctggccataaattgaaaaaaattacatgctggtcataactccaatgtcaagcaaaatctagaatatatatacatatattctgtaatgtaactattaagaagggtgagaattttatttaaaaatggttcctttcggtggaactcttgtgataatattttttcagtaatgagagcctttcaatggaaattttcaacctaaatgaaaaagatattttcatagctaccagtgcctagtaagctgtgtcatgagcatcagtacattttacaaatggttttaattgagcaagctggttaaggaagccagttaaaggagcttataaacatatgtctactattctttttaaggaagagtaagaacttgttataatgtagataagggaagatgccagaaatctggacatcatgagctactacagaaagcagccttggacccatctcttttctagtcatctgtgtaaaatgctagcaggttggattaacagcttgctacattctgagagcatcatgaagagaaaggaagcggtcaaactgtagtatctatatataatgcattataatcagagatatgctctgccacctttgactcccagaaagcaattcaactataacttgacattgttatcacatttatgaaaaggatgtatcaagcagaagtgttgatcacaaatggagcaaaaaaagaaatacagataaactaatttggcagagcccatctaagcttggctcaggggggataaatgctgtacacagaatgcctggtatggtatagacttaaatatacctaaataaatgagagctatgatacaaaggcaactctacagagttatttttagaggcgaagtgcatgcttatgattttatgggaattttattcacagtttctgatgcctatctataaatattataaattttagaattttagggcattattagaatattatatttattttctgtttttgcat

SEQ ID NO: 4131 - DNA, 2263 bp, Homo sapiens
ccaggctggagttcggtggtacaatcatagctactgcaaccttgaactcctgggctcaagtgatcctcccaccactgcctcccaagtagctgggactacaggcacgcaccatcatgcctgactaattttttcattttttttcagagacgaggtctctctatgttgctcaggctggtctcaaactcctggccacaagcaatcctcccactttggcctctcaaaatgctgggattataggcatgagctgttgtgcctgaccgtgaatcatattattattgcttaagataaactgtcatcgcatggtcatgagaactgagtacctgctgtctgaggtctgttcacaaagtccatttgtacaattggaagacgcttttttttttctttcaatttaaactgcttctgtcatcacagggagagagatcaccttcgctgatatttcctttaaccagttgctctttttgttttcctccccacattagccccgtgacccccagcacaccagggagcccgccagtgagtcctgggcctttgtcaccaggggggacgccagggaagcacgtctgtggccatcatctgcatacggtgggcggtgttgtcgagagggatgtgtgtcatcggtgtaggcacaagcggtggcactttataaagcccactaacaagtccagagagagcagaccacggcgccaaggcgaggtcacggtcctttctgttggcaggtaagatcccttcagatgcttttggtttgtgtgtgacatgggtgctctggtgtgtggacttctgcttacctgtcagatgtagaatatgttctctgtgcctgtctcaggttatatctctgggctttttagatgttttctggtgtgagtcctagatttttccaacaacagaagaatcctaaaaggtggctgttgctagatcagatggtaaatgtattaagataaatacctacctgctctaacagataaagcccagattttcaactgtatacagaatagacatttatatttcacttatggaatccagggcaggtattgagatatcaatgggtggctcttcaagtacttgtccagggttccaggcccccttcgtttgtggctctgccaggtttgccagccaaaggagcaggtctgtggaaggttgttcacgaggggttttgaaagagctaggcctgagagtggctcgtatcattttgactcacactccactggctggaacttgatcacccagccaagctaactttcagggaactgagaaatagcatcaagccatgtgcaagggaagggagaagacgtggatctggtccacagccctccagtgtctgtctgttaagttccatgtgaattgctttgactgctttcttttagtgggtggtgctttccactgtgtcttggctttcttggtcctagtacctttcacttgtgacccatatgtgaggtggagatcttgcagttcaagtgatgaatccattggcccttacctgaagcatctttgcagtgggatgcttttgcagttctgctgttagatgctgagtcccatgcaggaactgcattgccgatgttgcatttggaaagacagtggggagtactggtaaggaacacacatgctggagtgagaccgggtgagcactgagcgaaagtcaacagtgctgcttacatgatccttctctctcagtatactgacaacccccctgggaagagtaacctgaactcgtcacttctacctccttcaagtcctggcaccactacttacaaactgttacgttgctccatgcctcagtttccccctctgtaaagtgagaaggacagtcacactcacctcatagagttgctgtgtgtagactaggtgaggtgactcacataaaggtcttaaaccagctttgggtacttacgcactcaagaaatgttggctggtattatttttattttaattcagttgagtttcatcatgtgttgcacaagcatcatggagaagacttgcagggctgtttgccacttacagcaaaacagcacaattcatgaccacactgttttattaagaagcagagtcatgggaatttatgaatgcaaagcagtgagaacctgtagcttgtttggacaaagcatgttttgttggccttaaaaaaaaatctgctgaaattttcaactcagattcaacatgccttttttttttttttttttttttttttttttttttttttgaggtggagtctcactctgtcacccaagctggagtgcagtggtgtgaactcggctcactgcagcctctg

SEQ ID NO: 4132 - DNA, 1199 bp, Homo sapiens
aggacatgaaacatctcctaagagagagcccaggtaaagaagatctaaactaaggtaggagtccagatatttgcagaaacaataaacttgacgggtgtaataaacattgatagtagctgcaaaataaagccaaacttcatatttgagtattggaaaaaagaactgcttatcctgggttggtcttttcagatacattcgtctctatatggataacaaaagtaaccatatgtgatatcgtttggacatttgttcccttcaaatttcatgttgaaatctgatccccagtgtttggaggtggggcctggtgggaggtgtttgggtcatggggcccaaacatgaatcttggcttggtgcctttctcttggtaatgaatgacttctccctctattagttccctccagatctgattgttaaaaaacagtctggcaactcccttctctctctcctgctcctcctcttgccatgtgatctgcgcactccagctcctcttcaccttcttccatgagtggaagcttcctaaagccctcatgagagcagatacaggtgccatgcttctgatacagcctacagaaccatgagccaaataaacctctctctttctctctctgtctctgtctctctgtctctctctctctctctctctctatatatatatatatacattacccagcctcagatattgagtagcaatgcaaaatggactgagacaatatgtcatcaatataccatcttttttcaaaaaaaaaaaacacaaaaaaaacagtctcactgtcacccaggctggagtgcagtggcacaatcatagctcattgcagcctcaaacttctcggctcaagtgatcctcttgcctctgcctcctgaggagctgagaggatacaggtgcatgcacatcagctaatttttttttttttttgagacaggggtctcactatgttgcccaacttggtctccaactcctgggctctagcggtccccccatctcagcctcctaaagtgctgggattacaggcatgagccaccatgcctggcctatcaccatcattgaatacaaaaaatgactgtatccaggagataaatcatggacaaggcacaaaactgataatgagattttctcatcaaaatattgacactattacaagtgtatacatgggtaataaatgaataaattatcttgcccatcagagcccctcaactgaatt

SEQ ID NO: 4133 - DNA, 1100 bp, Homo sapiens
ttaactattaaaaaaaaagccatggtatatttatacaccatattttgtctattctaagacatattttaacacctctgaatttccatgcatattacaaccaatggtgacttgtcaaagagatggcagtgatgaaacagttgtcactgccttcatgtgcagtttgttttccttttcatgtatatacagagtgatatatgatacttacatgtgtcatttcaaacatagcatacttttttaatgacacacacattgacagtgtgttttataactgatggcaccttaaattcaatgagataacaacataagaagagcctctttgttctaagcataatggcacatgtcttatttatcatttcatatattctttttgcagactttatgcagttggtggtcgtgatggaagttcttgtctcaaatcagtagaatgttttgatcctcatactaataagtggacactgtgtgcacagatgtcaaaaaggagaggtggcgtaggagtgacgacctggaatggactgctgtatgctataggggggcacgatgctcccgcatccaacttgacttccagactctcagactgtgtggaaaggtaatttcctgggaagaaaaactaggaacaaaaaagatatatataagtctctgatacttacatatatttggagaacgtgttggagaattggaagggaaagtcggcattcaaaaatgcaaagcaacttcactttataacagcctgctctcacaggaagtgatacttccagaaaaataagtttgtattgagcatgcactacatgcaaggcaattttattttatatgggatattggacctaataagaagaggagcttgatgaattttaggcagaatgacttaagggctgtagactaaataaaaagcaaaaaggatagggacatttctatgtgttttgatatgaaataaaaaactaataataaggcttacaaacgtaagtcatcccaactggcctcacaaaactcaagtgtggtgccaggtagagagccaaatagcagtggaagatttggatggtaggtcaggttcccatttattatgtttagtctagtacaaggaatagagagaattgaatggattt

SEQ ID NO: 4134 - DNA, 1146 bp, Homo sapiens
tctgtcctgaagaaagaatttgatgcctgcagagagattagtgtataaagtcattaatccccctaatgcttttatcagcagtcctgtcagatgcaaaaaatatctaagaggcatgaaaggaaactcatggaagtgttgcctcaaggggtgcaggtcctagtgttacaaggcagaacatggtgtcatcaaaggaaaagcacttgatgggcagttagcctgaccccacagctacgtactttcctcattaaacagatcatatctggttctttgcagaaaaagcaaagttcagagaccatgaccctgttttcctacagaaccagggtggaatcccgcctgtatcactgaggacagcagacactgtgctgttgctgctctccccttttctcttgcagacattgtacccatcctgacgtcaactgtgattgagtgtcacagggcaggcctgaagaactctgctttcagcttcgcagctatgttgatgaggcctgaataccgcagcaaaatagatgccaaatacaaaaagaagatcgagggaatggtcaggtaggcagagatggctatttctgctatctaatcgtatttctcaaagtatttccaaaaatgtagctgccagtgtgcaagctcaataagaaaacggtggggggccaggtgcagtggctcacacctataatcccaacactttggaaggctgaggtggacaaatcacttgaggtcagtagttcaagaccagcctggccaatatgatgaaaccctatctctactaaaaatacaaaaattggctgggcgtggtggtgcacacctgtagtcccagctactcaggaggctggggcaggagaattgcttgaacccgggaggcagaggttgcagtgagccgagatcgtgccattgcactccagcctgggcaacagagtgagaccccatctcaaaaaaaaaaaaaaaaagatgggcatatcaattaggattgtatttagctctaagcatcagaaaacctaacagcagcttaatcaagtcagtatttatttgactcatacacaaggcatcacagtccagagctggtgtcaccgtgccttgatgccaccagaccagatccccgtcttccagctttgacatccatagcatagaggtttcctcttcatggtggcaaga

SEQ ID NO: 4135 - DNA, 1184 bp, Homo sapiens
cttatacagtgaatactggttgaagctgttgttcactggcgtttagacaaatataactgtttaatttcaggaaaattttttctctacaaattgctgagcactttgcatttgttcttcccagtgagatggctgttatcatcagcatccttacttcattacaaaggctcaagagcttacccacacaattttagtcagttggcaaggctaatactgaaacttgatgcggattacagtctagagatttctaacttgaatgtttcctgttccacattctagaaacaggcaaaaaaaaattctttttagtatgtttggctttattactaaatgccagccattacttgaaacccttctagaggcatgtgttctgtttgtcctttctagatacaatgctcctgagaagacagcattttccacaggaggctgtttcctcccctggtggatttaagagacggtcctttctggatacagagaaatgaaacaacggtgacctctccaggtcggcactttccacttctgtacggtggcaaaacgatgacatgtaaccttgctgtttattgtactttgtatattatttcctcttcaaagtctttcttacacactctatcctctgcactgttaatagtaacctatgacataattgtaaatattcagctttttgctaacttttgtattttgaaaaactttaaaataaaattgttgactagatatctgtgacgtttttctggatttggagacagaaaaagagataaaggtagttctgaaggacattgtcaagtttgaacacagatgtgaatggtgtaaaaagcttgaaatgaaaagctgttgtttatacaaatcacagctattaagcagaatcaatcagcccagaagcaaaacatcaaaaattaggaaaaccaatcttgtaaagaatgaatgaaactatcagcttatatctatctgccgagtcattctactgcatactacagaattcccgtcacaaaattaagtcatttgacttcccctgaaaacatacattgtttgtttggaatcatcttctctgaggctgtgtgaaggttctttttccccatatcacacatacaacacacaccatctgtacacacacacacactctctcttgctccaagggagtacatacttcttcttcttttcccacatcagtatatgcttccttgccatccaaggcc

SEQ ID NO: 4136 - DNA, 1215 bp, Homo sapiens
ctgcagcttctgcttcccaggtcaggcagttctcctgcttgacccagtagctgggattacaggcgcatgccaccatacccagctaattttcctatttttagtagagatggggtttctagccaggctggtctcgaacttcagacctcaggtgatccgcctgccttggcttctcaaagtgctgggattacaggcatgagccgtcgtgcctggcctgtatgactgtatgagggaggttcttgagctaggtgccttttttttttttttgagatggggtctcactctgtcgcccaggggcacaatcatagctcattgcagccttgacctcctgggttctagcaggccttccacctcagcctcccgagtagctgggactacaggtgtgtgccaccacacctggctaatttttattttttgtagagatggggtctcattgtgttgcccaggttggtcttgaactcctggcttcaagcagtcctcctgcctcagcctcccaaagtgctgggattataggcatgagccacctcacccagccttcttgagctgagttctagaggaaagttaagactgacctcaaatttcaggagacagtcccaaaggaattctggtaatattgcaattttttttttctgagacagttttgctcttgttgcccaggctggagtgcagtggcacaatctcagctcattgcaacctctgcctcccgggttcaagcgattctcctgcctcagtctcccgagaagctgggattacaggcatgcaccaccacgctcagctaattttgtatttttagtagagaccgggtttctccatggtggtcagtcaggctggtctcgaactccgggactcaggtgatctgccagccttggcctcccgaagtgctgggattgcaggcgtgagccaccgcgcctggccgagattcttaagtaaatgaacttttctttaggcacatgaattggaactatggaacaaagagattattgatacaattattcaagaagcacatttgcatatttagaacagaaaggttgcacagctcttacatactcaaacatagttttagagttagatcatgatcttaactttcttcatggttaccttttggggaggaaaaccaccctttttcatattaaagtaaaatgtgtacgtaataaagtgtgactggcatccaaatcaagaaacagacccttcccagtaccatgggaatctgcctgcctt

SEQ ID NO: 4137 - DNA, 1111 bp, Homo sapiens
taactacacttcagcatccccagtgcccaagaaattggaaagtacaatatttggtttgagacattcttcataaaagattctttattataaaaatttacctcatttacatttaatgtgatgatcttttttttcctttctggtatatttcccactgtactgtttggtttttgttattctcttgtctgtgggtagatttagttacccaaacatagaaactaaagcaattgcttttttcctctggtcttaaatatgtttggacaaaaagacactaaaaggtcaggcctaggggaaaagtaccctggtggaaattatttttgtaattcttaatatttttgagttggctccgtttgtcagttttaaaagcctcaaaaattatgttaaaaaaaaaatccagtgaaatcccatttagggcaggccgatttgttagaagtcactgatgctccagtaggcttttgttataatcaggcctgtttcctgagtatgtgcctcttttaaaagaagaaataattagctgtatagtatttcagtactgatgaatgaatgaatgaatgaatggcagttagtggacccaaataagtattcagtggtatataaatatttgaggaactaggtactgaattaggtgctctgagttggcaccccgaaatgtttggaatcacgactatgatttacttaaacacgtaacacattcaaggatatataaatggagtctaagtattttgcttttgaagagaataatctatgaaatggaagacttgattttttttttcattttttagaagtaatacacatttatgattgttggcacataaaactatgcaaaataattctttttaagtatctgtaagaaagaattggcagtttaaacggattttgcttatttatgcactacagaatgcagcatactgtattactgttgaggctgcttaataagtttaccaatgtgaaaagcagatcttgggtataagtgtatgcctgatttgagcttttaaaactgtgcagtaggtgtatggtaatgttttacaatcctatgtagcaaaataggaaattatgaatttttgttgttattgttttaaagatttaagatggattggggtagggaacagctgga

SEQ ID NO: 4138 - DNA, 1099 bp, Homo sapiens
cgctgtccgccctgcgcgcggccgcctcgggcccgagggaggcggatgcacggccggcggaggaaggggagggagcgaggagcgcgcgctgctctcgcgtgctctcgcgccgctcgcgtgaccggccggtgtgtgcgcgaggccccggctcccggggcacggacggccgggcgcgcgcctctgcgaggggcgtccgggtccgagtcggcggtccgggccggcgcgaggtgcgtgcgggcgggccgcgggggtcccggacggacacaagcgcacacactcccggaggagccttcgaggctgctcttcctcggccagacggagagcggcactgtctccccgcccagcgctcactcgccccgcgtctccccccgcggcggctgctcctcctcggcaccgccagccccagcgccgctcccgggcgggcgggcggcggcggcggcggcggcgggacccgcggagccgctttgtgtgcagcccgactaggggcggcggcgcaaccacctgacagaggcccgggcgctcgatgcaccttccgcccgcatgaggaggaggtaaaggcggcggcggctcggctcccgccctaggctgctggagggaggggacggaaggggagactggaggggggggccgcgggtccgaggcccggtggggccgcccgagggtgccgggaaggcctcggcggtgccggaggcgccaagcggccgggggccagagaagcagctggggtccctcagccgaagttgaaggaacaaaatgtgaagtgcggaggcgcgtcagccgcttcctggcgtggggctgagggtggagggcggcttgttttcccctcccgcgggggtgagggagcggaacaggggaggggtggcagcgcggcggggactaccccgggtccgaggctcggctgggcaagggcgttttgttcccggcagccgccgctgcgcgtgggtccgctgggtccctagttttgcggcctaagccgagccctataggcctcgggtctggtttcccggaggggactggccgggcgggactgggtgcttccccaccgccgagcgggggccttggggtccttgccggcctcccggggccgccaaacttcgga

SEQ ID NO: 4139 - DNA, 1145 bp, Homo sapiens
tttaggccagttgtggtggcttatacctgtaacgccaacacttttggaggcagagacaggaggattgtttgagaccacacattccagaccagcctggtcaccacagcaacaccctgtctctacaaaaaaaaaaaaattcataaaaaaattagccaggtattatggctgtagtcccagctgctcaggaggctgaggtgggaggatcactttgagcccaggaggtcaaggccgcagtgagctatgatggcgccagtggactccagcctgggcaacagagtgaggccttgtctcaggaaaagaaaaaaaaaattcctcctttggcgtgggaaaggcactcatccaaaaatttaaagtgtaggggtatattagtgtgtagtttctagaatgatgccaagggctcagttatctcttgatgtacaacaaaccaccctatattcactgagtgcctactatctcatgatttggaccagatttgggcagagcttagctgggagattctgctacatgtgcattacctggggttagttggtagtattcaacttgtggctagtctggcttgaggattttttttttttttctaattcatttctgtattctcatctgaaggcttgatgatttaagatggctttgctcacatgcctgacaccttggcaggaacgtttcagggcctctccataaggcctctcctgctgggtggttggacttcttacatttcaaagtgtcccaagcgtgagtgtcccaagagataggacagcaaagctaccaggcctgggtttggaagctggaagagtgtcacttctgggttgaagcaggcacagagcccactcaggttcaagtggagaaagagtggatcccacttctcaatgagaggagtgtcagagagtttacagacattttaaatctgccacactaaggatcaacctaaatgggtttccattttcctgggttgggggtggtaagtgtaagtacctatttggatttgaaaatcctgctgaacttattttctctattttgtggcatttgaactttagggacttctctttctttttttttttttttgagacggagtcttgttctatcgcccaggctggagtccagtggtgtgatctcggcccactgcaacctccgcctcctgggttcaagcc

SEQ ID NO: 4140 - DNA, 1237 bp, Homo sapiens
tacccggagagcgcgaggccgagggagggggagccgagtcgctgatcggttcggttttgcctttttctttgcatttgcctttcagatgctgaacaaagtgagtggcgtctcgcgccgtctctggccccctcccccgcgagcgccgaggcgggggcgcccaccggttccggctgctggcagggaccaagccgcccgctgcgagcaccggagacggccgggctggggcgtgggctgggcgcctttcctgggcccctgcatttagcgggtgactctacgaaaccggtcacggggagacggagggggctgcgccccgtggcgagcgagcgccaggcggagctcccgagggcgtggcgcgggcagcacagactcggctgcacgggcttcgcgggcgccacgtgtgggccgcgctttgtgctgtgtcattgcgccggcccgggtgggggtggcagggcgggactggggctcctcccaggctcgggtgcgggcgcggagggcgcgcgcctcctggccccgccccctggcaggtgcccgcgacccgcgtgtccccgtgcgcctggccgccttgtctcctctccgcaggtgctgtcccggctgggggtcgccggccagtggcgcttcgtggacgtgctggggctggaagaggagtctctgggctcggtgccagcgcctgcctgcgcgctgctgctgctgtttcccctcacggcccaggtagggcgtggggcccaggatgcgccggccgccggcagtgcacgccgctccccagcttgagtcctcgggggctccccgccccgccccctcccctgtaggtgatgcggggcgcgcctacaaggaagggaggagcctgcattttcgtggtacctactccctgggctcctgttccagcggtgcctgtcgccttcttgcccatccgtccacaattgccttaaatttggaagagaggcagtatctcagttccatctatcccgttatccagggaaatcattcatcctactcatgagttccctcgaacttgggctttttcgagcctccggttccggggaatggctgctggtttccctttaagggctataacctgtcaactcattgtttgcttctcagactcccacctagctgtagaatggagggggaagggctgacctaaatcgcagggaaacaattaggttcgctaattctccgcctccattacttgggtttctgatggtcttaaggggttcttctctcttctccactcccacca

SEQ ID NO: 4141 - DNA, 1199 bp, Homo sapiens
gaaattgtattggtcattgaagtcttgagtaaattcaaattgacagtattttgtttagatccaaatgagtcttataggtcaggcatagtggctcatgcctgtaatcccaacaatttgggaggccgaggagggtgaatcacttgagcccaggagtttgagaccagcttggccaacatagtgaaaccccgtccctacaaaaaatacagagtagcgaggtctgtagtcccagccacttgggaggctgaggtgggagaattgcttgagccctagaggcagaggttgcagtgagctgagaccatgtcgctgcactccggtctgggtgaccctgtctcaataacagaaacaaatgagtcttatagagtgtacacctctcctagtaagtgagcatttcaaataatcttcacaggctgttggggagaatgaaatgcccaacgaaggacaagttctagaaggcttgaatataccataatctgatgagaacctctgagtcagctgctaaatttaagtcagatctcagtgtcctttttaaaaaaaaaaaaaagttgacaaggtcagcctccatttcccaggctggaatgcagtggtgtgatcttggctcactgcagcaattctctcatctcagcctcccgagtagctgggattacaagtacacaccaccacacctactaatttttatattttttgtagagatggggtttcaccatgttgttcaggctggtcttgaactcttgtgagctcaagtgatctgcctgcctcagcctcccaaagtgctagtattgcaggtgtgagccaccgtgcctagccagatctcagtgtctttataactacaactggctgccactttctagcattgaccttggttgagatagttagcctctctaagcctcaattttctcctcagtaaaaatcctgtagtaatagcatcctcatagagttgttctgacagttaacagtatatttaccttagtgggcttagaatagggcttaatgtaagacatacattaaatattagctataatttctaaaaatcaagtcagttcaagcacatttcacttgaattgcaagataatttttaaaatacagcttacactcattttcaaaaatttcttgactttctttaggtagatgacaaggtgaatttccattttattctgtttaacaacgtggatggccacctctatgaacttggtatgttttac

SEQ ID NO: 4142 - DNA, 1270 bp, Homo sapiens
gtgtttttgttgttgggtttttttgtttttgttttttttaacttttccaaaaccaggtacaaagtgagagaagcacaaaaccatttggtggaagtgataagtcaaatccatgatgtaaccttgtctttcccatcacctgattttttgctttaagccctggttttcaaattaatgatggaattaaagttgatgagggtgaactttgagcattaatagaccttggagcctttccctatgtgactttcattttgagctcttgctgtttggattttaatgacatttctcctttccaggacgctgccaaggtctgcagagaattcaccgagcgtgagcaaggagaagtccgcttctctgccgtggctctctgcaaggcagcctaatgctctgtgggagggactttgctgatttcccctcttcccttcaacatgaaaatatatacccccccatgcagtctaaaatgcttcagtacttgtgaaacacagctgttcttctgttctgcagacacgccttcccctcagccacacccaggcacttaagcacaagcagagtgcacagctgtccactgggccattgtggtgtgagcttcagatggtgaagcattctccccagtgtatgtcttgtatccgatatctaacgctttaaatggctactttggtttctgtctgtaagttaagaccttggatgtggtttaattgtttgtcctcaaaaggaataaaacttttctgctgataagatagccacagctgattctcattttcttttaccctctcctcaatatgtcaggttattttggtagtaatatatgaatgtcttccacataagtaactcatacagtgctgccaagaattaccataaaagcattggtttgatgtgtctttggatttttttttgcatttgtattccctatgtatacctgtagaaactaatttttaaagatttttaaataggcaaattttgtagcacaattttagacttataaaaatattgaagacaaaaagaaaatactggacattgtagaagtcccataaacccaccacccagtttcctctattgtattaagcggggttttctagaggacagaactaataggatatatgtatgtataaaggggagtttattaaggagtgttgacccacacgatcacaaggtaaagtcccatggtaggccctctgcaagctgaggagcaaggaagccagtccgagtctcaaaacctcaaaagtaggaaaaccaatagtgcagccttcactctatagtcaaaggtccaagagtc

SEQ ID NO: 4143 - DNA, 1177 bp, Homo sapiens
agatatttccatgggccagtgtgatgacttttttttaaatgaggttcagtaccataatgtttatttactggaagataatgcatttataagcattttaaaattctgtaaagtgggttagaaatatttataattttacaggcaggacagcatttgacttttatttaaaaggcggcactacttatgtaaatctgagctgtgggatatttcttgctttaagagagagacagaatctctcactgaaactcatggtcatgattttgtataatatagttcatactgtgtctgtgagtttcttcagttacaaatgggcatttagtatagttatattgactataacatgtaagtaaatagctttctactgaccctaagttatcaaggtggaaaaaaaacatgcaattcagtaattgaaaatgtggtgaaaagctgcagctgtcatcatcaaaacaactcataacatactttaaaatgttcaggtagcagtgagcattgttcatatgagaatggcggctgggtgatctctttgctgaattaatgagttcttaacatgtggacccaactgcctgtgtgagatctgtgtcttaaaacttactggaatggaaatctatgaattattgcaaattgtaatgctggaaacaaaaaataaatccttggttaaagggtttgtaatggtgatttttgacccagaaatctcatttactggaaaattgtgagactttacgttggtgtatttttcttttttttttttttactattacagagtattttgcatgctgtacattttaagtgaaataacattccagttttatttttaagatagaaaattgttatatatatatataatttgatactctattcttacagtttcaaattccttatcccttctttacaaaaaaaactttttttttacctgttatgatttattctatacttttttcttcttccttcccctttcccacttgccatttattacttcatgtcattgccatatgagaaagtaccaaattatatccagtttcctcctagtgatattactctgaaaaatttcacaaagccagacaagaataattactcattttttttcccaagacgaccctcaaagttaatgtgcagcaggtattccaaatggtaattttttttttttaggattccctaataaaaaaaaaaaaaattctgatat

SEQ ID NO: 4144 - DNA, 1169 bp, Homo sapiens
gactctgtctcaaaaaaaaatttattaaatttagagacagtcttgctgtgtcactcaggctggaatgcattagcacaattgtagctcactgtaacctcaaactcttggctcaagtgatccttctgcctcagtcttctgagtagctggaattacaggtatgtgctaccatgcccagctaattatttaaaaaatttcttgtagagagggtgtcttgccatgttgcccaggttggtcctgaacccctgacataaaaaattctcctgcctcagcctcccaaagtgctgggattacaggcgtgagccaccatgccaaccctcatatgtttttcttacaggtaaagacagtagagatgctgctgtgtacataatcttgatctgatgtcctagtctttctgccaggcatggcatgtgtatcttcttatttacattgcttgatgatgacttctgtctctccatgctgagaatttaagagatatcattgcgggagaggctggaagtcttcctgaactggttgggacagaatcatagaatctaaaggccagggagagtttacagcttcctgaggccagtcatgctctgaagtttaaatcttcacctacaaaaaatggtcagccagactctgttagaaccttcatggcctctgtcgttgggtagtgttgacacttgggttttgactggaacccatttgaggttccaagtccaccaccgtggagatactcagaacaactgaattcctggcctccatgccagttccaatttaggttttcatgatgtttctccttctccgttaacaagtcttttaacccgtgtttctcagtcttttgaacaccaaggcagacattgaaaatgatgatatttgcatggcgccctggggtaaaccagaggggagttaaggatgtctgtctggggcttggcgaaaattattacacttctctttatagtgtataattataagaaaataaaatacaaaatattatgaaagatgttaaatattgaatttgtattaaacttccaaataaaatcttttcaaatgtttgaaagcaaaatttagcttgcttccatgaacataacttttaataccaggttttatgcttgaaatggctgcatgaaattcctgatccagacttgttaatgaagatttattcaaattcttgatagccatgatggtca

SEQ ID NO: 4145 - DNA, 1196 bp, Homo sapiens
gctcatggaggcaaagctgaggataaggagtggatgcccgtcaccaagctgggccacttggtcaaggacatgaagatcaagtccctggaggagatctatctcttctccctgcccataaaggaatcagagatcattgacttattgactttttcctgggggcctctctcaaggatgaggttttgaagattatgccggtgcagaagcagtcccctgcctgccagggcaccaggttcaaggcgtttgttgctgtcggggactacaatggccacttctgtctggatgttaagtgctccaaggaggtggccaccgccatccgtggggccaccatcctggccaagctctccattgtccccgtgcgcagagcctactgggggaacaagatcagcaagccccacaccgtcccttgcaaggttacaggccgctgcagctctgtgctgctgcacctcatccctgcacccaggggcactggcatcgtctccacacctgtgtccaagaagctgcttatgatggctggtatcaatgactgctatacctcagcccgaggctgcactgccaccctgggcaacttcgccaaggccacctttgatgccatttctaagacctacagctacctggcccccgacctctggaaggagacctgtatttaccaagtctccctatcaggaattcactgaccacctcctcaagacccacaccagagtctccgtacagcggacccaggctccagctgtggctacaacatagggtttttatacaagaaaagtaaagtgaattaagcctgtaaaaaaaagaattaacttcttcattgagctagtggttgttcaggagcatgttttatttccatctatttgtacagtttccaaagttctttttattatttatttctagttttattttaaaaaaaattgttgaaacctgttttgtgtcccaatttatagtctatcctggagaaggttccatgtgttgatgcaaagaatgtatttctgcaggtgctgtgtaaagtattctgtaaatgtctgttaggtccatttggtttaaagagcagtttaaatccactgtttctttgttgcttttctgtctagatgatctgtccaatgctaagagtaggatattgaagtctccaaatattaataatgtatttgaatccaattgctttatatacctgggtgcattggtgttgggttcatatatattca

SEQ ID NO: 4146 - DNA, 1158 bp, Homo sapiens
caataaagttgaataaacaattagtgtaatattgcttttcttttctttttagtctataccataatctataacagtggtaccagtggccccggtagttaatatcacagtcatgaagactcacagcctattgtagctagcaagagggaatccatgactcctctgggaagaaaggtgatcatcttttctttgacattggtatgttgatcaattcattctgtggaacctgtgggttgtactccagtagagtccttaggatggtctctcctgaaggatgcccaacagtagctaaaagtaaatttaccagaatagagtgaaaaggtaaggaaataaatgaatacataagatatgtgtttcgcagagctggaccaaaagaaacctacttagatctgaggctcattttctcttcattgtgtcagaatagtgtgcctgcaatttaattttgttttacaatgctcacaaccaagcttggcttgcaggatgtattgccctgaaacatctgtggtctcttcagcttttcctgaatcttccgttattgcctagtgacacaggtttgaagagaagggcaagaagctagagtggatgaagggctaaacaaacttaccaataatgggatgacactgaattcactggtctactacatgtatttcaaagggatgtggaaacttcatttttatctaaggtagtgtgtttccaccagggctctgagatcagaaacaagacatggaaactttaagaagtattattcaaagttcattctcttagatagttttttcagttgacttttgggacatcgttctcttactactttccctccttgcctcattgctgctccctgtcaatattttctgctagatcatcttcttcattatgacctctaaatgttgaagtcccgaggctctgtccctggaccctttctcttgtttaaatgtgttcacttcctacattatgttttaattaccatctgtatatggaagattccccaggttctatttattccttgaatctttcccttggacatcagactcatattcaaatgtctacttaaatatgatatatccaaacttgatttcttgatctgccaaatctgtttctaccatgatgttctctttcaagtaaacagtaacgtctagttacttaggtgagaaattttgggataat

SEQ ID NO: 4147 - DNA, 1249 bp, Homo sapiens
caaatggctttttatacatttttactactaatttgtacataatgtgatttctgtggatgctgaatggatttttcagcaggtgatctcattacaagataatctcattacaaatccctgttagaatttctcaccgtggtatccagattgaaatgaaattcttcacagctgtagaaaagttcttccgaaatttgttggtatcataagctctaaactgctctactctatggactttcaagaaaactaccaacttttgcctttccgtctggcggcagccatcaggtaagccaagatgggtgcatacaagtatatccaggagctatggagaaagaagcagtctgatgtcacgcgctttcttctgagggtccgctgctggcagtaccgccagctctctgctcttcacagggctccccgccccacccggcctgataaagcgcgccaactgggctacaaggccaagcaaggttacgttatacataggatttgtgttagccgtggtggccgaaaacgcccagttcctaagggtgcaacttacggcaagcctgtccatcatggtgttaaccagctaaaattttgctcgaagccttcagtccgttgcggaggagcgagctggacgccactgtggggctctgggagtcctgaattcttactgggttggtgaagattccacatacaaattttttgaggttatcctcattgatccattccataaagctatcagaagaaatcctgacaccccatggatcaccaaaccagtccacaagcacagggagatgcgtgggctgacatctgcaggccgaaagagccgtggccttggaaagggccataagttccaccacactatttgtggttctcgccgggcagcttggagaaggcgcaatactctccagctccaccgttaccgctaatacaagtaaagtttgtaaaattcatacctaataaacaatttaggacagtcatgtctgcttacaggtgttatttgtctgttaaaactagtctgcagatgtttcttgaatgctttgtcaaattaagaaagttaaagtgcaataatgtttgaagacaataagtggtggtgtatcttgtttctaataagataaacttttttatctttgctttatcttattagggagttgtatgttagtgtataaaacatactgcgtggtataataggcttaataaattcttaaaagaagagaaaaaaaagaaaactaccaacttttctcagcaactatcctatgaaaattttgtgaca

SEQ ID NO: 4148 - DNA, 1148 bp, Homo sapiens
ttaggagtgtaattgctggatcacatggtaagactttgtttagctttgtaagaagctgtcaaacagtttactaaagtgtctgaatcattttgcattctcacaacagtgagtgagaattgttgttgctctttattctcaccaacatgtggtattgtcagtgttttggattttagccattctatttttaattgatacataataattatacatatttataggaaatgtaatgctgtttcagtacatacagtgtgatatacagtgatcagatcagggcaattagcgtatccattatctcagacaccatttctttgttttgggaacattcagtatcctcttttctagctatttgaaaatatatattattgttaactatcgttatctgtaactatagttatagatatctatatctatagatatccattgttataggtaactattgttatctatagttaacaatagataacagtagttttatagcactgtaagataactataaaaccccagaacttgttcttcctatctagctgtaattttgttttttaacaaatctctcttatcccctcctccctctaccttttccatcctgtaactattctgctttttatttctataagatcaactttttagcttctacatgtgagaacatgcagtgtttaatttaacatgcagtgtttaatttcctgttcctttttgcgtttttttttttttttttttttttactcattaattaggtttactgtttactatgggcacagtttgtggcaccccaaaagaatccaatagtaacatcaaagatcgctgattacggatcacaataacagatataataaaaaagaaaaactttgaaataatgcaagaattatatgaaaattgtcatagagacatgaagtgagcacatgctataggaaatatggcactgatacatgtgttccacatagagtttccacaaattcttttttttttcatttttatattgcgttatttgctttcttattgagtatattttgaagacaagtcctttaccagctgtgcattttccaagtattttctgccagtctgtggcttatctttttaaccttttttttttttttttttttttgagactggatctcagttctgtcacccaggcttttcatggagaaggagtg

SEQ ID NO: 4149 - DNA, 1159 bp, Homo sapiens
tactcactcactattggagtatgcagatccttcccagttcagcttctgttcagcatttttttgtatgagtacttgttggttattttggaattttcaggacattgagatattcctctgcttccttctgcacagatactgataattcatatggtcttgtagttgtcagtgacttcttcctacccacttgtattttgggcctcatggagatactccatcacctggttttattgtagctattgtaaatgggttttggtttgaccttcctagttgctctgtatgtttttatggagagagttgaggaaattcgtaaattacaccaatgccggtaccatctttcaagaatcctcataattatgtttcttaatcttgacattgacattttttccgctttcctcactagacactctaaggttagttatatgttaatttattaaactaaaatacaataagttatataggtatagatgtacagctgtttatatatactgtgtactaaaactaacgtgtctctcaaatcttgatatcatgtattttgatacctaatcaattccctaattttggaaatgtggctattttgttaaaaacttcccctaccagggtggagatatctaatgaatcttaatagttcctgtaatgtatgtttgtatatgtacacacacacacacacacacacacacacacacacacacacacacacacacattccctctctctctctctctctgtgtctcagctttggcacccaaagggtggctaaggttttcagttgaataaacatatttctttctaaaaagtttatttctaaaagtcattattgaggttggggcaattatcttgaagaggatcagttccaaagttattttctatttagagtaaattggaagattaagctgtaaatgtttgctggtagcttatgcattcatatatatctttttgtatttatggaagaaaaggtattgaagccctattttcggggcattttctgcatcttacatttaataaatttttctaataactaacaatttttgtatgcttacaaaataatagtcgtgtacgttaatggaagaagaaatcaaaggtttctgtgtctttctcttttatggttacttgtcagcaattgccatttttatatgctttggagtcataccttataaaacct

SEQ ID NO: 4150 - DNA, 1200 bp, Homo sapiens
agcagcaatttgtaaagtgcttaccatgtgtttgctgggcatgtacatgcatcatttcaaaactatgaggtagatactaatatttttcccaattttaatacagggaaattttggcttatgtagggcaaacaacttgccctagcaacgcatagctagcaagtagcaaactcaggatctgacccacagtgaagttacaaagccctttccactacacccacctgcacagttgaaagttccaagcagaaaactggtaaaatatgataatggtagttttattttattgtggtcagagaagatacttgatataatttcaattttcttgaaatttttaagatgtattttgtggcctaacacattttctatccttgagattgatccatgtgctgagaagaagaatgtgcattctgccaccactggaagaaatgttctgtaaatatgtattagatccatttggtctatagtgcagattaaatctgatgttcctttcttgagtttctgtctggatgattttggtccaatactaaaagtggagtggtgaattctccagctattattatatcagagtctttctttctctcgctctctctctctctctctctctttagctctaacaatatttgctttatgtatctcggtgctctagtgttgggtatatatatatatatatatatatatatatatatatatatatatttacaattgttatatcctcttgctgaatcgactcctttatcattatataatgaccttctttgtctcattttatagtttttgtcttgaaatctattttatctaagtatagctactcctgctcttttctgggttccattggcatggtatatcttttctgatccctttattttctgtctatgtgtgtctttataggcaaagtgtatcttgtagcaacagattgttagggtcttatttttttgttttgttttgtttgtttgtttttaaatccattcagccagtctatgtcttttggttggagagtttagttcatttacattcaatgttattactgagaagtaaggacttatccctgccattttgttatttgttttctggtcttctctgtcttctttccttcctatttgtcttcctttccgtgaagatgattttcctggtggtatgttttaatttcttgcttttattttttgtgtctttactgtatgcttttaaatttgaggttaccatgag

SEQ ID NO: 4151 - DNA, 1186 bp, Homo sapiens
atcttttttctcaccattaaaatgagaattgtgtttagaagtttgttatgaggactaactatttatgtaaaattctagatacaatgcatttgtccaaccccaagttcacaaaagtctggtcatcccctttttgtaattataatttgactctcatgtgcttttattcaaatgagagagaaacataacttttcatcatagcaacaaacttaaaataatgtcttttacttattattgcttggaatcatcaattatttatgcttttttcctagtcaaagtaaacaagtatggagatacttgggatgagtgaaaaattacatcattggacatgaaggagtttcaacatccagcttcatctaggtggtcatgattacctgcatgctttgagctcagcagcagtcttcataaacacatttaaaacaagatcctgggtttttgtggtttgacttctatggtgttttaaaaaaacacagatttttagtgttaatattgtgtaaatgtactcaccttagggattcatttgaatgatggtattataccatgattgtatacagtttgtgaaattgttgcaagggcaaagataactcttaaaaaaccgtcgagattacaatgctctagaatcagcatataagaaaataaatgatatctgcatgttgaattggggtggatggggggagcaagcataatttttaagtgtgaagctttgcatcaagaaattattaaaaagctttttttctccagtattttctgtattatcttaatgtttatggcaaataaaatgtaaaggaacatgcaacagccctcatcttccttgattttatggttttattgtttgtaatttattgatttatttttaagctagttataatcatgtaggtataggaaataaagtcatctataatatttctataatatggctataatatggctataaatctataatatggctggaggcagtgggcagtggttcatgcctgtaatcccagcactttgggaggccgaagtgggaggattgcatgagtccaggagtttgagaccagcctgggcaacaaagcgagaccctgtctttacaaaaaaataaaaattagctggcgatggtgtcgtgtgcctgtagtcctagttacttaagaggctgagttgggaggatcagttgaacccagtggttctgggttgcagtgagctgtggtca

SEQ ID NO: 4152 - DNA, 1199 bp, Homo sapiens
ccccctcgtgcttgttggtgcccaaagtttgaagggggctgaggtggcagggggctggtgtgtcagcattgccccaagcatgtgcacacctggtcaggtcacgacagtgcctgggctcagcctcaactttactctgataacggacaaagcaccaggagtagggagatgccaggaagtgggagcagtcacttttgaggctgtgggggcagggggccttcccagtccttgagagtgcagggatgcctgggtccgcagccatggctgggcggctgcagctgttcctggaagggcgagactcctgcccccacagctcagaatggggtggggctcctgcctgttccaagctccgtggagtgtgcagcccctgctgctcctcctccactgcagcccacctcatggcagtgattgctccagacgggctgctgctgccatcagtatgacatgctggtttattgcctgttaccttgtaagtgcccagtcaatgtcagttagtgttagtaatttcttggagtagtcaacttcattaacatttgccatctggttatagcatcacttgtgattccggtacccaacagagtatactttaaaaactgagcaacataaaatctatgatgtttagaaatctgaaatagttgagtcattgtagtacttctttgagtctcttggcctaacagtagtctgggcaatgctactgtgtgtggaagagccaaacctaagtcacagagatcgggtatcttcctgctctgcctcctctcaggcctttcttttgtgtgtcacaatcttcctcctaccaaaaggaaaaagagagaatgaattagtggctaatcttggagaaatagcacaaaataggagtgaattttaaagagcccaatcaggctgggtgtggtggctcacgcctgtaatcctaggactttgggaggctgagaccagtggatcacgaggtcaggagttcaagaccagcctgggcaacatggtgaaaccccgtctctactaaaaatacaaaaattagctgggcatggtggtgcatgcctataatctcagctactcgggaggctgaggcaggagaattgcttgaatctggacccggggggccgaggttgcagtgagctgagctcatgccactgcactgtagcctaggctacagagggagactccatctcaaaaaaaaaaaaaaaaaaaaaagtcaatcagagaggacc

SEQ ID NO: 4153 - DNA, 1204 bp, Homo sapiens
aagaggaggaagtttttgtggacaatgaaaagttattttcgtacctttctaccaaaaccaagtttcaggaaaataactctatgttgtttattttcagtgacacttatgtaaggccctgtgagttgtatttatcctgtatccggcactgctaagcttttcaaggtatctttccaatcctgctgatgtggcagtcaatggctgcagggctggcaaacctccccttagccagtcagcacggcattgttccttatcaggaataacaaaggtactacatctttccagccatcagcacgttgtacaacttaactttttaacatagtccgtctgtttactgaggcactggcgagtcccagggctgatacagaaccttccctagagggaataccagagttagctgggtatagaggtggctcaaaggaagtgtccgtgggcagggggaggaatgaacaaaatggcgctgtttctttggctcagactcctagaatgcttgacaagacagaatttttttggaagaacctcatctcactatagttacttttttcacttttgttatatatgtatttattagagcatttgaatattggtacctttaaaagggtcatttggtgttttgctgttgagctggtttttgagtcatagatcttggcttcctttagaagccacttaacttccatacactataataaactgtgaacatatttttgttacctaatgcatccactgatgaacatgcaaactttgggcataatgtgaactaaaattgaaatggaaaatgttagtggccattttgcaacaatgaagaggatagcactttatctagatgaaaactggatttcttatctttgaaatatcttgaactgtttattgctcagaacttaagtaagcatgccaacatttcgtttgtttatgcttgaagtgaaatgttttacttttcactggagaagacaaaacagggtgatcttcatgttattgttttatacaagtgatggaaatgtaccttgccttgtttagaggcaatttcacatttataaatatttttttttcctccatgaaacttacgcagtaatcactacctggaaggtgagttttgatctctttttaaggagaggcactttccaactgaaggtgattgatgtagggaaatgtttgtactatatagaatccatatatttgactgcaagttacaaagttttaagaacatgat

SEQ ID NO: 4154 - DNA, 1202 bp, Homo sapiens
ctctctaaaaaagatgctctggaaacaaaaaaacacccttcactttaactttgtaattagtctcaagaatatatgtggaaggaaatttgaagctgtattttcattacgtgttttgtgctttagaaaattccaaaaatagcctggctgtggtggctcatgcctgtaatcccagcactttgggaggccgaggcaggcagatcacctgaggtcaggagttggagaccagcctgaccaacatggagaaaccccgtctctactaaaaatacaaaaattagctgggcctggtggtgcatgcctgtaatcccagctactcgggaggctgaggcaggagaatggcttgaacccgggaggcggaggttgcagtgagctgagattgtgccattgcactccagcctaggcaacaacagcaaaactccttctcaaaaaaaaaaaaaaaaaaaaaaaagaaaagaaaattccacaacagataccctggataaaagctactttttctctttgctactttttctctttttaaacacacacacacacacacacacacactctctctctctctctctctctctctctctctctctctctctctctctctctctctcaggctactttttctcttttaaaacacacactgtctcactctcactctctgttagtgtaagaaaaactagattcctgctcttgtagttaatgtaactgacaaatgtggagtttgaggcattgcttaaatgtttgtaaagagcaagtaaataatgattaagatgtttttcgtaagttattatatttgggctgggcgctgtggcacattgcctgtaatcctggcactttgggaagctgaggtgggtggatcacttgagctcaggagtttgagaccagcataggcaacatagcaaaaccccaactctaccaaaaatacaaaaattaattgggcatggttgtgtgcacctgtggccccagctacctgggaggctgaggtgggtggatcactggacaggtgaggctgcagtgagctgtgatcgtgccactgcattccagcctgggtaatggagcccaacctggtctctaaataaataaataaatacataaataacagttattatatttgaagttgtggccttatcatatgctagttactattaatttgtataatacagtgttttcccgattttaacagtattcttcaagccaaatctgtaagtgttttt

SEQ ID NO: 4155 - DNA, 1173 bp, Homo sapiens
atgcaaattgtaaaacatcgcagggaaacgtcgataataaggcataggcagttaatgaaattgtgacaagaataaaagaatatttcgacgtgatgttaggcactcagctgctctacaaatttgagaggcccctgtatgcagaaatcctcttggctcaccctgatgctcctgtgtcccaggtttaaggggcacacacctactgaggttatttgtaagaataggagaaatgttggcctatatatcccttgatgagaagagccttgcgttattgttgggccatttgcatgatttcctaaaatatctggcaaagaattctgcatctctttttactggcggtgattacaaagtagcttctgctaagtaccaccacaaagccctgtgctggtctacagaccattcactgttatttccctgagatctggaaacactttttgttcttagtctttttcttgtaaaatggatattctttaacattgttaatgtaaaacagggcttatgtttcagtttgttttctgttctgttttaaacagaaaataaaaggagtgtaagctccttttctcatttcaaagttgctaccagggtatgcagtaattagaacaaagaagaaatattcagtggaacattttattgcctagttgacaacattgcttgaatgctggtggttctacccctttgacactacacaattttctaatatgtgttaatgctacatgacaaaatgccctgactcctagtgccaaacattcaatttgatatatatacccaaaaacccatgcatttgttctcttttttttaatgatgcttgaagtaaaacagcccatcctctgcaaatccgtctatgttgttccttaggcattctgtctttgcgcaaattgttgaagggtggtcgtttgtttcatggtttttgcatttgagtctaatgcatgttgtaacgtgatagaggcaatgcattattgtgtaagccacagttttctgaaaaagttgatattttaggaattacatttcagatcttaaataaaatttgtttctaaatttcaaagcaaaaaagaaaaaagacagtaagaaagtgtctttggaggaaagacctaaaggtgaggaagtaagacgtgtgagcttgtaggggaagagttctcaacagaggggaaggctagagagggccagaccagcaaggaa

SEQ ID NO: 4156 - DNA, 1107 bp, Homo sapiens
tgacagcagatggaggaggtgtggtatccatgattcgagactgtctctcctgcactcctcaatgcctctttcagtgatacgaagttaaaagcaggtattatgattcctcacctaatttttggtttttgggatggtgcttttccatgggcaggtagttattaaaatttggtgttccagtaaaagggatgaaaggtgtaggattctattccaccatcttgctctgcccctaacaataatttttgttataaagtaagatattattatcttagagataacacaaaattaggacagttttatctccataaaagcaaggatgagtctgcgccgggtgtaccttatcgccatgcctcagaaaattgaggaaatcaagggttttctgcttacagcctggtgaaaggatgccaaatctgtcaagatcaagaaaagtaaggacaatatgaagtttaaagttccatgcaacagattcctttataccctgatcatcactgacaaagagaaggcagagaaactgaactagtccctgccccctggtttggcagtgaaggagctgaaatgaaccagacacactgatctaaactgtattaaaatattaaaaatcctttaaaacaagaaagcaaggatgattcaacatcagaaaatgagccaatgtaactcaccacatgaatacactaaaggagaaaaactataggatgatcgtaatagaaccagaaaaagcattggataaaattcaataacttcatgattaaaaattaaaactcttagaaaatcaggtctgaaagagaatgttctaatttataaaggtcatgtgacaaatacctacaataaacattatatttgctggaaagattgtagaattccatctaagatagaaaacccccaaaccagtaacctgaggctaaaattgatggatttaattacatcaaaataagcttttctgttttcatgaaaatagtcatggataaaagtaacagagaactgatgaggagtttgggaattccagtagaaatctagtaaaaggaaaaaaacatgattcatgagaaaaagaaactaaaatgataatttttaaatgatatctaacttatgacaagatgctcagactcgttgggg

SEQ ID NO: 4157 - DNA, 1051 bp, Homo sapiens
aaaaaaaggacatgaaatttttaaatatttcacttgtgttatcagttttatgtaatttaagtgggtttaacagtctttatattattttgcctcaactgttaaatcatatgtgtttatttctacatcttctcttttatagctttatttagttttatagatttaaccactttttttttatactttatgttctgggatacatgtgcagaacgtgcaggtttgttacacaggtatacatgtgccatggtgatttgttgcactcatcaacccgtcatctaggttttaagccctgcatgcactaggtattggtcctaatgctctccctccccttgcccctgacccctcaataatgtcctttatatcagtgtttttcccttcggtctaggtcagatattgcatttagttatttattatctttttagtcttttaatctgaaatatatccatagcctttttttaaaatgttttctgacatcaacctttttgggagaattacagtgtatccctcctccctccaccccaggaatgggctgttccccattttttgtttgtctgatgtttcctgatggttagattgaggtaggcattcctgactagaaaactgcataggtgatactttgtctctccaagaatgtctcatctggaagcacatggtgtccatttattcctcattggtgacattaattttggtgacccagtcaatatttcttttctgtgttgtcttcccttgcaactactatctaatctgtagggatatacttaaagacagtacaaataccctcttcctcatcaaaatttctccaaagattttgcatcaattgatgattcttgcataattagatctttcattgatgcttgcaaaatgatgcttttaattctaatacttcttgcatattcaccagtgagccttggtattctactgccagcaagagctctccttcctttcccatttgtttgtctttttactagcagtacaaacttatggattccttttttcaatggtttataattaattatttaactattttgctgcttaaattatccgatgttaggcc

SEQ ID NO: 4158 - DNA, 1245 bp, Homo sapiens
atagaaggagttgaattggagataagtagagaaaacttttttgagttttactgtaatgtggaacagagaagtggaatagaagccatagaagggaaacaagggtcaagagttatttttttaaagatggaaaacaacatgtttatttgttcccatttgctagtggttgcttaagtggagaaaggaaattaatgatgtagaagaattgggtagaatttctggagctgtgcccttgaatggataataatggatgaggcctggtgcacaaagttggaggttggccttagacaaggaaacagacgtgccatccatagtgataggagggaaggcagaatactgtccatgggcccagctacaggcagattagtataagtagtggtgagggcttttggctctatcatcagctgagagtgaggatggaggaggccctgttggggatttgaaacaagagggtgaggtacaaaatagttttctgggagagtggaagatgaatggtgtggaagggtgttaggattgcttaactgcagtaagggctctgctgcttgaagttagtgactgtgagttgagaatgtgacctgtcctctacggccataccaccgtgaatgcgcccgatctcgtctgatctcggaagctaagcagggtcgggcctggttagtacttggatgggagaatgtgacctgtcagtctagttgagtgtgtttttctagccatgttcaaaagcacttgtacagttgtggaagaggtagggattgggtttggctaggtttagtgtttagacaggtaagccagatggaatgagaagagaggctagggaggtgaaggtgtgtgcaaggacatgattgtgatgatagactatggatctaagctggctaagaaatttgaggacaagaaaatagtgaacaatggtgaaagggtcaatggcatgtaggtccaatgggatcaaggaattgttagatggagagagtgggagggaaaaaaggaagggatagagaacaggatggaatgattgctgtcgttaataatttcagagaagtagcattttcatttatggtctggtttttagttggcaactgttttaaagaattatctctttggtgtatccctctcctgaaattgttaatattctgtaaatcaacacttaaatttactaaaggaaacccagaatgaaaaaaaaattggtatgtatttttagttttccaaaaagtttttaaaactataaatgctttgcttataggtttgatttttgct

SEQ ID NO: 4159 - DNA, 2242 bp, Homo sapiens
atttagctgaaggaaaatcaagcaagatgaaaaggtaattttaaattagagaacacaaataaaatgtattagtgaataaatgcttctctagatccatattaataaacatgagcatctaacccctcctttcttaggctagacaccaagatatttcagccagcctttatcattcctcttactttatcctttttccttaagtattggtggtcactactattgagtttcttccttaacactgattaaatgatcttaactccctcagctaaaactggcattactgactcccagctatatttctccagacttgcatttttttttttttttttgagacagggtctcactgtcgcccaggctggagtgcagtggcgtgatctcagttcactgctgctttccctcctgggctcaagcagttctcccacctcagcctctcgactaacagggactataatcttgcagcaccatgccgagctaattttattttttgtagagatgagctctcactatgtcacccaggttcgtctcaaactcctgaaccctagtaattctcctatctcagcctcccaaagtgctagggttacagacatgagccactgtgcctgtctagacttgtactttcaactgtccatttctccctgtctgtcccatgggcactcatgaaaaaacagaatgctcccaactttattcatcttccaagcctgtagctcttggtatactcactgttgcaagtcagaagcttgatttcatcattgatgtttttctcacgtttcacatctcactcatcaccaagtcatgttggtgttaatttctgattaacccttgaatttaccgtcttctcatcctctgtacaaaagcctcaagtgagggtcaaattcaacattatcctgatctagacagcccccattctcaatccacccttttccaagttgattgcccaaggacttctaacaataaactctcttttgcaccacagacttctttgaaaatatacatgctgttgaccctctctgtagaaaaccgcacacataaaacttaccaacagatttcattggttcttgggttctcccgaagcctatccatggtttatagattaagaattgatgaggtagctgggcacagtggctcacacctacgatcacagcacttcgggaggctgaagcaagcagatcacttgaggtcaggagtttgagaccagcctggccaacatggtgaaaccctgtctctactaaaaatacaaaaagtagccagccgtgatgacaggcacctgtaatcccagctactcgggaggctgaggcatgagaattgcttgaacccgggaggcggaggttgcagtgagcctagatcatgccactgcactccaacctgggcagcagagcaagactctgtctcaaaaggggaaaaaaaaaattgctgatgtgacccatgaagggaactcattttcctcgtaattttggactgccacacattggtacctttagttctctgaaggcccacgtttttatcattaagacctatttgttagctagtagagctttatgttcgctgtccatgaaaccttctgtaaccacagtgactacaagtagttctttctctattgaattattaggtccagaatagaagatgtcattgtacactttatttccctcacactgtgttatgctctgatgtgctatgcttagctatctgtcagagattagtaaattataaaactcatgtgtactacttaagtttatatcttatgctagtttataagaacaattaaaaggacttagaagattaactttggtttcatggtctctgaagtcactgactgctatttcagcttgtttacccttacctagcattaagactccatctacttctgtgcagtatatgaaaatttttaaactttcatttagactggtggataggactgaccattacaaattgtcgttatcaattttttttcctttttttttttaagagccaagttctcactgtctcccaggctggagtgcagtggcatgattatggctccctgcagccttgaactcctggactcaagctgcagcctctcgagtagctgggtgcatgtgctaccacacccaattatgaatttcatcattagtttcttagtagagtccacatgtcctcagtagtaagttcatcagtgctaaatatttgaaggtatttctactgttttgtaaaagtaacttaagcctacctggtctgctatcttttgagtatttatactttctacgggctt

SEQ ID NO: 4160 - DNA, 1104 bp, Homo sapiens
gaataggtaaagagaaaagatacctctacagaaatcatcaaattataaagaaagacagaaagagagaaagacggaaacaaaaggtgataaaatgccagaaaaaaattcacaaaatgacaaccataaatttttacctatcattaattatgttgaatgtaagtatactaaattttccaatcaaaagatgtagaatggctgaatggataaataaacaagagctaatatgctgtctatggtgtttgcaagagattgtttttcagctttaaagtcatatattgaccgaaagtgaagaaatggaaaaaatattccataaaaatggaagccaaaggagagcagcagtagctacacttttattagaaaaaatagactttaagccaaaagctgtaaaaatatgcattaagctaaagagcttctgcacagcatagaaaacaattaacaaagtgaagaggcaaccaacagaatgggataaaatatttgcagttagtaactaaaataatatacaaagaactgaaacatctcagtagcaaaaatagaaacaaaaacaaaaacaatctgatttaaaaatgggcaaaatatctgaacaaatatttcttaaagtaagacatacaaatggccaagaggtatatgaaaaaatgtttaccatcactaaccaccaaggaaatgcaaatcaaaacctcaatgagacatcatcccaccccagtcagaatgtctattgttaaacaagacaaaaaataacaaactctgatgaggatgtgaagaaaggaaaatgtttgcctattggtggaaatataaagtagtacagccattagaaaaaacagtattgaggttcctcaaacagctaaaaatagaactagcatatcatctagcaatctcacttctaggtatgtgtattgtatgtattatagtcaattctaggtatatgtattacagtcaattctcacattgctatgaagaaataccagatagtggctcatgcctgtaatcccagcacttagggaggccgaggagggcagatcacgaggtaagtagttcgagaccagcatggccagtatggtgaaaccccgtctctactaaaaatacaaaaattagccaggcgtggtggtg

SEQ ID NO: 4161 - DNA, 1175 bp, Homo sapiens
atgaacctcaacctttccatgaattccaaatgcatcacaaatattttgtttaaattgcaataattttgtagtatagcatgtggtgaatttcatattcaagagattgcaatgcaaaaagacaagtcacatgaacatagaattccaggaagcaatagaggctgtaaagacattaagtaacctggcaatgaacaaaaaatcaggaaaggaactgtcccaggatctgaaatcagaattttacaatggtgctatcaagatctcccaggtctgaaaggactggatgatatctaggttaagtatcatatgtgaatgaggtctgtttgcatttttatgttttttatttcatttgtctagatggtaatcaatctcctaattataattatgtctttattgaagtgatttcagagaatttctagacacttttcatttcaataagagatatttcatgaagcttcaaaaacattagttatgcagaatttcactttgttccattaccattaagaaatattcacactgttaagttccaaatatccagcacctgccttcatgagcaggacataacaaaaagatatttcttgtcctgaaaacacagggctgtgctaaatggaactaatatgagaacaaatttgaggagcttcccaagggcaagtcagggaaattaaaacactggatagttagttttcagcatcatccaggctgtataagaagcattcagagataaaaaataaaatgataaattgtaagttagatactaggtaaaacctatgacatctaaaacctatgatgagataagagcaaattagaaagaggagagttaattcagtcaggtgcttctccagtgatagaattgaaaaagctatccaagtattttccaccttcgtttatcccctaacacattcatcaacacagatcaataaggatttactagaatgtgatccacattaaatactagttgaaatgatgtgtttatatgtcctgtatctgagaaaatgttgaaaagtattatttgggtttaaatcatgtgaaatccaaaatgttttcattgtattgtaccatccttctttttctttctagaacaaagctgtagaaattgttaatttaagtaacactattttaaaaataatgtactccgctttttaccaaattaaaagaagtgtgagaactcatctctaacctca

SEQ ID NO: 4162 - DNA, 1195 bp, Homo sapiens
ctgagtgtcgaattttataaccatgaaatataatgtttttcctcccacattcaaatgtagggcttacgttttcatttatcattcatggatccatcttttaaaactattcttttgtcaaaaatcaaagggtaataagccattattgttaaacacagtcgacatatgctgcaatctgctgatattctaaagctttgaatatttgaaatggttattgttaatgctctgtagcatctgggctgctcagactgctactatgaaattttgtgttaaaagaagtagggactgttttaaactttttattttggatcaattgttgacttagataaaaattgcaaaaatagtacaaagaattcctgtatactccttaattatctgcttctggtattactatttacataactgtagtccacttatgaaaatctgaaaatttaacattcatacagttctattaactgaattgcagatcttgttcaaatttcaccagcgtttccattaatgtaggagttttttaaaatgtgaagtaattcatagctgtaactatgtaaagttggtaagttttgctattaattgactttttaaaaagtaatgacagaattttgacaagcctctgatgctatgagaatgatgatgtccttttcttcttattctgaagtacatttttgaatgttaccatttgagaaaaggaatatcattactattttaggaaatcattaaatgttactgatactaacattttatttttatcccatttcagtgatctcagtagcatgatacattccacatttccatgtggttgtggatatagagtcaagttccatattctaatttgatgtttagatctgtaatactatgaaagttatagaactcatcagtgtcatcaatcgcaataaccactatttatatagtagagagtaggaagtgctaaaatgtaaatgttctagattaaaactagactgagaggacctttaagaagagcaaaccatgacagatgaaaatttggattatttgtaaaagagcttccttagtccttaatatgtttaacaacccattatgtggagaaatttgtctttatgtctgaacttacactgcagcataaattaaatccctcttattttgtcaacagtagttaataagtgcaatggcaccgtctgggctcactgcaaactctacctcccaggttcaagtgattctcctg

SEQ ID NO: 4163 - DNA, 1222 bp, Homo sapiens
gaaattgaaccatataaacatgtagagttaaaatatcttgttttaaaaatataccgcatacaagaagaatagtaaaagacatacaaaggtagggttttcatcccaaagtatttgttgctgaaaagatcttatgttttgtgtgagatctatgaagtaaatttccagataaaactgttctaaataaatgtaaaattgattaaaatgctacaaattagcattgttgattttcttctactccaatcatgaatcttatgaaactaaaaaaattaaataattggtttagaaagcacttcatcattcaaatacttatttattaaaaagatttgttttaaattgacacataattgtgcacatttatggggtacagtgtggcatttttatacacctatacgttgtgtaatgatcaaatcagggaattagcatatacagcacttcagaaattaatttctttatggtaagaacattcaaaatactctcttccatctattctgaaatatataacatgttattgtcaactatagtcaccgtcctgtgcaatagaacaacaaagcttaaaggataagtccttcccatctaattgtaactttttacttgttgacacatctctcctcattcctcactcctccccatcttccagcctctggtagtcactgttctactcttacctctatgaaatcaacattttttgattccacatatgaatgagatcatgagatattcttctgtctctggcttatttcacttaacataatgtcctccaggttcatccatattgtcacaaatgacagaattatattcttttttatgtttaaatttaacatgacacctcattaaaattagtaattagtaaaggaatatatatgttaatacttttgtttatattttggaaaaaatgtatcaaatggtaggagatcataattcctgttaataccataaaatttttaattgcccaattttttttttcaaaacgctttaataaaatccaaagtcaaataaatacttattatatgataggctcaataaagttcccccaaagaagtctatattctaattctcagaatgaatatgtcaccttaacagtcaaaagagatttctcagttgtgattaagtatattgagatgggaggttattctggattatctgagtagttccaatctaattacaaatgtccttataagaggaagtcaagagagtcaatgttgggaaggggatatatgacaat

SEQ ID NO: 4164 - DNA, 1174 bp, Homo sapiens
tgggaggctgggacaggaggcagctacttgggaggcttgaactcaggaggcagaggttgcagtgagccgagatcatgccattgcactccagcctgggcgacaagagcaaaacaacgcctcaaaaaaaaaaaaaaaagtctctggaaagtgagaatatagcaaggtgaaatagagatgttcattatttttactttgtacactttttatttatttagtgtaaatgtgttataatcctgttttagtttattaattttaaaacaaagaagattataacttgggaaattatgcttatttacttattcttgtttcttctttcttgtttctcatgactttcttaccaattaatatatattcctaacttcgaattacccatggctatcaaatttgttctagtgatgatgaggtattaggtctttatctgttttaatatttttggagtgttgaccatttgacatattcttgtagaatgtacttgaaaaaatcagcatgtagtttcagagaagaaaaatacttgaaactaagcaatagtttgctacccagcatactgggagcaaaattccttatacagttagtaagaagatgaaaatcactttgaaaagcctggattttatttctgtcaattttcacagagcttagtagctgatgagtattcactgtgaactaagtgctaaaccagacacaaaggaaaatttgcacttgcctctgagaacttacaatgtggttggggatttacaagacacacgcaactaagtccactttagaaactcacagagaaaataatagggcaaaccttagacctaacgacccaaatagataattaaggtaagcatgatttttcaaagtaagtttcctcaggaggagctttctgaagacatgcgtttaaagtcaagttttcaagaaaaagattaattcgcaggaaaaattggggagtgtattccagatgaagatgaagtttaacaactatttcttgaatcgatgattacaattacatgcaaacatgatcgttgaaagaaagcaataaaagtatttatgtgagatctctttcctttgtattccatttaaaaattatagttgaaatctggtgaaacagctgccaacattgctagagagctggctgaacagacaagaaatcacttgaatgctggggacatcacctactctgtccgggccatgg

SEQ ID NO: 4165 - DNA, 1599 bp, Homo sapiens
caggcctgtaatcccagcactttgggaggccgaggcaggtggatcacgaggtcaggatatagagaccatcctcgctaacacggtgaaaccccgtctctactaaaaacacaaaaaattagctgggcgtggtggcaggtgcctgtggtcccagctacttgggaggcggaggcaggagaatggcgtgaacccgggaggcagagcttgcaatgagctgagattgcgccactgcactccagcctgggtgaccgagccagactccgtctcaaaaaaaaaaaaaaaaaaaaaaaaagaagctctttcccatcttgcaagatggcgggtgaaaaagtttagaagccagatactaaagagaagaaacccgaagccaagaagactgatgctggtggcaaggtgaaaaagggtaacctcaaagctaaaaagcccaagaaggggaagccccgttgcagccgcaaccctgtccttgtcagaggaattggcaggtattcccgatctgccatgtattccagaaaggccatgtacaagaggaagtactcagccgctaaatccaaggttgaaaagaaaaagaaggagaaggttcttgcaactgttacaaaaccagttggtggtgacaagaacggcggtacccgggtggttaaacttcgcaaaatgcctagatattatcctactgaagatgtgcctcgaaagctgttgagccacggcaaaaaaaaacccttcagtcagcacgtgagaaaactgcgagccagcattacccccgggaccattctgatcatcctcactggacgccacaggggcaagagggtggttttcctgaagcagctggctagtggcttattacttgtgactggacctctggtcctcaatcgagttcctctatgaagaacacaccagaaatttgtcattgccacctcaaccaaaatcgatatcagcaatgtaaaaatcccaaaacatcttactgatgcttacttcaagaagaagcagctgcggaagcccagacaccaggaaggtgagatcttcgacacagaaaaagggaaatatgagattacggagcagcgcaagattgatcagaaagctgtggactcacaaattttatcaaaaatcaaagctattcctcagctccagggctagttgcgatctgtgtttgccctgacgaatggaatttatcctcacaaattggtgttctaaatgtcttaagaacctaattaaatagctgactacaaaaaaaaaataataataataaaaaataaaaaaataaaaaaatactcaaataactcaaatacatgtattcatactcttgaggctctacattaagaaaataattataaatgtagttaaatatttgtgtaaataaaaatttattaaaatgtcattccacataatgtagtctaaatgtccaatactggaaaaattattaaataaattgccagaataaatatgtctctctctatatattgctgtatatatatatacatatatatatatacacatatatatatacacatatatatacacatatatatatacacatatatatacatatatatacatatatatacatatatatacatatatatatacatatatatacatatatatatacat

SEQ ID NO: 4166 - DNA, 1141 bp, Homo sapiens
cttgaatacctatcattattagattaatcatcctaaagtgtagatataatttggttattctttgctcaaaaatttgcagggccatttaatagtttcctaatatctattgcagtagttctcaaattttagtgtgataataagcagcatctgggaagctagctataatgcacatattggaggcctgctggcagagattcctatttattcgtgaatggggctcaggaagctatttttaacagctatcccatgtaagttgaaatacatttgttctttgggctaatatccaaattttttaaccttaatgataataatcaataacttgtttctagaatactttttgaagtctttatgcaccaccccctaaacatatacatgctttaatgatatgaaaccattctctctaaataccaaattttccagacttcactgattttcttaatcttttatttccagttaaagtatactgcctgttaattgctgcctatcccgctcatgtatggtttgatacttagctggcagaggaaataccatgatcacaaaggtggttttcccagggtgaggtttatccattaaactcaggatgtgctgacccctgcgatttccccaaatgtgggaaactcaactgcataattggtgatagtgagagactgcgttctcactttcccctaaggggggtgtggggatgaagtatggtttgaatgccaccctctaatgaagcatttcccatcccctgacccaatgtgagctctcctttctctgaaaccccgtagtattgtaatagggtgaccctgcatgatattagacctaggaatttttctgaattttagtgaaaaagacagaaaaaaacaattaaagcagaggccagtgttctagatcctaataggcaaagtcctagatttatctgtaaggcaaacttccctttgttctgggaagcaagttggacttagtgaagcaccagtcatctgtgcagtttgtgcttacatgccaatctagacagtgtattcacatagagaagttagcagacaatgatgtgctgcttcttgattttaaaaaactctaaatatgattagattcagtgtggtatgcaaaaatgaatggtgactgtatgaatttgctaaggttgccaaaaaaaaaaaaaaag

SEQ ID NO: 4167 - DNA, 1178 bp, Homo sapiens
ttgccaaggcatttgtaaactgtcgtggtgcaggtgggagcatctcttaacatgctaatgcattgtaacaattagcatataatgagcagtgaggacaaccagaggtcactttagttgctatcttggatttggtggcttttggccagcttctttacagcatcctgttttatcagcaaggcctttatgatctataaagaggtcttttgccaacctcgtatctcatcctgggaatgcagcccagtaggtctcagacttattttacccagcccctattcaaggcggagttattccggttccagtgcctctcacagtgccaccatagttcactgtgtaacctctaactcctgggctcaagtaatccttctacctcagcctattgaatagctaggattacagttgcatgccactatgcctggctaatttccttttacattttttttttttttttgagacaggatctcactatattgcccaggctggtcttgaactcctggactcaagagatcctcctgcctcagcctctcagagtgttaggattacagatgtgagctattgtatctggcctaagctgagtctttctcagtctctcttttttttttctcctcttacgtgagacagaaacttgaagtccgtctactttttatatactattttttcttgcaaaacacattcatgaacatttaatttgattaagatatatttttaggttaaagatttttaaataatgaattacagcccaatttgtttataaatcatatttatttgctagtttgtttcataattctgaagtttaatctttcctatgtaattttctaatttaatcctaatttctaaaaattttgtgtccaaggtgtttcttctggaaaataagaaacataaagtttttggccttttttcaaagaagcactgattttgacatgtactcttggatgcttttctggtgtttttctggcatttcagtcacttttctggtgtttttgctttatgcattttgctttctccaatatctatgcgttaaagtgggtgtaggtgtgaatgtatggttttgtgttccttttctagtgtaggcattttattgtactatgtaatgctagtatacaaaaaggtatttttattaaaatcttaatattagtagcaaactgttccagttatctattactgtgtaaaagcaacagcca

SEQ ID NO: 4168 - DNA, 1157 bp, Homo sapiens
ggttaggaaagttagcatttatgttcttaggttgaagtcaattgcttggtgatatttgctcaattttatattttgttttgtttttcactttcagaaatcagcaaggctgcttctgaaatgcttaccaacaactgtaagttaaggaccttttaattataaatttgatggactcacaggtattttctcattatttttctattaaaaatacttgaaatatgtcatgtggaaatcccataacacgctttccgaattactagatataccagatattgacttagaatttctctttgaaaaacactggtctattaattttaacatttattaaaaaatatataaaaagttaaatgaaaattgattccaaataataaaactgtgagtgaaaaatatcatatttgaatatgttaaaatgagaaagattgaaggaaatgacaatttaggataagaagaaaatataaaaccaggctatataaaatatatttattaaagataaaaacagttctgcatcttaaaaattattattattttttgctttagaggtgggatgttgctatgttgtgtgggctggagtgcaattcacaggtgcaattacagtggactatagcctggaactcttgggctcaagcagtcctcctgcctcagcctcccaagtagctgggcctataggagcatatcgctgtcctgttacatcttttaaataaattctctttagagtatcatgttttccacaagatacatttatgcattcattcactccatggatatttatggagtatcttttgttcacatggtgtcttacagacagcagtgcatatactatgcaagatgtagacaccaatgaggcaaagctcctccttcaagaatctgcttagagagacaagagttataacacatagacacaacaaaaaatagtggttgaaagatgcttgagactggaaaagaggataagtaagaaccactcaaaccaagatagaatacagaaacatcacaggagtatcttgtaggaaagaaacgtcatcaattaggagaagttgaataatcactgaaaggtttcaagtaatttttaatgatatatttttttataatgcgtaatcaaagatacctgctctcgtgtaaataaatcctttctctaggttgtgggagacaagtagccaacagta

SEQ ID NO: 4169 - DNA, 1258 bp, Homo sapiens
gaagctgagtcaaatgaagttcaagtaacttgtccagtcccacatcattatacagtggtttctaagacttgaatcaaggccatctggatccagagtgccagctcttaaccaccaggttatattgactctcctatttggggtacagatattttccaagtgtagtatcacagtttcccattatgtagatatatattaattgtaattttattacatatataatttaaaatatgtagaattattattccaggtgtgtatcactgcataacaaatagttttcaaatgtagggccttaaaacaactgtaatcattttattatcatctctcagaatctgtgtgttaggtggggtcagttatgtgttccttcacagagtttcttaggtagctacttttctatggtgcctgggtctgtaattatatgaagatcattcacttacatacttagagattcgtgttgaaaggctcaaagtgctagtgggctaccaggattccttaggcatatatttgtatctctctacaaattgtcatttattatggggactacaggttgagttatttagtaatagtgagcgaaaaaaaagacatgaagagaagaaacagacggtggccatggaagtcagaatccgctaaggagtgtgtaacaactcacctgccgaatcaactagccctgaaaatggatggcgctggagcgttgggaggctaccaggctgttgccggcagtcgagagtggacggcagcagcctgggcagtgcgggcgtgcgagtgcagtggggggtcctcccccctctcttcctcccccatcccccggagctctccttaagctgataagcaacttcagcaaagtctcaggatacaaaatcaatgtacaaaaatcacaagcattcttatacaccaataacagacaaacagagagccaaatcatgagtgaactcccattcacaattgcttcaaagagaataaaatacttaggaatccagcttacaagggacacgcaggacctcttcaaggagaactacaaaccacggctcaatgaaataaaagaggatacaaacaaatggaagaacattccatgctcatgggtaggaagaatcaatatcgtgaaaatggccatactgcccaaggtaatttacagattcaatgccatccccatcaagctaccaacgactttcttcacagaattggaaaaaactactttaaagttcatatgaaaccaaaaaagagcccgcatcgccaagtcaatcctaagccaaagaccaaagct

SEQ ID NO: 4170 - DNA, 1194 bp, Homo sapiens
gtacccagaaatatggtattgggggtgggggtgaaatgagaggaaagcaatctgattaacttccagcctgataagcagaaaagagaaaacaagggagcaggaaaactacgctagcactagactgccggtcgcaagcgccgggtacacacgcagttaaacctcaatggaacgcccccgggacttctccggggcgtaaagcgcagcgccctctattggccatcgggacctcgcctggaggtgccgtcaggattccgtcccccagccactcccaggcactcgagagtaagcgcattagcccgagaaagcgttctgtggaacggaacttccttatcctatcgtttccacacggaaagattttaattcaccggaatcgactggcgttaaagggcacagtgaaaaggaagttggtatcaacgtgatctcgactaagggaccgagcggaagtcctcaatcgtacgccacgcggagagcatgctgggggccggaaggaagaggaaattccagtagccgatcaggagtctgcaaactccggtggtaggggagcgcgctgctgtttagagccacgagttaccggagcgcctgattcctgcgccgaagtcagtggtggccgaaagtccggagtcgctgtaaaacctgagattgtgagccatggtggggagatcccggcggcgcggagcagctaagtgggcagctgtgcgagccaaggcaggtcccacgctcaccgacgaaaatggagatgatttaggattgccaccctcaccaggggacaccagctactaccaagatcaggtagatgactttcatgaggcacgatcccgggccgccttagctaagggctggaatgaagtacagagtggagacgaggaggatggcgaggaggaggaggaggaggtgctagccctagatatggacgatgaggacgacgaagatggagggaatgcgggggaggaggaggaggaggagaatgccgatgatgatggtgggagctccgtgcaaagtgaagctgaggcctctgtggatcccagtttgtcgtggggtcagaggaaaaaactttactatgacacggactatggttccaagtcccgaggccggcagagtcaacaggaggcagaggaggaggaaagagaggaggaggaggaggcacagatcattcagcggcgcctagcccaagcgctgcaagaggatgattttggt

SEQ ID NO: 4171 - DNA, 1129 bp, Homo sapiens
attaaaggtactataaataactctgagaattcacataaatggttgtatattttagtttagtgtatgtttaatatctttgatttatttttcttccacaaccgtgaatctataaatgctcaggtaatgattttttttttaaaggttgtaaatcagattctgtttgagggataagaggtaggaaaataatagaaaaaaggtttttatcatttttttccattagttcctagtatattgcaaattgaagagtacctccttagttttttaaaagttttattttaataaaatatatgctagatatatattttgtaaaatgcatgctctatattcataggtgtggactggaccctgggcacctcacatgaacagtgtgcatatgaaccagcttggctgatgaggatcagcttgttagcctgcagattccttttcatttggaggaaatcacaagtggccgaaaaaaaaaattatgctcccaaatcattctactgatgtgcttgactgaagtgtgtaggctttttgcagaagatcttactaactgacctattttctgtgaacatttgtgactgcccattccccatcatcatccgttttaccttagttagcatttttcttatcatttttctttttttctttccctcttcccctttggacataactttctgttgaagctgttctttggctggttggttttagtactgtaaactgcttctgagcaaacacggaaatttagcaaaattatgtaaacttgatcctgaagttttagaatggcaaataaatgtacaattgtttacataacagaaaaggctaagcagaaagtaaatttcaatatgtcagtatagaggctctactttatgtagacttaaattaatgtgagatatgtaccttcatattcagaaatctggatgtttccttcatacattaaactattaataagcataacttttctactggtgtaatttaagtataaagtaaaataatgggcattatcattggatgtttccccacattggcttttaaaatacccatcttgctttctttttggtttatttgtagcaaggcacatatagaagaagaaatttctggcttttccatgttgttttattaccttttctcacttttaaaactaatacag

SEQ ID NO: 4172 - DNA, 1117 bp, Homo sapiens
ttgctgctcagactttccagcagatccgtccaccaaggttgcccatgacccactttggaggtacttttccaccagctcaatccacttggggtccgtttcctgtcaggcctttgagccctgccagagctactaactcgcctaagcctcacatggtgcctcgccatagcaatcagaatagcagtggttctcaggtgaattcagcaggttctttaacttcaagcccaacaactacaaccagttcatcagcttcaacggtgcctggtacatctacaaatggcagtccaagttcaccttctgtccgaaggcagctttttgtcacagttgtgaagacatccaatgccaccacaacaacagtcacaaccacggcaagcaacaacaacactgcacccacaaatgccacatatcctatgcctactgccaaagaacactatccagtatcatccccatcttccccatcaccaccagcccagccaggaggggtttctagaaacagccctttggattgtggatcagcatctccaaataaagtggcatcttcctccgaacaggaagcaggtagtccaccagtagtagaaacaacaaacactagacctccaaacagcagcagttcttctgggagttcatcagctcattctaatcagcaacaacctccgggatctgtttctcaggaaccaagaccacctcttcagcagtctcaggttcctcccccggaagttagaatgactgttcctcctttagcaacaagttctgctccagtggcggtgccttctactgccccagtgacttaccctatgcctcagacaccaatgggatgcccccagcctactcctaaaatggaaacccctgctattagaccaccccctcatggcacaactgcccctcacaagaattcagcttcagtgcaaaattcatctgttgcagtcctcagtgtcaatcacattaaaagacctcacagtgttccctcttctgtccagctaccttcgaccttaagtacacaaagtgcttgtcagaattcagtacatccagcaaataagcctattgctcccaatttcagtgcccccttaccatttgggccctttagcacattgtttgaaaacagccctacttctgctcatgc

SEQ ID NO: 4173 - DNA, 1165 bp, Homo sapiens
gatttttgagatgaactttatttaagtaattaaaacttgatatagagtttgaaaaatattgagtactgtttcttatgatactaaatgtaaacatcttagaagcttttattaagcaagctaatacatgctttaagattgaaagtttatcctaataacttattaatcaccttccagcctaagtcattatgttgagtgaaatacaaaaaatattctaataaaacatttctaatggagtcttggtagtatctcagagacttactaaggttgagaaaaatggatattttaaacaatccttcaaaataatcttagattagaattatatatcatctccaatttttctgtcatttaaaatatatatttttccatttgttttccccatacctgcacccctagaactggtagcaaattgggcatctctcctctgatgttagcagctatgaatgggcatacagctgctgttaagctcctgttagacatgggctctgacataaatgctcagatagaaaccaatcggaacactgcccttactttagcctgcttccaaggaagaactgaagtggttagtcttctgcttgatagaaaagcaaatgttgaacacagagctaaggtaagaaaaagtctgagatttacacatgaatttattgctttgatatttaagatatatagtagcaacatgttgattataattttagttctttctagtaacatttatctcctatgtatatatttaattagaaatcattctgtataactcagtcaaacattaactcttgaaaatacctgagtgataaatttttataggcaacaatgacagtaggattatcagctgaaaaagagagactattttgaaaaggaagggaatggaacatttattgagtaccagttatatgccaagtgcttgcatcttaaacagatttttttttctttctttcttttttttttttttgcaataccgttgagattaggtagaattattttcttttaatagatcagactaactcaaaggagctaataagggtcagtgattaaatttagttgtgaatcttggtaacagctgtatcatattccttcttcaagttgttattctttacaattttagatctttccagtctcttacgtgtcattacttttaattttacactaaacttagactggtctcacacca

SEQ ID NO: 4174 - DNA, 1141 bp, Homo sapiens
aagcagtcctgttttaggagtctcaggctcctaaagcgctagcattacaggcgtgagcgactgcacctggcctaagattgaaaatgtttaagaatgatattttctactgcttcatgaaggaaactgggtttttctttttctctcttttttttttaatacaaaattgtgagtgcatgcagagaagaatatgataactactaactagtacagattggtatcatggccttgatcgatgttaagaaactagcaggtttacccaccattgcttttgtgtcatcagtgcaagtgtcaacacagtgcaacaggcaaataaccatcttagttgtttaaaaataattttgacctcacagactctttaagagtcttggagattctcatagatcccatggaccacacttgcacaactgctgttttacagtatattgcccagtttacaagtttacactcattaagggagtaaaagtaagatttagacaagtctgcttgattcaaatgtattctttactattttataaaatttattaattaatcacatagtaccaacttctccagtctctttgacacaccctgtaggtcactctatcctttaactacaatatagcaattttaaagagccggagaaaaaccttgtgtggaaatctgtgtgggaatttgaatattgctttaaaattatcagtccaagattagtcattcagaatttcaggaagtcaggagtttgaggattcctgaaggaagtagtgaatgcaaagagaagctattaatagaaataagtagaaaaatattttgcttgtggagtaatattaagtggtaagtgaaacagatatatgaaatatttgtcaaatttgagtattttttttgaaggctataaagtgtctttcctatccttcccttctttcacaggtatcactttggttttcatctggtcaagagaagttctttctcttattttatatagtctatgaaaatgaaaaataaaattcagataatgtagatcttcctctatttaaaaactaaggtttttcaaatttcttcatatagaggtaaaattgagtcatttaagatttacttctcaccttcttttgtttatataaatatcaatgtttatatataccatatttttgcaacaatttatttttgatat

SEQ ID NO: 4175 - DNA, 1127 bp, Homo sapiens
ttttttttttaatttaggagaatcccttattttaaatttctaattctattaaatttggttatcttattgaatttatagattgctagtaaatattttcagttctaattgtacattttggttaattgttttaggtggagctgatagtagataggttaaggggttgggattctgtaatgaacagttcacaaaataatggttgtattctgaatttgttaagtttttagaatttatgtagaatatgttcttaaattccttgagaacttaaaaatttgtagtactttatcatactgttaataaagagggagagataagggttatgggaaatgcacatccttttctgactcttaagtccttttctgggaatatgaaagcaaaccatatgcctatggcgtctctgctataggcttagcagataatactagggttctagataaaatgaaaagtatgaaggcaaagatttgatcatgctgttttctaaatctcaggacctttagaatgtatctctaactcactttgtggactcctttcacttgtaccttttcttccttttcttactctgcatccagatccccacctcacagtccaagatcctctctaccactcagtccagctttctggctgccacctaaacttcagtacctggcttctcttggccagatcgaaggactgtaatatgatttaagttgtgaatatgccttagtatgtgagatgtcttttcatatgagggagttcttaacctactttagcttaatcaccagatccttttgtcttttatgctaacacataaaaaacacaggcttggtattacagctttttgtcttctatgcatgagcagttttgttttgtatcccagggatcccagaagaacagctttgcttggccagggtacccattcattggcttaggcaacctagaatgttaagattcatatatcttaatcaaatacgaaggtcttcctgacctcactaccataagcagaagtttttctgaaaactttgatcagagagcaagtaggaagaagggccagattccagtttcattaaaccacaggcatatgaatacttcacagtttctgtgcttgacaaaaattacatttaattctgaaataacccaatgcctttgtattt

SEQ ID NO: 4176 - DNA, 1099 bp, Homo sapiens
gaagcagctgccttttccatcctgggaggccccaaattactggactcttgtaggtcggagtttgccactgagaaagcttctttttagtagcactgttttcatgtctgtctctgcttgcaaactgctttataggtgaattgatctttcttgttgatctttaaatagccaacacaccatatttcgagtttttctaactgcttttcttagaactacaaacttagtaggcatatgatgtgcccttccaattattgcaggcaagagttttactaaatgttctgcaactgtatagcacagatcattagatctccagcctgagatgtttccttgctacctgttctctaagccttaccagagattttaggagtttgttagagcagcgtgtcatttccaattaactgtattagttaaggtataggatggatcatttgaacaaagagactccagaacacatcaggcaagatagaagtttgttattcttttatgtgctactccagaggtagaccttcaggttattcacacatctaagtatctgctgtcttgcacttgatacaccatcccttaatcagtgctgtccaatactgtagccactagccacaggttgctgctgagctcttgaaatgtggctagcgcatctaaggatttgagttaaattttttttaatttttaatttaaatattacatgtagctagtggctaccatattggagagtgcatatgtagaatatttccatcacagaaagttttattggacagctctgctttggagtgttcatctacaagatctactgtggctcactagcatcatgtccatgtttcagcctgttatgggctgaactgtgtgtccccaacattaatattaatattttgaagccctaaccccaagtatttcagaatgtgattgtacttggagataagtcctttaaaaatgtaattaaggttcaatcaggtcatatgagtgggccttaatccatctgactgatgtacttataaaaagaggacatttgaacacaggacaccggagatacatgcccacagagaaaaggccatgtggggatacagcaagaaggtggtcatctgtaagccaaggagagaggcctcag

SEQ ID NO: 4177 - DNA, 1218 bp, Homo sapiens
aaggacatgcccactgaattcaggtcctttgagtaaaaaaaaaatcttctgctgcacattttgtttaagtgttactgtttctgcctgttaatgctgggaacacaaatagtgcaatttgtgcaattggagaatcttgccttttttcttggctccccccaaaaatacaaaccaacagaaacttgttatgcactcatcaaaatgtactaatgggtactctgaactcattaacattgacatctgcaacaggaggcaacagggaaaaaatctcatcttcttttccagtagaaaatagtttgtgaaatgatgagggcattttatctgcttgctgtgaccagcgtgtgtacacataaaccttaacaagactacaagtatattccagaaggaaatcattttagttatgaactaaataataaaaattagaacttcaaatgcgatggtcttgactattagaccagatttagtagctccatatctaagatttttctacctgcccctcttcagtacagggatggctggctgctcaacacactcctcctccccttttttcctttctttaagctgtgtacagtgaaaattgtctttactgtatttttgttctctggtaatgtaataagcatgatggtgccttctattaatacatcattccagtcttgctggtaattttgtacagtatagtgtatgaattgctgtgctgcaaagccaaacagctgcaaaatgttgaaaaatcatcgaaatgtataaaaattgcagtatctttaaaatcagtaaaatggactagcatattatttatcttgttcttcagttaacaactttgtgttctctgtgggagggagggagtcctgtgtgtttgtggggagagggaaggaggaagtcagttatttgagtaagcctctagttgacttttctcttagcctgaatgtggacgttgaaacatatcacttcagggcttggaaaagtcagtcaacttgacgtacatttttagtgacattttaaaagcagtcagattctataaatggcaagtaagcctgaagtgaggatactgcaattttcggagaaaagaacagcagctctttaagtgtttgcattttctatttggggggcagggaactgtcattcattttgcacaattcttgaactgatgtcagcacccgagtggctcctgaatttaagtctgggacgacatcttttatttttacatgaatctttaaacaattctgt

SEQ ID NO: 4178 - DNA, 1215 bp, Homo sapiens
ctttgtttggtggtaaaaagggttactagacacccctcattccactgccactggagggcgcatttctcagctcttgctcttcaaacctgctgaaaggaattcctagatctaaacaccaggtacacctctattttcaagtgtcgtcaggaggaaacccatcaaaccctacatttagcttactagagaaatacattgttctgctgtgtcagtttggcgagtaacataatgtttcgttattaactctcaacccctgtgttttcagtttttttttttttaacatgaaaaattgtcattttctctaattggtatgcctgttcctttggcagtgaggttgtcagtacacatgcttctggaatagtcttgtaaatttcttgaggctaaaaagcacaggtctagttagctaactgactcatgcacctctccccttggattccccacaggtctcagattcagcatttaaaattgaactcgtcatctttccctgcctcccttaaagaaaaaaagtcaatatgctgcttctactgtgtgcgtgccgtgctcagtagtaccactgtccaaataattgcctaagctagacagaggaagctgggaagaatcttagactctggctttccacccacacatgtccaatcaatagtcatgtcctatcatttctatttatagaatatttctcaaataggtgttctgctctccatcctctgtgcctgtgacatagattatgttcttctcatcatttctcattgagatgacagcaacagcctcctaattagtttgtctgcattcagccctggcttccttccagtccaatctccagtccatccttgggtgagactaacaacaacaaaacatctgttcatgtcattcctcttaaaatcctccagttgttccccattctgtccagaataaagtgcaaactccttagtttgtcatacaggcctgttatgatttagctcctgcctactttttcagctcctgcctcccccacatactctgggcatttttctcagacctggatatgcccttcccttcctttctcttcatcaagcaaactcctgctaattccttaaggctcaactctgacatcattcttgaaagctttccctaaaatgtaggtacacatctatatgttagcactttgcagttattgatactgtatatggtgtacattgaataaatgcttgctaaaccaaactgttaagggcaggactatgttat

SEQ ID NO: 4179 - DNA, 1232 bp, Homo sapiens
cgttattgatgtatagaaatgctactgatttttgtacattgattttgtatcctgaaacattattgaagtcgtttatcagctctaggtgccttttagtggaacctgttgggttttccaggtttagaatcatattattagcaaagagatagtttgtcattttttcctattcggatgtcaattctttctcttgcctgattgctctgattaggacttcctcctttaaattttaagtgtactttcaccatcctagttctatgctgtcttctttttaatcttttgatagtttttctttttttggaaacagggtctcactctgttgaacaggctggagtgcagtggtgtgatcacgtctcacttcagcctcaacctcctatactcaagcaaccttcccacctcagcctcctaagtagctgggactacaggtacaaggcaccacgcttggctgatttttaattttcttgtagagacagggtcttgctatgttgcccaggctggtcttgaattcctggactcaagtgatcctctcaaagtgctgggattgcagccatgagcccctgcacccagccagtagtttttcattttcacattcctcatctcagttttttctttcctagtcactcctgttcccattgtgtcttttttggtcatctttgtgtagcaatgaatataaataaatagccctattggctagcaaaaaatgttttttttaattgaccagttgttagactataattctgattatgcccaatttaccagttgttaaatggattgtttgtcattttcatgtttcccttggtaagtgaaattgtgaacatcatgtagcaattatcattttttgattttacaaaatggcagacaaaatgagtaaagtttaagttctctttactcctgtcaccaatttcagttctctttccagagataaccactattactagtttggcataaatccttccagacctttatacgtaatcatgcctctgtgtaatatacaaatatatatttgtattagcatatttattcttatttacataaatggtatactgtttattgtgttctacagcttaccttttttttttttttttttttttttttttgaggcaaagcctcattctgtcacccaggctggcgcaatttcagctcactgggttctcagctcacctccgcctcctgggttcaagcaattctctgcctccacctcccgagtagctgggattacaggcctggctaatttt

SEQ ID NO: 4180 - DNA, 1214 bp, Homo sapiens
agttaactgatatatctcattcatattagaaatgacagagagccttggcatcaaatcaaagaaatcagatggcttatattctactgtagttactagaatacaaaatttgtctgggcacagtgctcacacctgtaatcctagcactttggggggctgaggtgggcagattacctgaggtcaggggttcgagaccagcctggccaacatggtgaaaccccatctctactaaaaatacaaaaattagcagggcgcttggtggcaggcacctgtaatcccagctactcgggaggctgagacaggataatcgcttgaacctggcaggcagaggttgcagtgagccgagatcgcaccattgcactccagcctgggtaacgagcaaaactccatctcagaaaaaaaaaaaattatcagtagtatatattgttaaatgttgaatgtgacatgaacagattttcacaatattaaatacgtctttttcctctaggttgaagaagaggatgaacttgaatctggagaccaagaggatgaggatgatgaaagtgaagatcctggcaaggatctagatcatatctagttttcaaatctctaggaacaatagagattatatcataactctgaagatggactctaaactttggtttacctccatggaaaataaagatttagaaaccaggtggaaaacattcactattaagactattgatatatttttgtaatgttgccacccatgttgaaaaccttaaaactgaatttatgtagaacacacatcttttatttaaatccatctgaactgtcccaaaatgtaatttgcaaagagcttcaaacaccaaaaatataccattttaaggcatgtggtgacaatgctatttgccttagttcattcgttgtttactttgcaaaatttgtgacttttaagtactaacacatttgattgaatgtgtattgaattggaattattatttctaaattcagcatttgagtccttagttgatgattttcttttaaagaaattagtttatttaaaagcaagatagcctgggttgggagttagtgcatatcatcagccctccatctaatgtgattgctaagatgtgcaggataggacagcttagaatgagtgccttgacacctacatatggctgcattccatacctcagtgaagaagccgaaggatgctgacacacagtgatgtggagggcattccggagaaactt

SEQ ID NO: 4181 - DNA, 1522 bp, Homo sapiens
ccttctagttattaaccaaacattttaagtttgttaaatagtttgcaaaaatgtactagaatataatgcaatgctgacttttctattatttatttgctgcaacagagtagcaaatattattaaaaataatatcttaggctgggcacagtggctcacgcctgtaataccaacactttgggagctgaggtgagtggatcacttgagctcaggggttcaagaccagcctggccaacatggccaaaccccgtctctataaaaaatataaaaaattagtccatcgtaggccaggcgcggtggctcacaccggtaatcccagcactttgggaggctgaggcaggtggatcatgaggtcaggagttcgagaccagcccggccaagatggtgaaaccctgtctctactaaaaatacaaaaattagccgggcgtggtggtgcacgcctgtagtcccagctacttgggaggccgaggcaggagaatcacttgaacctgggacgcggaggttgcagtgagccgagatcgtgccattgcattccagcctcggcgagaagagcgaaactctgtcttaaaaaaaaaaaaattaggccattatgagacaggttagttttaccctactgatgatctgttgttgccatggtaatcctgctcagtaccaacccgcaggttcagacattcggtgtatgtgcttggctaaggagccaatgggacaaagctaccctctgtgggattttgactgaatgcctctaagtcagaatcccgcccaggctgaaccacagggcagcgctgcagggcctcagttggcctcggatagccagtctcccaatggcctgggatagccagtctcctgccatccccgccggcccgcagttcggctcagcaagcgcgcaggtacccgaggccggtgcggagagtccctcctcctgggaaaccgggtgcggccggaaaggcggccgcccctcacccgtcatgcaacggcacgttcgtggggaacctgacattaaactgttcgtagatgacctgcttctgggtcaggatttcgcactgagcagagcagctccctcgctgtgatctactgaaagtcagccctcgacacaagggtttgaaaaagaaaaagtgaaaaaaataaagaaattagggcatgttggcatgcactagtggtcccagctactcgggaggctgaggtgggaggattgcttgaacctgggaggcagaggttgcagtgagcctagatcgcaccactgcactccagcctaggtggcagattgagacccccatctcaaaaaaataaaaataaataataatattttaaaacttcaagtaatatttaagcatttgttcaattgatactgaatttgagcttctaaattaagcttcagagcaagaaagcaacttaatttgaacattcataccttataaaatataaagattaagtcatccaattggccatgtaagtctcctaacaaagatagaaaaagaatatcaattctgattgttccttaccagtgcttctgatttttattataaga

SEQ ID NO: 4182 - DNA, 1248 bp, Homo sapiens
tttgaaaactggcacaagagaaggatgccctctctcaccactcctattcaacatagtattggaagttctggccagggcaatcaggcaaaagaaagaaataaaggatattcaaataggaagagaagaagtgaaattgtctttgtttgcagatgacatgattgtatatttagaaaaccctatcgcctcagcccaaaatctccttaagctgataagtaacttcagcaaagtctcaggatacaaaatcaatgggcaaaaatcacaagcattcctatacaccagtaatagacaagcagagagccaaatcatgagtgaactctcattcataattgctacaaagagaataaattacctaggaatacaactaacaagggatgtgagggacctctccaaggaaaactacaaaccactgctcgaggaaataagggaggacacgaacatgtaagccattaaatcttttgaagaggcagctttgctggtggtattgtcttgtgccacagtgagttgtaagtgaagtttggaccaaaaatgagtttatgaagactggtgggcaggagctcaagagctacaggcttgtcctccagccagtgcctgatgtgccccagctgggaagctgatgaatagctgacatctgtatctctggacctgaatgttgatccctcgcttcaggttgacatacctgatgtgctcagtgagagagataaagtcaaatttacagtgcacacaaagaccacactgcccatgtttcagagcccagagttttctgttacaaggcaacatgaagactttgtgtggctacatgacactcttattgaaacaacagactatgctgggcttattattccacctgctgctatgaagcccgacttcaatggtcctcgagagaagatgcagaaaccgggagagggtgaagggtctatgaccaaagaagaatttgccaagatgaaacaagaactggaagcctaagtgttaggtggaaaaatactaaagaaatgtttggtggcttcttcaaaagtgtggtgaaaagtgctgaagaagtcctttttactggagttagggaggtagatgacttctttgagcaagagaagaacttccttactaattattacaataggatcaacgattcttgtgtgaaagctgacaaaatgaccagatctcataaaaattgttgccgatgtctatatccacactgcagcctgcttacattgcctggctttagaagagcccacagtcatcaaaaagtacctattg

SEQ ID NO: 4183 - DNA, 1248 bp, Homo sapiens; identical to SEQ ID NO: 4182

SEQ ID NO: 4184 - DNA, 1176 bp, Homo sapiens
attggtgaaagaaatcagaccaatcattgcctctgtggttggagactgactagggcacaagggatgatgtgcgctagtgcccttttgatgcatgaaagttgtaaatttctgggatgatggaaatgttctatatcttaatagtgatatgtgctatgtggatatatgcatttgtcaaaaactcattgaactgtttccttaagatctgcacattttactgcacgtaagtcatgccttaaataaaatctgataccttaaataaagtgagagacaggaagaaattggctattggaagcacaaaacaaaattgaaagtttagaaatggacccattagatatataataatttagtataggatgaaagaagaatttttaaaggtttttttagaaacagagtctcactatgttgcccaggctagagtacagaggttattcccaggcacaataatggtacactgcagcctcgaactcttgggctcaagccatcctcctgcctcagcctccgagtagctgggactataggcgtgcgccaccatgtctagcagaaattttaaatcagtgagggcaaaaagggatttttaaataacaatactgggatcaggaaagataaaagctggagtcatttcattcctaacaccaaaattaggtcagatgaataaaagattcagatagaaaaagtgaaataagtttacttcagatatttatgtattgtttggagacttttatagcaaatacattttaaactttttgtggtaaaatatacataacataaaattaaccattttagccatttttaagtatacagttcagtggcatcaagtacattcacattgtgtgcacttacttatcaccaccatccacctccagaacattttcatcttcccaaactgaaactctgtatccattaaaaaccaattctccattccttccagtccctagcccttagcccctggcaaccgccattctactttctgtcttcataaacttgattagtctaggtgcttcatataagtggaatcatacaatatttgttcttttgagactggcctattttacttagcacagtgttttcaagattcattcacattgtagcgtgtgtcagaacttcatttattttaagggtgaataatattccattgtatctgtataccatatgttgtttattcatttatccattgat

SEQ ID NO: 4185 - DNA, 1158 bp, Homo sapiens
tataattgttctcttctattattagttattgttgttaatctcttactatgcctaatttataacttaaacttgattatacatatgtatgtataggaataaacatagtatatatagggttcagaactatccatggttttggatatccacgggggggaggttggaacgtaagcctggtggataagggggactactgtacatatattaagtatctaatacgtaagtgttgagtatatggttttcctaattcgtcctttccattcaatgaataaattcagaaggttaattaatccaaatatttatagaatgcctgcaatgtgtcaggcattttttttttttacctgtgggataaatccatacacaaaaaagaaaaaaattctgtgcttatgaagcttactttctagtgagtaatgtaagctcatgtattgaaattcagatgctccagccccatgctttagacaaggttcctgcagtcttccctatcgctttattatccagaccccagttttcaaggctaggactattcttggcatccttacagatcttcctcttgattgtcaaggcttggggagtagaggagggagtgaaatgacttgagaggcatctcagttctctcagaattgttctctcataagccatcctgtgccctgaacttctttctgcccagttacacgtttgttagctgttttggagccaacttctggagacagtatttgcaagtctgcatgcaggccgagaaaacggaaaggcacatgccttcctggcatagcattagccagaactcagtgctttggtctagtcccagagaggtggctggtgccacctttgccaggacctgtggctgatcagctgctccctattgttgccacaataaaggattctggcttttctaaggagagagagatgccagatcccaggcccacatgtttgggataggtggtagtgtgtattttgataggggatgtgtgtagaacaaagaatgtgttctctagtctcattttgactttcagcccccagtaaaccttattgctatgagagccagtctctctgtagctaatttgaggcatgaaggtggctggtggtggaggaagaatgccagtgtatcattcagactgtccaataggcaaacacatgtttgaagaataatcctcagttgtttgg

SEQ ID NO: 4186 - DNA, 1220 bp, Homo sapiens
caggacatgagactatgacacaaatttttggatgacacttttcaacccaccacaaaatggatagaagagcagtgacaaaaacaaaaactcaagggaccatgactcccaaaaaccaacatgtagccaaagcctcaaagctttctgaagtcattccagaacaacacaaaagaaaagagacaactgcaaatgtagggttcccaatagacacataaccttctggattgaatttccaaaaactgagaacaatttaaaacacacatggaatgtataaaaggagaaattttgtttcaaaattatatttgagtttgaaatgggcaaataattaaaagcatgaagtctagagtcagatggtcctagatttgattcccagtttcttaagttacttgctctataatttgggcatattactcctttctccacacctcattttcctcatcaataaaatatagataacaatacagcctggctcctagagtcggtataaagattaaaagtgatagtgcacttagaatgcttagtctagagcctggcatacagaaactgctcaagaaatgttatctcattatttttagatgctgatagaagtggacaatgaattcaatgaggggacggagaaggttaggaaactggacattaacaggatattgtaacggaatgtttacattcaagaagaaaaaataatttatgttttccaaggactggggtatattcctatttaactgtaatatctagtgtggcagttcttaaagtatggtttggggacaccagggaatctccaaaaccctttgaggtagtcgatgagggctttcccactctcattctctcttgagggtgctgtggagttttctaggtgccacatgacatgtgatgttgcagctgaacaaaaacagaagcagatatgagaatccagctgtctttaataggccagacattaaagatatttgcaaaaatgtaagacattgactgtcctattgctaacttttttaaaaaaatttatattaacatatatattgactgttacttttaaatgaatgaataaattaaagatgtatctattttagtttctaatacagtggatatcaataaatataacccacataacaaaagcactttgaaattttcaatattttttaataggaaaaaagatcctaaaactaaaaagtaggagaatctctggtctagagaagcacatgacatgcctggcaacacctctgcaaaat

SEQ ID NO: 4187 - DNA, 1172 bp, Homo sapiens
aggccgaggtgggcagatcacttgaggcctggagttcaagaccaccttggcgaacacggtgaaaccccgtctctacaaaaaatacaaaaattagccaggcgtggtggcacgtgcctgtagtcccagctacttgggaggctaagtcaggagaattgcttgaacttgggagatggaggttgcagtgagccaagattgcaccactgcattccaacctgggtgatgaagtgagactctccaaaaaaaaaaaagaaattattaatccctgcctgtgctctacatagcctcatgggcatcattggatagctcagagggcccttgattctggcaaggcaaataaagccagaatgagaaattaccatcttctactagagaaaaccaagagaaaaatttttatgctaggatgcctttatgaccacttaattttttaatcttagtttaatggtctctccctggtgctaactgctgacagtggccacctcttttttggggattgaggggcctacataactagctggccttaccccatatcttttgttcaaacataataccatctttttgcttcttctgaactttagatctccataacacatgtactgtagaatgtgatggaaaagcattgatgagaatttattggcagttcagattgtgttttcccaacttaggctctttattaattggttaaggttttctccaaaaagggcatttcaacaatgggaattatttaatgtaacagtgggcacagattacttatcttccttctctgctttgtgactcaccagcagtaacacacacaatccacatcttgtgcacctcaaatgaacagacttggtttccttgctttcttgacatttccatgactgtttcacatacaaactattgggtgaggtttttcagctgttaccgacccacgtcctgctgtctctgtgtggtcctacaaaaactgtccattcccacccctttgctttgccatttgcaagagtctggaattgtcaggtctcagcttcgaaaagtcctggttccactgacaggacacattctttagtgggaattaagacctacaaagtctagtttgtatgtaggtatgaagggaattttttaaataaattgaaaagctgtgaacagcattagaactttgtctatttcttaattttaaaatatgctgatatgcctta

SEQ ID NO: 4188 - DNA, 1231 bp, Homo sapiens
caaaaattcaattaaaattcatggccagcaatcctgttccccctcagcatcctgatttaattttcctgttgcttttgcttgcttctccatttaatagttactgaactttatgcatgttgatctatattgattttcactgcagttgaatgaacaaattatttcagtgtgacagccatgactcaagttccaattagtctgaaaagggtactttggaattgtcccatattaatcagagatggcaaaagaaaaagttctcatattaccaggttgattttgtgtctcatttcaaattttaatttaaaattatggttttcatttttgtttaccttaaagtgatgcttaaaagtggcatgtaattaggacacttaggtttgttgaaagcattttcgacatttgtataaaagaatttgtgataaatatatccaggtgctcaccaaagaaacatgtattaacaacttaaattagatttttctaactgatagttttcactcatttataatcagtaggagagactgtctagatgttggggcagctctatgatttaagtctgtaacatgttataactgaatttagtaccctagttttgttaagctattaggattttctaatagaacttactccccctgcctccccagccttatgtttcttttaatgacttctggatcctgagctccctttgcagtctgaaaaaggtattgcagtcagaactgtgtactgatgataaaagcctctggtagcaataaaaagttgtccttaacttttgtttttgtgacttttttctggttgtgaagaggtacaggttcctgattggctaggcactgctatttcaactagagaaaacaatagaaagaccaagaatacacttactgaaaataaaacatgaagaggatctgaatgtgatcgagggatataggttttagacataagaatttttctttcgtgatattttttcactggtgcactgtgaatcctccaaatagtaaatttacatcttaatgtgactgcttgtgagagtaggctcagacccctatctttaaaatgtcatttttagccattttgtaatgttcagatttagcagaacaagagtattttcaggtcatcatctgatttgtaaaaaattcttgtggtagggttgacttacctgttttatgaccttaaaatccaattaaatgggaagcatttactcacatgtcagtaaagggagtgggagggaagatagcaaaggattggc

SEQ ID NO: 4189 - DNA, 1140 bp, Homo sapiens
ctattttaaaattcttagcttccctcctcatccctgattaaaaaaaattttttttttgccctttggcttcttacatttttaatgaatgtgtttatgagtactttggactccactgaaaaaaattagaagaggccaagagagtaggatgaagggccttccagacagggggaatagactgaaaaaaaaaaaaaaaaaaaaaaaaaacagacgttggatacaaaaaagtagtttctgttctcatgtaaatgttcagcatacattgcaaatacaaaactcaagttccaaagataattatattagaaatacagatttggacctaatttctaagatgatgttgatggatgggtagctggataaataaatgagttggaggtagatgtggggagagaaaagactcagcggggacggaaagcacagggaggaaaaatggccaccagagataacagagcagcctatgttaattaatgatcaactgtgtgtggctttttttttttcctggcccagatggatagctcccagttgatccattgtcgggagcttgtggcacatcacctttctactctgcagtcttccctgcctctgaattccgtttatgtctaccgtcccctcaagcacaccctggtgacctgtgacaaaggagtgttcagattacatccctcctctgtcccaggcccagacttctccaaggacaacagcaagccagaagtgccagtcagaggtacagcagccttttaccatcatctcccagctgccagtgggtgcaagcagacctctactaaacgcaaagtagaggaaatggaagtggatgacttctatgatggaatcaaacggctctataatgaagataatgtctcagaaaatgtgggttctgtgtgtggcactgatttatcaagacaagagggacatgcttccccttgtccacctttgcagcctgtttctgtcatgtagtttcaacaagtgctacctttgagtgtaaactaaggtagactactttgggaatgagaacatgcaaaatcaggaaaggctgtagaaggaaatataccttaacaggctgatttggagtgagccagaaaaaaaaaataaaactctcattatttgtgtggctaattataattcagcgttatttaagcacataaagac

SEQ ID NO: 4190 - DNA, 2073 bp, Homo sapiens
taaacttgtaggcattagtatgcaaaagaatatgtaaactgggggaactgtcaattaaatgctttattaggtatacagaatagaagccaaataattacggagtgtaagactgaatagctgctcaaacttctactcttaagacacttactaaacatgacaggacccaataaataagaaatatgaaaaaatgagatatttggcaaaattctctaattgttccacaaatttctccaactttgtttcaaatgtttaataaacacagcaagaaactcatgatagaaactacaacaatgtgttcactaataatttttgaaaaatgtactgtccaagaaaggacactaactttaaactcatctttctgtggaattatctgtgaaaagtaggttagatgtagtagagagggagggaggagtgatgtggacttgttgctgagataaaagtaggcatttttcagatatcccagattgcaagcaattagctttaaaaaatgtttacatacacaaaaaattttttaattttgggaatattatttattaaaaacttctaaatcaagctttttttctgctggatagaaatgaactttggttaattggctttggttgaactttgagcaatggaattgatattatttttgtagaatatcatatggctaggattgtaatgctaacagttagctctcaggccgggcacggtggctgacgcctgtaatcccagcactttgggaggccgaggcgggcagatcacgaggtcaggagatgagaccatcctggctaacacagtgaaacccccgtctctactaaaaatacaaaaaaaaattagctgggcgtggtggcgggcgttgtagtagcagctacttgggaggctgaggcaggagaatggcatgaacccaggaggcggagcttgcactgagctgacatcgtgccactgcactgcagcctgggcgacaggccaagactccgtctcaaaaaaaaaaaaaaaaaaaaagttagctctagacacacttgatcttgcaagtgtactttccttcctttcattactgctctaaagctttttaataaactttctttcctgttcttaaagttagctctgatctaaaaagtaatgagtggcagtcacattaattgaattccatagtattttgtgtatacctgtctcatctgcatatctaggtttttaaaacagttacaaaaagttaaattgtttttgaaaaatcactaaagttgctttttccctcttcaaaattttaggctcatccaaaatacttgagttgtattgcaatcagctgttttttcctagctgccaagactgttgaggaagatgaggtaataaatcctttcaagataatgtttcttccgtgaaaatttctctccacatttattaacttgcttcgtttgctaaaacaaaaatcataaatgagtttcttttctgtccttttctccctgtccctgttcccctttgctttggatagagaattccagtactaaaggtattggcaagagacagtttctgtggatgttcctcatctgaaattttgagaatggagagaattattctggataagttgaattgggatcttcacacagccacaccattggattttcttcatattgtaaatatacctgaagtcttttagtttcttatttgagtgtgtagttttcagtaaattaaaaaatagattgcctactcatttattttgtactggaaataggaaaaagaaaacttgatatccaaggaaaaattataaattagtatatatgtcatatcactgaagcttaattcgcagacttagaaattgaataggttaggctgggcgcggtggctcacgcctgtaatcccagcactttgagaggctgaggcaggcggatcacttgaggtcaggaatttgagaccagcctggccaacatggtgaaaccctgtctctactaaaaatacaaaaattagccgggcatggtggcaggcgcctgtaatcgcagctactcaggatgctgaggcaggcaggagaattgcttgaatccaggaggcggatgttgcagtgagttgagatcatgctactgcactccagcctgggcaaca

SEQ ID NO: 4191 - DNA, 1140 bp, Homo sapiens
tatatatttatggggtacatgagatgttttgatacaggcaggcaatgtgtaataatcacagcatggaaaatggggtatctgttccctcaaacatttatcctttatattacacacaatctaatttttttttttagttattttaagatgcacaattaaattattataaaccatagtgactctattgtgctaacaaataccaggccttattcattcattctaactttttgtactcattaaccttccctacctccctcccaccccactacccttcccagcctctggtaaacatccttctactttctatctccatgagttcaattgttttgatttgatttttaggtcccagaaataagtgagaacatgcaatgtttgtctttctgtgcctagattattttacaccgcataatgacctccagttccatacatgttgttgcaaatgaccgaatctcattcttatggccaaatagttagtactccactttgtataagtaccaattttatgtatccattcatctgttgatggacacttagattgcttccaaatctgggcatgcatttcttttcttttttgaggcagagtctcgctctgttgcccaggctggagtgcagtggcgtgatctcagctcactgcaacttccgcctcctgggttcaagtttggctgaacttatatatgaaaggagggctgagaagtcagaaactgaggagctagagagaaccaagtgtggcgtgggccagcagacagctcctctaaacatgtaaacacgcagaaccattccttccatgcaggccctagtatctcccctaggtgagccaaaccacactagaaaccctcccactccactgagtggcccttcccatcttcagtaaccctctacaaacttttcagggtcatgtgaaaaacacccaaactcttctgaacctaccaccatcctttctttgttctttcttagtgaaaaggacattcctcctcctgtcccaggaaaatctctctgcatctgctctccatctatcccctcctgtctcctgaacaaccagagtgatctgccattactcctctcccttgcatctcctgacactccttttcctccagttgtgtgtctccttgacttagtcaaaaaaggtgcttacaattctgtaat

SEQ ID NO: 4192 - DNA, 1166 bp, Homo sapiens
tttgcaaaaatgtagggtctcttgttcaaaaagaaagaggagaaaaagcttttttgttgtttttttgtttgcctctgtgatctctttctctcaacctgtcatatttggcatgttttttagttgctatttaatgttttcctcctttgggcctgggaatgaagggtgggaggataccctcacagacaccccaggctctaccctgtgacttggtgcatagggcgcatgcaacctcctggcaccagcccccacgagggttggggatgacagcattcattgggatggagtggaggagctggtagctgagaactcatcccaggaagccagcagcaggtgggaccacacatgagctgagcctcaaaacttcacctataaaacacaaattcagagatttcaaggtagtgactgcagagcattgaacaccaaatgcaggacctccttctgtgcactgggcttctgaccaactgcactggctgcacgcccatgcagtcagccctgggatcaacaaatgccatccccctagtaatccttgtttctttgaccttccagaaccctgttcctatgaaggccatgtgtttcaggatggggaggactggcggctgagccggtgtgccaaatgtctgtgtagaaatggggttgcccagtgcttcacagctcagtgtcagcctctattttgtaaccaggtaaggaagacaacctcagcatgcagccttcacgggctattgaagaacttggagtctcttctgagattatggcaggcaggcctcagaagcactagaaacaagaagcaaagccctttttgttttcctcatacttttggagaccacctctgagacatttcttttacccttagaaactacagataggtctaattaccagccacttaggctaattgttatataatgcaactgagccttgaggattcacacaaggaagcctccagctctaatggcagatgctccaaaaatgtcaagctaaacatctgcaaaattcaataatgtgattagatttgttattgtttttcattgcataggtatagtctgcttttttaagacataatgcatatctttgaacatgattatccagatgtacacaatttaattcttataggataatgattcaaattatgaaaggattttctctgaggacgtttaagatagtgggatttt

SEQ ID NO: 4193 - DNA, 1204 bp, Homo sapiens
aattaccactaaattcagtgataaccccaattactgaaaatgagatttgaaattttggagaaaaagaagaaaatggggtgcatttttcttagataaaaataactatttttcaacattgtgggttttatgtctgaactgtttgtacatgttgaagcttaagaagaacatcggaggtatcataaattattgaatctgtttaaataatacattatggaagtagtcattcctgtttcttgaagtattccagcaggtagaggctgttcttttagtatcttcatgctggggctatgggagacagtgatgaatttcagacaaggaaaacttccttgcaatcttgcattggaatgtatttttttttttttttttttttttgctatttaggaggctttttcctaagtcccacagttttctgttcttcatgttctatgtaatgctacatactttgtagattcttttctgaaggatgtaagagaaataatagatggagttcacagagttctccccttctttgtccttgatttcagttcattgccatccagattgtttgacatgctctcagtctccagaccactgtgacctctgccaagatcctaccaagttactgcagaatggatggtgtgtgcacagctgtggactgggtttttaccaagctggcagtctctgtttaggtatggctccaagtggacaacccagaggtggtggtgtgtgggagatagactcatcaaaggttgtgattcttaaactgaggctcagtattgtcaaggagggggtcatgcatgcagcatgtttttgagatgcacaacgtctaaaaacctctagaaggtagtaatgtcatctataggttacttgccctctctacctgcaggtctttttttctgacattttataggtattttggtgcttattggaagacaggtgatgtggaggttgttaggtagtcatagttaaatatttttatttttgaagactttcaaggatagtaatatcaggatacctgggctcatttcttaaagcactcaattaatccgggatagaaacttagaattgacatagaccttcaagatcatttactgcaactttctaattttgcaaatggggaatctgtaggccagagaaattaaccaacttgctcaatatcaaacagatagttggtaatagagcttatctcttatgggctaccagaggatccagaatgggtttatgt

SEQ ID NO: 4194 - DNA, 1111 bp, Homo sapiens
atctattccttctttgtctcccacttacaatcaaatacacatatcattggttgatctgagaagtttagctgatgtgtgacatatttggaacttagcagaagcaaatgagttctgctcttattaccacctcttaatctcaaactatgttagagatgaatatactccactgttactttgagagcaggaggcagccgtctaatacctgcacccctgtcccagggaaacatatatcccagtataggaccaaataggcagatgttgagcaaattgaagtcagcagagtattctcttgacaatgtacatgaaatctcatgcatatgcacctagaaactcaccactaaagctagtggaaaacaaaaaaaaaaaaaaaaaaagaaaagcaggggttgaaatcctagtctctgataaaacagactttaaaccagcaaagatcagagaagacaaagaagggtatattacataatggtaaagggatcaatgcaacaacatgagctaactttcctaaatatatatgcacccaatacaggaacacccagattcacaaagttcttagagacctacaaagagacttagactccaacaaaataatagtgggagactttaacaccccactgtcaatattagacagatcaatgagacagaaaattaacaaggttatttgggacttgaactcagctctggaccaagcagacctaatagacatctacagagctctccacccaaaatcaacagaatatacattcttctcagcaccatatggcacttattctaaagttgaccacatatttggaagtaaagcactcctcagcaaatgcaaaagaacagaaatcataacaaacagtctctcagaccacagtgcaacaaattagagctcaggattaagaaactcactcaaaaccacacaactacatggaaactgaacaacctgctcctgaatgactactgggtaaataacaaaattaaggcagaaataaataagttctttgaaaccaatgagaacaaacacaacataccagaatccctggaacacagctaaagcaatgtttagagggaaatttatagcactaaatgcccacaggagaaagtgggaaaggtctaaaatcgacaccat

SEQ ID NO: 4195 - DNA, 1233 bp, Homo sapiens
tattcagaatatgcttaaaaactcaaagacaaggatttgttatatataatcccacttttaaaccaacacagaaaaaacatgcacagaagtattttgttgttgtctgtttctttgaaaataattgaaattactgacgtatgataggaagaatatagaacttagaactaaggcctagttggtaccttttgctgtcaatcaacaggcttggacaagacataacctctctgaacctcttctgaaattgtactaataatctcaacatgagaaggtgccttgcacagtgtgcctggtgtagaataggcatgcagtaaatatttgttgggtttttttttctttttaaagattagtgagtaatatcatgagggctaaaggaggataaacaaaaacaaatgaggaaaaattaattttgccaatcagctagagattttattgaagttctgatagtgtgattggagcaggtgtatttagcaaaacctgtgtataagggacagaacatggtacaaggtccaaatacaatctggaaattttctttaaaaagaacaaaaagaggggctgggaacagtggctcatacctgtaatctcagtactttgggaggctgaggctggaggatcactggaggccaggaagttgaagctgcagtgagctatgatggagtcactgcattctagtctgggctacagagagagaccccatctcttgaaaaacaaacaaacaaacaaacaaacaaacaaagtaaggcatgtcaaaatggaatttttcaatgagtatggagttagttgagtcttttgagaaagttggcatcaaattttaaatccctgacaactttgaatattaaaaaaaaactttagaaaaatattaaaacatttggttttttccttaattacccatagaaacactttatactgtattttcaaacaaaagaaaaatataagtcccatagtatattatagtaattagccaatgataaaataaaattgttttaagctaagtttttttgttgtgtatatatatatatatatatatatatatatatttatttatttatttatttgtggaaaaaagtataaaaatattttaaaaatgtgtgaactaactccccattcacacacacatatacagctagcttcaccacaaaagcttctgctaccattctgttatctttccatccagttttgttcattacatagtaaaatgaaaatgattgggccaaattaaaagcaggaacacaaact

SEQ ID NO: 4196 - DNA, 1195 bp, Homo sapiens
atgatcatgccactgcactccagcctgggcaacagagtgagaccttttctcaaaaggaaaaaaaaaaagatatgcagaaacacatgagacccatttgaaataagtcagcagtcttctccatctcatttgatgactttgttcttctatttcctcagtccaaaagccctgaaaccttgcagttattttaaactgtttttctctcatatccagtcattcaggaaatcgtatcaggtctgccttcaaaatatatctagaattctttcatttctcactaattcccactgccctgatcaaaaccactattaaattgcagcagatttactgatttccctgcttctgatcttgtctgtcttcactctgttcttcacacagtggtcatattaaaatttgagtccagtcatgccactcctttgctgagaaccctctagtagctttccatttctcttggagcaaaagccagtgacattaccctcatccgtaataagactttgcatgatctggctctctgtttactctgacctctcttattttactccccattatttattctgctctaggctttctgatccctttgctgttcctcaaacttatcaaccatgcctcctgccttagggcctttgcacttctgttctctttacctggaatgtacttgcctcgaggtctgcatggcccattccctcactttcttcctatctttactcaaagtcacctcaggtcttccccatgtaccttgattaaacatttcagcctcctccatccttctcccaacacaattttccaagggaccatctaatcttgatttaatttttttcttctcaggacttaccgttgtcttctatgtactgtatattttacttgtttattttgtttcagtcattctagaatgtaagctcacaagggcagttctctgatttgcttgtagttagtcttgttcatagcacgtagatcagtatttggcacattctgagcatttaatatatattgttgaatgaataaatgaattactaaatggtgtagtttctttgacttgaagcagatgctccagcaatgtaagaatgagtctaggggagtgtgaaaaagcaaaatggggacttggaatgagatgaaaagtagtgttttgtagtgggtgaaggtagggaaatgttccttggcagtggtgacatggtgtagacatctgtttccctctgtcctcaag

SEQ ID NO: 4197 - DNA, 1127 bp, Homo sapiens
aagaacattagatattttagttttccagaacaaaagctttaaacttctgcagtaagttgagagaagggttgagaagaggaaaagaacttctcattttctatcagataagaatcacattagaaactaagtacaagattagacaacaaattatgtggtcaaataatatagtcattagccacctaaacattttaattccagatattatttaattccatataataactgaattcttgtgagtggattacaggtttttgatcccaaaattccagagctttcaactctctgaatttgtagtcctgaatatcccagtggtgggggttcccagcattgtgggtgctacttgcaaggccatagaatctagatggccctgtcttgaccctgaaatgaaccttaagccttagaacaaagtcatgcagatgccccatttgataataatcttattcacctgtgctctggtcctcggtttctgcatgtgttagcattgcattgataactcagaatcttgataaacacttaatatttgggcctgaagcattaaactttctttttattgtatatacttaaaaaatagaactcactgccctatcatacattgtagccctcttattctttggtctttcatatgcattagttaaatcccttaaagtagacattcataaaaacttacattgtttattggagtataaaatattacccaagtttcttcatgagttgacatgagctgttttaaatactggtgtattttcagaacagtaaaattactgaatatcagaaaaaatgttaattgatgatgaagcttattcccaaaatgccttttgtgcatatgatacttggaaagtcactaatgtgcctcagttaatacatcagtaaaatgttgtgtttcttttccagtgtagtgtttttggaatataaattccccatgctagtatagtatctcagcaaagagaatttccccccaggaggctcagtaaaggaataccgtgtcttacccatcgttatgatggaaggctgctttgaaaatggctgttttaccttataaggttaaaattttgatccatatgttaagtgatagaagattttggtgcaacagtagtaggatatatttctcctagaacatcccttattgg

SEQ ID NO: 4198 - DNA, 1189 bp, Homo sapiens
tttccttataaattacccagccttaggtattcctttatagcaatgcaaaatggacaaagacaccattctaactggggtaagataatatctcattgtgattttaattttcatttccctaatgattagtgatgttgagcattttttcaaatacttgttggccatttgtatgtcttcttttcaaaaatgtctattcatctcttttttgcactttagaataaggttatttttttactgttgaattatttgagtttcaactttttgcattcaatgtgatattaaccatgactttgccatatatggtgtttgttatgttgaggtatgttccttctatgcctaggttgttgaagagtgtttataatgaagggatgttaaattttatcaaataatttctccacatctattgaaatgatcattttttcttcattctgttaatcatatgtatcatgtttattgatttgcatatgttgaaccatccttatatcctttggataaattccacttgatcatgctgtattatctttttaatgtattgttgtctctctctttctttctctctgtctctctctctctctctctctgtctctctctgtgtgtctgtcttctgtcttactctcttcctctgcctgactttctgtcttctgtctctctctctgtctctctgaccctgtctgtatgtttctctccctctctctgtctctctttctgtctgtttctctctgtttctctgtctctgtctttctctgtctctctgtctctctctttctttctctctgtctctctgtctctctctctctgcctctgtctctctctctctgcctgtctctctctctgtgtctgtcttctgtcttagtctctttctcttcctgtctgtctctctctctttctgtctgtttgtccctctctctctgtctgtctctctctcttcctgtctgtctgtttttctctctctctctctctgcctgtctgtttctctctctctgtctctctctgcttctgtgtctgtgtctgtcttctgtcttactctttctctgcccgtctgtatctctctctctctctgtctgtctctctgtctctgtctgtctggttttttctctctctctctctctctgtccctgtctgtctctctctctctctgtctctgtctctctctctgtttctctctgtctctctctgtccatctctgtctttc

SEQ ID NO: 4199 - DNA, 1190 bp, Homo sapiens
agtgagtttaacctgaaatgtcaaaacctagatccataatatagcatcacatctcaataaatttatttggaagcagtttcttaatagtgcagtttatcaatgaactaacatttaaggatgaccctaaactatcataaaatttgattttttttgaaagctacctttcctttttttttttggtgggggggggggtggagaaagggtcttgctctgtcgcccaagctggaatgcagtgatgtgatcacagctcacctcagcctcaacctgggctcaagcgatcctctcacctcagcctcctgagttgctgggactgcaggcaagcaccaccacatccagcttatatatatatatatatatatatatactttttttttcttttttttttttgagactgaatctcactttattgtccaggctggagtgcagtggtgtgatcttggctcatcaaaacctccgcctcccgggttcaagtgattctcctgcctcagcctcctgagtagctgggactacaggtgcacgccaccacatccggctgatttttgtatttttagtagagacggggtttcactggattggtcaggctgatcttgaactcctgacctggtgatctgcccgcctcaatctcccaaagtgctgggattgtgtgagccacctcgcccggcccagtttatttatttttttttttcatttttattttttgagacggagtctcggctctgtctctcaggctggagtgcagtggcgcaattttggcttactgcaacctttgcctcccaggttcaagctattctcccgcagcctcccgagtagctgggattacaggtacacaccaccacacctggctaacttttgtatttttagtagagacggggtttcaccatatgaccagcctggtctcaaactcctgagctcaggtgatccgtccacctcagcctcccaaagtgctgggattacaggtgtgagcaattgcacccggcctaatttttgaaattttttgtagagatggggtcttactgtgttgctcaggctggtctccaactcctgtgctcaagtgatctgcctgcctcggcctcctgaagtgctgggattacaggcgtgagccactgtgcccagcctaagatacctacttttgatagggttgagaagggtatatcctttctttaatactagccatattcaaactgttacta

SEQ ID NO: 4200 - DNA, 1207 bp, Homo sapiens
ttgcaagaagttcttgagctgaattcctgttgtgacaacttcctataattacagtagataactttttcttttagtcgtatataacttttctataacttgtgatggacaagagatatgcttatccaataaaataagcttaaatattagatgctcttgggtcaaaatgtccttttaccaaattgacctttttatgagttctttgggtaaatactttaaagctttttatattttaaagaatacttgtaaaagcatatcacatcttaaaccagtggtgcacatgtggatttacagctcatggactctactgttcagctttaatttataaaacatatcacacatttaatgttatacagtatttacatatagtggaacatagggataactcagttttatgtaaatttttgttaagtgttgtagcctgcccagagtgacttctattttttcttctttgtctccaggtggtgaagcagtattttccaatttgaagattcatttgaaggtggctcctgccacctgctaatagcagttcaaactaaattttttgtatcaagtccctgaatggaagtatgacgttgggtccctctgaagtttaattctgagttctcattaaaagaaatttgctttcattgttttatttcttaattgctatgcttcagaatcaatttgtgttttatgccctttcccccagtattgtagagcaagtcttgtgttaaaagcccagtgtgacagtgtcatgatgtagtagtgtcttactggttttttaataaatccttttgtataaaaatgtattggctcttttatcatcagaataggaaaaattgtcatggattcaagttattaaaagcataagtttggaagacaggcttgccgaaattgaggacatgattaaaattgcagtgaagtttgaaatgtttttagcaaaatctaatttttgccataatgtgtcctccctgtccaaattgggaatgacttaatgtcaatttgtttgttggttgttttaataatacttccttatgtagccattaagatttatatgaatattttcccaaatgcccagtttttgcttaatatgtattgtgctttttagaacaaatctggataaatgtgcaaaagtacccctttgcacagatagttaatgttttatgcttccattaaataaaaaggacttaaaatctgttaattataatagaaatgcggctagttcaga

SEQ ID NO: 4201 - DNA, 1128 bp, Homo sapiens
agaattttccattttatgtgctaagagttttgttaatgagagaactgttaaaatagaaaaggagcttcagcatagacaccaatgctggttgctgagatcagtggggaactgcatagcattttaacaagtttaatgaacatttggaagagaaatttgaagctaagattctggtttttttgctgttaactttttaatctaaggaaaacttttatgtacagtatttttactttgggtatatgtttatcttttagcaagttgaaagacttaatttgctgcttgctcactattttgtaattatttgggagcagcagtaataagccagctttttggaataggatgttcctgatgtgtggttatgtaggaagaatgatgttttaatatactgcccagtaaactggtgcagtttggaaaaggtgtgttattgatgtggataatatttaaggcaattttttttaagcattttaatactgctttttgtctttacaggaaaatgtttataggaggccttagctgggacactacaaagaaagatctgaaggactacttttccaaatttggtgaagttgtagactgcactctgaagttagatcctatcacagggcgatcaaggggttttggctttgtgctatttaaagaatcggagagtgtagataaggtagtgtgttacgtgttctgatcagttaataatataaaatattaacatatggatagtttgatacaatgagtttgcctatttgtggttccccattttgatagtataggaaggaagaatagttcttgccccaatacgttttatgaagatagaggtaggttcaggaattatttcctgaataatttgtgttccaggctctgctaaattttgaaattaactttaaagatactatagacttaaagatgcctagttaaaaggatgtgttttagcaattcacagaagtccatattttgaaattttgttaggcaagcaacttttaactgaatcattattttgatcctgggctaaagggaagtagcagttatgtttgtatatagtgctaaagggaagtagcagtcatgtttgtatatattgaaggtaatggttatctagtaattggttaaatttgtgtatgtcctaccattcttacctttaga

SEQ ID NO: 4202 - DNA, 1177 bp, Homo sapiens
aaaatgttttctgtttgggcatcctgaggaagttgtattagctgttaatgctctgtgagtttagaaaaagtcttgatagtaaatctagtttttgacacagtgcatgaactaagtagttaaatatttacatattcagaaaggaatagtggaaaaggtatcttggttatgacaaagtcattacaaatgtgactaagtcattacaaatgtgactgagtcattacagtggaccctctgggtgcattgaaaagaatccgttttatatccaggtttcagaggacctggaataataaaaagctttggattttgcattcagtgtagttggattttgggaccttggcctcagtgttatttactgggattggcatacgtgttcacaggcagagtagttgatctcacacaacgggtgatctcacaaaactggtaagtttcttatgctcatgagccctccctttttttttttaatttggtgcctgcaactttcttaacaatgattctacttcctgggctatcacattataatgctcttggcctcttttttgctgctgttttgctattcttaaacttaggccaagtaccaatgttggctgttagaagggattctgttcattcaacatgcaactttagggaatggaagtaagttcatttttaagttgtgttgtcagtaggtgcggtgtctagggtagtgaatcctgtaagttcaaatttatgattaggtgacgagttgacattgagattgtccttttccctgatcaaaaaatgaataaagcctttttaaacaaaatccaaacttttaatcaagtcttgatatgtatgactgagaaaaaatacactacatctagagatgattgagatgttttgcaaagaattgaagggggagtgagaattggtttttcttgcaggggctttgaactctagatttgggctttgaactctagatttaattcagatttcagggtctatcagttcaccaactgatgcaaatttgaacagatactctaaggctaagtgtcctaggttggatgaactgaagctactatcaagatctcgttcccaaggattaatttagaacaaagtaattggacaagtttattggggaggggatagaaatgaattctaaagtacctataacaaatactctgtgtatgttttttacatcgtatttgccttttacattgtt

SEQ ID NO: 4203 - DNA, 1100 bp, Homo sapiens
tttcaaaaaactgttaaaagtgtggccactttgacaattagtgtcatcactgataggaaaagtgtaccattacatgatacaccgtggtgtgataggttttcttgggcaggagtccttgttttaaacagaacagtgtacctgtcttcggctttaatggaaaattgaatgattttccattaagtttaggaagtttgatactggcacaattggactttctgcctccttttttataacagctggaaaaatagtttttcaagcagatagcaatatatatgtccattctgccctttaagatttgcagagtgagagacaagaacgcatcattttatgttagaattgggggtcagaagttgtttcctaacaatcattgtgcattgtttcaggtcagggccaaaactggaaccaaggatttaataactattatgatcaaggatatggaaattacaatagtgcctatggtggtgatcaaaactatagtggctatggcggatatgattatactgggtataactatgggaactatggatatggacagggatatgcagactacagtggtaagaatatttaacttaattttataaagcagtggtattaaaattcattgttaacatacaatcctgttctgaaattgtgtgtatgggctttccattaaagtgttcggagttaagtgtttgaggcatgttacaatcataggatgattatactaacatagactggtggttataaatgaactaggatgtatgatttatgagtagcatctaatgggtgctaaaatatcttaatactttttatttagcatgcaaagatttgtagatttaatagtttgtgtttgtaaagaaagttttgtagaaaactatcttaatgagaattctgtgttttcaaaataggccaacagagcacttatggcaaggcatctcgagggggtggcaatcaccaaaacaattaccagccatactaaaggagaacattggagaaaacaggtgtgtataagagtacaggaaaacagtagaaatgtctaatttaatttaaagatcaatagacaaatgaaacgtaaaaacaaaatactatgtagcctgtttttactaaattgttgatttttt

SEQ ID NO: 4204 - DNA, 1285 bp, Homo sapiens
tttttgagacggaggctcgctctgtcccccaggctggagtgcagtggcgagatctcagctcactgcaagctccgcctcccgggttcacgccattctcctgcctcagcctcccgagtagctgggagccagcgcgcccagcctaaaaaacttttcaagtcaatattactacgatttaacattagagtgtggacatgtgatttaatcgctatagctaaaatacgtcaaatatacgttgtcatgtgcttgaacatgatgctaaccctgacaggatgaaggaaagtaatattctttcagtgtagttcaggagagcatttgttttcttttctaccaattaacccatcattgcttttaaacaaccatctgaaggagcagagaggcagggtagaagacagaagggggatctatgtggtaactaaagaatgtttctgttttgttaattattgtgtgtgtgtggttttattgtttgcttaagagaatcaaaaactgaaaaaaatgagaatacaggaaatggctcttgtttatttttttgctgtgtttacagcttgttaatgctctactgtctttgtttcaagagagatttgttcactgcccagctcgttttgtgtcctgagccctatggccagcccaccttataaatcatgcctgtttagatgtttgattttgttctgtttgctattgttatcttaaaggtgtataactctgacatgccagacatcaaattaagctcaaattaagctctcgtttaaatgtttaagcacctaatttatattctaattgatcccagccactgatgcatgtactttagctacttctgctaaataagcatattaattttccacatcagaccatcagatcttgagaaccaacagttatctagaattccgtgtctactaatgtttcacctgcatgcagccttcattaattttgtagcaaaatataaagtgatcattatgtagcttctggattaaaaaaatttgtgtgtgaagttgctttgtaaagtgcatgtggaattaatgggacagtgtgccctttgtgttagatgttagagcaaaagaaagggcttatagtgttagtattggagcactttgaagatagatattttcagaaaagatgtaggatttaaaagttaaattttaaattttagaaaaagatatgatggcaattggaaatagtcacaatgaagttcttcatccagtaggtgtttaacagtgttattttgccactggtaatgtgtaaactgtgagtgatttacaataaatgattatgaattcattggtgttcttgt

SEQ ID NO: 4205 - DNA, 1157 bp, Homo sapiens
ccagtttctccacatttttgtgcatgtgaagtggctgtctcatcgtggtgtttgccttttcttaaggactcaaaagtttgcagatacaggcattcacttgccattttcttaaggtagagttgaaagtactgctgccagttcatcatctgaaatgagggctgttttctttcctgtttaattggattgcaactatttgcctttcctaaagatgaaatagtgtgcttcctacattattctgacaacattcctttaattgttaatttcagatgaatttctgaaaactgcttttatcagaacagatttacttaaatgaaggcaatagccgcaaggggtcactgctctagatatttacttctgcataggaaataagtaatcctttatagatggaatttttttttcttagttgtatttttgtatctttacatttgtttataacttatctatactttttttgttgttgtgattattttactgttgacatggaagttctcaatctgatcatttggttatatcattgcttcttctagtaacttcatatccagtgattaaaccttttcactgctgttcacataatgaaccgttgtgattattgaatacttaaatgaggatatgtaagctgtattaaagatagtgttatttgcaaaggcattgactattgcacaaaaaattttaaaagaaaatatctcttttcaggaattgtactctcagagatgttgagaaaagatacatgggtcttggaagataattactcaaaatatgcagggaaggtagtatatctttctattttaaatgtattaagtattcctggaactatagcagtgagttggaaatggaggattgtccaagtaaaaaacatttattaaggctttaatgaaatctacctattttatggtatataatctcattaattgtccacttggaaagaataataacagatatttatttattggccagttactatgggccacaaattatgctgagctttttttaatttcatttcattttattttattttttgagatggggtctcactctgtcacccaggctggagtgcagtggcgcaatctcagcttattgcaacctctgtcttccaggcccaagcaatcttcccacctcagcttcctaagtagctgggaccacatgcatgtaccactaca

SEQ ID NO: 4206 - DNA, 1153 bp, Homo sapiens
agcaaagaggggttgaaggttacatagcactgtgactctagagataggactgttattcacaatgccagacaagttcttagaaggggacatatttatgcctcttaagagcatggataatattgctacaaaagatactgctatgaaagtttgtacctacattttgctgacaagctgacccattataagaataaagatgtaaattaaagagcaaaacatgtctgcctaaaagtacacagaatttcctgaaagacatctttgaatgacattcaaaaaaatttttctggatgtgagggcaatctggctgcaatatctttcgccccattgattggcagggttgatttggctgatctggctggctaggcagatgtccccttcttccctcaccactccatgtgcatccctaccaaagctgtgcactcggtcaaagaggacgaccatccccgagagagaaggactggtcttcagtcaagggtatatgagtagctatgtccccttctagaacctccaaataagctctcaaggtcaatttgtagcagaacgtagggtagtcaagcttccaagactccagacacatccaaatgaggtgctgcatgtggcagtctgcctttttaaaaaaaaaattccttactttttcttgctatttttaacctttactttgagaatatgcacctgatttttgtattaattaaaataaaaagatgaaagaaaaaggttatgtttttagaacactggatggtatatattgacctactgttatttctccatggttttacttaaatcacaccttgtatacatagaaaatgttgcattaatcctcttataagtgagcttagattttttgatagtaaaaagcaaatgactttttcataaaaccctctgacttgggtgttttgatgtgcataatgaagtttatgaagctctttaaatatattcactgtaaagcccttgttgagattatgaaacttgtttttaagaaatgattattttaatgatagtctttattacagaagttctttttcttattgttactctagtattttccttcactttcacggtagtgttaacattcaccatataattcatcattatgaatagagagagcaacggataaaacaagagtgttttgtttctggatgaatcccaggaaaatttt

SEQ ID NO: 4207 - DNA, 1146 bp, Homo sapiens
acagtatttgtggcttcaacatattttaagaccacaatttctaagcaaaaatttttagaaaaatttcatttttgcaggtcctaaatagaactaaagaaacatttttattttcaaatataagtgaatcagaaatgacattatttcatctgaaaaataacaggtaatattttctccccctgttaacagtggagagtgtccaggttcttggagtcttgaacaaagtattggacaaaatgcacaaacaaagcaaggaaggaatgaaaggttctattgaaaatgaaagtacactccacactgtgggagcaggcctgagcataggggctcaaaaggcctgttacagagtttttgtgagtttaaataccctctccctggggtacgccctgtgtaaatgaagaggatgaagtagagttacaaagtcatttacagtatacaccctgtggagagaatatttcctgttacagctgtagtgtgaattgaccttatgttcccctgcctccagaccctattttcctgcctcacccctatacagtttattgtatgatgagtttacacatttcagaatcttatcttgtctttctactctgcaactttttttttttggagacaggatcttgcttctcactctgttgcacaggctgaagtgcagtggtgtgatcacagctcactgcaggctcaacctgcctggctcaagtgatcctcccaccaccctcccaagtagtgggactacaggtgtgcaccatcatgctctgctaattttgttgtatttcttgtagagatggggttttgccatgttgcccaggctggtcacagctttgtcttttttctgtagtctgtaatttttttttaaaccttattgtgtgaatccagtgtcaaactacttttcttagatgttcacaaatggataattattcacatcggtatttgaagatctcttaacaagatccataaataccacttagaattgctcttactagtttaaaaactttgtaggaaagtaaaattgtagaatacataatatcaatctactgaataaaagcatttaaatgaactaaaataaaattttattatcaaatgtttgtgtgcttctcaatgttttatttttcaaacagaaaactctttaacttgaaatgttcatcaatttaaaga

SEQ ID NO: 4208 - DNA, 1180 bp, Homo sapiens
aagggaggagccagcacttacgcatttttcactctcctcctcactccctagggtcatagttttgattctgaagttagaagtgtgggggtcgtcggctgcattttcaacttggcctaaaagttggagttcaccacactgcaggcgctaggaactctgccgctcggtcaccaacctgagcctctggctagtccgaagaacgcgaaaagccaggcccaaggcactggttgtcatggcaaccggggcgctggtctccctggcgacctcgtccctagggaggaggtggagctggatgccaggcgggccaatgaggtcgaggggagctcggggtgggagatctgcggtcctcccagtgccggggaatggttgagtgacaggaccgggggggcggagccggcgcggctgcccgaggtggagccccagtggtgcgagtagctccagcggccacgctgaggcgagggtgacacaccatgctcacggcccctggagaccgtcgtgctggcgagccgtgctccgtagctccccggtccgcctcggcagcggtcagagtcgcctacaggagttgagccgcccgcgccagaaggttttggcgaagctcttggagaggcgtcgagcacagtagggcggcgggggtgcgttgagcgctcgggggtcaggcagtcggccgggatcgccgctggggagcgtttccgaggcgaggaggaggaggaggagatgctgctcctcttctccccctccccaggctccttctacagctccttcagcccacgcccgcagccgcttgtgggagaagtggtggtggctctcggcgcccgcggcggctgccggcggcccgccccgacgccgcgtccctgcagccctcgcccggcgctccagtagcaggacccggtctcgggaccagccggtaaggacgagagccgccctgggctctgcgctgcatgtgcagaagtgcaaaacaaagtacattgcgctcgttctcttcctcctctctctgctttcgctccagtccctaaacccaactcctcggttgccctggtagaaggaacttttctttggttttggtggtgggtgtttttgtacgttagagtgggggtggggtgactggagtggggaagaatgagatgaaactccattgctaattaggtagatccatctcctctgcggaagaaagccggattctcgg

SEQ ID NO: 4209 - DNA, 1110 bp, Homo sapiens
tgccaaatagtgaaaaccctgtaaaacagtgtaaaagtgaggcattatgtttgacatcaatagtagaaaacaaagatggggaacaacttgtttcaacttaatgtaaggcatactccatttctgttattggtaaattccagtatacctcttcatgaaagcttcaacgtttgttttagatcacctagttctaatgtggtgattttgtagtttcatatgtaatttattattcttacattatttttcctttcaaggaaaaaactagaataaatagtaaaaaatattgattctgcttatgtgatttgcagaatttctttggccctgagtttgtgaaaatgacaattgaaccatttatatctttggatttgccacggtctattcttgtaagtaataaaaccaatttgtgtcactcttagaaaataatttcagtagtgttaaaaaccagttaaaattcttataatgcttattttaataaatgccgtttattttttcaattgtagactaagaaagggaagaatgaggataaccgaaggaaagtaaacataatgcttctgaacgggcaaagactggaactgacctgtgataccaaaactatatgtaaagatgtgtttgatatggttgtggcacatattggcttagtagagcatcatttgtttgctttagctaccctcaaaggtaccaagacattttatattcagagtacagtatagaaatttagcaacaagcagacttcctatgtttgttaccatgcctgacctcattttgacaattagtaactaaatgaactagtcagtagaagtgagttaggaactccctttcttctcccagctactttcattgttttaatagttatgtttgttaggcaccttctgtatctgactgggaagatttttttattttttgctatggttatataaaaatatattttaattatattttagggaccgttttatatgttaatggtctacatgtgtactctagaaattagtatcctaatatgagcctgaatgtatagcaagaccttatttctgaatttccacatcagtttatttagtctactatcctaaaatcacagtgactttttaaaatgtcaattgaaggctaaaaattagt

SEQ ID NO: 4210 - DNA, 1173 bp, Homo sapiens
gtctgagtctacatttcttataatgtttttattttttagactagtgaaatgcagtagcaagaagtgggaaaagaattctattataaatagaaattatggctgggcacagcggctcacgcctgtaatcccagcactttgggaggccaaggcaggtggatcacctgaggttaggaattcggggccagcctgccaacatggtgaaaccccgtctctaccaaaaattagccaggtgtcggggcatgcgcctgtagtcccagctaattgggaggctgaggcaggggaatcccttgaacccgggaggcagaggttgcagtgagccaagatcatggcactgcactccagccggggcaacaatagcgaaactttgtcttaaaaaaataataatacctcgggatgagacatgggcagcatctgccttgtccggtgctggcccaagtcccatccctgccctgctccctttcagaactgcacctactactggggcttcgccgcgtggatggcctattacatcaatcaccctctctacactccccctacctacggagctcagcaggtgaaactggcgctcgccatctttgtgatctgccagctcggcaacttctccatccacatggccctgcgggacctgcggcccgctgggtccaagacgcggaagatcccataccccaccaagaaccccttcacgtggctcttcctgctggtgtcctgccccaactacacctacgaggtggggtcctggatcggtttcgccatcatgacgcagtgtctcccagtggccctgttctccctggtgggcttcacccagatgaccatctgggccaagggcaagcaccgcagctacctgaaggagttccgggactacccgcccctgcgcatgcccatcatccccttcctgctctgagcgctcacccctgctgaggctcagcccctcaacccggtggcattctgggggaggagtggggcccacagctctccagcacccggaataaagcccgcctgccccagtcgggaaaaaaaaaaaaaaaaaaataataataataataattaataaatagaaattatgataaaagtaacaataaaaacaactctgcaattgctagaatgttactacaaggggtagtagtaacatttaaaaacatttaatacgtttttggagtagcgcagaggctcacg

SEQ ID NO: 4211 - DNA, 1221 bp, Homo sapiens
atcaaataagggatgtggtagaatttagaaaggcccccaggtcagtgaggtacagttataaggaagtgaagatttagacagtaaggagggcattccacctggctattaaatataaaggttaatttacaaaacaaccttttgtatgtgtgaaggactgttatgggaagtggggtgaaagatggtctctatctctgccaaaaatagatcttgaagagataaatagcaaagcccatgaaggaaaacacagaagtggtgttcttttttatatatttagcaataggaaataatcttctgccttggatagtttaggaagtagcagatggtttaagtaccagtgatattatgattatatattggttttcgtccatggttcctggcccataactcccacagtccttgttagtcttttgttataatggtggggcactttaggcctcaggagacagaatctctctgtgaccttctcttatcttcctttcacttgcccaaggcaggactctaatctaattgtaagtctaaagacttttattccagagagttcctgccccatactctggaggaaggaatgctgtacagagaggccaagaaaaatctgaactgaagggtgttggttgatttagatcataccctttttgtccagtcacatttctacatggttgtcaatcttgcctacactatgaagtcttcataaaaggcccaagaggactgggtctccagagagcttctggatagctgagcatgtggaggtttagggagagtggtgtgcccagggagggcatggaagcaccacgccccttcccccatatctcaccttacacatctcttcatctgtgtgctttgtaatgtcctttacaataaaccgttaaacgttaagtaggtgtttccttgagttctgtgagccactccagcaaattaattgaaaccgtgggatcccaacttgaaaccagtctatcagaagttctggaggtccagacctgtgactggtgtctgaaggggtcgggggggggcagtcttggggactgagccctcaacctgtgggatctgactccatctccaggtagttgtgtagatagtaggaaaatctcctcctcccacgtttgatcacagaagtcttctgtgttgacgattgttgtgtgagagcagaggaaaaacacagaattttttgaaaacagcacctttttctcaagggattctgtggcttcttgaaaaaatgtgatcaca

SEQ ID NO: 4212 - DNA, 1155 bp, Homo sapiens
ctgtgtgagcaaaaaatatgtgagaaatgggctaaggatggaacatggaaaacatagaaggaaatagatgattggagacaaaaggagactgatatagaaatcaaggaagtaagatgtttcccaaaaaatgggatgatcagcatatcaaatgttgcaattgtgttcaataagaaattaacttagaggctgattggttttgttacgaccttaggaagagtaattttagaaggtaggtgagagtataaaccatattgtagtgggacattagcaagcagagatagttgatataccctattctttgaggggacaagaagaaaattttattagatttctagtaacataataacattgaatactatccaaataacttttttttgtctttttgcttttatccaaagttttggctttctaatttttttcaacttggcagctatgatttatctctattttgtggctttacctttaggtgtgctgttttgtgtaggtggtcgaggtggatctggtgacccctttcgcagtattgaatgctattctatcaacaaaaacagttggttctttggaccagaaatgaatagtcgaaggcgacatgtgggtgtaatctctgtggaaggtgggtccactcttgtctgaaatatcatatgatcacaatgctctttttaaaatatttcaactctgagaatttatttttatataagaaaatgactaaattgtaaattatttttaaataaaatgcttggttagtgataatttacttgctttgtgcccacagatgctcagtgtgcataatgtggagatgaatatcagagaaaagagatataaagagttaaactattctgagttatagttaccaaaaaactaaaccaaggaaaaatgtttatagaactcaaattataattacatatcagcttttttatgcccatctaattaaaattaatgattattagtacaattaatttttttttacttattcctgaaaatgaattaattttagaaccatggataaattgtcagaaaactctaaaagatcacttttttattataaaagtataaatgaatttttaacaatataaaaacattttcataaaaaatgaaaaccacttgcaacacaaacacccagaagtagtcacagttgacattttggtgtacaatcttgcc

SEQ ID NO: 4213 - DNA, 1111 bp, Homo sapiens
acctgtaactgcaatttgggaggtcaaggcaggaggattgcttgagcccaggagtttgagaccatcctgggcaacaaagtgagacctttctctatattccaaaaaaaaaaaaaaaaaagaggccaggctcggtggctcatgcttgtaatcctagcactttcagaagccaaagcaggccaattgcttgatcccaggagttccagaccagcctgaacaacacggcgaaaccctgtgtctacaaaaaaacaaacaaacgaacaaaaattacccagatgtggtggtgtgcacctgtggtcccagctactcgggagactgaggtgggaggatcacctgagtccagggaggtcaaggctgcagtgagccatgattgcatcactgcactccagcctgggtgacagagtgagaccctatttccccccacccccaaaaaaagcaagagatgagggaggataaatgtttcataaaataacaaaatgttgttttcagtcgctaaaattcacttgactatgtcttttttttttttctgaacaaaatggtttatattagccaaagaaacaagagggagttgagcattttaaataaattaatttttgtttactcatgtcaagatatgtctgcaataaaaatgtcacccattagtctatttttaaaaattctgttttctctgttttgaggagcttttatggaagcaccagactataatattgttctgagctcacttctggtactacacaattctctattagaatcccagatctccacttattggctgtgtgagcatggcaagtaattttctaaacctctttccttagctgtggaagggggataaaaataatacgtacttctattttaccagaattgaggattatttggtgttgtatgtgaaaacattctctaagctataatcaactataatattcattgatattactagtcacatgctgtattttaaaatgctgccagtacaatttattttctggtggatattgctatatagatactgtcagctgctttttttttaaatgggttggtcatgcaagaaagtatattgtttggtttggttatgaatgatttagttggttcttatgagtcagagagagaattatggaag

SEQ ID NO: 4214 - DNA, 1160 bp, Homo sapiens
gcctcaacataaaccttttgaaaagtataaaatttcttttttctcatctatgcgtgatttttctaacaaagttaaattgagttatgctaaaatacagacttgctctaaaacttggatcaagatgagattttaattagttataactgtttaacattgtcccatttttactattacaaaaaaagataagcatgtgtaagaaactactcccctcctaaaaatatatattccctaaagcatgttaataattttctcagaaaaaaaaatggaacattaattagctagcactgtggctggcacaggagagattcattaaattatctatgaggagagtagcagcagtttagtaaacaaatctcttttttggaaagctaaatgaaactttttttaagcaaaaacaaaggcttttttatgatttggagtttttgtggtctttaaattaaaactatgtatcttttttttgtaaattcagaactaagcatctcttttctgatactttgttatttcacatttcttcttatgaagattatgagtttaacgaacatgaaagagaggcaagaagctttgccatcttccatacaagtgacaggtggaggagagaaaaggccaaagagaatgaggaggactggttaactttcttgagaaaatctaagtgttaaaagttagtgctacttcttttgtccttcgatctcaatctttcataatcatttaagccttgaatataattttctgtcctttcctaatcacttctcagagtacctgatgaagaatatggagtccatgaaaagaacacagttagagtttgggttttttggtttttttggggttttttggttttttgtttatttgttttggaggtggggatgttgagacagggtctcactctgtcacacagatgagagtgcagtggcatggtcacagctcactgcagcctcaacctcctggactcaagccattctcccacctcagcttcccaagtagttgggactacaggtggactctacaaggcctggctattttttttttaattattttgtagagacagggtctcattatgtcactgaggcttgtctcgacctcctggtctcaagcaatccccccatcttggcctcccaaagtgctaggattacaggtgtgagccaccatgcccggtccacacttag

SEQ ID NO: 4215 - DNA, 1200 bp, Homo sapiens
tgtctttgatattatgaacagtgttgcaataaacatatgagcacatatatctttttgttaggatgatttgctttcttttttcttttcagacagtctcactctgtcacccaggctggagtgcagtgatatgaactcagctcactgcaacctccgcctcccaggttcaagtgattctcctgcctcagcctcccgagtggctgggattacaggcacccaccaccacacctggctaatttttgtatttttagtagagatggggtttcgccatgttggccaggctggcctcaaactcctgacctcaggtgatccacctgccttggcctcccaaagtgctgagattacaggcatgagccaccgtgcccagctgatttattttcctttgatgtatactacccagtaataggatctctgggttaaatggtagttctatttttagttctttgagaaatctctaaactgcttttcacaggggataaactaatttacattcttaccaacagcatataaatgtacccttttctctgcaaccctgacaacatctgttgttttttgactttttaattatagccattctgactggtgtgagtgagatctcattgtggttttgatttgtgtttctctaatggtgagtgatgttgagcatcttttcatgtttgttggctgcttatatgtcttaggaagtgtctgttcttgtcctctgctcatttttaatggggttatttattttattcttgttgactggtgtaagttccttatagattctagatattagtcctttcttggatgcatagtttgcaaatatttcctcccattctgtaggctgtctgtttactctgttgatagtttcttttgctgtgcagaagctctttagtttaattaggtcccaaattgttatattttggctttgttgcatttgcttttgaagactcagtcataaattttttgcctagcctgatgttcgcaaggatatttcctagggtttcttacaggatttttatagtttgaagtcttacacttaagtctttaattcattttgagttaatttttgtatatggtgaaaggtaggggtccagtttcattattctgcatatggttagccagttttcccagcaccatttattgaatggggaccctttccccttgtttatttttgagagacattaattttaaaccatgtacaacagtgtctgtgatacaatc

SEQ ID NO: 4216 - DNA, 1197 bp, Homo sapiens
aaagtgagaaaaagaggcaagtgaagaaaaacaagatggcattgcatgaagaactttcttaggaaggaaggcagcaaagaggtaaaattggaggtgtagtcagagatggaagatgaaaaaggaaaataacaatatttcagaaatgaaatgaaaaaggtcttttactaagtaattggtactactacttgtcagtttcaagtgctgtaaaaaaaatgggaagaaccacacatgtgcactttcagtactatgtattttatgcttcagggatgcatacctgtttaacaaaagtatgttttttctcaaagtgtgttgaatagtccagaaaaagatggaggtagaagtcagacttcaggagataaaggaaccagaaagatcattgaaggctgtgatggtagaaaacattttgacaaagagttgtgcaatgagaaagctaggggtgggacaattaattttgagggtaacaattggggatttgagtagattttttgcttctgttctttaattgttttgtcttctttttaaagaaaccaagagactgttaatgtagtaggagcagagtttcacaatacagagcagagagggtgttggttgataaagaattgtctcaaatgagaggaaaagaatggagccaataacagagatgatgtttaatttgggaaaggtgggacatgttaacatgagtccagagaactaaaatgagcttatggcatgcagatgctgaagatgaagaaaggaaaggaaggaaaaggaggaatttatatttatttattgaataatcttgtaaaactgttaatcacccctttttactgacgataagacataaatgtcagaggtgttttgcctaaagtaaaaaattcgatagtcaagctgggtttaaaaccatatcagtcttacgtcaaagcatgttttaattgctgttgtgtggttgtgattttaagggaagaagaagagttttataatgggttctctgaaaaataaaatatcaattagaaagaaacaaaacaactgctgagaagcagtgaatccaagcagaatctgagtatcatcactttttagttaaactaaccagtccaatatcctgatttttctttaacaggcaaagaatttttgagtctttcccatagactgagttcttgtgaactattttacagcaataatggcatccaatcctatagataacaataacaaagctgcaga

SEQ ID NO: 4217 - DNA, 1177 bp, Homo sapiens
ctacatgtaacagaagtatcattctgcccaccttagtaaggatatccaattctgagaactcagatgctccacttctgttttttaccattttcttcttttcctttcccttccccctccttttccacttcctcgtccttcacgctgtactgagacatcatttagttcatcttattaaaatgtacaattaaactattaatagtaagtttacagagttatatggccatcaccaaaatccatttgtagaacttttccatcacccaacaagctctctcaagtccaatcaattgacagttccatactaccttcaagccaaccacgaattgtttctatagattagcctcttctgggcatttcattaaatggaattagataatacaaaatcttttgtgtctggcatcttagaatgagtttttgatgtttatctatgttgtagcaagtgacaagatttttttcttttaatgatgaatagtgttctattatagggatatatcattttgtttttccagtcaataattgaagaaacttagtttccagcttctcttaggaaaagtgctgtaatgaatatttattgaatagtctgtgtgtgtgtgtgtgtgtgtgtgtagctgtatatatatatgtgtgtgtgtatatatatatgtgtgtatatatatgtgtgtgtgtatatgtgtgtgtatgtgtgtgtgtgtgcatgtgtgtgtgtgcatgtgtgtgtgtgtgtgtgtgttttagcctgcttaggctgcataataaaatacaacagactgggtgtcttaaacaacagaaatttattttcttacagttctggagtctgagaagtccaagatcaaggtgccagccaggttgaagtctgttgaggactctccacttaggtttcagagggccaccctctttatatgtactcatatgatctcttctttgtgtgtgcatgaaaacagagtgtgctcaagccctctgatttctctgcatagaaagacactaatcctatcagataaggactccatccttatgccgtcatttaaccttaattacctccttagaggccctgtattaaaattaatccacactgagcattagtgttcaacatatgaacttttgaggggacacaaacattcagtcatagcatcttactagggtagatatttagggagaaattgctcagttttatgatacatta

SEQ ID NO: 4218 - DNA, 1202 bp, Homo sapiens
cgccacgcccggataatttttttgtattttagtacagacggggtttcactttgttgcccaggctggtcttgaactcctgagcaatccacccaccttggcctccgaaaaatgttaggattacaggcgtgagccaccatgcccggcccgaccatgttttatatattcgtcactgaattctagaactgaccactgtttctgacatataatagtggttctccttaacactaactttatgcttggaccaaatcaggtttcccgtcagtattatattctacagtatatctttcatagtaatactgtgttcaactttaaaagcttgttaattgtgatcatactcttactaggattatactaaaggttctacttgtgtttgtgaacatacatgacaaaaacacacatattaaaattatttgtttccgagttttatactatctaatgacacaactgtgtaagcatggtattttactgtttaaaattgtaaagtatcctgttaaactttacttttaaatttttcttaagacttcttaagttgcagtaactgtctatcagatgttgaccttaacaacatctcctgttaggtagaatgacaaaattaaaatggagcttagttgaaaaaaaaaaaggtttggccgctttgaagataaagatgcatatgctaggaacaggcatggtatgctctgtggtcagggaaggcctccctgcagaagtgacttctgagctgtaactggaatggtaagaagatcatgatgcatattactaaggacagagccccactcccttaaaccattccagggagggaggaggcccccagtgaggaatggctcatgctttccaggggggtacacaccagaagcaaggcttgcaggtgcagaagttcctgaactcacgtatgatgtagttgcagagagttttcaattttcatggagctgtgtgagcttgaaagatgacagtcagtttgaaagatgaccatggaccagttgccagaggggtcttcctgaatagcctgctatgcagaggaacttaaggatttttatatgtccttgggagagggaagagaggagagaaaactctaacaatggctaaaattgaatttccctcaattcagaggaatggggacttcacagtcagcttcattaaagaatatgtgacatttctagcaaaaaaaaaaaccaaaaaacaaggtttggcattgtagttatttg

SEQ ID NO: 4219 - DNA, 1200 bp, Homo sapiens
aattgtctcaggtaatagttattactatttttagcactatgacttaccaaattgaagtttttgtttgtttcttttgtagaagtgtcaaagtctcatctctgcctaaaccatatatttttttctggttgcctcatgttctgtcacagtcacagttaacatcctcattctcaatcctacccatgatgcagacagattgcctcatttcagctcaataaaacatcaccaaattcccttaggcagaaaaagggtggggagtgccctttcttgaaggaatcccttaagtgcacgtctcccgttttcttttcacatcaatgcagagtccctctgtgaatttacaacacccaacacccatgagttcagtccttaagaaggaaaattgagcaagtatttaattggttggacattgcataaaagaggtccatatccaggctaactctagaaattttattctcaaacttagttggcctctttttcttctgtcagaggaccattcttagtggcactggggaaatcttggcacccagaagaattcaactgcgctcactgcaaaaatacaatggcctacattggatttgtagaggagaaaggagccctgtattgtgagctgtgctatgagaaattctttgcccctgaatgtggtcgatgccaaaggaagatccttggagtaagtattggaaacgtttttattctgaatgagttttaaagtagaataattttttgatatgaaagtcttctatcactttaactttttattttcttcttgctttatgccctctctgctttcggcactatttattattgtaaagcaaaactaaatagacctctgtggaaatatatcggactcatggggttaggttgtctttggttttgtctcactgagtgctggcttgtctggtgaaagtctagccactgtggggaaaaaataatttactgtgggtgtgcttcctcaacaggagcctgtttgctcaggaatgaagaggtcgcataggaccacacacatctgagttcttagaactgacaccttcactgttttaaattaaattccatagcttttataagagcagtatttccctacttgtcagagttcaagcacaggacactgatttcatgaaatatataaaacatgaggtttataaatgatatatttttcttgaatacatacagtgtttaaaaatataacctcagttttatgagagtgca

SEQ ID NO: 4220 - DNA, 1176 bp, Homo sapiens
atatatttgaagtaaggagttgaacaaactgacttgagtgaatattaatcatagtgaacaaaatgggcccgttaagttattacagttcatcatatggtcttcattccaaaatatttacttatctaactgggaatgttgaccagtacttgatattttataataatgcaggtaagcataatgtgtgcctgacataattatgtgagcttttgaaaacactttattgtcataagatgtagcgaggacctgctgattatcattagacagcttgtgtatttaggtaatgaatgatttggtaatagtttttattcaggcttatgccagaaacagatttatttttaaattattttgctaaaagataggaaaagctgacatgtgatgtttagcagtaagttttcccaggtgggtagctgtttgttttagtatgggagaacttatttttaaaacccttttttgtgagtttaaaggggcaatggacttaattgttctggtcatgcaaaatatcttttattctggatgtcttctgactttatattttgaatatatatctatttcaaatatctatctatctatccatctgtctgtctatctgtctgtctttctctcctgactgtcacaggacagaagcaaagagagaggatccatcaactgaagagtcattagcactggttgtttttaatatacgccatcattgaattctctcagcaaccctttaaaaattgggtgttattattaccctccctttgtaaattgggaaattgaagcaacttcaatttcccaatttcccaagtaatgaattaagtaagacccaaaatgggtcttggattcagattccgtgttctcacatgttcccttcaataatgtggatctttcatggggtccccagtggttttcatcatcttagtcaagaggagagagtataaagacaccccttaatttaagactagattatcccttcatcattgggaaagttgaggcatttgacctaagctaaaagtgaatgaagcaggaggtagaaccctaggaccactcatagatggagctgcttgttagactacatagcaggctctggcaagtgggctctctgggatgaagtggtgcaagcaaggggagaagatcaatataaacgtgcttgatggtatagggtaattgatatttatttcataccaaggcactgta

SEQ ID NO: 4221 - DNA, 1100 bp, Homo sapiens
aatataaaagataaaaaagtggtacaccaatgtagggcacttaccacgaatggagcttgcaggactggaagttgctctgggtgagtcagtgagtgagtggtgagtgaaagggaaggcctaggacattactgtacacaaatgcagactacattaacactatacttaggctacattaaatttacaaaaaatatctgtcttcaataattaacctcagcttactgtcacattttattttattaacctttttttagcttttttactcttttgtaataacacttagcttaacagattgtacagctgtacagaaatattttctttatatccttagtctataagcctttttttaaaaattattttttatctttaaaacttttttgttaaaaatgaagacaaaaacacacacattagcctagacctatacaggatcaagatcatcaatacatcactagacaataggaatttttcagtttcattagaatcttatgggaccacagttattccgtcattgattaaaatgtcgttatgtagtgtgggactgtagatatgtgctctctttggagaaaaaaaaagagaaactacctaaatgaccgtatcacctctaaatattttcattcataagagactaaaatttctttactgtagtatactataaatatgcaaactaaatgaaacttgttttaaagttaaaagctggagatccattttagaaactaacacataagcagaaaaaaaattttgtggttattagttggaggctagaaaagaaactctttgaactatgaagttactaagtcttagctagagaccccaacaaatgattaattattgctaagaatcttttaaaatccagttttaaagtttaagtgttgtttctgtggaatttttccctcacctgcccccttctttctgtgattctaattccaaaattgagaagacagagctttttacttttagggaagctaaacctctttcttgctctaagaaggttgacctgctgatgaaagaacagaaggttggaattcttttgagcaggaatagctgtgcaaatgcttatttcattgttctttggccaatctttttagcactcaagtattagaact

SEQ ID NO: 4222 - DNA, 1174 bp, Homo sapiens
ggattggccagcttctggccacgtgacggatatgtccgtttggccctggcggcacctgcgcaagactgcggctgcgtgagtaacgagaggcttctgggaagtggagtctctcccccaccttttttttttttttttttttaaggtaaagaaattttttttaaaaaggactggtcacgtggccgatgggtagggtgcgcggttctcaacgcggcggacactcgcttgctggagggtggtttcagtcctctgctcttccgcctggatagctgcggtcacacttactgccaggcaagcctactgtgccctttgtcgccctgtcctcccatcttccccggaaggttgggaactgcaggctcagcacacacaataaggcttcatttgcttagttgaggtcccaggacaagttgcctgtgtgtttatttagttttcttttgatctcccaccattttctcttagtttcaaaaagaggcggcgatgcagagtcgtttaggcaatcaaccctcccacgtcccctggctcagctaatgctggtggtcattcgttgccatttctgcgaaaggggacggacggaaccgcccgcagtacccgcttgccaccggctggacgagggggagggacgacagcttttactgtcccaaatcctgagattaagacctcagggctaaatcttgcgtggcggtaaaaattatttggaagttctgtgcaaccgttccaatattccgcttttacgtgcacggaaatagcctaagtccagatgccagccagggaagccactccgggccccgctgactaagccctggactgatggtctggagtctttaggccgggtcaactatgactcttgacgttgactcattctccttaggcgagtgacttaatcgctcggcgtctcagcttttttatttatgaaccaaaggtgatgatacacttacctcacaagggtgtgcttcgtaatgactgtaaccggctttgaaaatgcatcggactctagaaatgattcataataagcaactgcgtgccttcctaaagatcaagtgcttctgctttttttttttagcaaagtttaaatttttttctgtttactttgtttgattatgatgtacaccagtgtagttttaaatgttcaggaccattttttttcctttacaactgcagctgccctcaatagaggctt

SEQ ID NO: 4223 - DNA, 1241 bp, Homo sapiens
aactggcaggaaatgcatcaaaagacttaaaggtaaagcgtattacccctcgtcacttgcaacttgctattcgtggagatgaagaattggattctctcatcaaggctacaattgctggtggtggtatgttaacttctaacattttaaaaaatttcttcagaggaaggaattttttgctgcttttaattagtttttccaggagaggaaatttaagtatattttcaatgatggaagtatggttgtatcatgaaatttgatttatatgtataactcaatgaatttttacttcatacttgagctgcatgtttttaaagatacctttcaagttgaacagtatacactttcttggtttcaaatactgtgattttttaaaaaatcttaagtagaattaattcctgtcactctcctaggtgtcattccacacatccacaaatctctgattgggaagaaaggacaacagaagactgtctaaaggatgcctggattccttgttatctcaggactctaaatactctaacagctgtccagtgttggtgattccagtggactgtatctctgtgaaaaacacaattttgcctttttgtaattctatttgagcaagttggaagtttaattagctttccaaccaaccaaatttctgcattcgagtcttaaccatatttaagtgttactgtggcttcaaagaagctattgattctgaagtagtgggttttgattgagttgactgtttttaaaaaactgtttggattttaattgtgatgcagaagttatagtaacaaacatttggttttgtacagacattatttccactctggtggataagttcaataaaggtcatatcccaaactagttgtgtattaaatttgcttggttgtaataggaacttgttttgagtatctcatctagcagcaataactaagcacatttctttgtgactgaactgtcaaatctgtagatcaacaaagtgagatagcccaagtatatttttttaatgttatatgagctactaaagttttaatttaaaaagttggcaggagctggagtgggattgtcagtttcttaggctaagtgtgaccatttcagtttgtacattggcttcgcttgctgtgtgacagcactgcactagtatgctgttagcatggtggacttggggagggagagaataggtaggaatgtcctgtatatccacagaatgaactccgaatttaaactttaaagataatagtgctacgtgccaggcc

SEQ ID NO: 4224 - DNA, 1374 bp, Homo sapiens
taaaagcctagttctggccttggtggaaatttctgtggatagatagaatgtgtatactattttaacatttgtccataatgaactgtaaaaatttcttcacgttaaaattagagcatgagctcggtggtagagaaagaaagggtcttttgatttttgttagcctcccaattttcagtgctgctttcttagttgtttttaaaatactactttcagagcatcaggctctcatttcccacattgctttgagtaccagtgctatttctcccttgttggcttttattctaatcatagtcattagagatgacttcatgatgagtctggagatgataaaatggaaatctttcccttccatttaaagtattaggaattctttattttaacttttaaaaataacatctttatttacaggtacaacagaatatctcgggaatggactcagaagtatgccatgtgatgctaccttaaagtcagaataacctgcattatagctggaataaactttaaattactgttccttttttgattttcttatccggctgctcccctatcagacctcatcttttttaattttattttttgtttacctccctccattcattcacatgctcatctgagaagacttaagttcttccagctttggacaataactgcttttagaaactgtaaagtagttacaagagaacagttgcccaagactcagaatttttaaaaaaaaaaatggagcatgtgtattatgtggccaatgtcttcactctaacttggttatgagactaaaaccattcctcactgctctaacatgctgaagaaatcatctgagggggagggagatggatgctcagttgtcacatcaaaggatacagcattattctagcagcatccattcttgtttaagccttccactgttagagatttgaggttacatgatatgctttatgctcataactgatgtggctggagaattggtattgaatttatagcatcagcagaacagaaaatgtgatgtattttatgcatgtcaataaaggaatgacctgttcttgttctacagagaatggaaattggaagtcaaacaccctttgtattccaaaatagggtctcaaacattttgtaattttcatttaaattgttaggaggcttggagctattagttaatctatcttccaatacactgtttaatatagcactgaataaatgatgcaagttgtcaatggatgagtgatcaactaatagctctgctagtaattgatttatttttcttcaataaagttgcataaaccaatgagttagctgcctggattaatcagtatgggaaacaatcttttgtaaatgcaaagctgttttttgtatatactgttgggatttgcttcattgttt

SEQ ID NO: 4225 - DNA, 1176 bp, Homo sapiens
cacaatagtcttttctactaaccattctgagacaatcggacagtctcatgcaaaagaatgaagttgggcctcatcccatacacaaaattaaataaaggtagatcatagacctaactataagaactaaaactctataaaattcttagaagaaaatatgagaataaatcttcatgaccttagcttgggtaaaggctaagacactaaagtacaaccaactaacaaaaaatagattaattagacttcactaaaattaactttttgcctcagaagttttaccattagaaacaaaacatatatcataaggaaagctaaaagataatctcaggagaaatatttgcaaatactatatttgatgagagaattatatctggaatatgcaaagagcgcttataattcaatcataaaatacaaacaatttagaaagtaggcaaaggatctgtaaacatttatctatggaatatgttaatgcagatgtccattaaaaacaggaaaagatgctcaatgtcagcaacagtaaaatgcaaatgaaaaccacatgagatactatttcacttttattatgataactaagataaaacagacatagtaagtattggcaagaatgaggagaaactgcaatcctcagacactggtggtgggaatgtaaaatggtgaggctgctttggaaaacattctggatgttcctcaaatggttaaatatagacttagcatatgatacatcaatttcactcctcggtgcataccccaaagaaataaaaacatatgtccacacaaaacttgtacacataatttcataacagcactatgtataatagcaaatcatggaaacacctcaaatgtcaaaagagaactaatatatccatatgatggactatcatccaagctaaaaatggagtaaagcgttgatacatactacaatataggtggaccttgaaaacattatgctagaagcattcaaacaagcagtcacagaaaatgacatactgtgattccatctttactatatgtctggaataggtaaatctataaaacagaaagtaaatttgtagctgtctagggctgaggggtttggaggggaatggagaataactgttaatgggtacaggttttattttgagaatgatgaaaatattttaaaattgattttgctaacagttgtatacatttataaataaa

SEQ ID NO: 4226 - DNA, 1182 bp, Homo sapiens
gagcaaagggttaaatatacctttctccacagaatatatatgaactgccaataaggacatgaaaagtacattattagtagtaattaggaaaatgcaaagcaaaaccacaatataacacttcacattaactaggatgactaaattcaagaagacagcaataacaaatattggcgagaatgtggagaaattgtaacactcatatatgttgatgtgaatgtaaaatgatgcgaccattttggcaaatagtttggcagatgactgtttactcttaaatatggagttattatatgatccagccattccattccttggtatgtacccatgagaagtgaagacatgtccacataaaaattggtacataaatgtttatagtagcattatttgtattagccaaaaactggaaacaaccaaaatgtccatcaactaatgaatcgataactaatacatggtatatccatacaatagaacatggtttgaaaattaaaaggtgaaagaagttactgtctgctgctaatgtttccactacagatacaagaaaaagtctcttcacactttctgtctgtctgattgtagcagcctgagattgaatagaggaatacaggagggaaaacccagaaagagaatttttacggctcaggaataatcttgtaaacactaaagagcctgttttactacaaagaaaatcctaaaatttggtttacatgagaagtgttgggaaatagctcctcctatcctaacctagctggttacatttgtaagaacttaaaggctaaagctaattaaaagcaagccaataataaaaagaaaaggaagaacataaaaaggaatgaaattccaatacatcttacaacttgaataaaacttgaaagcattatgtgaagtgaaagaagtcagtaacaaaaaaacaaatattgcatgattccattcatatgagatgtccataatagtcaaatctatagagacagagagttgattagtggttactaacaactgggttggacagtgaagagagaagtgtaaggaagggtgaatgactggtaataggtatcaagtttctttttggggtgatgaaaatgttctaaagttacataatagtgacctcattccatcttacttgccatctatcttcataaatagccctgcttgtgtttttgccagtttcctccctccccagcttctact

SEQ ID NO: 4227 - DNA, 1180 bp, Homo sapiens
taaaaaaaactgtagaaatgaaggcttgttattctcatttccattacataaatggttgctcaaatgtgaatttctaatttatcatagtttatggtgatacattaagagactaatgtgtcatttgtgttttgatttctacattctagagagacagtttaatcagtccgtgaccaaaatcaaacagagtaaactgtgtcatcatggagatctgcccaggaaatccccaaaatacagaaggatcagaagtagatggaaataatgtcatagaacgtctctcacaactgtgttataagaatgacagggaagctacaggttacaacagatttgtgaactcagccaagcacagtggtggcagggcctagctgctacaaagaagacatgttttagacaaatactcatgtgtatgggcaaaaaactcgaggactgtatttgtgactaattgtgtaacagggtattttagttcctgttctgtggaaagtgtaaagcattccaacaaagggttttaatgtagatttttttttgcacccatgctttgattgctaaatgtaatagtcagatcgtgacgctgaataaatgtctttttctaaaaaaaaaaaaaaagaatgacacatatttgttcttcattcttgtttcacattagtagtggcatttctcatgctctattttcccagccttgttctatattttgagttatgtgaataaaagtatgccaggatgcaataggaagggtgcttaatattcatccttgtaggttcagggagatctttccatggaagtaacatttgaactgagatctaaaggatgaataggaattattcaggccaagtggtaagtcagagaaaagtgcttgctttagataaacgactgtatctatattagagacataagagagcatgacatgtttgatgaaataaaattaattccaaaagccttacagaaagtaaagaggaagagttcatactattgggatgcagcagtttgcagggatcagattatgagggttactttaaatcatggtaagggttttggaatgtggcttaagtggactgagaaatcaataatcgatttgaaaagagaagaaaatgattagatttgggctttgaaaatatttttgtagttgctgtggggaaaatggattgagagaacacaataacagaggctaggacacctatgaggagag

SEQ ID NO: 4228 - DNA, 1191 bp, Homo sapiens
ggtaagactgttactttccagaaagtgaaagcaaattagtgtgtcattggaattctgagaacttaaaagaagttcacataggggagttaaatgtactttttaaaaaagagagaggaaaagatgtagatagacaaattatattttaaatgaagaaagtacattctactggtttccctctattccctttttcttccctctcctgtcacctctctttcactttcttcctcttcctttcactccttccttccctcctttcttctttccttacttccatgattttgatggtccaactgctgttgggaactgttttgaaagcatcctttgactaggaataaaagcatacgatactggcatttttaccctgaaatctcttttgttcatatgactaacaagaagaaactaaggaaggagtgttcatcgatgacaaaagctatttctgcacctagtttttgtctcttcttgtacaaatgaagggaaaagtaactgccctctaacgaaattttgatgtcctagaaattttaagttctggaaatagcttggcatgatttaattttgtttggagtcagacagacttcagtttaagttctggctgtgctacttcctggctgagtgactttgggtagatcattcctgaatttcagttgctcatctctaaagggagatgattatacctacttgtaaagttgttggcaatataagaaacgatttatttaaagcatctggctttcacataccagtgttgaatatatgacaactattattattctttgaccaatttttcctctatttttctttcctgttttattcttgctcaggatcctctttacttgtaaacctcgattctaaactggaagatattaccatttctaagatgactgaacctcattaacaatgtattaatcttagtttatgtacctttttttgcacttgaaacaggaagagatttcttttttgtcattcttgtatataactgagaaagggagaggtctgatagcgtgaagtgcatgtaacctcaggatcaaaagtaaaatgtgaaaactacaattaaaatatgagctcaagtctataaaccatatatattccttatctcattattttaccctgattttttctatttttatacttttcatatacatatatatgagaacagtaaataaattttatttagttaaaaacattttttagcatctt

SEQ ID NO: 4229 - DNA, 1197 bp, Homo sapiens
gaccatcctggctaacacggtgaaaccccatctctactaaaaatacaaaaaaaaaaaaaaaaaaaaaattagccaggcatggtggcaggtgcctgtagttccagctactcgggaggctgtggcaggagaatggtgtgaacgtgggaggcggagcttgcagtgagccaagatcgagcggctgcactccagcctgggcaacagagcaagactccatctaaaaaaaaaggaagttgtatgctttcaactcccaaaaccaatgttcatttgatttggacatttaactggctattaataacataatggtgttgaaacagaacgtgattgttaagtctcaactctcttctttgagtctcacccatcttatattttggtaagctaataatggcaacagttaacatttttttgcataaagcttctcatgtatgttccagaagcataatttcttacatttaaatgataatattgacgatctattatgctgttatttaaataaaatctttatgtaaatcatacatttgtgcataattttggagtattttaaactactattgtacaacgtgatagtgtagggaaaaaaatcttaagttggtcgtttacaacttcagtgtccttaaatagagcaggtggattataatcaatatttgtataatttgttttttgttttcttccttctgtgtatgactaaataatacttttaaaaatgatgatctcttgtttggaattttttaaaaaattgtatgacgatggattgttcatttataatgtgtgtgttgtccttgggaaacaagatgacagtgatacatttttaagaaaattaaaggaaaagagaaaccagaagaaccagaaactattgtttataaagtatctaatgcattctttttaaactctaccaactgtatgtaattgtttaatatatacttgcaaagatttttagggctaaaattgacatcagttcaaagttgactcttattaccttcttcctggtgtgaagacgagcacatcccagctcctcttgaccaaggcagtgaacagcctcttttccaacccctggatcaccaagccacaagtttgccttcaaggggtgagcgtgcattgtcccaggtggtctgctcttcccacctgcatggcttcctgcagttatgtcacttcttgcaaatgttctgaagactagcccaggagtgtccagccttcagccct

SEQ ID NO: 4230 - DNA, 1131 bp, Homo sapiens
agaagattatcggtatttatcttcggtgatagaaaaacagtgctttattctgttagagagtaaggggtaattcaagaactgattcaaaatggccttgagggaactttttaaggggatgaacatttttgtatcttgatcagatattacctatatggtgtatgtgtgtcataactaaatgaaatatgcactgaaaatgtataatatatgcattttacctatgtaaattataccttaatttaatttttttttttgagacggagtctcgctttgtcgccccggctggagtgcggtggtacgatctcagctcactgcaagcttcacctcccaggttcaagtgattctcctgtctcagcctcctgagtagctgggactacaggcatacaccgccatgcctggctaattttttgtattttagtacagacagggttgcaccgtgttgcccaggctggtcgcgaactcctgagctcaggcagtctgcctgcctcggcctcccagagttctgggattgcataccttaattttttttttttttttttttaagaaagggttgttgagttattcacttggcttgagttctcaatccctcatagagaaacagtattgtgttgttaatgaagatgtttgagccactgacttttttaattttttggtttttagaagaaagagtatgaattagttattgcttaacaagttacctcaacactttgtggcttaaaacaacaataaaaatttattaactcatataattcctttggatcagaacataggaatagcataactagatggttctagctcaaggtctcacaagatttcagtcaagataacagctggacctccagtcatctgttataaaagcttttctggagttgggtgatctgtttctaagatggtttacttataaagaaggtgctagttgttgacaagaggcttaattcttttctacattgagggcctttccacaggcctcttgacatgctcaaagcatggtggttggcttctctcagagtgaacaatctaaggaaagaaaacaaggtggaagctacagtggctttggtaacctagtgtcaacaaacacacactgttattcctgcaatgcaatatcctgttagtttacacaggtcagccattaac

SEQ ID NO: 4231 - DNA, 1200 bp, Homo sapiens
tgacttggctagtgattaacatgtataaagccctatccatgaagtagatcatataagttctgaacatttggaagtgcttcaaataataccaaaagaagccctcttacctttgatgttcagtaaactaatttattagacaaatatttaatgactactatatgccaggcactgtgccagacccacgataggagatacttctggttctggcctacaaacttacacagttaatcagtttcctcagatgtactataagagatactaaattcagctagctaagtaaaagggtctttagaaagacatttaattctaatctacatggcaacttttaagctggcaaactcttttcacctacatgttttcattccgatggtgagttaaccaaataactggtgaggtacagaaagcaagtaccccctacaagctgactttgtttcaatatataaccatccctgaatgagttaataaaacctataattaaagaataggggaatgggaaattcaatgtggtgcagtggttcccagagtgtggtctctggatcagaaacattggtatcacttggaaacatagattttcaggccccacacagacctactgaatcagaggctttgaagttggaaccctgcaacctgtgttttaacatgccctccaggtgattctgatgcacactaaattttgagaacctctggtctggtagagaatttgcaattagaaaaactgggttctgtttctagctctaacatttactacctgcataacatttgacagtctcggagtaggcttcctcacccgtaaaactgaagttaataatgcccactcaaactgctgaatggatacagagttttatttaggagtgatggaaatgttttggaactacagctagtggttgcatgacattgtgaatgtacaaaatgccaccgagcagtttactttaaaatggttaatttgctgagtatgttggctcaggcctgtaatcctagcaactcgagaggctgagacagaaggagagcttgaagccaggagtttgaggccagcctgggcaacatttcaagaccacagataggcatggtggtatacacctgcagccccagctacttgtgagactgagaggggaggattgcttgagcctagtagttcgaggtcacagtgagctatgatcatgccactgcactccagcctgggtgacagagcatgaatccatc

SEQ ID NO: 4232 - DNA, 1180 bp, Homo sapiens
tgaaacaaacacggaatataaattccatccggatgaatttttgcccaccagtgtgaaatgcaagatttacttaatttctagagctctgcttctcaaaagtgcgtataaattacctggggatcttattacaatgcaaattctgattttgtaggtctgaggtctgatattttaaattttaataaggtcctatgtgatgtgatgacgctggacccggtcctgagacaggttagttttatactactgatgatatgttgctgccgtggtaatcttgctcagtaggaaaagaatctgcaagttcagacatctggtgtatatgcttggctgaggagccaatggggcacaactaccatctgtggaattatgaccaaaaatctctaagtcagaatctctccaaaggaaaatgttagggcagtgctactgatctttggttagcgctctgtgcaatgaaggtatatgctggtgaggttgcccaccaaggtgggctctccagacctcttcaatcttctggggtgcaaattagagaccagtcttgtccagagcatccaagaagtagagcgtgagcacaatgctagggcctaaaagatggtgaactatgcctgagcagaggaaagccacaggaaacttggtggaggtttgtagtggtcctgatgtgcagatcggtcatctgacctgggtaaaagagtgaaagacggaatcttctagtagttggtttcctgcaagtgttcctcagtatagttggcacacacagggaggatgctatgtgaaattaaggcagagatctctgagccaaagccactgaaaattgccagtaaaccacgaaaaactaagagagaggcaaggaacattctccctgagctcattcagaagaaccccttcctgccaccacttttgaggaacaaggttccagtagacttgagctaagaaaagtctcactttcaatctactcataatcctttagtaggtatcatgaattatgtattattcctcatctgtaagagtgttgaattacctaatgctatattaaggattttttatgttatctaatttaatcaccacaacaatgctaagagatgggtattctccccattttataggaaagaaagagagatgagaaaagtcaagtgatttgtccaaggtcacacagtttgtaagtgtcacagttgaattcaaaagcatccac

SEQ ID NO: 4233 - DNA, 1200 bp, Homo sapiens
accgcactcagcctagcttaatttttttttttttttttttttttttttgaaatggagtttctctcttgttgcccaggctggagtgcaatggtgtgatctcagctcaccacaacctctgactcccgggttcaagcgattctcctgcctcagcctcccaagtagctgggattacaggcatgtgccaccacaccgggctacacccagctaattttgtattttaagtagaaacagggtttctccatgttggtcaggctgctcttgaactcctaacgtcaaatgatctgcccacctcggcctcccaacgtgctgggattacaggcatgagccactgtgcctggcctgcttaatttttaaataagagcaataacgacattatgcttccacctagcaatgtaactatccctcatacaattgaaacatgctgtctccccaaaacaggaaacaaactccttttatccatttttgggtgataatcatctctcttctaggtgattcaatattccctctttgatatccggttacttaaacactgagagcttaaatattatcaacaaattgtatatcacatttgactaggagaatgggagcctgaaaaaaattggttaatatacacaaaaatatatttgtatcaaaataaaatactcctaactattacagtgcttatttctaaaactgcttacatggtcatagctggtatttataactacattcttccactacccatttcatattgtctttgccctcagcaaaaatctcagctggttgtggtttcttgcctgttggagtgacctaaaccttaatccctgaaaggtctaagccactaacagtcctggctctattgggttgttgtaattttccattgaagtttatcacaggatatgggattactaaggcatctcaggggatctactgcattccagacatactcctccttactactattttgtgatgacaatctaatttcctcttgattgtcaagataaatctgcctagcccataaagtattcttttatctgtttcttgattcattggcacgaggacttgtgaagtggctagctgacagtctcatctctcaaattaatggaaccattaatgtgttccttggtggaagtattcttctttggtactaatacttctagatcagtagagccctaagttgagtaaaagcaagaggagccattcccattccctacacatgat

SEQ ID NO: 4234 - DNA, 1193 bp, Homo sapiens
ggtatgcttataaaacacttagcaaaatatctggtgcagctgttgataaatgtcagaagacagctgttattgttgctatgtgatacttggttctgaacagaaaaattctataactcatcctcaaccctgcttgaaagaaggttcatgaactcctgagagtgcttcagtagtgagttggtgcaactaacaggaagggaggggctggggagacacataaaggcagtgttggcactaggtgtcacaaagcccagaagcaggccactgtctcctctggggaggctggctctctttggcccacccagctctaggagtggtggcaggtattggtctgactcaggaaatctgggtttccttttcccagtcaggcaggtgacacccaagaatgtgttcatgcctctttattcttcttagactaccttaccttccagtaaggccagtgagtaactatctcagaagcatgaattagactttggggtaagagtactatctgggagggggggtcagaagagagagccccatctatcagctttgtgatcttagtagtcgtttaatctctctgggcctttttccccatctagactaaatcaatgcttcctactcatggattttttttttttttttttttgagatggcgtttcgctcttgtttcccaggctggagtgcaatggtgcagtcttggctcgctgcaacctccgcctcctgggttcaagtgattcttccgcctcagcctcccaagtagctgggattacaggcacccaccaccatgcccggctaatttttgtatttttagtagagacaaggtttcaccatgttggccaggctggtcttgaactcctgaccccaagtgatccgcccgcctcggcctcccaaagtgctgggattacaagcatgagccactgcgcccggccctactcttggattttaagatgccaccaaaaaccagcctggtcataatgactaaggataatgccaccaagatatttaatttcataagtgattcagatatgccatcaccattggattaggagatgcccaagatgcttttgatttctaaaatgcaacaatttattttgtccatacaacttaattcttacttaaatcataagtttcagataattataaagttgaaaagacctcatagatatctatgcaagttccctgatttcatagatgataaacttcaggcccaaaca

SEQ ID NO: 4235 - DNA, 1176 bp, Homo sapiens
tggagctaaatatagtctagaaagtaccattgtgtatccgacactaggagccagtgcagccggcttgcgtcttaccttggtgtctaacacttcgttaggccctggacatgatccttttgttagatgccagcacaagcatttcattacagattcaggaaatgatgaagagataaatgttagaaagaatgtttccaaggaagatattaatggagtgttaatgcatcttactctcttcccagagcagaatcctctagagggattttagatttatgggagtgagagttcatctatgccaacagaatctttaccttcatttagcaacaaagtaaatatgaatgttaattaaagtgcctggtttagcacttccttgtaagcaaaattccttgaaaactgctatctggaacaaagccatatccttgctcagtcatggaaacctagagccaagaaaactaatgtatgctttcctacctctgaaatggaagacaataacaacattgtattctccaagctgaaaaattttggacaacagcatttttttcatgaagcaggcctcaaagagagttgtgaaaggacctttgaaagagtttctggagcccaatcttttttttttttttttttgaagttggtgtgtgttttaaaggtataagtaatatgggcttcataaatattttaagtttaaacatcagtttattctttacctttcaacttggacactggaaatcatgatgctattatcaatattttagctattattaaaagccagccagggaaatgcacatacgggcatacgtgttgtgcctctctcataaagtttgcctttaggtttatcatttatttctaatgataaagaatgctttatagttggtagcattttttcacattaatcatttctaatgttttcaagatgccccagaaatctgaaatacctcgttatagttcttgatctatacaaagataaaatactgcacttgctacatctacaaatcaatttaaaaattacctcctagatttgaaatcacttggagtatgggaagaagaaagagaaaagcacagataagtcaggcaagcttgtaaaatgaaataaaagtctttgcatttttctcatgaatcacaaaagtgcttgttgtttgctcctgagggttgaggtgtgataatctattaaattgttatgtgttc

SEQ ID NO: 4236 - DNA, 1145 bp, Homo sapiens
atgacttgctaatgttagaaagggcttgtatgcgtctatcaaagcaacggtggctgctgttagctaaaaatccttgtcagcttgtcccacgtttattctctatgtggaggtgaaagggtctgtgcttggcattcacttccattcttagacttaatttggaatcatccttttaaaaaaatcagagaccaggtcttgccaaatcaaactcctgggctcaagcaaccctcctgcctcaacctcccacggaatcgtcttgtcattaacttctttttttaatatgcagtagttgggagtaagatctttttatcatttatcaaaaaggcataaatgttccaccaaccataaagtatagttggtactttttgaacttcaactgaaacagtgtatataaacgattgcttttgaacctgcaaatcacaagtttcaggtatcgaagccaaaacagttaactttcttcagcctctggcagattattaacaaaacagtattattcagattctatatcatattaataagaattgaaccttgaaagtaacatctgttattctattaatgtgattgtgtgtgaatgggtctgatgactgttggactgtttgtaggaacttaacatggaagatgctgacagaatcagattttgcaggtgttcaacctatagtggctaagaattatgttttctatttcatcctcagaatgccatacaacaattctggaatgctgattttttttaaagtaggaattaaagtcatacacaaaatgtggtaattcatatgtagatgaaatattaaacatttaaatgaccgagtaaaaaacatctatcaattacacaaatgaacaagaatgtgagttagaaaaatgtaataaaatatgaatttcgaatattttattaagggatgatttaattcctggatttcaaaaacctttaaaaacatcaaacaataaacttttataaaaaagtgacaaaatacaagttaaatcagctagatttttgtgtaaccctgcagtttattaaaaaataatacaaatgcttataaatttttatttatctaatttcctgaggattttgtttctccatatcaaaccctttcaccatggccaacatgaactttttttttttttttttaaggcagttctctgctaggcattaa

SEQ ID NO: 4237 - DNA, 1164 bp, Homo sapiens
agctggacctctcgcagcgctctctgcgagggggcacaggggttattttctccgatgttgtccacacccagaaaagcttgtctctcggggctactgtgctgagccccgactggtcaggttaggccaccggggttagctctgcaactcttgcttcacggttaacagcccggagagctttcttaaaaaataccgacgcccactgccacctgggacaacgtaatcaggctccctagaaaaggggctcaggcctgggtactttttaaggttctcttgtgaaccaggaccaagggtcttgggagggtgccgcggagaccacgtgggcatggaggccccgcccccgtttcccgccccgcgcgcccctcccccggttccccgccccccccaaccccgcccccgccccgccccacccctgcgcgtcccgcccctcccgtgcgccgctgacgcgccgtgctccggcgcaggcgcacaggggacggttgctggcccaggtgagcgggcgcgctggtccaggtgagcgggcgcgtccccgcgacggcgctgcctgcccgaggcggttcacgtaaagacagcgagatcctgagggccagccgggaaggaggcgtggatatggagctggctgctgccaagtccggggcccgcgccgctgcctagcgcgtcctggggactctgtggggacgcgccccgcgccgcggctcggggacccgtagagcccggcgctgcgcgcatggccctgctctcgcgccccgcgctcaccctcctgctcctcctcatggccgctgttgtcaggtgccaggagcaggcccagaccaccgactggagagccaccctgaagaccatccggaacggcgttcataagatagacacgtacctgaacgccgccttggacctcctgggaggcgaggacggtctctgccagtataaatgcagtgacggtgagggggcacccgggcccagcgagggctcgtgctttcgggggattggggtgacggagatcctggaggtgtgagtgacagatgcaaggcagaccttgacggtgtccttcggctgtggaaaaacttaaccactgctagaatcttgccgttctagtgattgagcaagctgggtacaagttcgcaccactattgttagaatgtgagaggtcacattctaacggagaggtgtacc

SEQ ID NO: 4238 - DNA, 1171 bp, Homo sapiens
atataagcgttcactttcctctgcatccttaccaacatctgttatttttttgtcctttttaaaaaaattattttaaatttttgtgggtacacagtaagtgtatatatttatggggtacatgagatgttttgatacaggcatgcagtgtataataatcacttcatggaaaatggtgtatccatcccctcaagcatttatcctttgtgttacaaacagtccaattatactcttagttatttttcaatgtaaaattaaattattgactatgcttaccctgttgtgctatcaaatactaggtcttattcattccttctatttttttacgtatgtgcccattaaccattcctacctccccccctcccccgcacaacccccttctgggcctctggtaaccatctttctactctctatctccatgagttcaactgtttagattgtacaaataagtgggaacagagaagatgcagcgtttgtctttctgtgcctggcttatttcacttagcataatgacctccagttccatccatgttgtacatgtattttttgtcctttaataatagccattctgattggtataagatgatgtttcactgtggttttaatttgaatttttctgatgactagtgattttgaacattttttcatatgcttcttggctatttgtttgtcttttgaaaaatgtctgttcctaccctaaacccacttgttaatgggatgattatttggcttttttttttttttttttttgagaccgagttttgctcttgttgcccaggttggactgcaatggcacaatctcggctcactgcaacctctgcctcctgggcggattctcctgcctcagcctcccagatagctgggattacaggcatgcgccaccacacccagctaattttttgtatttagtagagatggggtttcaccatgttggccaggctggcctggaactcctgacctcaggtgatccacccacctcggcctgccaaagtgctgggattacaggcgtgagccaccatgcctggcctttttggcgtgcacgtgtgtgtgtgtgtgtgtgtgtgtgtgtgtgtgtgtgtcctgctctgtcacctgggctgcagtgcagtggctcagtcactgctcactgcagcctcaacttcccaggctcaaatgatcctcgtacctcagcctc

SEQ ID NO: 4239 - DNA, 1156 bp, Homo sapiens
tgaagaagcaggaggctaagaaagtggtgaatcccctgtttgaggaaaggcctaagaattttggcattggacaggacatccagcccaaaagagacctcacccgctttgtgaaatggccccgctatatcaggttgcagcagcagagagccatcctctataagcggctgaaagtgcctcctgcgattaaccagttcacccaggccctggaccgccaaacagctactcagctgcttaagctggcccacaagtacagaccagagacaaagcaagagaagaaggctgttggcccaggccgagaagaaagctgctggcaaaggggacgtccccaccaagagaccacctgtcctttgagcaggagttaacaccgtcaccaccttggtggagaacaagaaagctcagctggtggtgattgcacccgacgtggatcccatcgagctggctgtcttcttgcctgccctatgtcgtaaaatggtggtcccttagtgcattatcaagaggaaggcaagactgggacgtctcgtccacaggaagacctgcaccactgtcgccttcacacaggtgaactcggaagacaaaggcgctttggctaagctggtggaagctatcaggaccaattacaatgacagatacgatgagatctgccgtcactggggtggcaacatcctgggtcctaagtctgtggctcgcattgccaagctcgaaaaggcaaaggctaaagaacttgccactaaactgggttaaatgtgcactgttgagttttctgtacataaaaataattaaaataatacaaattttccttcaaagaaatacattgggtaatacataatatgtgtcctctgtaatgactcactaatcattaatgatcatataatgatcatacatggaggatgtcaggagactgcggcatttgagacaggctttgcctaaccccttaagatttcagctaagttcagaacatgtgtaaattcatggagaacactctatggtcaaaaaggagaggtgccagcaaatgcagggaggtgagatgctccagacatggtctggatatgacaatcccagggtcacacagaaagtgccccccttccaactgaactgcctacccatgacagtggtgctactcattctttacgcagaagtggccactgattggaacaga

SEQ ID NO: 4240 - DNA, 1176 bp, Homo sapiens
tctggttaatgcatgaataaaatttattcatttagcattcaaaaaagagtttgttccattgattctcagtgccatctcttatcactatgacattatgacattttggaaaagactagtaacattttcactaaatggtaaggatttttatttttattttttgagacggagtctcgctctgttgcccaggctggagtgcaatggcatgatctcagctctatgcaatctccgcctcccaagttcaagcgattcttctgcctcagcttcccgagtagctgggattacaggcgtctgccaacatgcccagctaatttttgtatgtttagtagagatggggtttcatcatgctgaccaggctggtctcgaactaccgacctcaggcgatatgcccaccccggcctcccaaagtgctgggattacaggcgtcagccccggcgcccggccggtaaggatttttaaagtattttaaaaaaacgtttacttggtcaaaggtgattcattagctcatactatgttttgatataatataaaagcaacgaagtgctatgatgatggcactttgagtggctgttaagagtagaaaccagccgggcgcggtggctcaagcctgtaatactagcactttgggaggccgaggcgggcggatcacgaggtcaggagattgagaccatcctggctaacacgttgaaaccccgtctctactaaaaatacaaaaaattagctgggcgtggtggtgggcgcctgtagctccagctacttgggaggctgaggcaggagaatggcgtgaacccaggaggcggagcttgcagtgagccgagatcgcgccactgcattccagcctgggcgacagagcgagactccatctcaaaaaaaaaaaaaaaaaaaaaaaaaaaaaaaaaaaaaaaggagtagaaaccagagattcattggtcttagaaatagcattagtgcaacatgtggattatgtgtactctcatctacccaatggtatgagcacttcatctgctgtcaaagtaatggagaaaactctggtttagcattagaaatcaccatcttctctagtacaagtcatgaaacttaatgtcggcagttttaaaaactgcagtaaagaaattcaccttctcaccttttattttatcacataactttttgaaagctctgttattataattacagtga

SEQ ID NO: 4241 - DNA, 1332 bp, Homo sapiens
ttctttaaaattgataataatgacaatgcttagagttgaagttcttatccaaaacattggtgttaaaccattcattaccttgtatattaacagtatttttctctgtataatttctttgaaatgacttataaatatcaataaatttacttgctttaaagattttccaaaagcttcattaaatctacatctgatatgtaaaaatataaatattagctcttgcacattcaatttgtcaagataatccaattaccaaaaggaattttcaccattggctaaaacctgattactggtttatagtcatattactaatgtaaataggaagatatttttgtaataagtgtttgaattccctaaaatacagcatgatttctatatttgaagaaaagcattatagctgtttaataaacctgagaactattatcaatgactgataaataatacagactgaatgcaatgcttatcttcctaatcgtgaaacagagtataaataaatgaagagtaaattacattttaaaatactaagatcatattaatacttgtaattctcacttcttgggatttaacaaaaacctgctttccactcttctggactatagtctggcctctgttttccaatgtatcctccccattcctcgccaagtaatatctttaaaaatcaaatgtgtctgtgtcaaacccccgtacaaaaaccaattcctcgcaaggctttcagaataaaattcagactcctcagcacggcagacagggactgatccctgcctatctaagctgcttctccccagtaacaatgcattaattgtaagtttccgtatgtcctgtgttgtctcattgcacggtgttccttctctttcaaataccttgcctgcttctgtgtcttcagtgtcttccagctgttactcccagtaacttcgttcagatatcatttccttatctagttgaattatgggtctttcatctgtgttctctttatatccaacacataatttaaaaaaactaattatataggtgttcactaaagtgtaatacagaattttgctaacttgtccatctcagtctctgggctgtgaattctcaaaacaggaaccttgaattttgtctctgaatcattagagctgaacacaatgcctagcagtgaaaagtcaccaaacatatttttgttgagtaaatataatgaataacaaataattcatagttttctatggacaggagtaatgttcaaaatatttaataaccagatgctaggagcacctgttggtcacaccagaactactgtaacaactggtaatgctgtacttatttcacccacccagtatcagcctgggctgtggatat

SEQ ID NO: 4242 - DNA, 1167 bp, Homo sapiens
acctgtagtcccaggtactcaggagtttgaggtgggaagattgcttgttcccaggagttctgggctgtagtgcactatgccaatcaagtgtccacactaacttcagtatcagtatggtgacctcccaggagcaggggaccaccaggttgctaaggaggagtgaactggcccaggtcaaaaatggagatgatcaaatctgctgttctcatcagtaatggaatcacccctgtgcatagccactcactctagcctgagcaacatagcaggaccctgtctcaaaaaaagaaaaaaccaaaaacgaaaacccaaaacaaaaacaaaaaaatgataaagagaaaacattaaaagcatccaaaggagtgggaaaaatacattatatatacaggaatgaagaaaaaatgacagcagattcagaaataatccatgccagaagacattcaatcagcaaagaactgaagaatactatacttacctggcaggggagataccatgatcacatagatggttttcccatggcaagtcttatccattgcactctggatgtgctgacacctgtgatttcaccaaatgtgggaaactcaactgcataatttgtggtagtgggggattttgtttgtgctttcccctggaaaaaaaaaaaagaagaacaacactagaaatggtaaataagagggtaaaaatgaaatacactttttcttattttgagtctctttaaaaaatcattggctgtttaaaatatgttgtttagtaatagtatataatggaattcatagggattagtgaaataaaatgtataacagcaatagcacaaaggctgatggatggtggctgtgggggcagtggtgaaagaaagtttactgtacctgaagtggtataatattactaggaggtagactatgataagctaaagatatatactataaatctaagatatagatatatatctaaagatatatactagagatatatgctaaatactataaagacatatactaaaaagatatatactataaattctaaagtaactgttaaagatatatactataagtcctaaagtaactacttaaaaaacaaataaaaagttatagtaaataaacccactaagaagatatgatggattcttaaaaaataataatccaaaagaagtcaagaaaaggaagggaacaa

SEQ ID NO: 4243 - DNA, 1179 bp, Homo sapiens
aggagaagcattcaccctccagagactgctctagactagatcataacacatctttctgaagttttcctacaatccagttttctctgttttaacaactacggcttaatatcattgtggatcagccacatttaatttactgttgtctatatgacttaaattgtgttaacattatattctcctccaggtgtcattctctatattctacttgtggggtatccacccttctgggatgaagaccaacacagactctatcagcagatcaaggctggagcttatgatgtatgtaataactatttatatcactttagatgaaggtttgtcttttgcctgttgaccaagagccagatcttttcatttttcttttaaccataatttttaccactttctcatattatttccctctctcttaaggaaagggagaaagaaatgcagcatttgtatccagtttacgtttccttttaactcactgtctcctaagattgaaagaaaagccatgtgaagtctctgaggaagaactttgtcaaaatatttggaccttagtgcattttaaaaacataaaaattaaaatatttctgctatagaaatgattattgcctgtttagttgaattatattctcaaatatctatcacataattttatattatataccaacaatattttgctgtgatcacatatcaaatagaacattatcccactataccagtttctgggttttgttttttgtttttgtactgtttgggatactatgcaagctttcatttgaagaatgagtttcacaattgaaaaatttgaaaatcataattctaataatatatttaatttataattagaatatttgaaagtagatatatatatatacattcataaattaagttcagaatctgaagaggaaggctttatctactttctctttatggcttaactttgtgtttatgatataatttgctctcctttgatacatattcttgtaaatatgatttaccactttctcaggtttcccctcatacagccctatggaaatccatgtgcagggtctgggcatgctttccatgtgttattaagtagagtaactacagagtagcaatattgggttcaccttttgtgcacaagttgaaagctcaatgtgaaagtgagaggagaagatataaaatgtctttattatattctataatgtctcg

SEQ ID NO: 4244 - DNA, 1194 bp, Homo sapiens
catcattatttgttcattcatttactcatctatttaacaaatatttattgagcaactgctgtgtgtaggcacagttcttgattcagggggtaggttggtgaagagagttaagatgagagacatgggaaaaggcatttggatagataagtaccatgcagtgctatgaagaaaatatagcagggctataaattagataatgacctcattggagttactttagatagagctgaggaagaagcatttgagctgaggcattaacgatgaaaagaagcaaaccgtgagaaaatacgaagaaagaacattccaggccaaaggaccaaggtgacagtgagcttgcacaggagtagaaagaaagtcaatgtggctggagtgtaattagcaaggagagaagtacatgatgatgttgggaggtaggcaggggatggattgtgtagagtcttttagccaagttaaggaatttggatcttattttaaatgcattgataagccgtttaaggatgtgaagcagggaagtaatgtgataggattttgttttaaaaaatatctctctggctgccatgtggagaatacattgtaaggaagtgtgagtgaaagcaagactatagtagtctccccttgtctctgggggatacgttccaagacccccagttggtgtctgaaactacagattgcacaaaactatatatactgtatttttcctatacatacataaatatgataaagtttaatttataaattagtcacagtaagagatgagcaagtactaataaaatagaacaattataataatatactataataaaagttattctgtgcatgtaacttttgcagtttgaagtgcgacagcaaaactgcatgaatttctttctccttcttcacaatttcatggatagaagatttattcttaccatagatcttagcatatacattttttatttccttattaaggggagaactttcacctttgcacttaaaggaagcacagtttcctttgctgaacggcttctccttggcatattccaattgccagtatcactactcttgcactttggggccattactaagtaaaataatggttgcttgaatacagcactgtggtactgcagcagtctgtgataactaagatggctgacaggcaggtagcataaacaatgtggatccactggacaaagggatgattcacatcctgggctg

SEQ ID NO: 4245 - DNA, 1302 bp, Homo sapiens
aaggagccgcgaagggggtggtagacggaacaggtggagccgcggcggggctaggcggggcggggagtgaaacagcataggctccgcccctcgcggcgcttcccccggaatagcgtcatcagttctataagagagcgtgtgccgaaggcctcggcctttcacattcgggaagcgtcgggattaggtgaaagtacgtagttgtctttcgtaagttaaaatgataattgggccgaaacttactgccttacctaaaaggcagcgcagtcaggatattggtaggtcgggggcggctttggaaacccttaagtttacaagcatgcgcggacttgagtgctcattaggtcgccgggcgtccacgtgcagccctggaccctgaaccccggcgtgcgtgggccgtgggccctcggggaaaggttccgtgcactcggggactccggtgaagcctgttcagccgtctgtgtcatgtggccatcttgagtctactctgtcgctcttgtgccctagcaccccgagaaccgtcagtttgagccagatggtgagtaataacctgtagcagtttggttgctggttaattctggattgtgaatctccatgtatctttgggacctgtcagccgtggcagtctcccttcctagccatggaagagcatatccttgtttattggcaaagctgtcaccatttaattggtatcagattctgacttgcacaagtaacattcactgttaaaaacctagagggtgccgggttattgggcaaaatttctaaaccgttgttcaatgtttctaggaagctgagctgaacacattacgatggatgatggaaacataaggtacatttcttttttgatatttctgagttaatctgaaacgccttagcggcaggacgttggaaagctaaagttggcccgttttgctggcttttgtagtttgagttaacaaccaactgaattagctgataagatctcaaaacagtgaggtaagtacacagctcggagttttataatgctttttttctcttgcagactatcaagaaatccaagtggtaatgggcgaagtttattcagcatccggcaatggacttatcgtagttggggaaacgggtgttccgaataatatcctggaagttatcaggacacctattttaaatataggcctgaattttgtaaagtaatatttaaggtggtccgtgataattaaataaaatgcttaattcatgtggctactcattgttccttgactgagtgattaatagacggaaaggtagttaatagcataatacctcctatttagtgttacacgctca

SEQ ID NO: 4246 - DNA, 1302 bp, Homo sapiens; identical to SEQ ID NO: 4245

SEQ ID NO: 4247 - DNA, 1230 bp, Homo sapiens
ccaaatatcctggtaatgttgatattttgccctcctcttgtgaatcctgattgttctttatggcatctagaatggtgaatccttttcagaaggttttcagtttactttgcccagttccatcagaggaatctctttctgtggcagctgtggccttatgaaatgtgtttcttaaataatgggactttaaagtcaaaattactccttgattcatgagctgcagaatggttattgcagggatgaaagcaacattaatctctttgtacatcaccatcagaaatcttgggtaaccaggggcattgtcaataaacagtaatattttgaaaggaatattttctgagcagtaggtcttcaactgtgagcttaaaatattcagtaaaccatgctgtaaacagatgtgctgtcatccaggctttgttgttccatttgtagaatacagtcagtctagatttatcatgatttttaaggccctagaattttcagaatggtaagtgagcattggcttcaacttgaagtcaacaactgcattatgtcctaataagagagtcagcctgtggccagaaaggtggccgccccctcgcccgtcacgcaatgcatgttcgtggggaacctggtgctaaactattcatagatgacctgcttctgggtcggggttttgtatgtagcagagcggctccctcgctgctatctattgaaagtcagccctcgacacaagtgtttgaaaaaattaaaaaataattaaaaaaaaaaaagacagaatcagcctgtcctttgaagctttgaagccaggcattgacttctttctgactgtgaatgtcctagatggcatcttcttccatctgtcaatatcactgtcagtcttcaactgtttcttccacagatgacagtcttcatctgtcaaacagttgatgactgtttcttcaacactgaaaatctgttaattagtgtagccactttcattagttatcttagctagatttctggataatttgctgtagcttctccatcagcatttgctgactcaccttgtatttttatgttatggagatggcatctttccttaaacctcctgaatcaacctctgctagcttcctacttttctttagcttcctcaccctctttttctcagctttcgtagaattaaagagcgttagggccttgctctggattgggctttggcttaaaggaatgttgtaactggttggatcttctatccagaccactcaaattttc

SEQ ID NO: 4248 - DNA, 1178 bp, Homo sapiens
tactagaagccatcacagacatttactcttacatcctgttgtctagaacttagccagatggcaatactaagccactagggtggctgagaaatgtggtctttattctgggtggccatatatgtccagacaaacagaaggggaggagaattattgaaggacaactggcagtctctgcactagactctacccaaatagtccatgtaatttaaacacattattcattctgtttcagtcttctactagattgtaagctcctatgacagttactaacctatgtaagtttgtcgcccatatactgctaagggtgcctctgatggagaaggtattcaatctttatttattgagttcaggaactaaaaatttatcaacatttcttatagagtaagaaacaaacatagtatcatgtaactttaataaatctaatgctcatttttcacttaaagtaaccatcaggaaaacctaaaaatttcaaggagttaaataaggtatcaggtatttgttgatttagaagtagtttttctacttctctttctctatattaactagtgtaagtctgaatttatgaactctgacaaattgcttaaccattttggattttttcctggctcctactcttaaaataatgatgatgataattaaaataatgatgatgaagaataataatagttattgatatgataattatcattttaaaagagattttacaaggatacttacttctccaatatacttcattctcctggtggtcaccttttcatttttcttcttttgttcactatagcttcttattttcttctctctaggctgttgctatttataaaatatttgtagttttaaacattgttttattaaactaaaccctgcatttatataaccttttcttgagtgtcactcaaataatatgtatgaagtaggacctcaggagtgtattaggtctgatgtgtatggtaactggcatgccttcacagactctcagcctagtctcaagaaatattcaatttaaagttcatttactattatgtcactcttctgtcatttccttttcattctttttcatgtatacataatactagacaagtggtcagtacttggtttgaccaaattacacttaaagtaaaatgtacaacaaagggaagactgaaatattttgaccaggaaccaggccacagggttcagga

SEQ ID NO: 4249 - DNA, 1174 bp, Homo sapiens
aattttgttttatttcaatttctgattatttttattgtatggagatacaatagatttttgtattataatatcatgtcctacaaccttactaaactcagttactggcaagttgttttttgtagattctgtcggatttttcacagacaatcatgctgtctgcatgaccagaacctccagtttatctttttataaacctccagtttatcattttatttctgatctcaagataaaagcattctgtttttcactgtgaactattaagttagctatagattcttgctaacagttttattgggtagagaaaatccctttctattcctggcttgacaaaatttttatcagaaattgatgttgtattcttcaagtgctttttctatgtctattgagattatcatatactttttgggttttttacattgttagtatagtgaattatattaattgatttttaaattaaaacaaccttaagtttcttggcatcaatccttcctcctgactctgaggtttgtgagatatgagagacatttaagacatctgttagccaagcgaaatgtaaagcacagactcagaaaaatgggaagtggtaggagagctttctgactacagagaggccaatcagaaggtgtaggggaagagttatgctagtagactacaaggcctgggacgggctgatggtgagtggcatgggctacactaggacaagaaggttcagagcattaagagacacaaatatggttgaggattaagccatttggagaatttacactatggacgttgactgaaaattgaaaaataaagaaacagacaaaaaatgatgagtagcagatagatggcatgctctgagagtccaggcattaaaagcatcatccctggaaggtgtcagttgcagcaacagcaatatctgcaggatttgactgtagcattttctaaacagctcacaccctgtggtctccatatgtgcaggttcttaggataaagcacatcccagaggttgtgatatctgtcatagtctaggccagagatggtcacagagactcaagcctgattttgacagctgttgaatttgaagtactaaactcttggtcacttgttgtttcagcaggataccatctgttttatctccaatcagtctttgccaccttagctgttgatatttcatccgtgaactttcatt

SEQ ID NO: 4250 - DNA, 1399 bp, Homo sapiens
cagatgcaaagcatgttctgcccttctgtctcggagggagagccatgacagccctgcagccccagcactgcccgtgttagctgatatataccaagtgatagaaactattctgtctagaaggcttgatttgactatagttgttaaagttgcctgattctttgtgttaccagagggaatactgagtgtctgaggttacattggtaggaaactccctgcataacattcctgatgtgaaagtcacagagattacccacttgggagaagagtcttatgaataaaatttgttgccagttatttagttttaaaattttctatggcttctgtgagtcatggaggttaatggaatacatttggtttcagggagatacatctggggactataagaaagctcttctgctgctctgtggagaagatgactaacgtgtcacggggaagagctccctgctgtgtgcctgcaccaccccactgccttccttcagcacctttagctgcatttgtatgccagtgcttaacacattgccttattcatactagcatgctcatgaccaacacatacacgtcatagaagaaaatagtggtgcttctttctgatctctagtggagatctctttgactgctgtagtactaaagtgtacttaatgttactaagtttaatgcctggccattttccatttatatatattttttaagaggctagagtgcttttagccttttttaaaaactccatttatattacatttgtaaccatgatactttaatcagaagcttagccttgaaattgtgaactcttggaaatgttattagtgaagttcgcaactaaactaaacctgtaaaattatgatgattgtattcaaaagattaatgaaaaataaacatttctgtccccctgaattatgtgtacatgtgtgtttagatttattattaaatttatttaacaatgttctctctttttaagctaataattgacagtggtgttagttgagaactgaatttacagttggtcttttgggcagtaagaaatgcaaaccatagactgaatttccttcatagtacatgatttttcctaaatataggaaagatcgaaggggtctctggtttatttgcaccatgtttatttaggcatctattaaagcaatgcttgtggtgctacttgcttagtagaaaagctaattataaaacttaatgcaaaaattcagagtactacctttctctttcctctttcctattgtgaacttgcctcccatttactgtctgtcactttctttgagataaataaaaaagacaataattttttctagaaagaagcagtttatcgatctcttctaatatttgcctttcagttttctgttttcaaactgccatttcagttggtgtcatttttctttttgtacttatgccc

SEQ ID NO: 4251 - DNA, 1162 bp, Homo sapiens
atacacctttataaagttctaaattcaaagatttgtattcctctggcacgtgaacgatcatttcaggctttgctgggttatcgtaaagtccctaagtatgtatacagaaacaggacttagatcaaaaggcacgtaacaagagcactgcttaaaattgagtactcaggatagggtattaagatttagtgcgggctcagtatgcttgtagatcaaaatggtgtgagacttaatgggaagggaacctgcaaagatgtgccctctgtgaaccaggaggtgttggtggggtttcgtcacagagaagagggagccagccttcccactgatggtattacaggtgatcaggatagcttctgtgctgaatcggccatgccaattcccattgtaaatggttcccttcccagttcaaaaggggtcacaaatcttatcaaatggtaaatttatttaatgactgaatatgatatatagcaagcggcttcctgtttgtgttatttactttgtcatattagtcatgatatgaataataccactgtgtttcgtgaattaggttctcagaggcactgtgactgacttccctggatttgatgagcgggctgatgcagaaactcttcggaaggctatgaaaggcttgggtaaatttagcttcctctttctaaagcaaatgtgatatttgtttttccaaacaagtcattaattacagtaagaataattttagaatattttgatctgaaatctgtaggagaagagatatgttaagataacaaaataatactataaaccagagtgtccagtcttttggcttctctgggccacattggaagaattatcttgggccacacataaaatacactaacaataatgatagctgatgagctaaaaaaaaaaaaaaagcaaaaaaatttcataatgttttcagaaagtttatgagtttgtgttaggctgcattcagagctgtcctgggccacatgtggcttgcaggccatgggttggacaagcttgctataaaccatccctaatattcagtctctagaactgaacaggcagttaaattcagcctctgtgcttttgagcttgtcaccctcacctgtgtggtagaggcccgagtcgataaggcagccatccctgcaggtgggcagctgtgcagctctgttcccaatcagatatc

SEQ ID NO: 4252 - DNA, 1284 bp, Homo sapiens
tataataccctcaacaaaaacatttttgaccccaaatgtcactagtactcaggttgagaactctgctaactttataactagctaaggacaagacattaaaagggaaatgtagaataactcatccagacttgtggagactaccaatttttttaaaattttttatttctatagggttttagggaccaggtggtagttggttacatgagtaagttctttagtggtgatttgtgaaattttgttgcacccatcacccaagcagtatacactgaatccagtttgtagtcctgtccctccccaacttcccaccctttcttcccaagtccccaaagagactactctttttttaaaggatacctgtaccaggcaatagactgacaagaatacaaatctaaaaatgacaaatttcatctatttctatgtagcccaacctggacataaatttaagtacagtatattattttctcacatattggatgtttactgatagttgaccaaaccatgaggagaccccccaaaacaaataaaactgaccagaaaacatggagaagagttaatagtagccacagtttcctactacattatggctcagatttctagacctgtttgaaaagttgaaaaatctatggtctcattcctcagactgttttgtccaactgacctgaacatctgtcactggaattttttttcctttggcatgacactttgtgcctacatgttttctaaactgcaggtaacttttgaaaggccaagttcaaccattatcagattttaacatttagtatggattaaattgtgagtgcaatttcttccccaaaagctggccagaaggactggagtttggggagggatgctttgaagactgtgatataaatgatggggtcctggagaggtgcaggggaagaggaggcagagtgggaagctgtgaggtaggaaagagaggaaaattttctaaaagaagaggtaggagaagatgacacaacacaaatgtttccaatttttcagtgttgctgaaggtcaactgtgcttcacacctgggcattctcctgaatttgcactcaaaagggcccattttctggcgtttttctcatagtcctggaataatcttcatttgacatgagagtcttgataaaaacaagatgttaaaagtggttagagagtttctccttctccagcatgtgcgctgcactcctgcctttcttttggcatccttaacttttggcaggcctctttcaatgcggtgggaatggataatattaagtatgtactctaaagtagcaagctgtg

SEQ ID NO: 4253 - DNA, 1221 bp, Homo sapiens
tagtaatgtggattgatgttttctcagagtaactcgttgtcttttcgcttgaaatttttgatcttgtcctgaagactagctgctgctaaaacaatgctagcctaaagatacaggagtctctgacaaaatgactttcatgttaaggggaaatgctgtttatctactcagacatgcatctgtgatgttcatagccttgtttcagttataatagttgtcttgtttttttcttaattgattttgttaataataccttaacacagggtaggaagaagtggcacagtgtattgcattatatacatttatcattgatttacctaatgttaccttgtagattaaacactattaagtggtaatacttgaaaaggagcacttataccataagtcttaggaaataatgtttgtaataaacttaactatgttacatatcaacaggcaaaaatatagaatgttacatagtgttgtgtgattaaattatagttcctgctgttaacattaccttttgaaaccttggctccagttttggtgcttcttatacaaattaaatgcgaaaagggactgtaaacttaagatgtattttaaggactttatctgtgcttcatcacccaacttgttcacattgttaatttctgtccagagacctgaaactgcttaagtatgggaacagactgaaatggtgtttcaacctgcaagagacagaagcatagacaagtatatgagcccttatgtccttaatgccaatcaactagattgacctaggttaaaatttcaaaaggctcattttctcccaaagctaaatctttatattaggaacaattaaatattgacttaagttgtaaaaattgagagtacaatatctttagggatagtcattatttctcacaactagttctctacgagagattttgtttctacaatgtagtcagcacttaatggagagtatggagtagtgcattttgcagggatttttattccgtcttttgaggggaagaatctcttttttgcattaaaaaatcatataaacttaatatatttttaaactctcctagtctttaaactttctcttaattctcttaaaatgaaataggtatatccaataggtgatgaaatacattttttacaaacatagatgctttttatttgtatgttgaatgtacagattcatttcaagaaaagcatgaagataatgaaagcaaatatgtaacaatacaagtagggacttta

SEQ ID NO: 4254 - DNA, 1181 bp, Homo sapiens
aattttttttttcttagcatcattactccattaacaatggatatgtatgcctggactcaagaacaagctgtgttatataatggcataatacttgctgctcttggggttgaagccgttgttattttcttaggagttaagttgctttccaaaaagtaagttaagtgtttttggttttatgtctgtttttaaaaaataaaacaaaaaacagagctaacaatgcaaatggatataccaggaaaataatttaaagcttttttttgcacacaaatttacaatttattaagagattatcatatttctatacattacagcatttctttggtaaaacaaaatttctcacaaagtatataattgactcttatttatcttttgtctactatgttttcctgaaagtatatttcataaaccattgttctactgtattgtaatatatattgtgcaacaaaaaagattcatggttaagtttggaaaatcttggttaagattaccaaacttattctagaacttctatccatagtatatatattctatatcatcatcatggcaaataaaatttgtgtcatttcccagaccacacaacactctttttttttttgagacaaggtctcgtattgttacccatactggaatgcagtggtgcaatcatggctcagtgcagcctgatgggctcaagagatcctctcatctcagcctcctgaatagctggactacaggcatgaccaccacacctggctaatttcttttatttttattttttgtagagatattatctcactatgttgcccaggctagtctcattcctgggctcacgcaatcctccagcctcagtctcccaaagtgttgggattacaggcatgagccactgcgcccagcataagtgttttttaattgatacatgatagatgtacatatgtttggggtatgagtgatcatttgatacattcgtataatgtataaagatcaaatcaagataattgggataccatcactttaaatatttaccttttctttatgctaggaacatttgaattactcttttctagcttttgacatgtacactaaattattgctaactatagtcaccctactgagctattgaaaactaggtcttatttcttctaactgtgtatttgtacctattaatcaactattgtttattgcctccttcccgctattattcg

SEQ ID NO: 4255 - DNA, 1229 bp, Homo sapiens
ttgagaagtgtctgttcatgtccttttaccattttgtaatgggatgattttattttactttaattttgtttattgaattaagttccttatagattctggatattagatctttgttgcatgcagagattgtgaatattttctcccactctctaggttttctgtctactctgttggcagtttcgtttgctgtacagaagctctttaattagatcacaccagtttttgtttttgttgcaattgttttaggggacttattcataaaattttgccaaattcatgtccagaatcatatttcctaggtgtttctcaagtattttcatagttttagggcttacattaaaatctttagtctatattcagttaacttttctatatggaaaaatttagaggtccagttttatttttctgcatatgactagctgattatctcagcaccattttttggatctgtgtatgaatctacaattatcttaactcttgattaaaaaagaaaactcatacttacctggcaggggagataccatgatcacaaaggtggttttcccaggacgaggcttatccattgcactccagatgtgctgacccctgcgatttccccaaatgtgggaaactcaactgcataatttgtggtagtgggggactgcattcgcgctttcccctgagaaaaaataaagaaaaacgaaaactctcaaataaagttaatataacaaggattaaaatacctaagaaaaactgaatacaagtttttgaaaaaacaccacacaaaagtgtttatatgggctgggagtggtgactcatgcctgtaatcccagcactttgggaggccaaggcgggcagatcatgaggtcaagagaatgagaccatcctggccaacatggtgaaaccccatctctgctaaaatacaaaaattacctgggcctggtggtgagcacctgtattcccagcctcttgggaggctgaggcaggagaattgcttgaagcagggaggcagaggttgcagtgagtgaagattgagacagagcgagactccatctcaaaaaaaaaaatagtgtttatatgtcctggaatgagagagagatggaggagggaaaaaaagatgaaaaaatgggaggaagaaaaggaggaaaggaggaataaaggaaggaaataaggaaaggagagataaagaaagaaaaacacattaaaaatgtgtttgtacattttctttgcaaaacctaaaatatgaaagg

SEQ ID NO: 4256 - DNA, 1193 bp, Homo sapiens
aaagtgcatgtaattggtgttgctttctgtagattctctacactgtacagtgtgttgtttctcagattttttttttttttttttttttgctgccagactgatttggctttgctgggtctgctaacccactccatactcatccagacactttcagtcttccaggattttgttgttcttacctcttcttgtttgttgctctcacctcttgtccttgtgggtttaggtataaaagagtcttttactgttgttttagtcagctttcataattaagtgaaattatatgcatgtttttaatctgccaacttaatcctaaagcacagattatttaaaatgtttaatctatgtcttacctcttgagacttgaaaggattattaaagttagcccttttcatctcttgttttggcttttacattcatatttataatatttgaaactcattatgtggactgctcgagactgtattagttcaaggatttataagtgaattcagaatttgtaaatacaaaggttgattgttctttaaatttgctcttataggaaagtgaaaaggtttctgaatatccagcagtgattgtggagccagttccaagtgccagattagagcagggctatgcagcccaggttctggtttatgatgatgagacttatatgatgcaagatgtggcagaagaacaagaagttgagaccgagaatgtggaaacaggtagacatctcataaaatgttcattatttataactttctcattttgtaagcttcaacaatactattgccagatgaaaaatatactgaaaaacctttttaatgctatttagtatagcttggaaaccagtgaaacatctatgtttaagggaatttgtgtagatataaaacttctattgtataattctatgaggtgtaacagtctcatatcatggactctatgcacaaaattacagcttcacataatgataaagttattttattattttttttctgagagtataaatcctagctgttatttatacaagtcaataggctagtattatgaggacagctttttaaattaaaaaaaatggtattctatcattgtctaattgattatgagtttctttgagttaatattgatggagcaataagatttcttttcattaatatcagaagcatcattgtagtgttctatcagtttcctctttgctttttgtcgtcttagag

SEQ ID NO: 4257 - DNA, 1217 bp, Homo sapiens
gtttatcataaaccaaatgattttaaagctgtcacatactaaattagctaagggaaaagcagggcttttttctttatgatgaaggtttttattttaaggatacaagtattacctgattttgacatagaattattcagtccagatatttgagaatcatctttgtttctgtttctaaaaagttacatgtaagttgaaattttgaaccatattttgttatgtaaaacttcttagtaaattgttttgaaattgaagaatctctttgaaattgactgttttctccttatttatctgtattgtagatctgaatttgcatgaattatgttttcttagcacaattcgagtcataaaattttttgttactttaaaacaattatctgtatcttcaaatattttgacaatcagatcagttttatattagttttaatgtaaagtagaactacagaattttagaccctgaaaggtagaatgttacagtaattgtctctcatttcatagtgggaaaaatctgagaccttaaaagatgacttattctaggtaacagatagaaacttagtaacgcaacagtgactagagcccacatcttcatattgttctttctactgtaagaactgtacatttataataaagtactcctgtagtcaggttgtattgttgtttggatttttaagtgactggtgggggagaaatagaacctttaacagaataatctatagaatttggaaatactattaactatcacattgccaactccatacatttaaaactgaggaaattaaatcaggcatcccaatcaccaaaaaaatgctaaattgtcccaattgagaacatcattttggctgggtggagtggctcacacctgtaatcccagcatttcaggaagccgaggtgggcggatcacttgcggtcaggagttcgagaccagcctggctaacatagcgaacccccgtctctaccaaaaaatacaaaaattagccggccatggtggcacatgcctgtagtcccagctattcaggagggtgaggcaggagaatcgcttgaacttgcaaggcggaggttgcagtgagccgagatcacgccactacactccagcctgggcaacagagtgagactccgtctcaaaaaaacaacaacaacatcgttttgactttccagaaagattagacttaaattatactacgcttgtccaaaaactaatttgtgttacaaaaactgaattg

SEQ ID NO: 4258 - DNA, 1185 bp, Homo sapiens
gttttgctttgttttaaaacagttgcctcaagcttctgtcttaagagtagtgacttagaatccagatatcttttgttttagaaaaacaagcaaaactatgttgcaagactgacagttgtaatgtttatttgccacagatcaaaggttcacaaagtatatcaaatttacatctacttggggtaccttgatagattattattgtttttcttttatctttcccttcaggaatttggaaactcgttgtcactttttttaattttaaaaatactaaattgtaatagttttcttttgccaaatgtgtgcgtacatattcaaagcaatgaaactatttcaagccatacaaccacaggggtgggaacccttttcacaaattttaatgtgtttgtatgtaaatagatgtttgtatgaaatattttcatgatagaatgaatatatttaaatgaagttgaattattccagtgctacttaaacacattacaaaaattttggtgagaattatctgagtctattgagatgtaatgcagatcaattttgatttttaaaaatcaaaagcctacaataactctgactctcagcaacttcctcggcgttgttgcacctgacgtggagagagctcgtaggcttccccagtgcctcagccgcttcctggtggaagttaggtgctaatggaggtgtgttcaccttttagtgatatcactgcaggcctttgaggggcctgagagtgaatcagaggcattagagacaccggtgcagttatctggagcacaatttctttgcagggcagcagaatcagaagccagacttggccatgtgaacctcgaaactcggtttcccggccgccatcaaccgccacccttactgcctagtcacacacgtcagggaggctgccctcagtggagttggggttgagaccccagggtgggacttcacagttttgccagcaatctctaccttctgacttctgcctcgcagagaggaaggagaggggagcatctggcaaggggcccatttctcagcacagtacatttcctgtctcagctctggaagactatgcacccaagcaccaaacttccaaccagagagagagacgtcctccgataacaaaaatccttgcttcctctgtctgtgactttacacacagttgttcaaagttgttaaatgtcaagagtcaatcacatccctagg

SEQ ID NO: 4259 - DNA, 1308 bp, Homo sapiens
aaagagaccgttctatacactgtgacggatgggccagggcctctggacttgcattctgataggtgctttaatttaaatgtgcccaaagggagtgactgtcttcaggagaaagatggcttgcattaacctcgatcaagtgggttgtgcagccaggtcagggaatacggtcagggagaggatagtgctggtcatgcccccgatgcagctatgctctgaatgatttcattcctgagagtgatagcattctggtcctggctgcagtggggtacaatttacgtcctaagtgggggctactctaattatcccattcaaatggaatttttttcaacattggatagaaggaattgaagagttgtaagtagtgattagtctgctaatcagttcttcagatgagatattgaatggtaacactctgagcttaaaactcagcagtgtgtctgtgacctccacgcaaatcagaggaagcaatgcatccacgctgagcctcaccatgtcttcctcccaactctcttcatactctctgtgtcttccagctcttctttctctggccggctctctttcctcttctctctgcatatgtgagaacgcctgggcatcctgggtaacagcagccccagctgccctctcctgttccctgttccaagtcccctgcactgacctttcttgagtctctctggctctgtgcatgtctttgggactctgctcatctggcttttcctctgtgtgtgcctctctgtttgcttatgtctctggctctgtcttccccacccctcccctcacacacacacatactcccaaatgtaaggctctgtggcaggttggaatcggagtaaggcttgagattcactgagttctgtaggtagggaaagaagtcaagggagtggaggttctataaggaattaacagctgaggacggaagggtttgtttcccgtttgaacctaaacgcaagtggaaaagaatactcagaatgtatttttctactttacatctgctggggaaggaaatgtgtcaggaagccgctgcatctggtcatttcatcgcatcagaatcacagcagacgtggaagattccatgtggtggggaataaagaaataactttatgctctcctgaaaaacagcgggagcctatgtgtgtgtgcgacactgtaatctcaaggagattcactcagagctgtctcagtccaactcctgcatgaccagatcttcccttagcatcttttctgtgatgaaatattatcttgtgttagagttaggaataggaactaacctgtaggagcatgtccccaaatggacatttgaatggacta

SEQ ID NO: 4260 - DNA, 1099 bp, Homo sapiens
cacatacttggctctccaacgccagcgccgcctctcgctcgccgagctccagccgaaggagaaggggggtaagtaaggaggtctctgtaccatggctcgtacaaagcagactgcccgcaaatcgaccggtggtaaagcacccaggaagcaactggctacaaaagccgctcgcaagagtgcgccctctactggaggggtgaagaaacctcatcgttacaggcctggtactgtggcgctccgtgaaattagacgttatcagaagtccactgaacttctggttcgcaaacttcccttccagcgtctggtgcgagaaattgctcaggactttaaaacagatctgcgcttccagagcgcagctatcggtgctttgcaggaggcaagtgaggcctatctggttggcctttttgaagacaccaacctgtgtgctatccatgccaaacgtgtaacaattatgccaaaagacatccagctagcacacagcatacgtggagaacgtgcttaagaatccactatgatgggaaacatttcattctcaaaaaaaaaaaaatttctcttcttcctgttattggtagttctgaacgttagataatttttttccatggggtcaaaaggtacctaagtatatgattgcgagtggaaaaataggggacagaaatcaggtattggcagtttttccattttcatttgtgtgtgaatttttaatataaatgcggagacgtaaagcattaatgcaagttaaaatgtttcagtgaacaagtttcagcggttcaactttataataattataaataaacctgttaaatttttctggacaatgccagcatttggatttttttaaaacaagtaaatttcttattgatggcaactaaatggtgcttgtagcatttttatcatacagtagattccatccattcactatacttttctaactgagttgtcctacatgcaagtacatgtttttaatgttgtctgtcttctgtgctgttcctgtaagtttgctattaaaatacattaaactattaaaagaaaaaagaaacacatacttgtagactctaataggattcgagaaaaagcaaaatccttgtatgacaactttaag

SEQ ID NO: 4261 - DNA, 1320 bp, Homo sapiens
tctcctgacctcgtgatccgcccgcctcagcctcccaaattactgggattacaggtgtgagccacggcgcccggcctacttttttttttgttttaaaaccttctggaacttctattcatcatggactaaacctcccagattgtctctaattttcttcttaccagcttcactttttaaacattaatacataatatttacacatatttatggggtacatgtgatattttgttacaggcatagaatatgtaatgatcaagtcagggtatttagggcatccatcactgtatttattctttctttctttctttttttgagaaagagtctcactttgttgcccagactggagtgtagtggcactatcatagctcactgcagctttgaattcctggactcaagccatcttcccacctcataccccaagcagctgggactacaggcatgtgccaccatacctggctaattttttttttttaattttcagtagagacaaggtctcactatgttgcccagtctagtgtccaaccactgaactgaagcgatcttcctgccttggcttcccatagtgctgggattacaggcgtgagccaccgcacccggcctgagtatttattatttctatgtgatgggaacgtttcaagtcctcacttgtaactatttgaaatatacactacatgttctccaatttttaaaatatgtgtttttgttatgaaatagaacttactatggtcacatctggtttttttccgtcctaatcctgttgtttctcaagggcaggatctctctctcttctctcttacacacacactttagctgatttttgcatagtgcctagcactgtgtcttaaacataaggatattcaataaatcatttgatggtgatcatcaaagtttgggtcaaaaatatgattacagttgattatcagctccaatggagaaagcattagcacaaataacacagagccgcttttgagatcaaatagaaaagctgaaaaggcaagtctagaatgaatcctttgataggaggtgattatcttgaaccagcggaacaacagtgagattgctgggaaggcaaccacaatccctgtgtctgacaaacaaaaaacaatggagcaactatgaaagaagtaaaccaaaagcagagaccacttgctggtcaaggacggtcacaggccagcccagagcccaagaataactcctgtggggaagagcagaaagggaatcatttccaaaatgtggtgttaatttttcatacttgcagtcttaggactagatacatcataggtgactctgctactttattctttacacgtatgttttcta

SEQ ID NO: 4262 - DNA, 1176 bp, Homo sapiens
attttttgtatttttttgtagagatggggtttcatcatgtttcccaggctggtctcaggcagctcggctcaagtgatctacctgcctcagcctctcaaagagctgggattacatgcatgagccaccatgccaggtcacctttcctgctttttatgtttttctagatttctgattactctagtccctccaatcttgattacattgccttggtctcttcccaaatctctcttcaactttgatgtgtcagaacacttcacgactctaccattcagcattacattctgggactcctccgcttgtattattaaacactacatcactctcaaaagccataccccttgtcttatttgcagattattctttctcctctgacattatcacattgtattattctgatgaaaagttgcctattaaacaaattataaatattatattcaatcatcctttcaataagtggcaaataattttggagatatgttaaggccttaaatttcaaggttagagattagatttcatgctgtgggtaatgaagggtcattggaaactattgaatgagctgaggattaaactacgaagtgtaggtgggaggctctgaaggggggcaactagttaggtaactctgaacaacagtttctaaagtagtgagaatctaaactagagaaatggcacagggactggagggggtgaggacctcttttagatgattttatggagttagagtttaatttatggaggcagtgaatgtagcagccaaagagtaaaaaaatgttctcaaggttttgagtactatgtgaccaagaagatactactaaatcttgcaaaaattcactattcttacatttttagttttcagcttcctcactgcaaactttgaatggatcctttaaaaaatccctctctagcagttcaagtgtatttgttatgggccacagaagtatgttgaataatagaagtcagaaggacggaagaaagaaataaagggtataatattgttacaaagtatctcaaacaaaatgtctttttaaccagtaaattttaacactatccaaacactctcccagagatgacaaagtcaaaagtttagaaatgctggtcttaattagtgaagcaatgtgaaaaaactcagtgatcttgacccctagccaataatgatacgttgtgcacggaatgccacca

SEQ ID NO: 4263 - DNA, 1154 bp, Homo sapiens
atttttgttttaaacatgccttaatacctttggagtggtctgttggtctaatttgttttctagatttaatgaaattacactgtaatttttattttttatggtgttgtatatagactcaggtgaaaaaattaggaaaatgtgacctattttttcatttgggattgaagcagccaatgaaatccatgaaattttatagaggaagatgagaatgtagagaactggaactaacaaaatgccttgtacttgtctgtcttctatagcacgctccctgaaatttggcaggcagactggaggtgaagagggagatggagcttctgggtatgatgcttattggaagaacctttcatctgataagtatggtgataccagctaccacgatgaggaggaggatgagtatgaagcagaggatgatgaagaggaagaagatgaaggcagaaaggattcagatactgagtcatcagatttgtttactaatttgaatttaggaaggacctatgctagtggctatgctcactatgaggaacaagagaactaggggagctgctctggtggccgtgtgtgagaggagcaggagtgagtgtgtgtgcttgatgaattgtgtgtggttgttcaaaagtaccttagccacttagccttgtgcagaagactagttacacttaatgggccaagcaatagggtgtagcgtttttatagaactgataatcaggcttatggcataagaaaaatgagtttcaaatttaagatgtttattgatcgaagcaattgaagtatcatggattggattgttactgatttcagtaaagtatgttttgccaattagatacatatatacaagataaaggaataggatggtaatatatttgtttgaaattaaattactgtttttattaaaaaatactgcttcattgggctgattttgtaaaatgtaatgagtaaaatgaattactgtatttttccttttatgtccacagaatgagagtcatatgttgttatattctaaattttcattaaatattcatgtcaccttgagttgtcatgataagtatgttttagtatttgacttattcttctctttcttcacaatgtatgtcctcagtggtacctattattgatgccttaaatgtattgataaggtgactagttagccatttttc

SEQ ID NO: 4264 - DNA, 1208 bp, Homo sapiens
atatcttcaagtttcatccaggcacatattatgggatttcctattttttaaggctaaataatattccattttatatgccacattttctttatccactcatatactgatgaacgtttaggttgtctccacatcttggccattgtgaatagtgctgcaatgaatgttgcagtgctaatatctcttagaaatcctgctctgttattttggataaatacccaaaagtgagattgttgtatcctatggtagttctatttttaattttttgaagaaaggtctgggaaaagtctgtcaactctcggattttgttttattttggtttattaaacttggtttcctgatgagttaaacaaaaactattatttttatagttcgcttgacttctcagtgttagaatgcgggtaacagtctctagcaacttttaatattttaagcagaagcagaactattacatatcgatgttatttcttttagcattgatgctactatccatacatttgcattttcatttctgcctctttcatttccttttctctggaatttacatatcaaagtacattgcactctgctgatgctcttcacattgtttctccctttctgtcatgttcctgtcctctctgttttactattatctgcactcacacagtagttgttctctatcatctcttcaaaaactttgtttgcttttttgttttgggctctcacaacagaggaaaggataagcattgacactttccacaaggaaataatgatgtttgcatggagaaagactgactttttgatggtagaaacggaagtaagtttaattatgaatttcttaaaaaataaactttggtcatgaaactaaaaggaactagaagaaaatgtgggggaaaagttctgtcacattgatctgagcaaagatattttggctgtgaccccaaaaaaataggcaacaaaaacaaaaataaacaaatgagattgcatcaaaggcttctacacataaaaggaagcaattaatagcatgaagagacaacccatgaattggaagtatttgcaaatcatacatctgataaggggataatatccaaaatatgtatgtaactcaaacaactcaataatgagaaaacaactcatttagaaaattggcaaaggacctgcataaacattcgtcaaaagaaaatatacaaatggccaacaggtatattaaaaaaatgctcatcatcacaaat

SEQ ID NO: 4265 - DNA, 1198 bp, Homo sapiens
cgcgagagcggacccaccctccggcttgacctgcgacctccctgcgcccgccgctcagaaacgccccgcgcttcgctgccaaccctgcggctccctctgtgacccgggaccagccccgcgcccgctgcccgtaggcggctcgcggcttcccctttcctcggcgttcaccgagcgccgcgaagtgacccaccctcccccgaggagagggaaggaggatcgctccgggcgcatcgaaaccgagggcgggtgggcgggcgagcgggcaccgcgcggggcattgtgtgtgtgtgtgtgtgtgtgtgtgtgtgtgagcagcgctgtgtctgtttcggaaagcgctctggggaggtcttgtccctagggggcggagcgcaaaggacagaagctccggcaccgagtcggggcagagtcccgctgagtccgagcgctgctgaggcagctggcgagacggcacgtctggaggcgaggcgggcgcactgaaaggaggccggcgcgcccgcggccccggctcgcgttctgttcaggttcgtgggcctgcagaggagagactcgaactcgtggaacccgcgcaccgtggagtctgtccgcccagtccgtccggggtgcgcgaccaggagagctaggttctcgccactgcgcgctcggcaggcgtcggctgtgtcgggagcgcgcccgccgcccctcagctgcccggcccggagcccgagacgcgcgcaccatgagcggtggtgaagtggtctgctccggatggctccgcaagtcccccccggagaaaaagttgaagcgttatgtaagtagagctgcgggcaccactccgcgggcctcggcgtccacacccctccccagtcggctcgccggcggctgcagctggccgcgcgcggggctggttcttaaacgaatgccggtctctttccccttggcccctacccctggcgggctcgggacagggtgccttgcactccctcacgcccaggcatccacttggccggacaactttcttcctccaggttccagacagcctgctttgcgggcctgttcgccccataaaaggacctagacgtccagctaaactcctgctgcatgctttttttcttccttaggaaggatggggtgcgatggagagaggagccttcttcctgctttattcctgcatctgattattgggctgatgtgtgctaaagctcccgcaccgggaaaa

SEQ ID NO: 4266 - DNA, 1386 bp, Homo sapiens
cttagtcccaatcaggcagttgacatatgctgtcaactttatcttaaaagtatttctgttcatttaacagggccaacgtatccatcagacagaaggcacagtgcttggggcccatgatacatttaggagcacacaaaaagtgtcttaatattttcttttaaaaatcagcttcttttccgagaaaacaccaaatggcggatgacgccggtgcagcgggagggcccggaggccctggtggccctgggatggggaaccgcggtggcttccgcggaggtttcggcagtggcatccggggccggggtcgcggaggcaaggccgaggataaggagtggatgcccgtcaccaagttgggccgcttggtcaaggacatgaagatcaagtccctggaggagatctatctcttctctctgcccattaaggaatcagagatcattgactttttcctgggggcctctctcaaggatgaggttttgaagattatgccagtgcagaagcagacccgtgccggccagcgcacgaggttcaaggcattcgttgctatcggggactacaatggccacgtcggtctgggtgttaagtgctccaaggaggtggccaccgccatctgtggggccatcatcctggccaagctctccattgtccccgtgcacagaggctactgggggaacaagatcggcaagccccacaccgtcccttgcaaggtgacaggccgctgcggctctgtgctggtgcacctcatccctgcacccaggggcactggcatcgtctccgcacctgtgcctaagaagctgctcatgatggctggtatcgatgactgctacaccccagcccagggctgcactgccaccctgggcaacttcgccaaggccacctttgatgccatttctaagacctacagctatctgacccctgacctctggaaagagactgtatttaccaagtctccctatcaggacttcactgaccacctagtcaagacccacaccagagtctccatgcagcggactcaggctccagctgtggctacaacgtagggtttttatacaagaaaaataaagtgaattaagcgtgaaaaaaaaatcaaaataaaaaatgaaaaataatatataactactccaggttagaatattttaatctaggaagggggggacctatgaaggcaaatgtacctggggctcacaaaagtcacaacatggccccaccatgggaggggaaataagcaagtaaacaagcaaatatcaagtgtggcaagtgctatgctatgagaataacagagcatgacaggaggacaaaacagatgctcccagcacagtatgtctgtgtgtacatgtggcagtggtggtggagttcagagaaggttcccaaagttagcctggttgtgagaca

SEQ ID NO: 4267 - DNA, 1169 bp, Homo sapiens
ggtccatacggcgttgttctggattcccgttgtaacttaaagggaaactttcacaatgtccagagcccttgatgtcctgcaaatgaaggaggatgtccttaagttccttgcagcaggaacccacttaggtggcaccagtcttgacttccagatggaatagtacatctctaaaaggaaaagtgatggcatctacattataaatctgaagaggacctgggagaagcttctgctggcagctcatgccattgttgccgttgaaaaccctgcagatgtcagtgttatatcctccaggaatactggccagagagccatgctgaagtttgctgctgccactggagccaatccaattgctggtcacttcactcctggaaccttcagatgcagacagccttctgggagccatggcttcttgtggttactgaccccagggctgaagaccagcctctcatagagagaggcatcttatgttaacctacctaccattgctctgtgtaacacagattctcctctgtgccatgtggacattgccatcccatgcaacaacaagggagctcactccgtgggtttgatgtggatgctggctcgggaagttctgcgcgtgcgtggcaccatttcccgtgaacatccatgggaggtcatgcctgaactctacttctacagagatcctgaagtgattaaaaaagaagagcaggctgctactgaaaaggcagtgaccaaggaggaatttcagtgtgaatggactgctccagctcctgagttcactgctactcagcctgaggttgcacactgatctgaaggcatgcaggtgccttctgtgcctcttcagcagttcccttctgaagactggagcactcagcctgccatagaagactggtctgcagctcccactgctcaggccactgaatgggtaggagcaaccactggaaggtcttaagctgttcttgcacgggttcttaagcaacatggaaaataaacatcagtatctaaataaaaaaaattttaaaaattacaaaaaaagaaaaaattaactccaggtataaggtgttagagtttgttagatgagctatgaagacttgacattacatggagtatagtaaagataaaaagttagaggttggttcaccttctatttactcaggccagattctctaacagaatatttttgaact

SEQ ID NO: 4268 - DNA, 1225 bp, Homo sapiens
aaagatagaaataaagcccatctttagggcagaattcaactgccggacttgggactggacgccaccaagtggataaaatatggagctcggaaaagattggattcccggccctgaactgaccacacagttgagaggaagttgaggcctagaagagcgcgcaacagtaagccgtgtcggcaccagactctgttggtcctactgacacctccagcgttagaatgactaaggctccactcctgacccaccggccttgaggaaagcgcaaacgtaaaaaaagattgaaaccggagaggcgaatgcatctgtttacgctaggaccacgctcgacgtcggagaaaagcccacacactcacagtttccagacctggctgcttgccgaaactcagattctcggcacctccagcagctggcttcgccaacggcgttgaacaagggtcgcagctcaatgacgtcatatctccctacctacctccagggttccgcctcacgctctatgtcgcgcgcgcgcactacgtcctatggcttgcgcgtgcggcggctgggcaccgccattttggccggtggccgtgagaacacgctgtgtggctgaaaagtgaaggcaagagctgatttggcctctgtgctcccctccgcaaggggatcgttttctccaggtacgtgaatagcccggagaggtttggccgttagctgccatctgccaggttggaaagaatgtagggacgttctccgagagcctttggttaggccttaggtggcggagacagcagcagcgcgtggcagcggttcctgcgggacagctggaactgatggagcgcgggcgacgccgagagcttgggggcgcctcggtcttcccctccagccgacccggctgtcgccgctgttgcctgccacacccgcgagggacttcgagaatggacctagatgccgtagtctccactccccctttaccccactcccgccctgaagctaaacctgctggagaggaaggcacctttagaacttacagcactctctagtacccccacactcctccagcacccaaaatggatatattgtcacatgtgcatatttggttgtgggaagtcgtggcttccacgttttgttgagtggaatgagtcatggcatcttgccgccatgaagtcgaatactcgctgtccactcccaggctttatagaaatgatgcccacatgtcactctgcttttctcagaacagcgtgtacgcagc

SEQ ID NO: 4269 - DNA, 1184 bp, Homo sapiens
ctcggtctcccaaagtgctgggattacaggtgtgagccaccaagcctggccgatcaaacagaatttttataaagttgtctttaaaaaaaagaaaaaaaaagtatccagctgttaaacattttcaaagtgaagttaatcaataccctgtacttttagttccttaattcttttgatctttgtgccatgattttttactattagttaagaaagtgtaatgaaccaaagaacaagaagtagggggagaaaagagttgcctgcttcatttgacaatagaccatttatcttctgttatttgcctttcttaaagtacggagagtttttggatttttttcccccagtcactttttgtagcctgtattttttgtttattttattgaataatacaattattccctcaatatttaatgggagcatttattttgtctgctgaattccatactggtgcaagaattataaaacagcctctagtctgaagctgatacagagagtggttgaacattatttgtctcctaatctttttattaaagggggttgtaacatttggtggttactccttcctttaaaaaacaattatatcttcatatacaaattagggtaattaaaaaaaaactttctgtgggaatttgggatctgtaacatattaaatggaagagagtgtattttgttgatattcacaggagttggataatttacttgttgctttactagatgaggccaaggtgaagaaaatgcccatttgttctgcaattggctgattaggcttcctttaaatataaagcaagttacatagcagttaagagtattttaacatttttttcttttaatattaaggaataacacataagttggaaaattaattagccgtgtcgagtagtataagagtatttttctaatttcacttctggcagttctgatagaaatccttcccatgggtgagactccttaggaaaacgttctgagttcagaacactgctttaaactacattatattttttttgcttctcaaaccagatcacactataaatccaacctgatttctaagtagagtatagatgtggcttgagataatgaattgatttttgtgggttttttttttttgtaattagcaaatatttgcttcgaaaacctttttataaaaaatcagaagttacattttttcattaaagaacgtttgaaaagtttag

SEQ ID NO: 4270 - DNA, 1118 bp, Homo sapiens
cagctcagtgttctggccaggaagttggccgagaagcaggaacagaatgaccaatacactccaagtaaccgttttatatggaatcaaggtaagtggttgccaaactcaaccaccacctgcagcttgtctccggattcagccatcctaaaactgaaagctgcagccaatgccgttctgcaggacaaatctctcaccaggactgaggagaccatgcgatttgagtccttttcctccccttttagctcccagtctgccagttctaccttggccgctttgtccaagaaggtcagtgaaagaagtttgactcctggtcaggagcaccctccaccggccagctccttcctttccctggcttctatgacctcctcagcggcccttctgaaggaggtggccgcaagggctgcgggcagtcttctggctgagaaatcatcgctgctgcctgaggaccctctaccgcccccgccttcagagaagaaaccagaaaaagtcactccgccacctccaccgccacctccaccacctccaccaccaccaccacaatccctggaattattattactcccagttcctaagggaagagtttctaaaccctccaattcaggtatggcatcttttctttcaatcatcgtgtaagtcctttagactataaactgcgatgtcttattcattgcttttttcagttgggttccccatctgatctgaggcaggaataaaaaagcaagagcacaacaaaaatactttaagtaagcagcatagtagtctttcatgtacgtattacacaaagacttcacaaatagcttcacttttgaaaggtaatgaataatcttagagacatacagcattccctccctttcatacaaatgatttttttttcttactaagttcaggctaggtccatacaagatatatttaatgggagaagatcaaagcatctttgtcatggagtgcatggcatcactgaacataaggggaaaaaaacccactgcttttgaaatagtggacaagggagagcccacactcctgctgcctccatcacaaatggacttttgtacaatcaggaactactctgccctaatttatcacaccatatacttttatgttagcatttttattacttt

SEQ ID NO: 4271 - DNA, 1397 bp, Homo sapiens
taacatgaaaaaatgcgggagcttagagggataaaattactggcagttgagacaagataaaatttttttaaattagtggattattttggaaaggggaggtttaaaatttttttggcataattgagatctgtgagtctgaagagtgttgagtaatattataatagctctttgatgcaaaaataaaaggacagcaaatacatccctgatgacttggttcaagattctttgccctgcccacttaaagtgcaaatagtgtgattttttgataaaccttctccaaaaataggaaaagaaggaaagagatttacatttgattatttcttatttctcagtactgagaagaggctttgctacacaataaccttgatagcattgctccactcatcgggttttacctttattttgctaagtcacatagtatgtggtcattacacactgaattcttgtatcgaaccatgattattgacaaattttgagctaagctgtgcagcatgttaaatgtgcctttacggtgtagttatttaaatctcaatttctttccccagctctactttacgaagtgtttctactggatcttcaagaccttcaaaaatatgtttggtgtgtggggatgaggcttcaggatgccattatggggtagtcacctgtggcagctgcaaagttttcttcaaaagagcagtggaaggtaaatgttcatgtgggtgttccttttacatattttttcctagtgtgtagtttacttgtacagctaatgctatagcattattgggaattcttcaaaaagatttttgatttaatctgtcagtgataaacagtaatagtgccttgtataaaaaccacctggagattttccacaaagcaatatttaatgagcaaaatttgaaattctgagcaaggatcaaccaaagaggattttttgttgtttgtcacagtttgtttttcagtaagactcagaaaaataattccttgtcattgtaaatttaatttatgtgatctggaatagaagttttactaggcacacacagaatacatgatttctgccttttctgggtttctgtataaatatgtgtttgtggcaaattaaaacgttaatatcagaatcaagtctgtgatttgtgtttcatacagaataatttcatttaccagctggttcaagctccaggtccctgtgtgagtctcacctttattcctcctgaaagtttccaaattttgcatattaaatgaaaaacctgactgagattcactatgcacagttaggctagcttttgcttctgccccaaaatcgtactccttaaggagaaatggtctttaatttatttttacctttccccatcctcacttataagcagttagttaccatcagacttagaccagatggttttattgatgttgcaaac

SEQ ID NO: 4272 - DNA, 1164 bp, Homo sapiens
taggtctcatttgttacacatttctacttttaaattacttctgaaccacagaatctggcaggcctttttggaaggcatttgaggataactactctatctggaatccagccatttacagtatttggaagcaaagaacaaagcaaagcaaattgagattttgttgaatgtttaaaagttttggaaagaacagttaaaaagaaatccttcatggatgcatgctttgaaaacaccaagttttctcaacctttaattttgtgcatctgaaaaccaacttgaatttgtctttaatcccctgctagtcagtggaaagtaaacaagcagaattgctaattctatatggccttggaataatgtttaaaggaacaggatagtttaatggattaattactcttctttacagtattagattcaaatccagcagagatgcaactcttgataatgtgtgtcattcccgttttttctcaagataattcatacgtaattgtctgatttttagaatgtctaaaacctcttgataatgttaagcatgttgaacaatagtagtaatgttgacctcacactaataatagagaagcagtggaggtaaacagatgtggactcaagtcctggctggctgtgggctgtattccagctcctgctaatagcagctaacattcattgagtgctgaccaggtgccaaacaatgcactgggtgatttaggtatgttatctcattcaactttgaggaccatattggtatctccattttataaattacagaggttgagtaacttgccaagtttatgtagctcccagtggagtttgaactccattcctgatgtttagcttcaacgctcatgcttttttcagccatcctgtctctatgttgtttagatttattatctttgtcgttacttataattccagtatttcactatgttagatatacttctaatcatgttttagttgacctgaatataaggaatacatttgagtattttcagaaagtttaaaaaactctagctattaatatttctgaaaatataaacctgcaaatggccatttatgttattttagagagaaagtgggtagaagtttctcttccttgttgtagttaagtcagtcctaaaaagacgaataaggactttggaaccattctttacattttgaataaaacatatgtct

SEQ ID NO: 4273 - DNA, 1184 bp, Homo sapiens
gaaatggccatcgtccttccactctaagttgtgtgaacacgcccttgagatcatttatgtctgactctgggagctccgtgaatggtggcgtcatgcgcgccgttgttaaaagccctatcatgtgtcatgagaaaagcccgtctgtttgcagccctctgaacatgacatcttcggtttgcagccctgctggaatcaactctgtgtcctccaccacagccagctttggcagttttccagtgcacagcccaatcacccagggaactcctctgacatgctcccctaatgttgaaaatcgaggctccaggtcgcacagccctgcacatgctagcaatgtgggctctcctctctcaagtccgttaagtagcatgaaatcctcaatttccagccctccaagtcactgcagtgtaaaatctccagtctccagtcccaataatgtcactctgagatcctctgtgtctagccctgcaaatattaacaactcaaggtgctctgtttccagcccttcgaacactaataacagatccacgctttccagtccggcagccagtactgtgggatctatctgtagccctgtaaacaatgccttcagctacactgcttctggcacctctgctggatccagtacattgcgggatgtggttcccagtccagacacgcaggagaaaggtgctcaagaggtcccttttcctaagactgaggaagtagagagtgccatctcaaatggtgtgactggccagcttaatattgtccagtacataaaaccagaaccagatggagcttttagcagctcatgtctaggaggaaatagcaaaataaattcggattcttcattctcagtaccaataaagcaagaatcaaccaagcattcatgttcaggcacctcttttaaagggaatccaacagtaaacccgtttccatttatggatggctcgtatttttcctttatggatgataaagactattattccctatcaggaattttaggaccacctgtgcccggctttgatggtaactgtgaaggcagcggattcccagtgggtattaaacaagaaccagatgatgggagctattacccagaggccagcatcccttcctctgctattgttggggtgaattcaggtggacagtccttccactacaggattggtgctcaaggtacaatatctttatcacgatcggctaga

SEQ ID NO: 4274 - DNA, 1406 bp, Homo sapiens
ttgggggggattagcaaagcagaaaactggctgctgggttctgtagttttaaaaaatctatatttttagtcataatgagaagtctattttcaccaattatggaaacatacagtggagcaagtaaaccacttattccagctataatattatgaagaacatttcccatgcatctacaagcttgagaaataggattttcacagtggggaagtgggttacaatattggaataggaaaatttgatgctgtaatttgggtcctgtatttttccaaacaactgtgcttcttcagcactaatatttctgggatttaaatagtaatgtttaaattatggtaaatgtaatttaaaacatctcaattaagtctgtctatcaatattgttcttcaagcatgttttagacctagaaaagtatggtttgggggaggctattttattgtgtggttagcacaaggaatctaatttatagcaagtgtgaaatagttaccattttttcctgatctgtcatcttcatagcacaacaaaacgaaatgatggaaatgctcttgagctcacaacatttgtttttcttttaaagtaaatgcaagtaccaaagctcactactgcggtttgcctgtgcctggacaatgaggcggagccactgttgttttgttggggcacccccttccctccccgggtttgcaaatagaggctaccgggtgctgtattcagcaacacctgttttactatttgttattaaactatcatctccaccttccttttgattagcaatttgtactaagaaacgaaacaatgttatttggtggtgtataattctacttttctagtagattactgtgtggaattctgtgaaaaatatttgagaaaaggcctgtattgcataaataaattctttgtatgttgtgaactttgatctctatttctcttgcaacagacttcaagtggtccctctttttttcctacacactcagctcttctctaaaagcaaggatttggaatgaacaattcagtttgacagaaaaagctgaataaaatggcatctgtaattgaattgttggaaatgccttttttgctcctaaattttaaacatcattaataaaataatgattcacaaagaaagaaaatgtcaaactctgattcagtcctagtttttgatcaataaccaatgtgagagatcctcctgactgaaaacaggaaaatgagctttctttggccagatctctcctctttcttactgagactcacacaaatgacctagacctgaatcttacaaatgcctagcaaggaactttatgtaccacttcatctgagatccatcattaagaaaataaatagacgacggtgaaatgtgggggagggaaagtacattttagaatcaaagaaatacccaagttgctgataaattaattaac

SEQ ID NO: 4275 - DNA, 1179 bp, Homo sapiens
tatctgctggaagccttcagtttacatatttctcctacttttgacccaaagaccaagagcccttctttttcaccttataaattaaaaaacagtcttggtaatgattttgattggcctgacttagctcacattctcagtcttgtattaatcactgtggccagtagaagggggaagtatatatttagccaggcctgacttaagtgacctctctgtgacctgggtgtgaggtactgagactttcttgtcagaattccataaatggaagaggatggaaggaagagtaaatacaatacagacaaaaacaacattgtctattacagtgaacattttggtaatttccagtttatttccctattgttaatataatctccattttcacatctgataaatctccctacataaggatattggtatgaaattattataaagatctaaaagtacattttttttttttggtggagaaaacctaatatatagatctttctttcatgtaccctaaattttggtgttcttcaaagtaagatttgtagagtcttcaaattatgaactatcaaatttaaaaatgtattttaaaatacaggtagtttggacacattgagggaatcatgacataaaatatttggggtactgaagtattaagtaatgtatgtgatgctatagttttaaacacttataaacataaactcaaattgatttgaatatgaaattcatgacattttgctatctctttcatatcctatgatgtttgagttcaagtaatgtaagttcagtggactttgactggttgtcacatagtgagagatttctgatttttgaaatatgtcactgctataaatcactagtttgctagattgaaccagcaagctattaaagaacatgacagaatttactgtagataaatgcaaatttaaaaaggttctctgtatgaaggtttagatgatttattagccttcagtgcacacatgaatctgaagttatgtaatggatttagaaaatttcatttcctgtttgaaggttcaaatttgcatatttattctataatgcaagtattagatgtgagtcagtaggatatatagttaaactctgtgtgatatcaatatatgcttcatcttttttgtatagtatatggcaaacattttttcaggtgtagggcaagtaattaaatatactgattttttt

SEQ ID NO: 4276 - DNA, 1199 bp, Homo sapiens
atttgagtcagagtcttgctctgttgcccaggctcgagtgcagtattgtgatcctccttggctcactgtaaccactgcttcctgggttcaagcagttcttgagcctcagcctcctgagtatctgggaatacaggggactgccaccatacccagctaatttttttaaatttttagtagagatggggtttcatcatgttggccaggctggtcttgaactcctgacttcaggtgatctgccagtactctaaatgataacagttttttcgtgtttatttattttgaatgaagctgtctcacagtagatggagttgaaggacaggaaatgtttttcccctacttggaaaatacactgaataagttgagtggggtgggatgtgcctggagtcccagctactcaggaggctgaggtggtaggattgtttgagcccaggagtttgaggccagcctgggcaatatagggagaccctgtcccaaaaaataaaaaatatacgtatatatatatacacacacaaagaaaaaatacactgaatagacaaaacctttcatgattaatgatgcacgggaataagtgatgaaaaaagtttcggtcccagatgatggccagtgataacaacatttttctgatgttcccatgcaatatacagttagctaagagggtgtaatggaaaaagcataaggcttggactcagaagactctactaactttgccactagctagctatgtaattcagatcatctatcctttacatgtgaaaggtaaataatggcttatcttaacaggaggatttatgcaggttaaatgaggtaggtgttatgtgtaggtttattccaaggcttctctacttttaaaggaaatggcttatatctgagaactaggacttttagaaaaaaatttactgttactggtttgcaggattccagacagcattggaaaagacatagaaaaggcttgccaatctatttatcctctccatgatgtcttcgttagaaaagtaaaaatgctgaagaagcccaagtttgaatgtaagtgagaaatcacatgattcctgtagggccaaatacattgtttttgggtggaggaggagtgtggggccatatcatggccttctttttcttcctgtcatgcttgcatagtagtgatgaccattatttcaagatatactaacagttttttggttttttttttttttttttttttt

SEQ ID NO: 4277 - DNA, 1199 bp, Homo sapiens; identical to SEQ ID NO: 4276

SEQ ID NO: 4278 - DNA, 1157 bp, Homo sapiens
ttttctttgcattattccagtaatatataaaaactgtgtcttgttatagtagtacattatgaatcacatataaaatcttacaatacagaacaactgttaagatggaaaacagtgccaaacctccacagctcatttctttgtaatataatcagaatgaaaaataatttaagaggacagaagactggtacttttttgttttattttttctctagcttatccctgcacaattattagagtgaatgaaaaaccactttcctgctttccattgttataaattctaagcttaagataaaagtggttctttacatgactgaatcaattacaatttatgggctagagccaaataggttgaagacaatcatccaaacagatcaatggaatagaatttcattggaaatgtaaaacactttcccaacaatggtcatgactttcttctgtttttgagaagagtttcatatgctggaccacattttagcttttattgttttttttttcccattgtccaaaaagttaagcaacaagtggccacacttttacgtgactacaacctggagttctgcaaagaaggtaatatttacttggtctttgactaaagttatctccccattctatggttacattttattttggactatggggacttctaatacgttttggtaaagaagagagtataaagaaaattcttgtcaaatttcactcaaaagtaatttcatgagaaatcaatgatttaaagcattatccaaattaaattatcatttgcagcaaactgtacaacagcaggaaggatatggaatggaacatgaggtatatatctttgcctttataattttaacatcttatattgaagattctgaaaacctatctttattagaggaaaatctcaatcttcagttttggccttctgtcagcagaatgataagtgcaatagttgtaaatctacttgacactgtaataaactgaactgaactttcaaagtccctttctcatactagactgagttttttgagaatggaggtggtatcttttttttttttttttttgagacaggatttaattccctttgaccaggctggagtgcaatgcaatgttggctcactgcagcctctgcctcctgggctcaagtgattctcctgccacagcctcctgagtagctggga

SEQ ID NO: 4279 - DNA, 1203 bp, Homo sapiens
atactagtggaaataagcggaatttaattttcagtaaacttaagccttagtttgggatttgggggcatgaatcccttcattttctcctcttaagtaagtaatttctgtccttctaggtaatggatgtgaagaacagaaaccccagagctataaataaactgattgggttggtccggaaagcgactcaaagccgagcagatccagtcatgataaaggagatcctggagaagaagctgtcattgtgagatgtttgggatccccttgcccaagggacaacaacaaacagtgcagcctgactgggaacaggatcctgtgaaagctgatgcccatgtgccctgagagctgcctctcaatccctgtcccaagccacagctatggcattaatgtcaccagtgttctcaccctctaggccctgtgcctggaggtgcctccacagccgaccagcagccaccccgcctgcttcatccacatcaggagggtccggtgaggctgcagcagtggttaaggagtaacaccttcttgtattaaggaattttaaactaaataaaatgtatgttggagatactgttacccattctaagaaaacttttcattctgcagttccttcaacaaatatttttgagcaactcctaagggccagccattgtaggtgatgggcattagcagtggtcaagagagactgtaatttggatgtattgttttcagacctaaacacaggttaacaaagatgaaaatacaaccaaataaactggcacagtataaacacatttgtttgtttaaggaggtctcaagagggtggggaaggaggatattattagaattaatcaacctatcgactgagtagaagtgatattgcctgttaaactccctccccatcccagaaggcacagtctgagaataaatgaattaaaaaaataagttttccaataaatttaatcaataaaatatatactgaaatatcacataaaaattaacttacacttcaaagattgtgcagctgacaactcccccaaatcccccaaccctcaggccaaacaagataaaaagaaacaagaaaaaagttgtaacatgaaattgacttgttttgcttggaaataagattataaattagtaaatcaaaatcttgacctctcatgataatcgtggtgtgctgcaggcatcacgatgaaggcggggctgtctgcactcctgtgcttgcgacac

SEQ ID NO: 4280 - DNA, 1140 bp, Homo sapiens
acctttcacagtatgtttaaatggaatgtattttctcaaagtacgtgacattttctgaacactatgggatatatatcttctagtaattatatttttacatgcaagtatctttaaaaatttcttcctattacaacttaagaattgtgaaacatttgagggagcatctgcagtttgagcacttgatctggatattggaatgacaaacttaacatttaactaaatttttctgaggtgttcttttacaatttttgagttaacacttgatttctgtaaagcagaaggcttataagaagaaaatatgagagccagtgttcgtcttgtattatcctgccatgcacgtagttgaaaatcagaaacaaacagaaatgcacaagagaccttattgcttgagtatcttctgctcttcccccatcagacctaagggacagctagtggatcagtcagatactgtgcagtttctgttgctatgctgtgtcacctttgccctttctttctatctggaagatagctactggaaatctggctgtaagaaagagatagcatgtttttttcctctctctctctgtgtgtttctgtctgtctgtgtacctgtacctagtgtattgtgttagatgttcatttctgcatgactgctctggaatttaggaaatattaaaagactacaaaatatttttaatattatttagccttttctctgagaggatcacatcctctggctttggcgttttcatctcacagcatcttaaacgaacccgtcaatgtttattatcagttccaaatgtgaagtctcaaggcaaattgttggtttgtttttggaagaatgtatgtgtgtgtgtatatatatgtgtgtgtgtgtgtgtgtgtgtgtgtgtgtgtgtgtatataatttttaaatttttaacaaaaattcctgatctagtcaatgcttatgagagtgtgtgtggtttgtataaaattattttttttagagacagggttgcttgttgtcaccaggctggagggcagtggtgtgatccttgctcactgcagccgtgaccccctgggctcaagtgatcttcccaccttagcctcctgagtagctgagtagctgggactataggtgtgtactgccacaccctgcaaatttaaaaaaaaaattct

SEQ ID NO: 4281 - DNA, 1288 bp, Homo sapiens
ctggtaacatgttggaggggcagccttctgaggatggtgtcagattcccctgtcctctgattagctccctctgccaaggtgcccaggctcctacttcagtgtcacctccaggtttcaaagcatggaaacccaagcatgttactcggagaaagtcccacccccagcatgggcgcatcggcttagaaccctccagggttagcaggcaaagagctgtggaccccggacacgggaaaaggccacagtcgggagaactcctgttgctggagggccaggcgggggcgatccccagggctcccagcttttaatgctgtcaccgcgggccttactccctcctcttccccacatcgccaccacttgaatcagttcttttacaaagtggttctatttcctggtgagacaaaaaggttagaaaaggaaacctagagggggtgggggaaagacagaggttcggaataccggcgcgcaatcgccatctgggtggaggggacccgccttcttttcttccgcctgagcgcagctcggctcccgcctcggggcggggcctgttgctatggagcccgggccccggcagagcctgcggggtgaaagcccctagggctccgcctggcatgcgtggccggggctgtctgagatttccccaggtcggtggttatgaccgcaggatggaatcgtagaggtcgggtgatttggtcagtagagaggaacatttgcgaggttctctctgaattacatgttggtctaaaagtaatccactatctgggaccgagaggaaagcatgtgtggaagaggcaggcattattagcagcgcgtccgcctcggccacctccctgctcccgcctcggccacctccctgctcccgccccggccctgggggcctctgttcagcctccaccagctcagtcgcccacggagactcccgaactcttaaatcccagccctgtagtcaaaaccactgcattaattaaacaaggtaaactggtgaggcaagcaggaacttgacaccgccttgaatttaattgttaaaatgagaagtgtggtaatggagctctgcttaagagaaaaacaatacttgataccgatgtgcacatcgatgtggacacggatgcaatcaggaacccatagttagcaccgggagattacattccgggtatactcaagatagatagagtcaactttgaattctcgaggccaagcaatgggcgaaacaaaagagctttgtgtttgcgtgcttttgctttttgttacagtcagagcaggacaaagaataatgaaggagtagacatgttat

SEQ ID NO: 4282 - DNA, 1209 bp, Homo sapiens
tcagagtgctgggattacaggcatgagccaccgcacccagcctgaacttggaatttaaaaggaccatgttgagctttttagaaaaagattctataaagggaagaagagaaaactgggagtttgccgactttataaaattctaggtgtctgtttttttgagtttttatatttttactcttatgtaaagaaagtttaatagaagctgaatgcttagtagtttagttgataatataaataagctgaatttatcataacctcattgattttacattctgagagggtgctataattttgtgaaaaatctttattgtgaggctgagcgcggtggctcacacctgtaatcccagcactctgggagcccgggctgggcggatcacttgagctcaggagttcgagaccagcgtggccaacatggcaaaacccgtgactctaataaaaatacaaaaattagccggacatggtggtgagcatctgtaatcccagttacttgggaggttgaggcacaagagttgcttgagcctgagaggcagaggttgcagtgagccaagatcatcatgccaccgagttctagcctgggcgacagagggagactctgtctcaaaaaaaagagtctttattgtgaaaagaaattttgattcaggacctactttaaagaatatatgttatagattggtagatagaataatagtagtagtaagtatagctattaggataataattccagttcataggttcctggctgtctaaaatatttactcttcagtaacgtaaaaaaatcctatagtcgatgcacatgggggtatgtttacagttgtccctcgttatccacatgggattggatccaggacccccatggataccaaaagctaaggatgctcaagtccttggcatagtatttacacacaacctcccatatactttagattatctctagaggccgggcacggtggtttatgcctgtaatcccagcactttgggagactgaggcaggaggatcacttgaggccaagagttcaagaccagcctgcgcaacactgtgagaccctgtctccataaaattttttttaaaaattagctaagcatggtggtgcacacctgtacttccagctactcatgaggctgaggcaggaggatcacttgagtccaggagttcaaggttactgtgagctatgatcatgccactgcactccagcctagatgacagagtga

SEQ ID NO: 4283 - DNA, 1129 bp, Homo sapiens
tctcatttaattatcagaaggaaaaataatctttatagtatttaagatatctgtcttcttgaatagtgtccatttatatatttctatattgtttcactgatgccagtgaatccatggatggctttaattttatcccaacttcctttgttatagttgctgggaaatgttgcaccaagaataacagcaaataaatagattgctatgtaaattaattcgagaatcataagctttggtgttagtagaatatccaagtagaaatgttattttagatggaaaactacaaactaaacataatgaatccatccatctgttattagacttggataatgccagaagtttatcaactcttcctaaaactgtcaaagaactaagtgtataaagccaatgaataatgttagataccttatttttgttagaaaggaagcctattagacatgaagcaaactaataatactttattttaactcacttttctatttttagacagaagaaactcatccagtcagctggaaaccagaaattatcaagagaaagagattttaatgaatgtggaattttttctctctctttttttttctttttaattaaaaaaaaaaaagcttggcgttcatgaggatatccagtcattttgtgctctggctgggaatataaaggagaaattcacttgcttcaatcattgctgcttcatattttacaataaactgtcccctgtcccctacccctgtgtttttatttctaaaacaatttgtgatactaggaagatgcagatatcaagtaaatgcaggtttattgaacataactattctagatgtaatattttgacagtcttattagaaaacccccttttttaaaaaaaatgtatgaaaccgataattaggacatttgaaggagcagtagtttttttttagtcctttaaaaaataacatctgtgactaataatttgagattaaaagatttgaagtcttaatttatgtatgtttattccaaaaacagtttttgagtgtatgttctacaaagttctgcactagatactgttcaggaaatagacaagtaagatgtgtctatcctctaagacttccagtttggtagcttagtatagaaattctgtaacagaggtgcaggtgaaatg

SEQ ID NO: 4284 - DNA, 1177 bp, Homo sapiens
ttcaccagtggacaaatgtagatctctagttttcagcttatcagatttcccttggagaaatgaagagaaacagccagatgagtacataggcatattgtttatatcttgtgaaaatggtccaattactccaagcttctgtaatttatgttttgaatgatgatgaaatgagcaaaaagagtaagggaaggtatagagacatatttaagatggttatttaatttagatggtttattaaatggaaatatttaaaaatctgttttccaagaatgctaaatttagtttagaagcattaggtcatttataaactttgatcatatcaaaagagttattacttctgaagatttgaaattagatatgaataatgcttttatgcctggcaactcagcaaacagtatagtgattagaacacaatcagcaatatacatttattttacaaagaaaaaaaaatcctttaattgaattcaactaatagtgcatatgtaagagtctataattctaaaattggctgccaggctggtctgaggcagtgatgtttacaactaattgatcacaaccagttacagattcctttgttccttctccactcccactgcttcacttgactagcctttaaaaaaaataataccaataaatatatttggctgccagaatttctaccatgtcttctggctgaagccttctcaatattaagtagctatggccaaacagcatttcatcattgagtgatgaggcaatgtacctctcatgtgaggtaagctgtctttctgctgggcacttatctctcatatctgggccccacttcaaacccacccccaagagaatggggtgtctagatcaaggagaaattagtttctatctatggacatacaatgaggtagagatacaagatgcatatgatattttacagtgacattggaaaatgtgacagtgtttttttttttttttttttttttttgaggcaggccttatgttgcccaggctggactgcagttgtgctagcttgactcactgcaacctctaccttccaggctcaagcaatcctcccgcctcaagcaatcctcccgcctcagtcttttgagtagttgggactacaggcacatatcaccacacttggctaatttttgttatgttttgtagaggtgtggtttttcaccatgttgcccatggtgagccactg

SEQ ID NO: 4285 - DNA, 1137 bp, Homo sapiens
acaacacccggctaattttttctgtatttttaatagagacggggtttcaccatgttggccaggctggtctcaaactcctgaccttgtgatccgcccacctcggcctcccaaagtgctgggattacaggcatgagccaccgcacccagcctgttagttgctatcttaaagaaatataagtaaaaggatcaggtgattattagctggaaaaatgttataataattttgggtataggagccaggatctgccactttttttttttttttttaacttttctacaatgggaaagacaattagggtagttttaaaggagatttttattatttcaactttcatttggtgatctttgctagtttacgttaagtcttcctatacctgcaaaactgttcagttggtatgtatagtagtacatagtggaatgaggataataagcccaaaatcttgtctggattgtagcattaactagaggcttggccttgactttgttacttaacttttccacacgtgttttctcctgtctaaattacttatgggtttagactagattatctctgaagacccttgtgtacttaatgtctgtgaatcaaaatgaccttaatattggctgggcatggtagctcatgcttgtaatcccagcactttgggaggctgaggtgggaggatcacttgagaccaggagttggaaaccagctttggcaacatagtgagatgctgtctctattaaaaaaaaaagaaaaaaagaaaaacccctaaacgaccataatactacccagcctaagtgacagggttgtgagtgggagttggaagctcagttacttgtaggaggtaggctgtcactcagtgtatgacaagaatagtagtaaaccggaagctcatgccccacctaatgccacttacatagacaatgataaaattgccaacttattctgtgtttattgagctcctgaatagcaataaaatgcttatgtaaatactaacattgtcgtattagttggaatgtataaaaacagcattatagtacataaatgagccttctcacataaatctgtgaattggacagtgctgcacatgacttcagctgtatagcttttatctctcattattacgatagtgcacttctacaatttagggttatttt

SEQ ID NO: 4286 - DNA, 1128 bp, Homo sapiens
gaaaaagttcagaatattgggagaattaccagaatgcgacagaatacatgaagtgagcatatgctgttgggaaaatggagttgatacacttgctaggtgtgggattgctacaaaccttcgatttgtaaaaaatgcaatatatatgaagtatagtacaatgaagtacaataaaacagtgtatgcctgtagtattatctgactggatgtttactatctacagaaacatctgaattataccatttgatctttgctttaaattaagttggtgtcttaaccacttaggtctggttgccttcctctctatacaaattggccctctatgtctgtgggttctgcatctgtgggttcaaccaattgtggatcgaaaacatatagaaaaaataaaatgtgtggttgcacctgtactgaacatggtagactttttttttcttgtaattattccctaaacaataaagtataactatttatataaggtttacgttgtattaggcattataaataatctaaagaaattgtttaaagtattgggaagtgattaagtcatgagggctctgcacttatgtatggattagtgccttataaaaggggctggaaggaactggcttagatccattttgctcttcagtctcatccaccatgtgaagaagactcagtattcctccctctggaggatgtggcaacagggtgccatcttgtaagcagagagcaaccatcaccggacactaaacctgctaatgccttcatcttgacttcccagcatccagaactgtaaggcgtacttatttattttagagacagggtcttgctatgttgtcttagctgccctcggacacctggcctcaagcaatccctttgtctcagccttttgagtagctgagattacaggcgcaagccaccatgcccagcataaatttctattgtttttataaattactcagcctgtggtattttgttacagcagcacaaaaggactaagtcaccaactgtctcttattggggagagagaaataatgcagttgtcattatcctcaccttaatcttacagtgcttctttaaaattgtgtccctagatctttaaactgatgtaaaggcaaatacttaaaatgttccactcacacagtttctcac

SEQ ID NO: 4287 - DNA, 1196 bp, Homo sapiens
ttaatgttatgtggtactcttttgaatattttgcttaactgaataaccttgtagaccatacagatgttagaaaattaaaatataataatcttacaaaacagacaataattgctctttcatggatattccagaagtgtggttaggatcttgcatttctttaatgccatcgttacgagtatctgttatcacagaagcacagtaatttttttattgggatctagtatataatttctgtattaatgtgttgtctttttgattacatgcagttggacatttaaattgtcgttagccatttgtgtaactgtttagaacttgtgctcagtttccttactattcgtaggtaagaaaaatgaaaccagaaagaaagagacttgtctgaagtcatattagtggggaggagcagatctgaactggtaatagatacattccaaactgctgtgtttttagtatttgtggagacctgcatagcaacgttggaatctggtcgtttggactttctcattatttggtttctgaataatcatgtagcatattttctcaaagtgaaggatgaatgtatcatctaatgtaagctttttaaaattgtatttgcttggattatattgcctctcaataaagcttttgacttggaactgtgtagtgtgtgggaaataaatggtggagcttctttagtatgttgaattttagtagttcatttgcgaaatgctgtggtgtttggggatgtttatttccatgcaagcttttcatttgctaatgatgtgaatgaaatagttttcttcctttcctttcctactctttgttatgtgtagaagtattgaataaatgagtccagaaaaactttttgctgttctttgattttttgttagtaaacatttacaaaaatttcatttgtatgataaaatagttatttctaatggcagataatgtacatccagaacaggcttttagttgcattttaattttgggaaacaatgaaattaaaatatagatttatcacaaatctccatttccaagtagagtattcaggttagcattaagacttcattagtaatatggtgcatgctgttaaaatgtggtcttaaaattatacctgtgttaatggccagaaataaattgatattgttaatgcctgggaatatgttttgtaatggagggcttttttgatgtgtgagaatgtaaagcagtgctgtgtaata

SEQ ID NO: 4288 - DNA, 1221 bp, Homo sapiens
tggaaactaaagaaatctcaaatgctagccaatctgaatatatgaccaacatttttttaaaaagagagaattgggccgggcgcagtggctcatgcctataatcccagcactttgggaggcagaggcgggcggatcacaaggtcaggagatcgagaccatcctggctaacacagtgaaaccccgtctctactaaaaatacaaaaaaaaaaaaaaaaaaattagccaggcatggtgatggacacctgtagtcccagttactcaggaggctgaggcaggagaatggcaatgaacctgggaggcgaagcttgcagtgagctgagatcgcagcactgcactccagcctggatgacagacagagcaagactccgtctcagaaaaaaaaaaaaaaagagagacagaattggtttatgatatagatagctctgaattctaaataaatagtttatttcggatcaaattccaggattttatgcctcaacccatttccagaaacttgtaaaattagtaattcttaaatacttaaaaaatttttttcccttgatttcacaaatatggccactcttcccaaggggaaaaaagatcgcttcttggccttttggctaagatcaagtgtagtatctgttcttatcagtttaatatccgatacgtcctccatccaaggggggaaaagactatcagtgcaatgattgaaaaccttacaaagaacgaatcttttgtaaaataacctttcttgcaaatctgcctcacaagggaatgtggtggtttgggctgcggattcagacataccagggttgaatcccagctctgccatatgctagcttgtacaaccttgggcagttaacgtaatttccctaagccttggtttcctcatctgtaaaatgaggataataaaaataagattgctgtgaggattaaataagctagtggtttataaagcacctagaactgtgtctgtagagagtaaggattcaataacttagctcttgttaatattataaattctaaagtaaaattttgctagaaaatctaggttaatttctaggtcgtcacaatgaaccatatttatttcaccttataaaacccttataaatagagtttataaaactgttttataaggtgaaataaaagattcatttcaaatatgtatttcaacataccataaaaaggaacagttggcttccccttcaatgacatttgaaaaataaaacctgcattttcata

SEQ ID NO: 4289 - DNA, 1209 bp, Homo sapiens
tggcacagtctcagctcactgcaacctctgcctcccagttcaagcaattcttctgcctcagcctcccaagtagctgggattacaggcacccgccaccacgcccagctaatttttgtatttttgtagagatggggtttcacgatgttggccaggctggtctcaaacttctgacctcaagtgatctgcccaccttggcctcccaaagtgctgggattacaggtgtaagccactgcgcccggcctttttaactttaaacatgttttagaattcacctaaagatcaaaatatcatggattgaacctcatcaattgatagcagtgagtgactgaagcttccaaatcaagaaaagccggcaccaagaacttccattctaatctagagctgaccagtttgagctgattctctctttgaagagtccttcttgattgcagtgcagtactggcatttctgaatggatgtaagtggagtattttagtctaaaggcttttcaaattacttgaatttttttaaaaattgaggagctttatttctatttacccttccatttttgtatatcaaatttccattgtcattaaaaactgtatcttgaaactttgtgaactgacttgctgtatttgcactttgagctcttgaaataaatgtgatttttgtgtgattatctggtttccagttttaaacattaactgtcaccttttattcttaaacttgaaagtacagaaatcattaaattattaagttgtacaataaaaggattggtttcttttcttttttttttttttaagtgcttcctttgccgaaatgtttcctggctgtttgaacatgaatttttcaggtttaagtattgtgggaaatcatcttgacctaataaagcaatacatactgaagcagttctttgccctgcttagataatgtatgttttctgtacagttgaagaatagagctaaacttttcagggctgataaaatctcaactatctagtttgtaactcatcaagggttgggaattcttagtatgtggtgttaattatttttatttttttaagctgcggagtcattatctggtaacttccttttttttctttttctttttttgaaaccttacacggtaaagatgtccaggtgtaagggattcagatacttaaaactgagaatgttttgtttgtaggtcatgctttataccttgtatgtggttcatatgcccacgtgtgtg

SEQ ID NO: 4290 - DNA, 1221 bp, Homo sapiens
ttttgttttccttcagccaccagaagagatttattcaattggagattcagttttaattcatttccacactgatgacacaatcaacaagaagggatttcatataagatacaaaagcataagatatccagataccacacataccaaaaaataacaccaaaacctctgtcagaacacaaaggaatgtgcataatggagagaagacatattttttttaaaactgaagatattggcacaaatgttttatacaaagagtttgaacaaaaaatccctgtaagaccagaattatctttgtactaaaagagaagtttccagcaaaaccctcatcagcattacaaggatatttgaactccatgcttgatggtattaataaagctggtgaaagggcatcatatacttcaaggaagactctacaagcttttgttcacagcttgaaatagatgcctcacaattcagacagtttaattcaggaactgtgaccctgcagtgttctttttgacaatttgtcaagatttagggacataaaatgatcttgcaggtcgtaaactggaaaacagtattttggttgtcttaggataattgctgactttgtatcttggatacagtgtaaaccagatccatataaggtgaatgtgaaatgggagtcttctgagggtgatttgtactttccatgtgtatgtgtgtgtctggtgtttggaaactgggatatttcagcttcattatttccacttgcaggccagcttaacctctgaaacacaaatgatcttgagaccactttagtgtacttacatttagatgagtttgaaatctcaatggtgtctaattattgcagttaaattctagacatcagttctttaagtctcagaaaacgcccagtgaattggtaaacttagttcttttttttggaagtgctgccttttcacaccaaatccaagaagcctgtgatgtcttatgaaccttatgagaaaactccgaagaggtgtgagcaggattcttctgaatgactgtctggatggttcattactcaagttactgctgctgctattgtctttcctttgttgtcgatctgttattgttgtattattattgttgatgttgtcatggttaatctattttttaaaattgaaatgaagcagaagtaggccttgtgagaactgaaaggtctctttcatttttctcttcctgggattcattttttcaaaacacaatgctggaaaaaaaaga

SEQ ID NO: 4291 - DNA, 1243 bp, Homo sapiens
ccaggcaagaaaattttattagtataagctttattagtgtttaaccctgtccccgttttattggaatagtgaggtggttgcttttttcgcccccacagggctgttcttaatggagaataagctgggcaatttctctaaggtaagatatattgtttcagtaagtaagtttcagactgagaaaatgaatggcttcttcaggttagaggaaataggttagaaagtaatagaattagaacaacttaatggtaaactaaatgttagatgaaggacaagaagttgttaaaattctcagtcttgggaagataggaggagttccttctgagacaatgaactccttgagggaagagacaatcatgtttccaaactaagcaatgattgacacatagaagcattaaataaatatttatccacagggagaatatatcaactaacttacctactatggaaggtcaagtgtgtttctgtaaatagagtaggaactttgggcccatacctggccatggagacagtggatgccctagaagagagggaacagaacaactcccattcttcccaagtccctatgagtaagaaggccattgtcacaggtgcaggtgcagatcttggtggcagtagccaatattcaaatgagaactttgaaggctgaagaggaactgggtcccatgtgaacagcaattgaaagggggagtcagtgagtcctgagaaacgggcaaaagctgctcagaaggtcatggagcaataaaggttgtcttagctcaagctgctctaacaaattacgttagactgggagacttataaaatgcacacaattatttctcatagttccggaggctggaagtctgagcccagggtaccagcatggttgggttctgatgaaagccgtcttcagagttgcagataggcgacttctgattgtattctcacaggatggaaagagagcaagttagttccatggccttttttttataagagtactaatcgtattcacaagggctaaactctcaagtcctaattacctccggcagtccccacctcccaataccatcacactgtgaatgggggttcaatacactaattttagagagacacagaaagattcagttcattgtcaaggcagaagttcctgtccaaggtgagatctggaggtatctccagcctaatgcacacaccttgtgtggaggcagaacaggatccaagagacagaagttgtgcctgggaagggcgatgccaaagggctcttcac

SEQ ID NO: 4292 - DNA, 1203 bp, Homo sapiens
tcgctttattccggtggagcagaaccaaagctacaatatctgcgagacatgcttgtactgtcaatctaaattggcaaagcttcaattatacactttttgtaaaagtgcaatttcattacattcagtgatatattgtaaactgtactgcctactgaagattcttgagtgaccacatctaatgaatatgtaataataatttttaattcaaatatcaactatatgcaaataaactcttgcaaaacagaagtggggaagtaattttctgcaccactgacctgtacttatgatacaaaaattaatcaaggacctcacaaaatttttttaaagtaattttaaaaaaagaaaacattccaaacatttctctattagaatcaacaagttcagtattagaatatttatctacattatatattgtaggccaattaataacaaaggaagagaactgtgaagtacacagagagaacagacatcagactgaagaaatgcatatggatagaggggtgtttatcagaaagaaaaatacagagacacaaaaaaagaaaaatacatgcacgaaaaaaataccaaaacagggctggtccgatggtagcgggttatcagaacctattaacagtagtgtcactaaagttagtatacaacccccaactgctaaatatgagtggcttttaaaagaaaaaaaaacacaagctgctttagcagctttgattcgtgccacgcactactgttcatcaggtcaaaaagtggtaatttctgaaataccaatgaagtgtctggcagtttaaagtagtccttcctgtagtaagattctcaatttactatctattatttacttttagctcaattctaaaagttttgcatgcataaggaggactaatgggttttttaaatacacctaaaaaaaagaagattttagagttaaacaaatatacctcaggttatcaggtgacagatacaggcctgtttgcctgcttgtaagtatccaaagtccttatctggctgtgttaaaaggcaaaggttgactcattgactaatctcttacataagaaaacggatcccttaaatttttaagagtaaatgtccaaaatgctctcatgtccccttagtttattagcatagtattctttccttttctcactttcaaaacagaaaaactctaaattctggcttgaaaaaccatttcctacatttaaaagaacagggtca

SEQ ID NO: 4293 - DNA, 1221 bp, Homo sapiens
tgtggagttgcccacaaattctcactctgagtcaagctattgtaaggcagattcatttagtcaacaaatatttattaaatatctgctatgtgccaggtaccactctaaatgctagagttaacagtagtgaggaaaacagacaaaaatcctctgctcatggagccattctaattggagaatataaatgataaaatacatgatcataaataattggaaaaattgaagcaaggctagtgaagaaagtttgtgtacatgagccccatttctcctccttatctggagcctgctagtcaggtatgaaggtattcctcagaggttactcctggctgggatacatgccttcataatgcagtgaatggtctgtaggccaacataggtttgtaaagattcaaatcaaaactttgcatttgttgtgattttataaagggaaattatcaatatatttttccaatggaatttttaaaaatagtaacattttcaagatttgattaatttataatcccatgaaatctgaagtaggttgagatagagaattacctgctaactccacttcatttgcagccagttaaaatgacataaaagtcagtcatggcggtgtgcagtgactcacgcctgtaatctcagcactgtgggaggccgaggcaggtggaacacctgaggtcaggagtttgagaccagcctggccaacatggtgaaaccccatctctactaaaaatacaaaattagccaggtgtggcggcacatgcctgtaatcccagctactctggaggctgaggcccgaaagtcgcttgaacccaggaggcagaggctgcagtgagccgagattgcatcattgcactccagcctgggcagcaagagcgagacaccatctcaaaaataaaatataagtcagtcagtcatgaccactgagactaaaaaaaaaaaaaaaatagagtcagataaagatcataatatcagttttatttttgataaagctctactggaaaatgtggccttaggtttggcttaaaatcatgcctctcaatattttcctcctgtgactagtccttggaatctgaagaacaaactttcttaacccacaataagagctttatatccatcaagctccagtagcaggaagactgagagtgagacctatcttgtccctagaaagcaggcgtaggcctgagctatttgtgctcaccacaaggcaacagaagggaaacaggatacgcacgcaca

SEQ ID NO: 4294 - DNA, 1168 bp, Homo sapiens
attatgtttatgaaaatagataaaaccatggcataaatacatgaaactatcatataagtaatcttgaaaaaaatggtaaccttaaaaataaaaaatatacgaatatacatccccatgaaggcaaatgaagtctgtgtataataattgttttaaatttttacatttttttcacattcaaatatacctgcctttattttcactcagcaaatatttattgaacacctgctgtatgtcaaggctggttttaggtgctagagatttagagtgagcttacatttttattctaagaccacatgcacacttcttttttggctaataagtaaatatcttcatagacctggcccaaaaaaaaaaaaaaaaacctctgcccttctttctggtaactcattttgttaattgtttttatttttaggcccatgcaaatgcacgtgctgctgtactaaaagaacaactagaacgaaagagaaaggaggcttatgagagagaaaaaaaagtgtgggaagagcatgtaagatttagctcatattcttaatcctggttgtattaacatttttatagctcttcctgggtagtacatcagtattataattttcttgtgcttttttttttctgttttttcattctcattctctctctcaccctttctcattacctctctctttctcagtctctctgtctctctcgcatttaagaataatcaatgtggaagttatttgggagattgatttgaagtcagaactaatttatcttatttatttattattattattttttgagatggagtattgctctgtcacccaggctgaagtgcagtgacacgatctcggctcactgaagtgcagtgacacgatctcggctccacctcctgggttcaagcgattcttctgcctcagcctcccgagtagctgggactacaggcacgtaccatcacgcctggctaatttttgtatttttagtagagacagggtttcaccatgttggccaggcaggtctcaaactcctgaccttgtgatctgcccgcctcagcctcccaaagtgctaggattacaggcatgagccaccacgcccggcccttactttattttaaaatttttaatttactattaccaagtagcttatcaaaatcccagcataatttaatgactacatcatccttctgtcactgatt

SEQ ID NO: 4295 - DNA, 1435 bp, Homo sapiens
tagcactagtatattcctgcagacagacttgtagttacttgtagttattgtatagtctgtatagtctgttatttttttttttaagcagagagtcaaagaaattgttttatgtagatatatataaaatgtgaaggtacaggagggactatggcactgtgtgtgatgtaaaagggtattggtagtgaaagtactgatactgctgtatcgcaacccttgtcattttacgtcattaacttgttaaagcctagtgggataagtgctctaaaaacttagactggttacctttttagacagttattagggttattggtcaatcatcttagattgtttacaactaagtggtttttcacagttgagtaatgataccggatgctttatttttttgacaatatttcaggatattgctgcatatcgtgccaagggcaaaagtgaagcaggaaagaagggccctggcaggccaacaggctcaaagaagaagaacgaaccagaagatgaggaggaggaggaggaagaagaagatgaagatgaggaggaagaggatgaagatgaagaataaatggctatcctttaatgatgcgtgtggaatgtgtgtgtgtgctcaggcaattattttgctaagaatgtgaattcaagtgcagctcaatactagcttcagtataaaaactgtacagatttttgtatagctgataagattctctgtagagaaaatacttttaaaaaatgcaggttgtagctttttgatgggctactcatacagttagattttacagcttctgatgttgaatgttcctaaatatttaatggtttttttaatttcttgtgtatggtagcacagcaaacttgtaggaattagtatcaatagtaaattttgggttttttaggatgttgcatttcgtttttttaaaaaaaattttgtaataaaattatgtatattatttctattgtctttgtcttaatatgctaagttaattttcactttaaaaaagccatttgaagaccagagctatgttgatttttttcggtatttctgcctagtagttcttagacacagttgacctagtaaaatgtttgagaattaaaaccaaacatgctcatatttgcaaaatgttctttaaaagttacatgttgaactcagtgaactttataagaatttatgcagttttacagaacgttaagttttgtacttgacgtttctgtttattagctaaattgttcctcaggtgtgtgtatatatatatacatatatatatatatatatatgtatatatatacacatatatacgtatatatacatatatatgtatatggagtctcactctgttgcccaggctggagtgcagtggcacgatcccagctcactgcaacctccgcctcccgggttcaagcgattcttctgcctcagcctccctggtagctggggctacagccatgtgcc

SEQ ID NO: 4296 - DNA, 1167 bp, Homo sapiens
ctaacgggtctgggagttaacgacctgggcgacccaccgaacctgctaggctggggcgtggagggcgggtctggtaagacactgaccaatcgttagcctccgtggcaagggggcggggactatctgggtttgaataatcgtcagaaccaatcagattagtggggatgtggcccgtggcctagctcgtcaagttgccgtggcgcggagaactctgcaaaacaagaggctgaggattgcgttagagataaaccagttcacgccggagccccgtgagggaagcgtctccgttgggtccggccgctctgcgggactctgaggaaaagctcgcaccaggcaagaataccctccaataccctcgggttcgtggacctgcctttccccattccctcagagcctctactcggtctcggcgcagtggctctcggggtctgacccggcgagcggcatttggggtgcgggccggcgagggctgggtctgtggagggccggcgggcagtcggaggaggcggaaactgcccctgaccgggcccggttctgggagttttcaatgtcggtcacgaggtgcttagcggttaagtgaggctcgcgacgtgggagctgggggacatttctgtcaggaaaggcgttttgagggcgcttgcggagtcaccggactcggtgaagggcgggcggcggcgtctcgggccccgggagccacttgctgggctgagccgcggccgctcgggccgggaggaggaggaggaggagggtgtgcgccggggcgcgggcgggggcgcgggcggccgcccttgggaggacgccctcgggaggaggggggcgcgggcagggcgggagcggatttgggcgggaagcggagccccgccagcgcccgccctggcagctgcgggctccgcgccgaccctccggcttcccctctcccccctcggccccgtcaggtggacgcggatctgtcaacatgggtaaaggagaccccaacaagccgcggggcaaaatgtcctcgtacgccttcttcgtgcagacctgccgggaagagcacaagaagaaacacccggactcttccgtcaatttcgcggaattctccaagaagtgttcggagagatggaaggtgaggcaggagagggacggagctcagggggtgcaggtgtggttttcggctaggagggcctt

SEQ ID NO: 4297 - DNA, 1181 bp, Homo sapiens
gggcaagtgttatataagatacattataataagatgaatataaggcaaacttatttttttgggaggaaaacatgtaggagggtaggggagacaccctatattcagaaacttatagtagttacaaagtagaacttgagtagtagagaagaagctcggggaaaaagagctagggtaagataaatatggtaagtgccaataggagatatgaccaaaatagaatcaagaagcttcaaaaatacagagacttaaccagtatttcatggatttctattttcaggtgaaaaattagacgatttcaagaattggagctgaatctgatgttaagtaatggcaacaggtgacttaaaaagaagcttacggaacctagaacaggtgctccgcttgctaaattatcctgaagaggtggactgtgtagggtaagctataatatcaaacttaattgtattcttcttgctagtgatttgagatgatatttaacatgggggactacctgagaaaaatcagattttacctggttcctatttaaatctgccttgaaatgattaaaatatttgagaaagcagggaattataggagtttatttctaagtatgaactaatgaagaattccaacttaaaagatttaaaactgtttagaagcacagtatttatctgtataagttataatctctgtacagcttttaaactcatagaggtataatagattttattatttgtataatctaccattctctcatattcagttggatgatatttcttacagttaaatatatccagaataagaagagattgttgccatttcttgtcagtcttttcttatcatttatttgtttattcttttatagaggaaagattttatacatttaagtcgagtgttctttttcatatggaatattctagttagtagatttttttgtgtatggcaacctgaagattgcgcttaagctctcccatttaacagaccccactttgaacctttcactttagctcccattttgcaactatgacaacgtttttagaatatggcaacatacattttcctatattcatgcctatataatatggtactgcagtcattctgtatcccttcataattctgtttcttcatgacacttacccttaaccttttatcattgattaattgatggattggttaaatgttcattggttactagaatgtaa

SEQ ID NO: 4298 - DNA, 1215 bp, Homo sapiens
cacagcaactaagcagaaggggctcattttacctgagccagcatgatagggaagccccttctgtgttaaccctataagtaaagtaactttgaaatgaccaatctgcttttgttccttgtttctgctttcttcagcccttttctgcctataaagccaaactataaaccagagcacgccttctgttttatagaatgagatattgcccagttctagaatcactaataacagctaattacatcttaaaaccaaacttgttgtaattttattttttaacaatatcagtaaaggtgcctttattctaagagctatatgaggtggtttgatcatattattcacagaattataaagttagcataagaaaattatgaaattaaaccccaaattgtttgttgaatatggtgactggttattaatcttgaagataggaaataagatgttccttgattagtgttggtcctgaaagaacttattgtcttattaagaagaaaagactcaagaaaagtaatccaaaacagaatatagtcaagtttcaactgtatgtattatagatgttcagagaattgtgttgtgttgatttttgttagcatagaaggcattgtaaaatgtgtgtgactaggagccaattagaactgagtgtgtgtgtgtgtgtgtgtgtgtgtgtgtgtttgagacagtctcgctctgtcgcccaggctggagtgcaatggcgcgatcttgactcactgcaacctccgcctcctggttcaagtgattcttctgcctcagcctcccgagtagctgggactacaggtgcccaccaccacgcccaggtaatttttgtattttcagtagagatggggtttcaccaggttggccaggctggtctcaaactcctgatctcacgtgatccacctgcctcggcctcccaaagagtgtttttacaggctccattccttattcctggagtcatcttagggaaattttctgacattttattgccttagaactctcatctgtaaagtagagagaaagatgcctcacttgcttgctgaggactaatgagatacaattttgagaattcatttttttcatcccaatgattttcaccaaccatgatcatgctaaatttgtctcactcaaaaccaggcataatgtaatgctgttaagaacatattattctaatattcggtccagaattcctctctgtgaaccgtttctgtttagaatctgtgttca

SEQ ID NO: 4299 - DNA, 1221 bp, Homo sapiens
acctttggagatctgtctgcctcagcctcccaaagtgttgggattacagacatgaggcaccgcgcccggcctcctctcataattatattcactatgccaattgtgacttttctatctccttctctctcccaaataaagtagttcttctttttcctttatcatcccctctactctctttccctctcttttctctcttctctctcttcctctccccagctttttcccaatcaggcctgttcctcttttcctcctcaacatctggatcagcccctcccagttatttaatagggacatttttcctctctcaccttcctaagtctccactcaacaccacactcagcaaatcaaatcatttcagggaatcaactctctttagaagaatgggtataaatacttaaacttttttacctgtgacattcttgcatagtgagaaatcatcctatgaaaaagagaaacgatatctaatctgtgtcctctctaaccatcttgaagttcataactcaaacctcttgatttttcttctctcacagagttagtcttggctcaactttaaaacctctaagatgttttgttcagctattcttaattgtcttcactaaaacctaggaactgcatttgtagctgtcttgaaatatatacatcagtcttggttctcaaaggagatcaggctggtaagccagtcaccctttgcttcttccatgagcatgcagccccacctcctctatccactcccatatttcctaggaaaaacagccttggatacgtaccctgcaatttcattctctttctgtagggtctctccctcccactaaatgaaaaaggactatatacagggttgctttttgtttgttaacttttatttcccaaatggctataattcaccataatatgtatcttgcccctcttttgttacttgaaaaaaattacaaagtcatttcttcttcatgaatccctgggtacaggtttccatttatccatatagtcatgctggaagcaagttaagatgagcagtacctaaactgtgttgtgaatgggtactgaagaatatcactgggagtcaggacccatctaccatgatttctcatctctcccaatccacgcctcccagaaaattttgaatctttttcctacatcagaattgccaaattttgatcaagtttggatgcattgtaggcaatatgcaatagctcttacttcctctcaccgacttttgaatttttc

SEQ ID NO: 4300 - DNA, 1099 bp, Homo sapiens
ggcttgtgttcagttaccacacaaactgggtcttctattactccctgagaagcagattaccctcccattctagttctagtgacctggattattgcccaagagaaatgaagtactgaagaaggacagccatcctatatagacttcctgtaccagctgtataaggctaatataatttgtgttgccatttttgttagctgtttttggaaatatggtacactccaataagtaaatgtaaaattccactccaaaaacaaaggcaagaaagctagtgcagcaaacaaggtgatggctcatggtcaggatttgaatactttctgtggtgtaaaatacatctcactctattcttgcatacaaaactggattttcaaaatgcattaaatttactgaataaacaaaatgaaggcataattctattttttcctaggaattatttgatgcctttgctatttcatcttatttagcaggttatgattatgtaatcttatttatatttcattttttttctttgggaatgatggtccatgatttttttttggcaggatcatgcgtggatttacttaaagactctgattaaaatactgaaattctctatccatatatgaacaaaattatgtttccactgtctttttcagtgctctaatgaattggaaaaagtgcatacagagtgtataagaagcaaagccaaatttgacatttaagtgaatttgagattaagtgattgagatggaatattattttttgagattagataattgaagattggagatgattttttttaaatagatcacactgaatattaaaaaggaagattctgaatcttttgttattgaaagttattaataattaagttgacactataaagatttcagtgttaaaattaagttgacattataaagatttcagtgtgaaattccaagtaatgtgaaatatcacattaaacatataaacagattggttaaagataatcctaattttcttcatgatggaaattattttcttatttataaatatactactactattggagttatgtttcctcatctattgtagaagcatatgctttgacaatgttctgatgcaagaacatatttataattga

SEQ ID NO: 4301 - DNA, 1099 bp, Homo sapiens
cagatcctccaaaaaaagctcaagtcctaactttgaccaggtttgacaaagaagggagaggaccaggcgttttgtaaagtgctgcttccaaacgccacccgtcaggacagattctaaaccaccttaacttgctgccggtttcaagtgaaaataaatggtacataagtaatcaagaagtcgcagtcccagacctctgaccaaagaaccgaaaaaggacagcgaacgaccggttcccaattctctgaacccaaaggtcggagaagcaatttagaagaggagggggtgggtcttccacaacaaaccccgcccctccctcactcgtcgctgattggtggcggcgttaggccgcgacggaggggcgggcccgcggctgagtctctccctttccgcgccgccccgtgcgcgctgtgggtgtgtttcgggaagcgggcgcgcgcgcgctcgcgtcggaggaccggaaaggaggcggggctgcggcggcgcgcgctcccggaacgcgcgcaccgcagacggcgcggatcgcagggagccggtccgccgccggaacgggagcctgggtgtgcgtgtggagtccggactcgtgggagacgatcgcgatgaacacggtgctgtcgcgggcgaactcactgttcgccttctcgctgagcgtgatggcggcgctcaccttcggctgcttcatcaccaccgccttcaaagacaggagcgtcccggtgcggctgcacgtctcgcggatcatgctgtgagtgaggccgggccggcggtgcaggacgccgggaccgggctggggcggaagccgaagccgggccgccgcgccggggctgccgtgccggggccgcgggcagggcgtccggatcgccctcctgagcggcagttcgcccccgagggcggtcgtcaggggtggacgtcgcaggcttttccggcgtcccctcggaacttgcacccctccaccgtaaattcccgggcttgctcttaaattttaattttgagcgttcctcaggtcggtgcctccgcttgcttcctgttcctcacttccctccacccacgcctggccaatgagggagcaacacaacagcagagccggcgccgccgcccgcctggg

SEQ ID NO: 4302 - DNA, 1074 bp, Homo sapiens
tttttcttttcctttttaaatttttttattttttctgagacggagatctgctcttacgcccaggctagagtgaagtggcgcgatcttggcttactgcaacctccaccccccaggttcaagcgattctcctgcctcagcctccggagtagctgggattacaggcgcccgccaccacgtccggctaatttttgtattttcagtagagacggggttttgctatgttggccaggctggtctcaaactcctgacctcaagtgatccacctgcctcggcctcccaaagtgttaggataacaggtgtgagccaccgtgcccggctgaagatttttcttaattgcaataaatattcagcattttttctaatgaaaatgaattttgtttaccagtaaaagtatgcattttaaaagactttcagatttatgctttttacgtgaagctgctaaactaaaagtaaatggaagaaaccaagtctagtaggttttttctttttttttgtgggggtgggatgggggaggttagttacacttaaaatatcttctccagagactgtatgctcctatactagactgtaagctctttgagggcagtctgtcagatttatctttgtatcttccccagcgcctagtgtagtgccttgcacataataggcgcccaataaatattgatgaagaatgaaggcgttgtgtttctaatgtgaccaaaccatggggattctttgtcattaataccgtcctcctttgtaagtgctgttttttttttttcattcttgagctcctaatgacattagatcttatcaggggcagttggacagttcagtaaaggtaaatgctgctcttgctctagttgctgtgacctatgttctttctgacttgctaagagagccaagtgatagtggctagtgataagattgatacataaattgctttactttgaaataacactggaaaaccctaccgtagacctgatcaagaaaaaaaaaaaaactcaggatgcatgtttaaagtatagctcaggaagaaatgggttaaaacaaatagctgactctttgaaaggccagggtgttggctgatcctcc

SEQ ID NO: 4303 - DNA, 1100 bp, Homo sapiens
tcatccagaggtttcataccaatgatgcaaagcaaccaagcattcgaaaacacctagatgactgtctaaaactttccaggtagcttgacattatgtagccaaagctttgaaaggcactcagacagttgcaaccatttttaacgttgtgcttttagcatatgaaagcaaattgcctaaaatacagcatattcccatcatgtggatctctgtggctatcagcccattacaatccttttaaggaggacattgatgagtcctctgtggtttcagagatgagaggtcagcagcagagactgtcagaatcacatggcaccaatagtagacaaataaagaatgttcagaatacatgtattaatatgccagttaatatttctgcacagtttgttttctcagcagtattttgctatctagggacaaaaaaaaaatgtgttttgctttacaagcgtgacatgattgatgctttactaggagagacttttcataacaaaacagatgtctcctgacaagaaagttattggtacaagcaaactacatcattgcaataatgttatggttcagacttaagcaaaagatagtaagagagtgtgggggaggatggtggggagaaagagaaagcaagcatgaggcagtgagatacaagggagtgagatatagtttgttagaaatctatatccttaacctaccacatgggcttgatctgtgatgaattgagacagggtagagctctcagaaggctaacatatgcaagctttaaaaagccaatctctgcacgtattcatttgtcaatatcttagcagtaagcacttctggttttctaaaaactcttaactttatgatatcaaaatgtcattatgtgcaaattaaaggtgataatgtccttaatccatcatgacagattcacagaatcataaaatatatagaatattggatcatttggaattttgttctagtatttaatttacttgtaatgtttttcattattatcaattcatataggacataagtctatagaattaagagaacaggttttagatctaacgggccttctgaagaaaggcaaaggagggtaaagctatgtgtctccacaggaaaggaaagtt

SEQ ID NO: 4304 - DNA, 1122 bp, Homo sapiens
acatctccataacacaatttgattgttccccaaagtgcatttcaccatctgacatatgctatcttaatgtattgattggagcttctcactaggatgtaagttacatgagggcagggacttaatttattttgtttatttctacataactggcaatgctaatcatataacacatgatcaatattttctgatgtggtgttaagttggttcctcatttatttacatgcatcctgtacacgtacctatttacaaagttctaagtattttattattcctatagtaataatatgattgacactatttacaagtagtattaataccagcatgcttaatacattttcaaaaaatatttgactaagaataccagtacaagctacacattagtcactatacaacacttctttacactgtaacataatttatggagatatttcatttcttaaactctgatttgtcttcttttaaatattttgcagtgttatgaagcaaaagattggaatgtatttaaaatagtgccagcttatctttaaagagtacttcataaagactataatttcagggatcatatctatagtttgttactagagaactagagaagtttttctgaacgtgtagagcaccaaaaaaaaaaaaaaaaaaaaaaaaaaaaaaaaaaccaagagtatttcatggtaagtactaaatagatggcttcttttcctgtaagttgacaaaagaattgaaggaagaaaggaaggaaggaaagagtaaagaaaaaaagtgaattagaaaagaaaaactatacatacaaacacacaccatcaaaaagagaggcaatgagtacatatgtttgtattggtcttgattcatggttcccaactgagggtaaatttctcctctacccaggaaacagctggcaacatctggtgacatgtttggttgtcattacttggaggaggatctactctgatactggtatctagtgggtagaatccagggatgctactgacatattaaaatgccgaagacagttcctactcataacaaaaactacccagcccaagatatcaatactgccaagatgaagaaaccttggttttgatcctggctagtttgtagaaacaagttcttgctatgttgaccagg

SEQ ID NO: 4305 - DNA, 1241 bp, Homo sapiens
tgacataccaaagaagtaaatttctctagacagtgcacaacactgaagtaaatgcagatactgtatcttaattgagtatatttaaatgcaatgttaattaaacttatacttcagtttttacctatgaacctaaaacaaaagccaccaattatacattgaattttattaaatattgtatctataacttataaaaataatgtaaattcagtgattttcattgagacatgctgacctagaatcactcactgaaaaataggttttgaagggtaactcttattttactataaatacgtttggcttaattacaataatgcttttcaatttatggttccttttctttcaaaataaggataaagtaaacctagttattaatatgcttatatctatattgtagattttttgtatgttcctatgaacataatacatacattgattttatttgccttttaataacatgggcagaatgtaatgtggaaggtaccaccactaattgtgattttaaaaaaattacccttcagtgtaatcctgcaactattattgtggaatatatcaatatgattaaattttggcattgcagaacagaatcttcactgcactgtaggttagaatacaagaaaaattgaaaataaaatgagaaaatttctttcttaaccttttgcaattttagtataattttgctaacctgtgaaaatgtctacacataggcattgtcttgtacatggcaagacagcattgtctctgacacacctgcattatttgagatgtatgcattcatgtcagttcttttcagaaacagtaggtaggtattacacaggaatatggtctatttttatggccttctcccataagatgccttctttgtaacatatcacagtgtacttaaaagaggtcattaaaattaaaaagatccaaggaagcagttacgagtgtagaccttcaatatatgaattaattttggatttcagattccttttagatttgttttagctctctacatgtcatatacttaaagttttcattgaaattaagaatattacccaaattttcatattgctttaggaatatttacaggaaaagaaaaagaacatgtttgttcttcagctatttttttctttacggagcatatcatcaccacaatttcatattcaagctttaaagcagaactcattaatgcatgtttcatatgcgttgccaaaaatacaaaattgttttcttgctttatctagtgctgagatttttag

SEQ ID NO: 4306 - DNA, 1189 bp, Homo sapiens
tctgtgtcagaagcaagctaatttacttaagtagattcctcttagtgaaagtttctgaatatttaaaacatttaaatgtggcattagaaacaaccccatttcaaattcttgccatatgtatgaaatccaagtcctgttagatacctgagatgctgaaatatttcattaatttggggatgggggtgtggggacatgttttcttggtgataggtgtatataaatatgaccaccctctatatatgtaatgttttctatataaagtattgtatatgtaaagaaattatttctaacaattgtcatgtgtattttctgcatgattagagcagcatgtaaaattaaatgatgaataaagacgtagagttccaccattgatcatttcctagtagtcagtgctgaaatttacgtagcatacaaatacttttgatttcttttggatgattttgtgtttcccttgaacaaatttgtgtggaagataaaagctgcttattaattccccttctctctcccgccactcttctctcctgttttgtgtcctcttcctcccacatagaaatatgttctgtggactgtggctcacacggcgtttgcatgggggggacgtgtcgctgtgaagaaggctggacgggcccagcctgtaatcagagagcctgccacccccgctgtgccgagcacgggacctgcaaggatggcaagtgtgaatgcagccagggctggaatggagagcactgcactatcggtaggcttactgcaagtctgtgtctgtccccttcctcccagagaagagcaccgacggtcagctgttttcaacttggaaaaagcctatttctttacgttattttttacttgtctttcttaacacgaaattattttttaaatatggttgtcattttataatggcaattcagttctttttagaacagctgtcacaagtatgagctataaacttttttattcattggtttttgggacggccacaaaaatggactcacataaaacagacttaatgatttgtttatgtgaagttttatcgaatattacttcttgatgttccatattgtcattgcatttcttaatagcagattttccactttagaaaaaaatgctttaaatttttttcaaatatatgcccttgttggcctctgtagtttccagaatcacatagcttagacttgtccatatcttgagtctc

SEQ ID NO: 4307 - DNA, 1155 bp, Homo sapiens
atttctgttagaatagtagcacaggagatgtaggatatggcatgtggagagaaggggagaccaaaagaggtggaaacttatccattgagtagctagaagctctctctgtgatagaaatgtcacttgagggagatagatcatttcctattcctgaatatatgaacactgcagtgaatgcttgaaagaaagagactaaggaccaatgagaatttgtgtaattcatcccttcccttaaaatatttcaggacaaagaaaaaccatattctcttccaagtaatgactgaaaaaactggcgtcccaggaatcttataagtcatagtgccttgagttgtttacagctgtagatttgaatattaacatccttgactcccagaaggaaatcttattttggattgctcatgaccaaactatgtatgtatttaatacttaacttttccaaataagacattctgattagtgctctcaccctcccctccatagatgtggaaaaatcattaccaaaaagaagagtgatccacttgcttggggagaaaaccacttgtgtgtcggctgctgtgtctgatgagtctgtggctggagacagtggggtctatgaagctttcgtgaaacagtaaggattcagcaggggcgcttttagctccagcgaatctccatcgccgtggatgtgggttatatgctgtaaatggactgctaccattagtccgctctttggcttagtaaggactttagccgttaaagaagtggtgtgcctgaaaagttcagtatatcaaaaatgacttagccatggaaattatcgataaacagattggtgtacccagaggcaattgaccctctttagaatttaaaaaccttgaatttagtgggaatattggaagaattcaccagaccctgtttggcacatgaagcttctcacgtgtatttctgaaagtctgaaatgtctcaagggtgtggtatatttctagtaataaggaaagtagtcatcagagaggctttgccctaaagcccagaggcgggctcttcttgaaaagagcctctgaaacagtaagctttcgctgggatcagttccactgggagggcataggagtgctgttaatttggattttcattcagaatcactaagtggcaaactgttaaccataacaatcgataacccca

SEQ ID NO: 4308 - DNA, 1163 bp, Homo sapiens
ttaatagccactaccaaaaggcagctattcagattatttgcaggcacagtggctcatgactgtaatcccaacactttgggagcccgaggagagcgaaacacctgaggtcagaagttcgaggccagcctggccaacatggtgaaaccccatcctactaaaaatagaaaaattagctgggcatggtggcgtgcgcctgtaatccgagttactacagaggctgaggcaggagaattgtgtgaacccaggtggcagaggttgcaatgagccgagatcacgccactgcactccagcctgggtgacagagtgagactctgtctcaaaaaaaaaatacataaataagtaatttaggaaaatgaagttatttaacaaaatagaacaggaaaaacttgtttgaggggattttcttaaagaaataaactcttaactatgactacctgctttacttggtaaatgtctcaatcccaaacttccacttgcactctgtttgatatgcagtgattttttttttaaatcttttgttgccagttaaatcggagtgacagtgacagttcaaccctggctaaaaaatcactgtttgtgagaaactccaccgaacgccgcagtttgagggtcaaaagggtatgtattccctcagccacgtcccactgtccctggaccagtccagaattgtcacttgtgcagcacaaactccagaactacagaatgaatgtcagtgctccatgcgcttggcctactgaatgcagccactgggatacacagagacgcagatgccatggccactatggagatgggggggtgtgagggcatttattcatcattggtgtggaacctgtgatggttaaggctggaaatgcggtttcagtatctctggagaaggggccttctgagcctgcaggggtatcagacgatggtagaacacatttctgatgactctgcataccatgtccaggtcttgagcgattgtgggaaggggtgtaagacctggtaccttttctgaaggacacacattctggtaaaggaggaacacacagtttttgtagcttgcttacacagatatctttagaaggttaaaactcatgtgggtgggcagctcgggtggcattttcctggaggtcatgggtctctgcatgagccttaaggataagtctaagagaataaatgaa

SEQ ID NO: 4309 - DNA, 1147 bp, Homo sapiens
tgtcaactcttgaagaacttttatttcacatcagattttcaacacattaatttgtaaagtaccttgagtgtaatttttatatgcttaaaaaagaaaaaatcatataagaaagatgggataacctggtacacaaatgttgcccagtatgtgcgcattgccagtggacttcattttgtaaaaatggaatagaggcagtaccccacatgtgtactgttgagccggctgttgagaaacaacttggttcagccggtggttttgcttctcctttgtgttcctgtgagtaggctgtgccgatggcagcagcgccacgtggtatctgtgcgctggcgaggagaggagcgctttccatttggaggcagtgtgagcacacgctggagtgcagcgttccaaagtccgcccgaaatggatgctgcgtccacggccatcacctgtgcgggaacacctggtttccttaagacaatttcctttttgtccttttatatttttctaaagaaaactaagatataaactaccaagtgctcttaagaataaaaataagaataagaatacaaaggagcactactcttggctacacgaaagatcttgggattcatgacactgagggcagggagaagaaagaacaccagccacgcagagatacaaataagctcatcaaatgagcagctggtttgtctcactcagcctgaatttgcattaagtgttcaaaagtgagtttctggcttgcactagtgttttgccctaaatctaaggatggtgcctagtggtggccctgtgttctgaggacagagagagctggaggggtggagggaaatgcatcggcactcatttggtgtaaccaagaagagggggaaagatgtcttgatagaatcaaagttgccaaaaacaaagaagagtttatcaagcagatttctaacatttagtagaaactacttcatagctctcatttttagggggttctatctataatttatggtaaatagttgggaggcaaagggaagaatgtgtgtggggggattattaatttgaagtataagctaaattgtttattaaaaagcctattttggatgaacaagtttagagagataaactgactaatgtgtcctccagtttagaatttcaccttacccgacccaggcacttcttaaaa

SEQ ID NO: 4310 - DNA, 1165 bp, Homo sapiens
acaagccactgcacctggcgtggcttttatgtttagatctacagtccacttggaaaggatttgcttattgggtgaggaggagtcaagattcactttttcgtatgtggatatccggttggctcagcactgtttgttgaaatgactgtccttaacctactgctcagcagtgctacctttgccataaatcagtggctatatgtattttgatctgtttctagaccctgttctgcttcattgttctattgatctattcctgtctaatatagttttatatattagataggcacgacactgtctaatatagttttgttataagtctttatatctaggaaaaacaattcctctaagtttgttctttgaaatttcttggtagttattgaccttttgcacttccatttaaattttagagtcagtttgccggtttacacaaacaaatcctgctagaatttttatttggattgccttgaatctatagatcacctaggggagaactgacatttttataatattgagtcttccaatctatgcacatggtaggcccatctgtttacttaggtattctctaatgtttctctataatgttgtataatgtactgaatagaaatcttatccatatttgttagatttattctagatatttgttggttttggtccttcccttttctctggaatttagctccgcacagcttcactgtcttggaagctctctggttgtctcaaactttctagtacctgcatccagcttttccatttgtttcagttgcagaattgctgcagaataattgagtttgctgtttcagaatgtggcattcctccatgctgactgcaatttgttttaatttatatagtgctttaattttattttgtttacagctatatatagaaaataattattttttattaatgctatataaaaacttaatatttgctgactatgaaactaataacagaaaacatgctttcatattgttttatcaatttttgatgtaggagtttatacaagaaatagaaactttcggctatataaatcatcaaaaattggaaagcgtgtggctttggaggttactgaagataacaaattttttcctatacagtcaaaagatgtttctgacgaatatcaatattttctctcttctttggtcagcaatgtcaggtatgtagtagc

SEQ ID NO: 4311 - DNA, 1217 bp, Homo sapiens
gaaccattggttgtttcaagttgttcttaatttccaaattatggatttctattagttttatttctaaaatttgctttatgctcagatgtgttctgtatgaagtgatgattttaaatttgataaaattcactttatagctagcatggaattggttttataaagaactgcttcatatttacctattagatcaaacttcttaattgctttttgtcattcattttttctgtatccttattggaccttttttgtggttatcctttgatctataaattactgagagtatgttttttaaaaaccttgatttatggtagatttgtttatcattgtggtcctgtccatttttgctcacatattttgcagctgtattatttggtgagtacaggttgagaattgttacatcttcctgggggaactttcatcagtatctactttttgccctgcagttcattttgtgtgatttttggcaaccaccgttttgattggtatgtatctatccttatccttttactttttaatttttctccatctttaagtcttaggcatatttcttggaacagcatgcagctggattttgttttctacccagtcttggtattaatactttttttttttttttaaacataaaggattctggttgatctgaaaaatgaagtttggtatcaaaaatgtcatgaccctgtatgtaaagcagaaaacttcaaatctgactgtaagttactaatttttacatttaccacaaagtaaaaattagataactgtaatatgtaatagttttgctatctttctgattcaggtttcccattacctgctgaagtatgtctcctgtttcttttcaaagaggtaagtacagattttagtgtctttctccttaccagggagttcttggtacaatagtatacctgagccatgagtagtgtccaaatagcattgaaacccatttgctaccttgttttcacttatgactgtattataggaatatattgtagtgattttcccatttcagcacatatctgataatacaaaccttttttttttttttttactgctgcttgaggtgtacagtttaatcagtcccagacatttaagaagtttcccatattttgcttttcaaagtaacaaaatacccatctttgtatttctttgaacatctgtatctgtaggatgaatttctagaagtagaattgtgtcaaagggcatattcagttttaattttggta

SEQ ID NO: 4312 - DNA, 1190 bp, Homo sapiens
ttgtatttttagtagagatggggtttcgccatgttggctgggatggtctctaactcctgacctcaggtgatctgtctgcctcagcctcccaaagtgctgggattacaggcgggagccacctcgcccatcctcccttgacttttgatatcacattgccgcataactggttggttttcttatttcagcaaagccaactgtttcccagtcatctctgattatagttaccaatattaaatactgtttgagagttacttgtttactgagataatttcagacctaaaattagacttttctcttagatgcagatatttattttgaataaacccttggagaaaaacatttttccacttttttccttctttgttggttcaggcgctgatggaactgctgctaattgaactgtgtcctgagctgagagttcatttagatcaacttaaagctggccaagtttgagactacacaaataaaccaccagaaaaatgtctgtgtaataatagacatgaaacattttcctcttttccacagagggcttaactgagaaccgtattgatttttattttagttacctccctctagttttatgtgaaattagtagaatcagggaggacgggacttatgctgtggtaggcaacagaaaaaaacttctattgattttaatttaatatgaatactttaaagatcaacataccgattgaaatacaaatgttaatatgtgagaacctaggaagtattttaaatatttatgaaaatattttgttttaaaatgaactatgaatattgtacagttaatttcctcactgaggactgtgaacattcttatattatttcatgtatattgaagaacattgttatgcaatgctttgtgtaaagttattgtgaagattttattgtctttatttttaccaaagatttcccatagtttgagcattcaaagcaataaaatataaaaatgaatcacagtgctctatgatatttaagatacttatatctcaaagaggttgaaactctacaggctgttcaaatatttatcaaatgcctttttagagaaaacactatgtacttaactacttctgcagggaagtaaaagtttgctgccttctccagaaacaaaataaatctgtaaaatatatgatttttagtgagcagaaagagccaaattagtgcttgaagtgaggcattagggaggagag

SEQ ID NO: 4313 - DNA, 1555 bp, Homo sapiens
tcttacctcagtgggttggtagttgcagatacaaatctgatttaagaaattagtcttctataaatcctggtaaattgttatccgtacatgagtgacctacagataccttctctgtggaggcgtaagagaagttaagcccacgtaaagacgtggcaagtgtgaaaatcaatacatattttgtcccagagttagttataagaatgcagaaaggtcatcattatcttactcatatttagataagtaatataccaatgagaaatgttttaagaaatgtatgattctaggtttttgttgcctttctcgtattttattttgccacagtatcgtttcaatatacatgactttcgttcatggttctttaagtattaaaacattcataattggaaatattgtatgagtcattttgtcatccattacaggtattcatcaaagtaatagacacaaatgaccatcgtcctcagttttctacatcaaagtatgaagttgttattcctgaagatacagcgccagaaacagaaattttgcaaatcagtgctgtggatcaggatgagaaaaacaaactaatctacactctgcagagcagtagagatccactgagtctcaagaaatttcgtcttgatcctgcaaccggctctctctatacttctgagaaactggatcatgaagctgttcaccagcacaccctcacggtcatggtaggcgctctacccgctctcctcccaccatttggtcctgaggcctttgtgtgttcgagcgtgatttttaattagttataaggaaagcaccaatgggattgataatgtgtcaattctttttaggtacgagatcaagatgtgcctgtaaaacgcaactttgcaaggattgtggtcaatgtcagcgacacgaatgaccacgccccgtggttcaccgcttcctcctacaaagggcgggtttatgaatcggcagccgttggctcagttgtgttgcaggtgacggctctggacaaggacaaagggaaaaatgctgaagtgctgtactcgatcgagtcaggtacttttggagccttcagtggcattttaaatttgcagttgttaaaagtctgtttctacttttccaaaatcagttctgggtattgaagcatttctatgtatctgcaaaaatggcttaaattgatctctagatacaattttacatgttaggagaaaggaatttttttttttttaacttttagcccatcagagagtttgggggaagttctgggggattcacaatattagcccagttcaaggctctgagaagccacgtagtagaggaaactttatttgaccaattcagtatttctgaaattattttaaccacagtttcttctgtaacattggttaaattaaacacacttaggaagctgcttgcctagtaatttaacgtttcacttttttgtcagagagtattttctcttgagcagagcaggaagctccataacagtgttgactcatctcattgtaattggctgaaacctcagaaagaggtgtcgtgcccctcccaccccttccacatttacctggatttttgccactcg

SEQ ID NO: 4314 - DNA, 1115 bp, Homo sapiens
tcgtagttagattcagtattgttagtataatgccatatacctacttacacctagtatatttcagttaatttagcctatgcaggttttttgtttttgtttttgtttttgagacaaggtctcactctgttgcccaggcttgagtacagcagcatgatctcggctcactgcaaccttgacctaccaggctcaagcgatgcccctgcctcaggcacccaagtagctgggactacaggtgcctgccaccatgcttggctaatttttgtattttttgtaaagacgaggtttcgccatgttgtccaggctgtactcgaactcttgggctcaagtgatccacccacctcagccttccaaagtgttgggattacaggtgtgaaccactgtacctggccgccttttaatacataaagaagatatgataaacacagtaacttcctaaatagagagcagtgttggattttttttaatatccttttttcttttttatcctaaatgggcctggtcacacggagttcttgaactctatacagggatctgtttggccttcctttagttgttataacttaagttccatcgctcctcccaccacaggcaagtgctggtccaccttggtggatgtgttgcctgtttttccactaacagtgattgattgatgagagtcagacctggctgttgaatcacaactctgcatctcatggagatagtaccctctggttttatgtgtggactctggagccagtcagccaggtttggggttctggcttctctgctaccaaagttggataactgaggatgacttccttaacttttcaggctaagttgttagatgtaaagctctaagatgactaactggtaaggtaatccattaattcattggttactttattacggagtaaataacttcagaccagtgacttttgagccttaagcctctgcttctgaatatggaaaatggggagagaccactgggctaattgtgaagattaaacaatatggcatattaaagcttttactaagtctgcatccagtccgtataaggggagaagagtaatcaacactgaaattgcgtatcttctgaaatttgaaacaaacttccagaagcattgccattggtaggt

SEQ ID NO: 4315 - DNA, 1255 bp, Homo sapiens
gaaggctgcgtggcgtcttctacatgtcgtggttgtcgatgccaatgataatccacccgagtttttacaggagagctattttgtggaagtgagtgaagacaaggaggtacatagtgaaatcatccaggttgaagccacagataaagacctggggcccaacggacacgtgacgtactcaattgttacagacacagacacattttcaattgacagcgtgacgggtgttgttaacatcgcacgccctctggatcgagagctgcagcatgagcactccttaaagattgaggccagggaccaagccagagaagagcctcagctgttctccactgtcgttgtgaaagtatcactagaagatgttaatgacaacccacctacatttattccacctaattatcgtgtgaaagtccgagaggatcttccagaaggaaccgtcatcatgtggttagaagcccacgatcctgatttaggtcagtctggtcaggtgagatacagccttctggaccacggagaaggaaacttcgatgtggataaactcagtggagcagttaggatcgtccagcagttggactttgagaagaagcaagtgtataatctcactgtgagggccaaagacaagggaaagccagtttctctgtcttctacttgctatgttgaagttgaggtggttgatgtgaatgagaacctgcacccacccgtgttttccagctttgtggaaaaggggacagtgaaagaagatgcacctgttggttcattggtaatgacggtgtcggctcatgatgaggacgccagaagagatggggagatccgatactccattagagatggctctggcgttggtgttttcaaaataggtgaagagacaggtaaatatgtttttattgctctcatttgatgcccttttccattttttttttttttttaaccatctgccctgtggcagcttcttcaaaattccctgttgctctttgggctcggtatagaagtgcgtgtgaatattttttttggcccggctgctgtattgtagatgtgtttattcgtagtaagccatgaagatggaaacaaaagggcctgagtgatttaagtggcgtaaagtgagtaaaagaccagggatacattgaaattgttatcactgatactgatctccaaactctattttgaactctattatcaaaagcatcattatggttttgttctgactttgagaagtctttccaacttttttcagtcagtgtatttgcaggctcatacttagaac

SEQ ID NO: 4316 - DNA, 2289 bp, Homo sapiens
gctcctgcttctgctccttctcttccaacattttggagacagtgatggcagccaacgacttgaacagactcctctgcagtttacacacctcgagtacaacgtcaccgtgcaggagaactctgcagctaagacttatgtggggcatcctgtcaagatgggtgtttacattacacatccagcgtgggaagtaaggtacaaaattgtttccggagacagtgaaaacctgttcaaagctgaagagtacattctcggagacttttgctttctaagaataaggaccaaaggaggaaatacagctattcttaatagagaagtgaaggatcactacacattgatagtgaaagcacttgaaaaaaatactaatgtggaggcgcgaacaaaggtcagggtgcaggtgctggatacaaatgacttgagaccgttattctcacccacctcatacagcgtttctttacctgaaaacacagctataaggaccagtatcgcaagagtcagcgccacggatgcagacataggaaccaacggggaattttactacagttttaaagatcgaacagatatgtttgctattcacccaaccagtggtgtgatagtgttaactggtagacttgattacctagagaccaagctctatgagatggaaatcctcgctgcggaccgtggcatgaagttgtatgggagcagtggcatcagcagcatggccaagctaacggtgcacatcgaacaggccaatgaatgtgctccggtgataacagcagtgacattgtcaccatcagaactggacagggacccagcatatgcaattgtgacagtggatgactgcgatcagggtgccaatggtgacatagcatctttaagcatcgtggcaggtgaccttctccagcagtttagaacagtgaggtcctttccagggagtaaggagtataaagtcaaagccatcggtggcattgattgggacagtcatcctttcggctacaatctcacactacaggctaaagataaaggaactccgccccagttctcttctgttaaagtcattcacgtgacttctccacagttcaaagccgggccagtcaagtttgaaaaggatgtttacagagcagaaataagtgaatttgctcctcccaacacacctgtggtcatggtaaaggccattcctgcttattcccatttgaggtatgtttttaaaagtacacctggaaaagctaaattcagtttaaattacaacactggtctcatttctattttagaaccagttaaaagacagcaggcagcccattttgaacttgaagtaacaacaagtgacagaaaagcgtccaccaaggtcttggtgaaagtcttaggtgcaaatagcaatccccctgaatttacccagacagcgtacaaagctgcttttgatgagaacgtgcccattggtactactgtcatgagcctgagtgccgtagaccctgatgagggtgagaacgggtacgtgacatacagtatcgcaaatttaaatcatgtgccgtttgcgattgaccatttcactggtgccgtgagtacgtcagaaaacctggactacgaactgatgcctcgggtttatactctgaggattcgtgcatcagactggggcttgccgtaccgccgggaagtcgaagtccttgctacaattactctcaataacttgaatgacaacacacctttgtttgagaaaataaattgtgaagggacaattcccagagatctaggcgtgggagagcaaataaccactgtttctgctattgatgcagatgaacttcagttggtacagtatcagattgaagctggaaatgaactggatttctttagtttaaaccccaactcgggggtattgtcattaaagcgatcgctaatggatggcttaggtgcaaaggtgtctttccacagtctgagaatcacagctacagatggagaaaattttgccacaccattatatatcaacataacagtggctgccagtcacaagctggtaaacttgcagtgtgaagagactggtgttgccaaaatgctggcagagaagctcctgcaggcaaataaattacacaaccagggagaggtggaggatattttcttcgattctcactctgtcaatgctcacataccgcagtttagaagcactcttccgactggtattcaggtaaaggaaaaccagcctgtgggttccagtgtaattttcatgaactccactgaccttgacactggcttcaatggaaaactggtctatgctgtttctggaggaaatgaggatagttgcttcatgattgatatgga

SEQ ID NO: 4317 - DNA, 1199 bp, Homo sapiens
tttcaggcttgttcagactttggaatatttgcattatacttactgtctgagcatccctaatcggaagatctgactccatagcacatttcttttgaatgtcatgctggtgctcagaaagtttcagattttagagaatttcagatttttggattagggatgttcaacctatataaatatttactttgaagtagaaaaactggaagtagatggtttaaacataaagtgtcttggtatagacaagggttctcccactttacatgatgggagcatttttgtaaagcactgagaatcttaaagttcacatgccataaatctacttttatagttaaaatttttcaaaaggaacacaagagatggctttttgtacatttttgtgcttaacttaccactgactcttcttttcaaggtcactctggaatatagacccgtgatcgacaaaactttgaacgaggctgactgtgccaccgtcccgccagccattcgctcctactgatgagacaagatgtggtgatgacagaatcagcttttgtaattatgtataatagctcatgcatgtgtccatgtcataactgtcttcatacgcttctgcactctggggaagaaggagtacattgaagggagattggcacctagtggctgggagcttgccaggaacccagtggccagggagcgtggcacttacctttgtcccttgcttcattcttgtgagatgataaaactgggcacagctcttaaataaaatataaatgaacaaactttcttttatttccaaatccatttgaaatattttactgttgtgactttagtcatatttgttgacctaaaaatcaaatgtaatctttgtattgtgttacatcaaaatccagatattttgtatagtttcttttttctttttcttttcttttttttttttgagacaggatcggtgcagtagtacaatcacagctcactgcagcctcaaactcctgggcagctcaggtgatcttcctgactcagccttctgagtagttggggctacaggtgtgcaccaccatgcccagctcatttattttgtaattgtagggacagggtctcactgtgttgcctaggctggtctcaagtgatcctccctccttggcctcccaaggtgctggaattataggtgtgaacaaaccaccatgcctggccttgtagtttatttctaagttcaaattaatgtt

SEQ ID NO: 4318 - DNA, 1140 bp, Homo sapiens
cctggtgcgggggtccaggtcaccgtcactgttcccccactgagcccccgctcctcctctgcggtgagatgccagagccgtggcggagcgaggaggagtgggctcagagcctccggggagccaccgggagccccagcctgggtttcaatgagggtgctcctggccgccagagccgtggagcctgccgctgaccgcgcgtgtctccccagaggatgacggccgaggcgcaccggcgcgtggtggtggagtacctgcgggcggtcatgcagaagcgcatttccttccggagcccggaggagcgcaaggagggtgccgagaagatggttagggaggcagagcagctgcgcttcctgttccggaagctggcgtccgtgagtgtcgcgcaggtccgggctggagaaggcctgtcgctccgcggccctgttcagcctccaccccgggactcgggccagtagatgggagtgtgtcgtgtgtttgtcaggcggggggagcctgggtccaggtcctgcctgaccttgtggttggacacgaatgtccacagaggtagacgcgccggccccgccggcttcccgaggccgcccacagctccctgacggacgcttcccagtctgtcctgcgctgcgaggtgctggctgcctcccacggtctcgccctcaccccagacccctggccctgtcactgagctttcagagtagatcctgaggagtcaggtgaagagggaggttcccagtcaggaaggggctcagccagaatccagctgctcccagcgccgcgggacagccgagggcggctcctcacattgctgctgccttccagggtttcggggaagacgtggacggatactgcgacaccatcgtggctgtggccgaagtgatcaagctgacagacccttctctgctctacctggaggtctccactctggtcagcaagtatccagacatcaggtaagggatgcacgtcttagaatcctgccttagaatcctggagtggagcggcaggtccctccttctgtctggggcgggtggggctcctggttcgcaagttcagccctgcagcacggcaagggttcaggtgcggcacagcggggcccaggcgcagggagcagagctgcttctgtgctgccttccacctggcctgggc

SEQ ID NO: 4319 - DNA, 1099 bp, Homo sapiens
gcagcctggccaggaggctgcggtccagggcctcgtccggagaaaacacagggttgtcaattcctaggagagagggcagcggctagtcagccttcggagagccccacggcggcaggggagacctcgccggggccgtcacctgctgggtgccttggaaagttagggtcaccgggaaggttagggtcacgtgcctttcaggttgcgggcccttcccccacatccatgaccccacacgccacaggcagcacaggtaacgtctcgcttccctcaagacataccccacctgctccctgcccggcccacgtctccccggacagcagcctccgagttggttgagggggcactcagtgggtgccaagcagggcccttgagaacccacaggagaccccacccccccaggtcccagtgcccctggtccaatgaccgagctccctcctggggcggcaggagccacccctcccttagccacgacgcctgtgccccgtccccacctgcaggggagtcggacgctgtgtccttggtgacactagccaggaactcgatccccccactcatctcctcatcatagttggggggctcctcggtgtctgaaagttccaagtctggggaagacaggttggggtgaggactggggtcactggggggctgtcctcacagcccagtcagcagtgtccatcagctctgtgcacagaggtgcaggcagtcgggacccacagagaggagggctaaaccgcagggctggaggagggaccccacttagagggcagtgtccctggaaccccatcctgggtgggtctgcagctggggccctgaccatgcctcccctgcctgggtggctggagggtccccagaggggaaggtcctgagaggggaggttcccgagccgggagggctggggctgggaggtggtggctcccagtcccagcgttcctgcagggcccccagcgcacctttctccttgatggtgaaattctgcgcagggctctccatgggcagcttcccattggggatgctgctgtttctctgcggagcaaacgtgaagctgctcacaccccgacacagccacacccagccctgactgcccccgctccaggcccca

SEQ ID NO: 4320 - DNA, 1129 bp, Homo sapiens
ttgttattgtatttttctttgaaatttctatttgtttcttctttatatctcctgtttctttgctaagactagtttttcctttgtctcaggtgtttgtaattgctcattgaagtattttttatgacagtcactttaaaatccttgttagacctaagttctgtgttctctcttggtggtatctgttgattgactgtgttttctcattcaaattgccatttttctggttcttggtcattttttatcatattgtggacatgctgggtatgatgtcatgagactctgcttcctgtttaaatccccttacttgagaagactcctcactcgagcctgctgggtgccaccttgttgccgggacagtcatggagctcctgcctcacccacggcctctggcagaccctactggctgggagagtgaagggcaccacctcgttctagccaggccgggacagcagtcaggatccattctcacaccccggtgctggctgctgcgcaaggccaggtggacgaggggtgtgtgtgtgtgtgtgtgtatgtgtgtgtgtgtgtgcgcgcgagtgggggtttgcttgcaggagggctgatgatgtgaagagagtctgtcctgcaaggcccctcctggtgccaagtggacgaggggtgtgtgcgtgtgtgtatgtgttgttgtgtgtgtgggtgggggtttgcttgcaggagggctgatgatgtgaacagtgtgtgtggttgcaggagggctgatgatgtacagagagtctgtcctgccaggcccctcctggtcctttggccatcgagagcaggcttacggtttttggtctttttgtgtttctgggctgccgacttctgtggcacccagagtgggatgtgtagtaaataagcataaacaaaaccccagagtcaagccagggactcagcgctgggttctctctcgagtgccgaggcccctggctggttggcttctgttcctttcagtcccccaatgcttgttccgtatattttcctccagggcagtgggtctaatatgcgggaggagcaggttgaaatgtgtcctctccatgttgcctggaactggaagagctcaaaccaaattttaaacttaatcagaacatattctggttgggtgtggtggctcatg

SEQ ID NO: 4321 - DNA, 1256 bp, Homo sapiens
atggcctgattggcccggacagaaccgtgggatgcgcctgccctgagcctggtgcctgagcattatggaggccacgtctgacaccagctcgggagtctgctccaagtcagatgcggacctagcccaggctacacccagtgctgcctcatctttccccgttcccaggcctcagctttctcatctgtgaagggggggctgatggttctcaccctgtagggcggcgtgtggattaaatgaaattgtgcgtgcacatcactcagcttgctgcacgctgaggcctcggtagatattagctgtgcttagttgcgtcacatgtgggttccataaacgaccgtctcaccgcgtggggcccagagaacttcacagatgagaacgtttcatttttctacttttcctggtaatgacatggagttattgcaaataagtttatacagttggttggtcagtgtgtgttgctggcttatttcactgtgtatttcttgtttaaagtgtgaatgaattcactgtgttttctgttgacagggcattcagtacctgactgcattggagagtctcaatctctactacaactgcatctcctcgttggcagaagtgtttcggctccacgccttaaccgagctcgtggatgtggacttccggctgaaccccgtggtgaaggttgagcctgactaccgcctttttgttgtgcacctgctccccaagctccagcagctgggtaggcatcaggcagggccacgctcatgcttttgtccccgtggggtatgggagtcggggagtcgtagtgggtgtctgtgtgctcaacgtcacatgcttgattccttctggaacggggagttggttttctacgctggtggcttgagttcctgcagacacacagctcgagaggccctgtgtctgcacaggacagggctggaagttgagcaccctgggagggcgcagggctggggccgtgggagcacagccccggaccaggctgctacgtcctgttctggctctccgcgtcatggctgttggacttgggcacgttcctgaacatctcctgtcctgtttcctcgcatagcccccaggtatcatctcaggtgcagctaaacagcaggatgctgcctggttttgccccacttggaagcacacaggacaagcagctcattgtcccccacaccccaccactgggacagggttgggaggggatgtgcagtgacctttggatcatgctcctgaaagaaaaggctttccatgacagtcttgtaggcagaact

SEQ ID NO: 4322 - DNA, 1190 bp, Homo sapiens
gtgtggcgtgtggtgtatggtgtgtgtggtgtcttgtgtgtgtgttgtgttttgtgtgttgtggtttctgtttggtgtgtgttgtgtgttttatgtggtatgcggtgtgtggtcagtgtggtctgtgttgtgtggtgtgtggtgtgtgtggtacgtggtctgtgtggtatatggtgtgtgatgtggattgtgtggtgtggtatatgaacgtgcttacaggccacggtggtatcgaggctgagcgtgggcctgaggggaaggagctgtcctggagtcttctctggctgatgtgacgtccgtgtcccctgctcgctgtcctccatggggtccatgccccttgcttgctgtcctccgcggggtctgtgcccctcgctcactgtctgtcctctgtggggtctgtccccccggctcgctgtcctcggtggggtctatccccactgctcactgtcctctgtggggtctgtgcccctcgctcgctgtctgtcctctgtggggtctgtgccccccggctcactgtcctctgtggggtctgtccccactgctcactgtcctctgtggtgtctgtaaccctcgctcgctgtcctctgtggggtctgtccccgctgctcactgtcctctgtggggtctgtccccccggctcactgtcctccgtggggtctgtccccccggctggctgtcctctgtggggtctgtgccccccagctcactgtcctcggtggggtctgtccccgctgctcactgtcctctgtgcggtctgtccccccggcttgctgtcctccatggggtctgtcttgccggctcgctgtcctctgtggggtctgtgaccccagcttgctgtcctctgtggggtctgtccccgctgctcactgtcctctgtggggtctgtgccccctggctcgctgtcctctatggggtctgtgccccctggctcgctgtcctctgtggggtctgtctccccggctctctgtcctctgtggggtctgtgccccctgactcgctgtcctctgtggggtctgtgccccctggctcgctgtcctctgtgggatctgtctccctggctcgctgtcctccatggtgtctctccccccggctcgctgtcctctgtggggtctgtccccgctgctcactgttctccatggggtctgtctccccggctctctgttctctgtagggtctgtgtcccccggctc

SEQ ID NO: 4323 - DNA, 1187 bp, Homo sapiens
ccgtgtgttgggaggttgtggtctgcgtggcttgtgtgttgggaggttgtggttcacgtggcttgcatgttgggaagttgctgtggtctgcgtggcttatgtgttgggaggttgtggtttgtgtggcttgtgtgttgggaggttgcagtctgcgtggctcgtgtgttgggaagttgctgtggtctctggcttatgtgttgggaagttgctgtggtttgcgtggctcgtgtgttgggaggttgcagtttgcgtggcttgcgtgttgggaagttgctgtggtctgtgtggcttatgtgttgggaggttgtgggtttgtgtggctcaagtgttgggaggttgtggtctgcgtggctcacgtgtggggcggttgcttggctcgcctgttgggagtttgtggtttgcatggcttgtgtgttggaaagttgctgtggtctgtgtggcttatctgttgggaggttgtggtttttgtggcttgcgtgttggggggttgtggtctgtgtggctcacgtgttgggaggttgtggtctgcgtggctcacgtgttgggcagttgtctgcttggctcacgtgttgggaagttgtggtctgcgtggctcatgtgttgggaagttgtttatgtggcttgtgtgctggaggttgtggcctgcgtggctcacgtgttgggcggttgtctgcttggctcatgtgttgggaagttgtggtctgcgtggcttgtgtgttgggaagttgtttatgtggcttgtgtgctggaggttgtggtctacgtggcttgcactgtagttcttttggacagccttgttctgcagtctgtgtttcagccctggaattgccacattctccaagaagccctggtttcttgactagagagccttgtgtagaagccaggacctgggttctgggtgaagccctctgcagatagagctgggagatgcctgttgtgtgtgtctgcaccacatacatggacactgtgcagagggattctgttggcacctgtgtttacatgggttgaaaactgtttttacacggaaacttccagttccctcgtgccccgtgggttccgcccacttcttccctttcagttttgtatctgcgccgtgaggacttgtctcctaatcttcgtatcaactccgtgtcccattgagctgaccttccgcctctcccccagggccctggccatcctgtgggctc

SEQ ID NO: 4324 - DNA, 1200 bp, Homo sapiens
ttcttatttttctccactaagcttttagtcatgtgcattttaaatcattctcttaatgactcctcacctgcattggtgatgtatcagacttagcacacttgctcctggatgcaagcacgttataattctttaacctcattttcctatcctggcttttgcatcatttttctgtatcctaattgtatgcatatttaattctacaatatatcattatttttattgttttcagtgggtttgcccacaagtttaccttttctattgattttcaaattttctcctattttcttgtgtttgaaaacaagatatttttggataatttgcctttggcctgaaaaagttcctttacatttattttagtgaagattagtggtgataaattccctcaaacttttcatctgaatacatcttcagttcatgtttattttcataaaaatattttaactggatataagattctaggtgagctgttatttttaaccccagaatttaaaaatacatcattcagttgtctttcagcttccattattttctgttgagaagtaaaacatcagcctatttactgtcacaatttttctcttcctttttatttttgactgtaagatgcccaggcgtggttttctttgcattcattttgcttcatgtttgcagagcttcatagatatgtggtctgatgtctttcattgattttgggaatgtcttaaccagtgtttctttaaatattcttctccctcattctctctcttcttcttctgggactccagtccatacatgtcatgcatttgcatcatgtctcatacgttgtcacgcccttttttctacttttttccttttagttttgattgcattattctttatgtgttctacctacctagcttctggttcactgatctttattctgatgttcaatcagttgctaaccccatcttttaagtactttcagttaatacagttcttagttctagtatttccatttgattttcaaaaaacaaaagacttcagttatcctgtagtattgttcatattgtcatgtgattttaactaaagttaatttaaaatcatatttggtaagtccaacatctgctcctattcagttctgtttatatttcctttttgtctcttggtgattggccttgtggtctttggcatagccagaagtttgtattttggatgctatgcatgaaaatagaagttgtggaggat

SEQ ID NO: 4325 - DNA, 1287 bp, Homo sapiens
tcctttctaagttaaaatgaacaaactcagaatcaaaggctgtcctgtgaattaaatacatttcagctttcagacaaaagtgctgcctttctgtattttccgcctctggccatgactcctcccacctggcatggagaccccagggcccaggtgcgccctcacctggccaagtgccctccctgccacattgctgttcctctcacctggcagctgttccccctgcgacagatcctactgacgtccaggagagtcgcaggccaccacagcgaagtgtccctctggctctcaccttcttcttttgtgttgtccagagcctcgcccatcgtccttgtcctcccaggtggtatccactgaggagggccagtcctgggtcacccagggcaccccttgtgatgcctggctggggccagcgaggggactcactccttcccttctccaaagtccacctcctggttccgtgcgaggcatcctgggtgccacagaacggtggcagagaaccctgtggagattgggcgcactaagagccaagacctccgacctaccctctctccccagcccccaaaataacacaaatgagattggctattattaattccctgtgagcaatgctggctcctgcctctgtacgtgtctgaaaacaccaacagcagcactttcccagacaggtgtgtctctgcacccccgacgtggctctccctggcgactctgcggagcgccacactttgcttttggcgggacccgcacggcttcatcaccgagtgtccctgaagggctagggccatgggatcactggtgacggtgccgtgaaggtctggagagtggattgtgagggatccggagtccctggggatgtgcgtgggtgaggagtggtgccatggtggcagtgcacttgtgtggctgtttttccaagtggtagtgactgcagggaggatggcttcaggcctgggaacaggctgcccctgcacactcaccctcaccatctggtctgcgagactagctttaatttctacagcgctccctgaggctggcggaaaatggttctgaagacaagagtcactgttaactggaatgttgttgtgaatggagcacaggcttccatgaagtagtgctgaggaagggtgcgctggggctaactccagaggcagcattgtagcgaacactcgtgacagaccagccagtgcgtggaggaggccgtggccctggcctgcacggggggctcttgcccacatctgcaggaggcagcaggcacggctctgagtggcccgtctagggcaggtcccagcttac

SEQ ID NO: 4326 - DNA, 1190 bp, Homo sapiens
gaaggggtctctgtccacggacaagctgggcggccccccgtgtcctgcatctgtgcccaccctgacctgcccggggtctgggagtggacaggaccgcagctccacacgcctttctctgttgggggagagcagcagtcgctgcttagtgattccggctgtcagcacatatggccccacacgcagacccgtgtactgcaggttcctgctgaggccaaggccccagggcaggcaaatcccctgcccctgcctccgccgtcactgcagtctcagaaaaccaacacctgcacctggtctgcagacacacgtgtgtgataccagcctggtgggacccacgaagaccccatgaggccgtgacctcacagagctgagcatcccgctaccaggtgacccccgtgctgtcctccagtgcgaagtgaccacaaagacacctgcccttggggtctcacagtggccatggggcccaggccagtataactcaggtggatacacccagacgtcctcagcagcctacagttacccacggagccaaagccgctgcagccaggcggccagcttccacgcacggaggctgcacaggtctgtgtcggggggtggggggtgggggggttggcaactcccctccagctcgcttccctccctccctgcacactcactctcccctcccacttggtcttaggacagaaatctgtgcatgctgcggggaagggcactgaggggctccacggtttcaggctgtgagacaaagcagccatcgtaagcagctgtgggcactcatccggctcagaagccgctgaccctgtcagagggcactgcccttggggagggtccccatgtctcctgcctgcacgctgctcggttagaaaagctaagttcaaaggtctcggccctcgtcccttcctgcacatgagcatgcatctggcaggctgccgttcctctaaccaggcacccgcacgcccaggctccgatgagctctggctttgacgccactcctgtgctcctgcagggcctctgccacctccacgcaggctgggggctgagcctgcgacgcagtacctgaggcatgctctctggaggaccctcgtgggctgcaggagggtcccagaaaagactcggcgaagtcggctatacttctcagaaagcctggtgtctgtggccacggcccccacgtacctctcgctcctgctcgttct

SEQ ID NO: 4327 - DNA, 1441 bp, Homo sapiens
cagcggttcctgttctgatcactcgagtctccgtgatgccaccgttcccagaaggcagcccgtgcagcctccgggtccccccttcagccatggcagcccgtgcagcctccgggtcgtcccttcggccaagcttccctttccttgagagcagcacgctggcctggccatgcagaacaaaacacaactcagaaatccctcctcagccctcggcagtaaaacttctgaggattcgactttttagttaatttgctcactgtggcagctcactggaaaataaatcgaggatgccaagtcctcctcttagaaaaatagcccctgcagtggggtttgctgatgtgctcatttgtgtcattgcaggctttatcctgtggataaacgcagagtgaacgagtttggggagtcctacgaggagaaggccacgcgggcgccccacacggactgaaggccgcccgggctgccgccagccaagtgcaacttgaattgtcaatgagtatttttggaagcatttggaggaattcctagacattgcgttttctgtgttgccaaaatcccttcggacatttctcagacatctcccaagttcccatcacgtcagatttggagctggtagcgcttacgatgcccccacgtgtgaacatctgtcttggtcacagagctgggtgctgccggtcaccttgagctgtggtggctcccggcacacgagtgtccggggttcggccatgtcctcacgcgggcaggggtgggagccctcacaggcaagggggctgttggatttccatttcaggtggttttctaagtgctccttatgtgaatttcaaacacgtatggaattcattccgcatggactctgggatcaaaggctctttcctcttttgtttgagagttggttgttttaaagcttaatgtatgtttctattttaaaataaatttttctggctgtggcatttttcttgacctggtataatgaaagtatttcggatatttgagtttaacccttttccagaaagtaatacatgatatggatttatttatgcattaaaagagcaaatttaaagagccctttgcaagcctttgagtcatgagtgttcttagatacgtagcatcttagttgtttaagactaaactattgtacagagccatgacccatcaggtcaagcttatcttgccctaggttgaggcagagagagagaaatggaatagaaagatgggtggagaactgctggactcggtgtgtagtgaagtttaatgtttgttgaagttagtttttgtggggtttgttgttctcagctcacagcagcctccacctcccatgttcacacaatcttcttgcctcagcctcctgagtagctgcgactacaagtgtgcaccaccacatccagcttttttgtattaatatttttagtagagatgtggttttgccatgttgtccaggctggtctcg

SEQ ID NO: 4328 - DNA, 1202 bp, Homo sapiens
taggtatgtccgtgagactccaacacacatgggtatatccctgagatcccgacacacctgggtgtgaccccaagaccccaacacacctggatatatccttgagaccccagcatacttaggtgtgtccctgagacaccaacacacctgggtatgtccctgagaccccggcacacctgggtatatccctcaaaccccaacacacctgggtatgtccctgagaccccaacacacctgggtgtgtcctcacaactccatcacaagtctccttgcatttggttttcttgttctgctcagctggggtctccaggcccagcccagtgacagggggatggggtccacgccccactcctcctgcatagaaagtcaaatcgagatcggagaaataaagttgaggggcccaagtcacaaagctgggggatggtgggggttgggggtgaggcctcagttctcttgttctgccaactactcctattcctgggtaagatgatcactaaaggactctgggttttaacttgaaaacaaaggagaaaaaagttatatccttcaggtcctcttccattgtaaaaagtacatataaaaatagggctgagcacacgtgacccctcctgggactcagcgaagttcctggcagtgactggaactcagtgaacgtctctggaagtaactgatggggtagaccaggagaaaatacttagtctctagtggagacaaagagacaaaagggggctacaattttttgttttatttatgcttttctcttttccttttcttagggctaagcttgaagcagaagaaaccacagtaaaaacactggtcaatgtatggtaattttaaagtcatctacttcctatacatgtgattgttggccagggcatttatgatttatgttatattttattttcctatggtcttaagttgttggttatactctagaactttgcatacatgcagttgttggctgggacatttatgatttatcttgtattttacaattgtcttaagttgttggttatcctctagaacttcctgtacatgtagggttggccgggccactcatgatttatgttgtattttattttgctatgatcttaagttgttggttttcctctagaacttcttgtacatgtaattgttggccagggaatttatgatttacattgtgttttattttattatgatcataagttgttggttttcctcta

SEQ ID NO: 4329 - DNA, 1177 bp, Homo sapiens
aggtcatgatttaacgcttaacagatggtgacccaacaattctgtacctagcaaagtcttattcatgcatgagaggtgttcctagtttactccctccttacagtttttagcaagggaaaggcatcctagtaattttagtgcaaaaatggtataggcatatcacttatgaacatagatgaaaaaaaaaaacctaagtaggatattggggaattgaatcctcagtgtgtttaaataatgttaacatagtgttcaattacttttatccccaggaatgtaaggctgctttatcattagaaaatctattgtagttcactgaaattaataaataaagggagaaaaatacatattcaaactaaatacagaaatttatttgatgaagattgatacctatacatgaaaatcttttagcagactgtgtgtagaagtttcataacatgattaaaggatatcaaccaataacctggaacagagcaaatttaattaactaattccaacttttaagacaaagacacctgttattacccttactattcaatattgtgctgaagccttagtcagttcaggaaggagggcaaatgaaatgtaggcatgagtaaaggtaggataaaattatcagtgaatgttacaactattcacataacacacccaagagaatctgcagataaattattcactgctggatttactttgcatatattttatttagatcttttgtgtgtatgtttataagtgacattgttgtaaaatgagctggtcttactgtaatcaacaaacaaaaattagtaatatttttgcatacccttaagaaccaattaggaaatgtaatatagcaaaaacagcaacataaagatagtactcatgctagtggtaaaaacaaattaagctagggtgtaaaagctaaccaggatgtagaaaacatccttcaggaatgcgtagaggaaaaatagaaaaaattatcactgtgtgtgttttgatttcattatatgctgccaaaatgctcttcaaatactaccacccatagtatgaattgtattttccttacatccttaccaatatgtttattttagtctagcctagtggatgaaaagtaaatttttgttattttagttttgcatttcctgatatgaaaaaggtggaatacgttttttaaaaaatgtctattgactattccaaattc

SEQ ID NO: 4330 - DNA, 1225 bp, Homo sapiens
ttcctggaagttgagctgttggagttacacttgattaggattgtgataccatctgtctctattgtgctcaagtcctgaaataaccaggtgttaggtacaaggggaagcgctcatctttggggagtatcagtaatgtcactgagtagtttatcagttttctgtgttctttttttatttccattttttgaatcctatcaaatatatatgagtgcctcattaaaatatttctacagtcagtgacaatacaggtgctggctacaaacgaggtcacatgtttaccctgtatagccaggtgagcctgctgtgtttcctgccactcacctgcacagaagtgacccatctgtccaagtgacagaggtgccattgccccaagggagttcgacaatatacagtccttggttctgtcaagactcaggtgacgttaggtggcaggtgtaccacttcttaaactttttaaatgtatcacaaacctaagaagttacaaaggaaaagatcgatacatttggctgtatagctgttagaaaaaaataaataacataaggctaaaaacaccataaactcaaaaggcaaaaaagctaagaaagttcttttttttttttttttttttaaaaatagagacagggactcactctggcccaggttggagtgcagtggcacaatcatagctcactgtaatcttaaattcctgggctcaagggatcctcccacctcagcctcctgagtagctgggactataggtgtgcactaccatgcccagctaatgttttttattttcatttgtaaagatcaggtttcactatattgcccaggctagtctcaatctcctggcctcaagtggtcctccctccttggcctcccaaaatgctgagattataagtgtgagccactgagcccagttgtaatacttattatacatatcacaaggaacttcatgactactatgcagagctctttcacaaataagaaaacccagcagaagaataggcaggtgttaatttttacattatataaattttacattatataaattttacattatattcaagcaataacttgaatgtccattaataatggcttagataaatcgtgctttatccatttgctggataactgtgctatgactaacatgaatgaaggaatgaagatctgtatgtattgatacagaaagacggacaaatacataattacaaaacacgttgattcagtcaacattagctgagggtcg

SEQ ID NO: 4331 - DNA, 1151 bp, Homo sapiens
ggttttgtgggtatgggttttctgtggttttcttttttaagcagttgcatattacatctcattcgatttagttatgggaatgtttaatgttctacatgaagccactttcacttgtaggaatccagacgctctgcagtgtcccatcgtcttatgcggatggcggggaaaggcctccattcgaacttttgtgcccaagaatgaacggcttcattatctcaggatgatggggctggaggtattgggagaaaagaagaaggaaggggttatcctcacaaatgagagtgcagccagcaccggacagccagacaatgacgtgactgagggacagagagcaggagagcccaacagcccagatgcagaagaggccaacagtccagacgtgacagcaggctgtgacccggcgggggtccatccaccccggtgagcaggcccaaggcagcgggggcccacacccctcacacgcaaaactggcttcttctggtcactggtgtctgaaaccaaatccagagcagcctgtggcctgtaaagcatatatttctaatgactgcagactggtgggatcataggagccttctgaatgaccaggactgctttctttggagctgatgaaaatgtactcttttagcgtgttagaaatcacttgttttattttgtttctttggccaagctgggtctagtgtttcttttgctgggaatagactttcaaaagttgtacttctatcaagaaacaaaactgcccttgcagaaatttcaggtcttttgttaagcctgtattggtcttaaggtgcagtattttttaaattattatttatagaaagaatctataaattcttggggaagtgtgttataagctttaataattacattgagctgcacctcagtggtgtgtcattaacatgcagtggggttaatatctgaggcctcagatgactttgtgccttttggaataaagggtaaaataaactctcccagagtaagagctgtatcgtgaattgtcatactaattattgagggggacttatgtgcttttattgaatggagtgctttacaatttttatttttaaatggggttgggatccttggaatatttcaataaaattgataaaatatatacatgtgtgattcctgtttttgctcttaggaagcagaaa

SEQ ID NO: 4332 - DNA, 1197 bp, Homo sapiens
aggagccagctctgccctgggagagatacaaagcgcctgcctgggtgaggcagtgcacgggtgggcttgcttcacctctttggccccagcttcaaaaccagccagtcctccctggctttggctttaattcacatttacaagcttgaaaaccagttaatcccattagctcagcttctaaagctgaaaatcgtcccctaaatgggtcacctgttgtcatcaatagctttattagctatggaataatatagttttgttctctaactgtaggatccttcttttgctcttaaaatagctcagtaagttgggtctcataaatacatacagcaagcatataccagatactaaaatacaaaaacattgctgatcttgcttttcagtactaaaagcagaaaatcgggaatttactaaattgagaagtcagtcattacctttcgatgggtttggactcttgcaaggcagtgattgtaaacgagagtgatcttttgttgtttttcaatgaactttattctctaatttttagtaaagcacactaggaaataatgcttcagaattctgttttcgagtagtttcctgactaaaataaaaattcactaaaaaaaacctctgctgtcaccatttccttttttcttaagataactaggaaatgaatcattaagagtttgctccgtggcaatggatcgggaagctgaccctgctctctgtggggctggagccttgctaatgtcccaggatttcacttcacagagacaagcatcagaggcttgcttcatttatagatcctacttcttttctacaccacagccaactcaaaatggtgacagaatctaagacgaggctagaagtcaccacggagcagttggaagctctgcttccggttctgggggcagtgttcctggcgttgtgtcctttggccccacctcagtttgtccgtttagctcctcagctgagaatgagatgtgtatcatataggagtttcctgggccactcacagccccaagctggagagtgccagcctaatgtgtcaggagtagggggtgaggccagagggctgtgtgccaactcctccctaagaagcctcctgggaaagccctcccaggcacttcccaggtctcactggccgcctgaggctgcaggggaggatggtcaggccgcctcttggctggcactgcttcccggcgtgccgccagcctttctcat

SEQ ID NO: 4333 - DNA, 1245 bp, Homo sapiens
acttacattatttctcctacaatattatttctagagatactttgaaattacatagctgtttttaaaatttgcttttcctgagtaaccattttataaagttgacaattattttagagagctttgttaaaatgttctttctagttattacagactttgcttctagctcagtgtgcctcattcgcaggttttacccaggtggaagttgataaatcatgaggtgccttaaatatactcactttgggaggtctcagtgcctgaggatgggcagagagacttggttgagctgacatgtttgggactctgaccatgtgcctggtcttaaacgggtggtcatgacctcctgttacagtagaggccgtgcagtccttagcaggggcagacgcacctccgggtggtcgtgacctcctgttgcagtagaggctgttgcaatccttagcaggggcaaatccacccctgcaatctggtcccatcttgttccattttcaagggccttgctcttcaggttcccccttcccccttgtcatctggtctgagggagcatgtccaccccaagcgcaacacgaacagcagcagccaggctttccctccctcctgccatctcctgccgctctgccttccttgccagcctcactctgctctcctgctccggaggcccccactgtcctcatggcctgtgtagcaagcacataaacactccagtgaacgcgctggtctcttcctgagttcctttgtgcctgtggactcgtcatggtaggggtgcacccctgctgagtcgtaacccagggagagctccacagtctcgattttcacaagcccctcaggaaattaattcttagcgtcccccaaccaaagtttgagacttaatgactgagagccttcagatgggcaagaggatcgaggaaactttcctttctgtcttgtgtgatttgctatgtgaaatctctttgaaagtatggtaattactcagtaaatctttttcttttggaatttacagaaatattcattgctgccttacttgattttagtattgaaacagttccttctgcagagggacctgaatgaagtttttacaggtggaattagctcatacagcctaattttaatggccattagctttctacaggtatgtatgctttcttgagactgtttctgttgagacatgtgtaagagtagactcttccaaccagttgcctagtgggttccagcagcctttgctctccttttactgtattgtttcaatttggt

SEQ ID NO: 4334 - DNA, 1218 bp, Homo sapiens
ccccctccccttggcttttctcctcattattcttgtaaccaggacaagccacataactttcgggtctccatgcaaaatgaaaattggagcctcttattcaaaaattatgaagaatttcaagttagcaaagactaaatgtggcttgggccctttgaacaggagccctaagtgactgcacaggtcacactgcaggaacccagcccgcccttgatccaggagacccttggctgtgcctacgcacctagactcctgctcttcccccactgcacgtttttgctgagcaagtcttggcaagagatgaagacagaagtgcagttcatcagcgggcacagggcccttccttcccttccagccaaaatgagggggcccagaatcggcagaacagctcctcaaagagaagatccccatgtcctgagacacattctcaagcaggacaaatatgttcatgtccgcattactgggtctatgtctcattgaactttgaaacacactttagacatgaacaagcacttctcaaaaggagacctggatgtgagggcgatctggctgcgacatctgtcaccccattgattgccagggttggttcggctgatctggctggctaggcgggtgtccccttcctccctcactgctccatgtgcgtccctcctgaagctgtgtgctcggtcgaagaggacgaccatacccgatagaggaggactggtcttcagtcaagggtatacgagtagctgcgctcccctgctagaacctccaaagaagctctcaaaagaagacctacaaacagccaacaaatgtgagaaagagctcaacatcacaaatcatcagagaaatgcaaatcaaaaccacaatgagataccatctctcacctgtcagcatggctattattaagaagtcaaaaaacaacagatgctggcaaggctgcggagaaaggaaacgcttatactctgttggtgggaatgcaaattagttcaaccattgtggaaagcagtgtggagatttctcaaagagctaagaacagaactatcattcaacccagcaatcccattgctgggtatatacccaaagaaaataaatcgttcttccaaaaagacacaggcacttctgtgttcatcgcagcactactcccagtagcaaagacatggaatcaacccaggtgtccatcagcaatggactggataaagaaaatgtggtacatacacagcatggcattatacacag

SEQ ID NO: 4335 - DNA, 1155 bp, Homo sapiens
gccactggaagcagccctgagaaacattgcccattatctctccataccagcccccaaaaagattttcactgccccaacacttcaatactattttatgttatttttcttattgatataagaagacaggaatgtcaggcctctgagcccaagctaagccatgatatcccttgtgacctgtacgaatacatccagatggcctgaagcaagtgaagaatcacaaaagaagtgaaaatagccggttcctgccttcactgatgacattccaccattgtgatttgttcctgccccaccttaactgagcaattaaccttgtgaaattccttctcctggctcagaagctcccccactgaccaccttgtgacccctgtccctgcccaccagagaacaaccccctttgaccgtaattttccactacccacccaaatcctataaaacggccccatccctatctcccttcactgactctctttttggactcagcccgcctgcacccaggtgattaaaaagctttattgctgacacaaagcctgtttggtggtctcttcacatggacacgcatgacaataccatgctggttgtgggctctgcagatttgaagatgcatgtgtctccagtcctggaagagaaaggactggtcctgatgccaaggagttgcagctgcagcatgggtgctctagtgacattttctccaccataggtttctatgtttaaaaaggcctccccggccgggcgcagtggctcacgcctgtaatcccagcactttgggaggccaaggcgggcagatcacaaggtcaggagattgagaccatcctggctaacatggtgaaaactcgtctctactgaaaatacaaaaaaaaattagccagatgtggtggcgggcgcctgtagtcccagctactcgggaggctgaggcaggagaatggcttgaacccgggaggcggagcttgcagtgagcggagattgcaccactgcactccaacctgggcaacagagtgagactccgtctcaaaaaaaaaaaaaaaaaaaaaaggcctcccctgcctggctcttcaggtgacggaatcacacccttacttagggggtggggcactcagtggagaaatggcctcagaaaacccagccatctgcaccattaacagcaatctttcacagcaa

SEQ ID NO: 4336 - DNA, 1277 bp, Homo sapiens
cctgcacctacggggtgcgtacatgtgactttgggcaagtgacttgatgttgtagtttttttcctaattttgtcttgacgtccttctcaggagagagtggctgtaaactctagccctgccctgacggggatcctggggatgtggtcgtgggtgtttcccatgtgcctttcatgggatccttctttgacctcacagacggcctgattcctgagtgtccaacctgtggccaggtgtccctctcgcaggaagcttgtttatcctggcacatgaccttgtggctctcatctgacctgtgtccagtttattcctactgagacagccactctcccggagagccctgaccgggaaagaagttaggatggggtagaggaggcaactcatcagaacccaagaaatgacagaagcagtttattgcttacagatccagagaacagagggcagcacgcttcacagggccagcaaaaagggggagccattcaggacacatgggctcaaccagaaggtggagaacgagagagagagggagctatgagccaaagccttcactggggcccagggtgtcatctatgcaggtttcccctggaggttctaactggggggtttagagcaagcaggcatgagccccggggactcacgctgtgactgagaggggtcggtgtgggtaggatatcggcatggtccatgtgggtgtgggggtcagtgggacaagtcaagcaggtggtatccagctgtccatgggaaggtggtcccaggaggcggttttgtaaggcagatgtctggatcgaccaccttggggaacagtgagaagttgtataactggaaactgtgttactaatccctgcttctagtatgagaaagtccaacttacattcaaatagatgctcaggaaacataaaattcaaagaattcccaaacttgagcttcctgagcctcagtttttgcatctgtcaaatgggtatggggagaccctttgcctaatgttgagagaatccaagcctgagcagggctggtctactgtggacacttagttgtggaccccaacaggccaaagcccttgcctgctgagggctgctcccaggaggcctcacacattcatccggcctcccaggaaacccctgagatgtgctgggcttttgccgtggaacggtgtcggtgagcatgtggccagtagccagagtcttcaacataggtgggaggtctgaaattcgtgcgagaatgaaccaagggtgtggctgtatccttcatggtgagcttggggcctgggcagccttccctct

SEQ ID NO: 4337 - DNA, 1214 bp, Homo sapiens
caagaatcttaataatagggaatctcaatttgattctgcagagagagagcctgataaattaataccctatctaaagaatgcagcaggcgcacaaattacccactcccaaccctggaggataatgattaaaacaatatagaactctttcaaggccctgtagttggaaagagtccagtttaaatcctttaaagaggatctattgcagggcaagcctggtgctggcagccacggtaatcccactttcaatgtggtgtgctgaattcctggcagttaaaatgcttgtttttggatcttaacgtgctgccggggtccattgcaagaaagtccatgcctcttgtctttttggtaccttacgggctcttcttccctgagtttccctggagctgaagtgtgcacttgaagaaaattagtgttcaaagtagcgtgggctgcctggatactgctggtgggaatcatggaatgggagcgtggttctattttgtttgtgttggaactttgaggaagcttattaagcagggcagttggggcattagtattgcaccgctaggactcaaattctgggccagtaataagactgatcagagtgaaagtttttgccaaggatgttttcattaaccaagaatgaaggtgaaagtgggaagtttaaagatgttcaggtcctgtgtagttacgaacataaatgtgatgttgaccactgcattaatgcccatgacccactagcagcttccaggaaaccagagccctttgggtcgtggtagggggaaggtctgtgttcatagctgaaactgaaaggcaacagcaatagagacagcttaatttgactgaacatgagcaaccttacctgcttccagcacagacaggattgtcccattgatagttattctgtgggtgggggtgcatggcttttctacttgatgaagagattttgagaggtgacagcatgctggcagtcctcacagccctcgcttgctctcggcgcctcctctgcctgggctcccactttggcggcacttgaggagcccttcagcccaccactgcactgtgggagcccctttctggcctggccaaggccagaactggctccctcagcttgcagggaggtgtggagggagaggcgcgagcgggaactggggctgcgtgcagcgcttgcgggccagctggagttccgggtgggcatgggcttggtgggcctgcactcggagcagccggccggc

SEQ ID NO: 4338 - DNA, 1099 bp, Homo sapiens
cctgcctcagcctcccgagtagctgggactacaggtgcccaccaccacacctggctaatttttttgtatttttagtagagacggggtttcaccatgttagccaggatggtctcgatctcctgacctcatgatctgcctgcctcagcctcccaaagtgctaggattacaggcgtgagccaccgcgcccagcaagctttttttaaaaaaataataaaaaatagagagagggtctcactatattgcccaggttgttcttgaactcctggcctcaagcaattctcctgtcacagcttcccaaagtgttgggattacaggcttgagccacattgcttggccaaacaaagttttaaattaccgtttttttcatgaggctaacttttaaggtcaatatttcataagcctttataaaatatttttgcagcctttaaggttttaactatgattcctgtgcctattaatatttaatatgttttatctcaaataagtagaggactgtgctggcaagttattaaatatttgaagcataatttttcattctgggatcccctatattgccttcccttacaaaggatttttgtgttttagttgtgtgtgtgtgtgtgtgtgtgtgtgtgtgtgtgtgtttaagcatcttgagcttctcgatataaatgctgtaacttagtgttttactttgtttttatttgatgagtataaatgattaaagttattacattttcacttttggagctgtatattcatcataaaaaagtcaattctgttattttgtagtcattaattttctgtagtacgtaaaagctgtacagcttgtcaagattcataggaaactaagactaactagttgagtatcttcatgaaattcagttgataggaaatatgtgggcttttactttgaggccaatagaagcttgttttgtacattttaattttcatttgatagttacattctctatttcttttatcttttgcaaaaaatctctattattcctggttttaatgacttgctcttgtataccagatatcctatcgaagtcaatgatctgtgggcatgtgccattaaaagttgctatttgtggccaggtgctgtggctcacccctg

SEQ ID NO: 4339 - DNA, 1257 bp, Homo sapiens
gtgtatgttcagtgtttttccatcagttttggtcattattctttttgatgctcatattatcctctctttggcctgttttcacaatggtttctgtgttgatttggcatggccctattagaccttaatagctttgttgttctctagttacagagaatgtcctaggcagtgtatttttagcctagttctggaatctttcatttctccaagaagccctagttccttttagtggggaattgtagtaggagtgttcattgttttgatgtcggagttttcatggaattttttccccctttttagcattttgcccttaccatattggtcatttctcccttgttggtttgggatttgaagaacacgtgagtataatacttttacaaagttactttcattcattactcccaaatgtgattattaataaaatagtattctaaagagttacatcatttcttcattggcattatgcaagggaatagttaggcaataccgtctcattcttttttaaaaaaaataacagtggctcaagagatagtggtcatgttgccaactaatgaaaatgtgctctgaaatccagtcagctgggtgggcctgaggcataccgtgggaaagtttcccacaggctgattttctgtccatctcaagaacctgtatgttctcttctttccctttccccaggtgccccctgctgaatttagaaaagtaacaatatatcaatcaatttaaaaagggtagaatattttggaatgacgggttgtagtgttttctagagtgctttagttttgacattttatcagtattttccagaggtaaataaattttggaaggattattacttctctgttggggccctagaacaatttagtcttttatggaaaagctgactatctgggatcatatgctcagtttgtatatttgagatctgagagatcacgttctgaagtcttctcatatttagtacacctctgattctcactagttgaatgcaagaacttgaaaggttcaggtaagtgttttgaaaaattttgactttccaaacttttgccacttgctatctgaaactcaggaatcaaaaaataccgacaggcactgttactttcaaaattctttctataagttgagaatgggacagatttgcagagcaagggaaacttgaacagttacttctagtggtaggaaatgaggtggctaggatattacccagctggtgggtgacttgggcagtgtgttcctgctttcagtggttagcctttagcaaatctg

SEQ ID NO: 4340 - DNA, 1178 bp, Homo sapiens
tagttttctgtcttgatgaatgagccaattggaagatagttactctaaattatttgtaatgtttctacatattaaaagtattgacatcacaaataagagaagaaattccccacttttgtcctattatttgcataacagtttcatttggtgataaaaacaatgaaaacattaattccctcaaaagcttttttagacctaaaagaataagtaattggcatgacaaatcagagtgtatgtcccagtagagctcgcctccattgaacttaccttgttttggttgtgatttcatcaaattgtgtactctttagacattgtgatttttgtcttttgtttttttgatgaagacattgatatatcgaatgtgatatctttttcctaatgtgaaaatactaacataacaacatgaagatgacaattctctttacctagccacatgtctcatttatcagcttttctattttcagtatttgctggccgttggttaatgtcgttttggacggggactgccaaaatccatgagctctacacagctgcttgtggtctctatgtttgctggctaaccataagggctgtgacggtgatggtggcatggatgcctcagggacgcagagtgatcttccagaaggttaaagagtggtctctcatggtatgtgtgtgtaatacaagactgatcttgtatgttaggaatagtgaatatttttccagtcatcttaaatttttttttttggcacatttatttccttactatattgtttcaagagagttgattttttgaattagaagaaatactctttcaagatagtggctttctggttcattcttgttcagagtcctacgttcagatatatgaggtttaaaagaaaaacaggttgggcacaatggcgtatgcctgtaatcccagtactatgggaagctaaggcaggaggattgcttgatcccaggagtttgagaccagcctgggcaacaaagcaagaccccatctgtattttaaaaagtatatgtatataatatatttttactggatcatttagtagcatgtttttctttatacacgtgcatgcacacacctacacatgcttatattacttacttaagggccttactggacactttgtaacattattgctctcagtaacacatatgactcccacaaatgtaggataaaaaaaatactgtaa

SEQ ID NO: 4341 - DNA, 1224 bp, Homo sapiens
gtaattcttggacttgctttttttatattcactatagaattctttcatactaaatttttaaataccttttgatttgttaaaatttgatttatgcaagcttttcagaaacgcttcctgcttcagtgttttctcatcatactcagataaaatgaatgcaatattgtataataacacaatattacatattacgtatctctttcataagatgtatgaagttacttcaagtaatgtggtcttgaatgaataccactgaatgtcatctggtattgtatagtgcaagtagagtataaattattctagattagtgtcttatttcatcacttagcagagctaactgcagagcgttagtgggtaaatacatttcttcagaaactcgtgggcactatgcttatgttgatataccagaatttgccttgactttagaagaagtaaccagtttgactatttttgggttggcagattcagttgtgtggagattgctgtattaacttggaggaatttgtcttgtatctttgttctaattgctttttgtaatgtttcaggtttacgcaaatggcatccggaacattgaccttcactatattgttcgtaaactggcagctcccgtgatctctgtgctgttgctttccctgtgtgtaccttatgtcatagcttctggtgttgttcctttactaggtacgtaatgctggttgtggagccttgaaggagcacttttattaacattggacattctctttacccctagtaaaaaggatgtctcactccatatgctttatttgtaaatgtgaatccagctaagacaatgatttcaaaataccacttttcttagatttgactattctgggtaagattagaggatcataaagctctttgatacagttcttttctctaccagaagataaaacttgaaatttacatgctgtacaaaataggcaggatcagatttccttcaggttgtcttcttctgactagaagtgctgtgatcatataaaattaagtaacagtgttgttgtatttaagttttaaagaaatattctttggcataaaagatccaaagaggagatgctaatgggcaacacgtttatactgaaatacactgtcttgttgattgtgtagtgaagactcctcatagctccttaaacccaacatattttcaaaattataagcagagacttttccttcccaaatctttttcttctccagaattccgtctctcagcagcaa

SEQ ID NO: 4342 - DNA, 1226 bp, Homo sapiens
gttgaaaataaagtacaacttttcctgaaattagtctgttctgcagaggggccctggtgaacttaagcatgcctcaaataacacttgttctgaaggatttcttccgcatgtgcctttcctgtggtgtgttcttacttcctggtgtttgcaattgcaggctagccaaggcgaaagaactaggcattcatcacacttggcttcgtccggaaaacttctggtggaggttgggtttttgaatgttgctacgttgtaccattttgtttttccctatgatactctccgatattcttgtacctggaaagtcactctgcccctcacaaaccctctaatgccctatttttaccaagaaggtgtttcttaatgagcaagacctgctgtgaacttatgccagccagtggttaggggctcagaactgtatccatttttttcttttttcccttatttaattatttatttatttattttattttattttattttattttattttattttattttattttattttattttttcctgtaatgcaaggaaactcataagattgttcctggccaggcacggtgactcacgcctctaatcccagcactttgggaagctgaggtgggtggcttacctgaggtcaaaagttcggaccagcctgaccaacatggtgaaaccccgtctctactaaaaataggaaaaattagctgggtgtggcggcagacgcctgtaatcccagctactcgagaggctgaggcaggaaaatcgcttggacccaggaggcagaggttgtagggagcagagatcgcaccattgcactccagcctgggcaacagagcaagactccatctgaaaaaaaaaaaaaaaaagattgtttgttcccttgcagtgttaggagctgcgcagcaacagacagcaggtgtgggtcagaagtaacatggaaacggagggcgtcttcaaccacaaggataggaagcggtagggcgtgggtgaggtcctgaccatgtccacgtccaggaaaccaggcagcttgaccagaatctctgtctaggagacagaggccatcatcaaaaagtcgggcaacaagggatgaggatttagacgtggagtccaacaaaagacataggaactgcaggagcaggaggcctctgtcccctgggaagcagagacccaggcttgcctctgctcagccccacagtcctcccccttctcctgccctgtgtgtgaagaggggtgctgccccca

SEQ ID NO: 4343 - DNA, 1209 bp, Homo sapiens
atgacataccctgatgcttcgtttaagtatttgagaattttctagtatatttcagagccttgaattcaccccatttctctttttactgtctgtgttcttgagtggctgatgtcttgtacacacctctgtgtaaccacagccattcattcttaccatgatgagaactggtcatgggtagtgtttatgcacccccttctctaggaccgaggaaaactggtttaaatttgatagcacggatttgggggattgctctatgatcagagaaaaagttcactcggtgtcttcttctcttcctccactcaccaaggaggtactgagcactcagcaacaggcgtgagggctccaggaatggcccagctggatgccctccctgccctgatgtagcttatcctctaataggaaaggaagacagagggacaaagaaaataattgccaatggccctcaagtctgtaaaagggacaaaccaagggtgaggtagagaagagcagagggcaggcctgaggtcccagcagatgactcctgggagatacatgcccccgccagggtcctcctggctctgcagctgtgcagaccctgaggtcagaagggagatgtacttccctttggtagggcctcctgccctacgccatcagggacagggaactctcagaccgtgcacacctgcgggcctcacagcacacaggcagaacattgcgtcctcccccatccgactctccgttcaggcttttgttggctgtccccagcagcctccatttgcctaaacctggggtgggtctgtccgtgggcacaggtgccaggctgggggcctctgcccaccagcacctaggagggctctggagccaaacagctggagaaggaggccgcctctgcatgaggctgggctgcgggccctcgcacctcccaccacccgcctgcccctccagactccgccttttgaggcccctcaccctgaggccatgtcaggcacagaccctctgggctcaccactacacttgagcctcccatcccctgaactgtgcgcccatcccctggacggcagccatcatctgaactgtgcacccatgccctgaactgtgcacccatacgctgaactgcacccatacgctgagccgcacccatcccttggactgcagccatcatctgaactacacccatcccctgcactgcacccatcccctgagaaccacccatcccctgcactgcaccta

SEQ ID NO: 4344 - DNA, 1162 bp, Homo sapiens
ctgacttccttcattgagcggcgcaaacaccagaatgatgttcgacctatccgtagcattaaaaactttctgcagagcaggcttctgcctagagtttgacctatccagaagttctttctcattctctttcacctgccaatcagctgttaatctgaattttcaagagaaaacaagcaaacataactgatcagctgccggtatgttcatcgtgtgaaattgcattccaagtgagctgtgctcagcagtgcttggacacagagctgcaagctgcgctggggtggaggaccgtcacttacactctgcccaaggcagaggtcgcattgctgtatcacagtattttattcaggtttctgcaaaaaaataaaaagataacttttttaaacaaacatgaatagaattttgcaaatttaacgttttcaagatttattcaaggaaacaaaatgcctatgttcaaccactggtgttaatgaacaaagatactgtgcgtctctggggaagacgcacctaggtggcggccactcccatggccttgtctaggactcagagaccactcggctctgagcttccaggcgcctcgtctgtgtgcatctcacgcccgacgtggcttctgaaacgtgcattcaacctcaaacttttgcataaaatagaatgaatcgttttgctctgatgaaatgtaggccttacttgtatataagactgttcctgccttcggtctgtcattttcccacctgcctcccctacccaccccccacccaccacctggggcttcctctgggggtccgagggtcttcccatcacatgaagacatcaggttgggtcctgccccactgcccctccccctgttcctgccccaagccgtcaatcagattgtggagcagtacacagtcagatgaaaatactgtaaatgcactcattgggggttttttggttttacttcatatcatgtgcaatgttgtggctttaacattttatgcaactatttatgaagacctctgttgtacctgtaataaatatatagaaaaagcacatacttcgtatggtgagctttatggttttgtgtgtgtgttggggttggcgggtgggtgggtagggtcgtagccctgtgccatcggttcaaagagacttttcgtgaaatttgttggttttgaggactgtaaaagtg

SEQ ID NO: 4345 - DNA, 1161 bp, Homo sapiens
tgggcctatttccagctccaaatacagcggtgatgcccaagtctgtttttccagccctaacttgttcccaagcttcagaccagtcactgggtgtatccagtcacctcccaacatctccccaggggccgagaagggctgtggccttcagcccatccctgtacactctttccttaccccttccacattttctcctgtctcccccatctagaggagtcacaggagcacccacccggaaacccactccatgtcccactcctctcagtcaagtccccaagcgccatcagcgctgcctcctagcatctcactcccactctctccttttcctcttcagtcccagcagctcggctcagggggctcctgctcaccttgggcttggatgctacagaagcctccctccagaaccatctccctccacgaggctcgagtgtttccctagactatgatggaaatgacatctcctagaattctgcatcacacaacccacacacccattctcagcagcctgggatatggttctagaaaccctggcctgatgagcgccctgctttgcccggcaggtccttcctcactgtaggcactgggctgcttcaggaccagcctgacacttaacacgggtgggcaccagcttacgcctgagctacatgtagaaaataagaacccagccagagaggacgacactcacaccaaagagaaggcggccacaccaaacggggactcctgatggcacccggcctccttctgcaggagtctgaactccctgactctgccatccctcaacacgaggagggcaaaaaagtaccaagagtagatatttgaaaagaatttgtagagatggtttctttgcagagagcgacactgagtcccactccttctggggcagggggttgtaatactcaaagcttgaaatggggtcctgagtcctggggactcagtgggctggtgtctgactcacccatcaaatctaatagaagggcattggggctggctggcaaatcccgagtttgacagggcagggggtccaaaagtctttcccttggcccagaccctggcctcatagatcaacaagcttgcctggggtcatcttaaggcctgccccacaaggccacctaggggtgtggacagggctcagtagaaagaagctggagctatcactggcttcct

SEQ ID NO: 4346 - DNA, 1179 bp, Homo sapiens
cttgaggggtgtttttttgtttgtttttttgttgttgttttgtttttcaaattttactaagttaatgggtttcacacaatggtacaaaaaatctctcggtttggtgcacacatgcagtgcttctctgtgccgtcattatttgaatagttatatgttccagtaaatcattgccaagggattcctgaaaacatattgcataaatttttttaaagtaataaccttaaaaaagatgccttgaaagatttttgtagttgcttaaaagaattttcatggtgggtataacaaaatgatccatgttcctccagtgaatcccaaacatctgcacatgaattacatgagagcgacattgggtcatcatccaatttttggttctgtttgcataaaagtcaagatctttgctcagaggtctgtctcaggttcaagagcgtgcccctgtgcttctgtcagtcggttcccgcttctcccctctgacctgttcccgttctcccttctctcaggttgtttttgtagccattttgcttcacagtcacctggaatgccgggagcccctgctcatcccgatcctctccttgtacatgggcgcacttgtgcgctgcaccaccctgtgcctgggctactacaagaacattcacgacatcatccctgacagaagtggcccggagctgggggtacgtctaccaacccaacagcagtctgtctgagactcagagtagaataaaactgtattccacctctatgtaaaatgagaaatcagtgacatcaaaacatgaagttggccaggatgtcatacccagaggccaagtgctagatgtctgcagggaaagacagttggaggattaatgaactctaacagatggatgtgatctgagatgtcactgtccagcctccttatcccataggaggagacagaggcacagagaatctgtggccaaggaatagatacgacattcatggtttttcttgctcttataagttattctgcagtcagcaaaggttttaggacccacgatacctttgagtttatatttcattgtgtttgattttacagcagggatccaggctttgtttatgctttcttcaatggccaatcccagtcccttattcaggtgcctcctggggaccaagcacaacgttaggtaccatagggcaacacagaatattttaagatatggtcgctac

SEQ ID NO: 4347 - DNA, 1216 bp, Homo sapiens
cttgttgaaatagatctctgggtctcaccaccaggttttctgatttgggagggccacagtggggcctgagaatctgcatttctagcaagtgtccaggtgatgcttatgaccataccaccattccagggaccactgagataaattaagttgtccagggccccgcagtcaataaaacataaaggctggattcaaacccaaggaatcaacctttaaatgcatttgcattacctcttgtgataactagacgggtctgatgtacctcacaagaggaatgcctgttgccgtataagccgttttctatttttctgcatataaatgtgagtgtctttgtgggtgtatgtgcttatttgtgaatgagtagacacatgtacattataaccagacactccactgagtccaatgtgtgtcaacagggaatatctattagcaaattctttaatcattcccatacttaatttaacaagtataatcattagtttgtttcaataacaaatctctgagctcatcacagtcattataacctgtcatttggaaataatgggtttatgtttcaaagcatgtgtaatctcacacatatttcctagaagaaaatcagactctgtaatttgacctaatgacaagtgtaattaatgctgtagatttgtagactcttagttatcaaatccaacctctcatcagtttcataaattttgagatctgtgaatgtggtgctggtagccattacttggaggcttcccaggttaatctgactcaactgtgggcagctctgttgctctagtggcttgaaagctctttagctcagttaacccagacctgccctcctgtgagtttcatctgccctaaacctgtgccctccagcaagccgtattgatgtctcacgtgagaccatctcaaatgtacaaagatgccactccaaggattctagccttcaatgacccagcctctcttcagtgactcctcaaagacccaccctctttctgcctccagttccacctgccctgagcacactttgacctggcattgtctcccctttcaaatacagtgtcccgaagtgaatgaaatgccccagaaaatattcaagaacgagaatcctagcacttgatctggaaatggatgctgagattaaacgtaaaccattttagccgggcacagtggctcatgcctgtaatcccagcactttgggaggctgaggcgggcggatcacttgaggtcagga

SEQ ID NO: 4348 - DNA, 1213 bp, Homo sapiens
aactgcactcatccagtccgtgtttgttatggcttgagctgagcttttgctcgccctccaccactgctgttttgccaccctcgcagacccgctgctgacttccatccctccggatccggcagggtgtcctctgtgctcctgatccagccaggtgcccattgccgctccgaatcgggctaaaggcttgccattgttcctgcatggctaagtgcctgggttcatcctaatcgagctgaacactagtcactggcttccacggttctcttccgtgacccatgacttctaatagagctataacactcaccgcatggcgcaagatcccattcctttgaatcctgaggccaagaaccccaggtcagagaacacgaggcttgccaccatcttggatgtggcccgctgccattttggaagtggcccaccaccatcttgggagctctgggagcaaggaccccccggtaacaaaacgaccccagggtctctttcccccatataaacccctcattttgtaagcacagggctgcttcctctttctgtaatggagcagctggcaggttgaataaaggcttgcctgaacttgggtgtctgtgtctctgtctctctctctctctctctctctctctctccctctctctctctcgtcctttctcttggctgatcttacagttatttttgtaaataattttgagtttagttcctggacacaataaagcaacttgaaaactgttccatctttttgtgtttcgcttttaagctttttaaagcaaggctccagccacatttggtctaggattttcttcccctactaaataaaacaagattcttcttgtactctactcaatgcctcatgaaagatgaagtttaccaccctgatttttcagaacaggcactgttcagaactgatcctatataggctctgtttattgtttattttaatcctttgtattgtgaaaggaaaataaatcttggggcctccaaatcgctaagctaaagggaaaagttaagctgggaactgcttagggccaaactgccttccattctcttccaagttacccctttactcactgagttaaatgcatatctgattgcctcctttggaaaggctaatcagaaactgaaagaatgcaactgttcacctctcacctatctgtgacctggaagccccctcccctcttctgagtcttcctgcctttgcttcaagttgtcccgcctttct

SEQ ID NO: 4349 - DNA, 1176 bp, Homo sapiens
gcgcccctcccttcaccagtgcaaaggcagtggcagagcccaaggtagcctttggttctcttgctgcaaatggccctaccgccttggttgataaaaaagtttcaaatcccaaaactaatggggacagtcagcagccctcctcctctggccttgcttccagtaaagcttgtgtcagaaatgcctatcacaagcagttggccgccttgaactgctccgtgcgggattggatagtgaagcacgtgaatacaaaccccctctgtgatctgacacctatctttaaagactatgagaaatatttagcaaacattgaacagcaacacggcaacagtggcaggaattctgaaagtgaatctaacaaagctgcggctgaaacacggtctccttcccttgttggctcaacaaaattacagcaagagtcagcgtttttgtttcatggcaacaaaactgaagatacacctgacaagaaggtggagctgacatctgaaaagaaaacggacccatcatcactaggagcgacaagtgcctcatttaatttcggcaagaaagttgatagctctgttttgggctcattaagctctgtccccctgactggattttcattctcccctggaaactccagtttatttggcaaagatattaccagagtaaaccagtctcttcaccatttcgcactaaaccattggagggccaagcggaaggtgacagtggtgaatgcaaaggtggagatgaagaagagaatcatgagctacccaaagtagtagttactgaagtaaaagaagaagatgctttttactccaaaaagtgtaaactattttacaagaaagataatgaatttaaagagaaagtcataggtactctgcatttaaaacctacagcaaatcagaagacacagcttttggtgcgggcagacaccaatttaggcaacatattgctgaatgctctgattccacccaatatgccacgtacgccaacagggaaaaataacgtttttattgtctgtgttccaaatccaccaattgacgagaagaatgccaccatgccagtcaccatgttgattcgggtaaacaccagcgaggatgcagacgagttgcacaaaattttactggagaaaaaggatgcctgaacacgcgaagtcggctgcggaattattgccaagttgctgcttcttccaccatc

SEQ ID NO: 4350 - DNA, 1198 bp, Homo sapiens
acttaaactgtgattactgggtgtgatgattagtagtatatgtcaggttgacttggctaagggatgccaagatagctgaaaaaacattatttttgtatgtgtctatgacggtttcaaatgttagactgaataaagatgtgagtgggcatcattcaacctgttgagagcctgaatagaacaaaatagtagaaaaagggtgaattcactctctctgtttgtcctcagatgtcagagcttctggttcttggggctttgaacttggactggatcataccatcagctttctgtttctctagcctgcagttggcagattgttgaacttcttggccttaactatgagccaagggctataatctctgtttctgtttcaatatcaatatcccattgattgtgtttccatagggaactctgactaatacactgggtttattttttcatggaaatgttaataacatacttgtacagactgagcagaagatgtagcatgctggagtctggtttactcaaagcagatactaagaagaaaattccgaaaattccaatagcaatataagaaaatggccgggcgcggtggctcacgcctgtaatcccagctctttgggaggctgaggcgggtggatcacgaggtcagcagatcaagaccatcctggctaacacggtgaaaccccgtctctactaaaaatacaaaaaaattagccgggcgcggtggcgggtgcctgtagtcccagctactcgggaggctgaggcaggagaatggcgtgaacccgggaggcggagcttgcagtgagccgagatcgtgccactgcactccagcctgggcgacagagtgagaccctgtcccaaaaataaataaataaataaataaaataaaaaagaatataagaaaatacttttggacattgattagaagcataatagaaaaatagagacaggagacatgaaaagttaacattgttttaaaaattatttaaaaatggaatattttaggaactagtattaaaattatactttatacttcattttgttattaaaatactgtatgtggttaaatgtataaacacatttaaatataacaaagttcctaaattctatgtgtaattccataccattatgagtggactataagtagtgtttattttgtcttccttcttatttctgtaaatcacagtgtctgtgtgaaaaaatcagctacttactc

SEQ ID NO: 4351 - DNA, 1177 bp, Homo sapiens
ctctttcttgtatgaatggtggtatcttacacttttctctactgagattttgttcacttaacaatgtgtctggaccaggtgtgatggctcagaccttaaattccagtgctttggaaggtcaaggcaggaggattgcaaacttagccaggtgtggtggtgcacacctgttgtcctagccactaaggaggctgatgtggaaggatcacttgagcccaggagtttggggctgcagtgagctatgattgtactactgtactccagcatgggcgacagagtgaaaccctgtctctaaaaaacaaaaccaaaccacaacaacaacaaaaccatgtgtctgggagatcactctgtagtaatatatagagcttattgatatgtttggctttctgtctgtcaaacagttttatgttagtggttactatgaaatccattatattggctttgttttttcctcttcatatcctttgtattcgggaaggcttgtatttttattctaatgattacctttatactgacaactttatagtataattacatttctcccttacttctcttcctctctctgtgtgtgtgtgtctgtgtgtgtgtgtgtgtgtgtgtgtgtgtgtatcttgttgtcttttagtaaaaatagcttctctctgcttcttcccataatcctctctctcacctggcacctaatttgaagtgatatccttttgttgcaagttaataaggcagacagcaacctcatcctactctttatgtatttcttattctccccttgttttctgatggttgtactaatcaatgttagaatgtttaattatttcttatattgactcacttgtgattatctaccaataaaaatatatttgcaagtaatcatcagatcatgtcattatcaatctcccacctccccttttttgtttgtctgaagctcattttctaaaacattcctcaagaagggcttatagaaacagtggtccttgagtttctgcatgttcctcacagtttgcctgtggcctttgttttaacggtcagtttggctggatataaaatctgtggatcccattttctttctttaatattttaaatacattctcattgttttctggcataaaacattgctgtcaaaagtataacaatatggtcaggtacaggtactcacaactgtaatcccagcactttgggaggccaa

SEQ ID NO: 4352 - DNA, 1175 bp, Homo sapiens
gttttttgagtttttttgctagggtgagataggagtataagtcagtataggatgttcttttaagtattcaaacatgatggtagtcatttatattatttgatggcatttgttgggaggtattttggtgatctttgaagttacacagtttcttggttgaccattgtgtagcaaaataacaagctcttcttgacacttagagagagattacagtttgaatagatgaggagatcctgcctttccaaatttgtgtgtctgagaagggctctggtggtatggatggaagcccaaaagaaaataaagtatatacaaagagaagaggtcagagaaggaattccaagaagtgattttacttaaaatgaaatggagaaaggactgtacgtgcataaatcatctagcagagtgctttttcctatgatagcaaggaagaaagtttgcacatttgctttctgcctatctcttgagaattcccaacagctctggttgttttctctcctgtttactctctgagtagttcatttccacccatgcatattctgatccccaccagatcaatattaatagctgtgacatgtacctctgtattaatactccactctcacattttagattgccttttgaaatgaacctcctcgatgtttcctcagatactttaccctcaacctgtgtgaaactagactcgtcatcttccctgcatattgaatttgaggtactaaggggacaccctcctgaattaagtgacctagttggtcacttacgccagaaacccagaaatgatcctcaattctttcttcactcttcctcccacatcagaatggtcactgtatatttcagtaatatctcctgtgtttaaaatttttctcttcctttccagtcttcccttcatttggctcctggactattgcattagacttcagtctggtcttctttgttcccttacaagccattcccacactgtttccacagtgtctcatctgaaatgtaaatgatgataatctgtaacttaaagtacttgaatgatttctcgttgccatatatccataagccctgaccttaacatggtttgtaagggctacataatagagttcatattttcctctctagatcatctggcatctctctctctccacgcacttctatctgaactgtgaaattactacttctttcctcagctccct

SEQ ID NO: 4353 - DNA, 1332 bp, Homo sapiens
ttacatagacttcagttgagatgtatacttagcaaaattatttttaaattgaaacagcacagtaaatacttaatataaaatgtcccttggattttgcttcccatgtaaatctattgtattattacacttgttataattttaactataaaggtccaattgtttcacagagccagtttgggatgggctgcattccatttatgctgtatatagtttgaattatatataaattaccccttcttctggccacccctgctcccatcttagtattttgcaagatctaatcagttgtacacctggtgcccctcgcttgcttcaatcatggttatttgatggcaaaatcgacctcttgtcgctgaaggagagagaaaagatgtgtgtctgattggtcctgggattttttgagctgtgccatttatggtactctttgcctatgcatccccttgttagattttttttaaattttatcttactgtttttataatttctattgggaagaggcttgtgaccagtaccaatcttgagtttctttttctgtccacaagtaaattaatatctgctctgaaatgtcatttatctactcacacattcttggggaaaaaaatcaaatgtcagtcctagcagatgttgcatgtaaattggtagcaagtaatgattacaacccagaggattaagaattttgtaacagaaagctctatgttttaattttttatatacaattaggataattagcattgtcagactataaacctttgctttttaaagtttatttttactatttctttatcactttattgtatcatcaccattggtttcataatgtaaatactatatgttgaacaaattaaatgtcaaaattttttattaccatagtccatgttaatagtggggctttcaggtgtttagagattttttttgttgttgttaacattcattgcaaaagtactagatggtgtataactctagagttgaattttaagggattccctaatatgtatactatctttttatctgaagtaataaataaacaatgatcttgaaagtgcctgaatcagagcaagcatgtcatttgtgtttttgtattctcatttagttttctttcaaatgaaatgttacttactgtagcattgtaatattttaatgcagggcttgggtttcttaaagggccagatagtagatattttaggctttgtgagccgccagctgtgtcagttgcaactactgaactttactgaatgaaaactgttatagataatacaaataaataggttagactgtgttccaataaaactttatttgcaaaaacggggctggtcaaggccccagttttaatgc

SEQ ID NO: 4354 - DNA, 1240 bp, Homo sapiens
ttttggtagaaacaggatctcactatgttgtccagtctggtctcaaactcctgggctcaagccatcgtcttggctcagcctcccaaagtgctcggattaaccttgtggttttatcctaaacagcaataaatgaatggtattctaattctctgtgaagctaacttggctaggttgtctttgcctgagcttcttaacttgtccacataaataaatcactataatctggggttaactgagtattccttggagtttgcagggttctgaaagaacctaataaacacacagcttggtgaaatgtgagttatgtttctaaacttatgacctctaaagttatttgttgtttgtatgtaagaataagtggtggaaagataagcccccgaaaattctcgattagtaatttatgttaattgtattttttcagtatattattatagaaagacaggaaaggtaaaaggcaccaaatatgactttggctgataatatttctgttttttactctgaattcaaggtaaattagctattttgttttatttcttcttctttttttaatagggttacacatcattttggaatgactgtatatcatctggattacgtggctgtatgttaattgaattagcattgagaggaaggttacaactagaggcttgtggaatgagacgtaaaagtctattaacaagaaaggtaagaggagtgctgagtaacattctttttaaagaggttgtactgcttaaaatgtatgtttttactagtagccttcaaaaattaaagtggaagttgatattaaagttgtctttcttcaattgtatttccatatcttttttgcattcttggtttcctggttctttcacctacaatgagtaatgtaattgattgttaaggtaaccggccactggatcttacaaattcagaaagattctagacttcatttgcagcttttatttatttatttatttttaattttattttattattattattttttattgatcattcttgggtgtttctcgcagagggggatttggcagggtcacaggacaatagtggagggaaggtcagcagataaacaagtgaacaaaggtctctggttttcctaggcagaggaccctgcggccttccgcagtgtttgtgtccctgggtacttgagattagggagtggtgatgactcttaaggagcatgctgccttcaagcatctgtttaacaaagcacatcttgcaccgcccttaatccattcaaccc

SEQ ID NO: 4355 - DNA, 1129 bp, Homo sapiens
tgtttaaagctttgtgtatagttttaagatttttttccccctctttctctaagttaataagtgtagggagtgaaaggtgaggaagcagctgtttggtttagtgactttgcagtcatgcaaaggcacagaagggaaaccaaacagatttccttaacctttcagtccctagacaaactttttagctctttactttttcttttatttctaatgtaggcagactttttttttttaagtttactgttttaaatgaacacaggtcaaggttcacaggggatcaagaaatattattcttgtataatctgtttactttgacctaaataccagcttttaaatactaaccctggcataaaatactgctgtaaatggcagctcattgaatccaattttaagtgtgattgtttttgtttttatctgagcttccattgaacggtggtattttaactttttttcatcaagggatatattcagtatttctaagattaattcaattggtttttatgttgctctcaaggctagagctaatggtctgcagtcctgtgtgattatcatacgcattcttcgagacctctgtcagcgagttccaacttggtctgattttccaagctgggtaagtagtacgtaactgtatggtgtaaaaacatgtaggaaataattctgcagcttttatcctctcagtttacatgtaattatcagccttatttgcatttactaaatatagtttttcttttctgatgaaaaatcctgggggagtcttagaatgtttaattttctcagatgtgactaattaaagaattttcattgatgtttctctttgtgtgtttttttctttttgctgttttcacagtgttttttttttaatattacagcatttattagttggcttttacatataatatacaaatgtataaagaagactttgaagaactgttaatctccttatgcagggacattttttaaaataatgtatgtggttgggaactgtaaaaattcagaaatacatattattcaaaaataatacaaaaaaaataggagattcagtaacgcagaaagctacaaaataaccaaaagccttcttatttaaaggcagattatcttaacaatctgctgtgatttcttctaggagaaaaaa

SEQ ID NO: 4356 - DNA, 1314 bp, Homo sapiens
tatgaaaatcctcaacgcttaaatagattttcacctttgaatttttaaactttgttttaggtatttctttaaatccagaacaatggagccagctgaaggaacagatttctgacattgatgatgcagtaagaaaactgtaaaattcgagccatataaataaaacctgtactgttctagttgttttaatctgtctttttacattggcttttgttttctaaatgttctccaagctattgtatgtttggattgcagaagaatttgtaagatgaatacttttttttaatgtgcattattaaaaatattgagtgaagctaattgtcaactttattaaggattactttgtctgcccaccacctagtgtaaaataaaatcaagtaatacaatcttaactgttgtggccttttttgatcataagagttggtactgtttaaggccaaaagtaacagtttttatagatcttttagtttcaactcagcttttacaataaaaaggatttgtattgcattgagtttataaacttttggtttgtgaacttcatatttgatcttttctcttccaatcaaatgtctaggcttgtttgacttccacccccaatggtttttcactctttttatttacttcattttcctttaataacttaatctcttcatgttcagtttttacttcactctttattcttttctttgattatggtatgcttatttggaaagtcagtgaaactgtcaaaatgttatctcaataagatacttatatgagaactacaatcaccgaatctactgtattcaatattagcagatctaatttgataaacaacatggcttgtgtgaaaactgagcaggtgtttgtttacccatagtgttctgtgtagttattgcttagtctgcagaaaataatgacttagatgagatgtctgacttgctttcacttattaaacatgttcaccatgggatgatgtctgtaacatcagatattgttcaactagactaggatttaataaaaattgtgaaagcttactggcctaacattttattttataatattgggtatgaattatatgtagccagagatgtcattaagctttactgttatagtaggtaatatggttagtttgtagggaaaagagcatatgagcacatgcttgtgtattttggcctttgccccagtagaacagaccaatggcattctagacttgatgatactaagttttagcagacactagtaagtggtttgtatttaaccatactgatgaagcagacagattgaggcacagattttagtggctttgtggcaataaatagggcatggtgtgcctta

SEQ ID NO: 4357 - DNA, 1238 bp, Homo sapiens
tctcccaggctgggatgcagtggctcaatcttggctcactgaaacctccacctcccaggttcaggtaaccttcctgcctcagactctgaaatagctaggactacaggcatgcaccaccacacccggctaattttttgtatgttttgtaaagatgaggtttcaccatgttgcccaggctggtctcaaactgcagaactcaagcgatctgcctgtctcagcctccaaaagtgctgggattataggcgagagctaccacacccagccttgattattttgaggtcttctaattgttaagttgtaagaatttcttgtgtattctagatacaattcctttattgaatacagtctccaatttaagattttggcttaagatttttttgggcggtttctctttccagccagcgccgagcgatgggcatctctcgggacaactggcaccagcgccgcaaaaccgggggcaagagaaagccctaccacaagaagcggaagtatgagttggagcgcccagctgccaacaccaagattggcccccgccgcatccacacagtccgtgtgcagggaagtaacaagaaataccgtgccctgaggttggacgtgggggaatttctcctggggctcagagtgttgtactcgtaaaacaaggatcatcgatgttgtctacaatgcatctaataatgagctggttcgtaccaagaccctggtgaagaattgcatcgtgctcatcgacagcacaccgtgccgacagtggtaagatgtcccactacgtgctgcccctgggccgcaagaagggagccaagctgactcctgaggaagaagagattttaaacaaaaaacgatttaaacaaattcagaagaaatatgatgaaaggaaaaagaatgccaaaatcagcagtctcctggaagagcagttccagcagggcaagcttcttgcatgcatcgcttcaaggccgggacagtgtggccgagcagatggctatgtgctagagggcaaagggttggagttctatcttaggaaaatcaaggcccggaaaggcaaataaatccttgttttgtcttcacccatgtaataaaggtgtttattgttttgttcccccccccccaaaaaaaagatttttttgagttgatgattggtttatcaagatataaacctatcataagtcaaggagcatctagccttataatggcttgacttatgattttttcatgttacagtgggtttgccaaggtattaaatgcac

SEQ ID NO: 4358 - DNA, 1168 bp, Homo sapiens
atctggtgtacattttaagcaggaagaggaacagagaagttatttagtaggccttttttttttcctttggagtctacatagcttagctttgtagaaagagaaaggtgggtgtattaagagaaaactcggtgtggtgacttgtgccagttgtcccagctactctagaggctgatgttggaggattgcttcaggccaggaggccagcctgcgcaacatagcaagaccctgtcgctaaaaaattaaaaaaaaaaaaacttatttgttggagaaattaagattattcaaaccattggaaattgatagtgcttatttatcagagttgccatatctgcttaaacaggaggcattcaatgtcaaatgataatgttctgcattttcaggatcttccagttaggttcttaggtacatttttggaatttgttgtttttatcattatatttcagaaaaatagagatacatcaatataaaaaaacaatatataataaaaatagtgtttattttcctgttttcaaattagattcgtgtgtacttatatatgtgtggacttttttttttttttttttttttaagtcaaggcctggccgacaacaccgttattgctaaagtaaataatgttgtgtgggacctggaccgccctctggaagaagattgtaccttggagcttctcaagtttgaggatgaggaagctcaggcagtaagttgctgattagtattcattgaattttaggatgcagattcacatttgaagtcttttccagctcagtcctgctgcgattgggtggctaacatttattgttgtctcactgtcatatttgaaatcttcattttgtccttcatttagggaacataataaaagtgcttgccttagaaaataaaggggtgaagctgaataagtcttttcattactagacacttcaatagggaaaatgttttgggaattgtattaaacattgattaagcaagtaaaaattgttttctaaactgtgaacactattttattttaattttttttttttttaatgatggagtcttgctttgtcactcagactgtagtgcagtggtgcgctcttgcctcagtacaacctccacctcccaggttcaagctattctcctgcctcagcctcccaagtagctgggattataggagcgcactaccacacttggctaa

SEQ ID NO: 4359 - DNA, 1168 bp, Homo sapiens
ggatgaattataggaagcagatttgcaacaaggggtgaatctaactaatgaaaaggttaatggagtttgttgatgtacacacaggtgatgtttactgtgtttcttaacttgaggcaagtacatttgcaggggattaaatttaacctatgacttaacttacatgttcggcaagggatactgtgcatggatatctataactaatcaaataattaagaatttcattgttatttgtgacatagataaactaggacatacctatgttgccaagagttctgccttttcacatataatgttacactctgtaaaccacaagtttgataacagtatttttgtaattattagtagctcatttcttacattatacagcattatatcataaaaagactattgagctcatttaacaaatacaacatggtcatactattacttatgtatgacaaataatgtaactaagcttatggaaatttgcatttgtttaatatctctgcataaagacaaagatacaaatattatgttgaattaaatctctctctctctctctccctctctctctctctctatatacgtatatatatttgagggctctctgatttctgtttatgagaattaagttaacctggtgagaagtaccagctagcatgaggatcaattgattttatgttaaatccattttatcagttggagaaattcaagattaatgttggagaaacagtataaagctctagtttttcaggctgtagaatataaaatcatcagacaaaacctaaaaaggcaagatattagatgtaagaaatgtcttgaaatgaatgtgaagtgaattgaaaagagccgtgaataaagcaaaaaccactaggaattcaattttgttggctatttctgacattcacaagtagacgtaccagaagaaataaaatctaagaagagtttatcttctacacaagttatttccagcatctggcagttcatagcacaaagtaaacttctgcatatgtttgtcagaataaactaaatcgtcttgttaatatactattgacactgattttcttaagaatgtagtaaaaaagtaaatcattcattaaaaaaaggaaaaaatagagaatggttaagaccatgaagttgtaactgaggaagatatttagattttataagataaggaacgattttagtt

SEQ ID NO: 4360 - DNA, 1234 bp, Homo sapiens
tgagccgagatggtgccactgcactccggcctgaatgacagataagactttctaaaaaaaaaaaggtatttggggcctgggccaccatcatataaagaagttgttggccaggaatggtggctcacgcctgtaatccctgcactttgtgaggccgaggcaggaggattgcttgaggacaggagtttgagactagcctgggcaacatagcaagacccccagctctaccaaaatttagccaagtgtggtggcatacacctgtggtcccagctactagggagtctgaggtgggaggatcacttgacatcaggagatcttggctacagtgagccatgcttgtgctactccattccagcctgggctcagaaaaaaaaaagaaaagaaattgttcctcgaagtcagtggttctgatgaactgggcttgatattgccccccaggggacatttggcaatgtctagagacatgtttgattgtcacatttggacctctagtggatagaggccagcgatgctgcctaacgtcctgtactgcataggacaaccatccacagcaattatccagcttataaggtcaatgatgctaaggttgagaaagtgcatctacggccataccaccctgaacacgcccgatctcgtctgatctcggaagctaagcagggtcgggcctggttagtacttggatgggagaaagtgctttaaacatgtcctaaagtatgggagttatctacaggtgttatattatgtcaaatagcttgggaaatccaggattaagagtttactaggtgtggtggggtgtctggtagtggtcaggtcctctgctctgaccctctccccaggtccccccatccagacatttgaaattagcataccctctaattcagatggacagaaatgtattgagagcctactgtgcagcagcagagttgtcaatactagagatacagcagggaatcaacaggggtgtctgtcctcaccaagcttatattctcatgggggaaaaataattaactatataagtgtgtgtctgtatagagaaagaggtaaaagggagtgatagaagctgctaagtgctatgaaggataaagaaataaagcagggagtgggggtaaaagaattagggagaaattggaatttgaaacgagaaagtcaggaaaggcctcattgagaattttacaactctctcccttctgtataagaactttgaaaatcagaaaactccaggtaatttccattcagg

SEQ ID NO: 4361 - DNA, 1217 bp, Homo sapiens
gatgattggaaaaagattgaattggattttaaatgtttaagactttcagaactggtgttttgaagggtacgatatgcccacacatcgggcactaaaatctggtagttttaatgaattgccattttgatttcgagtataatcaagttttgctactgtggtgcttaatcacatggaactgaatttttatttacctccccattttagtatcaccatcatcatcattatcatcattatcatcccctttcttctccttcttccctaaaccttgcaactcatcacttgaatgttggcacaaggttaaagatatggactttgaaactattattttctcaagttaggaaaaccccaatttttatctccagtttcatgggatcactggtcctaatctgtgtcataataaggcaatatagttcggcctcaacagaaatagatggtatggtaaacagaataataaacccctaagaatgtctatgctcttatctctggaaccagtaaaaatgatgaaattattcaggcaggcccagtgtaatcagataagccctgtaaaacaaatttcaagtgtgagaagaatttgacaagccattgctgcttctaaaatattcaggaccacagacacacacacacacacacacacacacacacacacacacactcacacacacacacacacacgcagagagagaagtgagtgaggagatagatatgttaatttgtttgactatggtgattatttcactgtatatgtacagtatatcaaaacatcactgttgtgcactttaaatatatacaatttaaaaacatatacagagccacatgcaaagactggggagaggcctctagagctaaggttaaatgccagctgtcagtttgcaggggaacagggatctcagtcctataaccataaagaactgagttttggcttggctaggtggatcatgcctgaaatctcagtgctttgggaggccaaggtgagaggatcacttgcagccaggtatttgagtccagcctgggcaacatagcaagaccctgtctctacaaaaaaaatttttttttaaaattagccaggcgtggtggtgtgcacctatagtcctagctatctggaagctgaggtgggaggatcagttgagcccaggagctcaaggttatgttgagccatgatcatgccactgccctccggcctgggcgacagtgtgagaccctgccagtagcctgaatga

SEQ ID NO: 4362 - DNA, 1210 bp, Homo sapiens
ttagggatctattcagagtttctatttcttgttgagtctgttctggtaatttgtcttttgaagaatttcctttttttttaatataagttgtgtaatttgttggcttaaagttaatattcccttttaattctttctttttttatttttttgaaaaggagtctcactctgtcacccaggctggagtgcagtggtgtgatctcggctcactgcagcctctgcctcctaggctcaagtgatcttcccacctaaccctcctgagaaactaagaccacaggtgcatgccaccatgcctggctaatttttgtattttctatagagacgaggtttttccttgttgcccaggttgctctcgaactcctggactcaaatgatctgcccaccttggcctggaaagtgctgggattataggcatgagccatcacaccgggccttcccttttaatttctaaagtattggtagtgatttcctctccttcatttctgattttggtaatttgtgtctgttctctcttactttcctgatcattctatttaagacattgtcaattttgttgattattttttaagaactaatttttgaattcattcgtatgtctctggttttttttttttttgtttatttttacttttatctttatttttttcttcttcctgtttttgattttgtttacactttttctagtttcttaaggtatggaagcataaatactgattcgaggctgttctttctaatatgggcatttaaagctataaatattcctataaaactgctttagctgtatcccatgaagtttaatatgttgtgatttcattttcatgcagttttaagtatttaatttctctcatgatttcttctttgacccattgattttctcagatttctttcggttatgggttttaattttattcttttgttgtcagggaacaccctttatatgatttgttgtaaatttaatgagatttatttcatggtccagcatgtgatcaattttggagaatgttcttgtatgcttaaaaggcattgagtattctgtggtctttgggtggagtgttctgtaaacttaagttaggtcattttggctgatagtgttgctgaagttttttacatcattgttaattttctctctagttatatttatcattcagttctgtcggtttgtgcttcatatatgtggcaacttcgttgttaggtatgaatacatgtataaacg

SEQ ID NO: 4363 - DNA, 1194 bp, Homo sapiens
tatgttcttcaggttttttgtttgtttgtttgtttgttttttagtttgttttttgtgggatgtggaaatactgaaaagttgttaggtcagtttgaaatcgtgatgcaaagcatcttcccttttggcttagtacttcagcatttgtctttcagacttctctgtgactgtattttttaactaaaaaatgaccaaaatgtaagaacataaaatcgtactacaagtatcaacatccgttctgccctgtcttcacatctggtgccagcatctcgttgtgtgagatgatgttcagctcttgtccatctggatgtgctgggcaatcacagccctatttcctggcacatttccttcagccttttgatggatgagcaactctagaatttttggaaagcttagttcacgttccaggtttttttgtttttgtttttttgtttgtttttaggggctaggaccacaattgtcttttcaatttaataggacttgtctccaactgaagaggaagagccagagcatccttttggggtgggcggtgtggacagcgtgtctgagagcactggcagcatcctcagcaagctggactggaatgccatcgaagacatggtggccagcgtggaggaccagggcctgtctgtccactgggccctggacctgtaagacctggatatcattgggtttccatgcacaggccagcacctcagtaatgtggttctgaaagattaacaggtttaagggacagaagcaatgaaagaagcaatgtgaattttccatttgctttcatattattacctggattagccattaccagaggaaaaataaacatttctcagtaactttgcctttatggggaaagggttgactattgatgtattatatgtttttgtatttgatgcatcattaggcataatttttaaaatgataagtacctttcaagccaagtttgcataacctactttcaataaaaaccctctatcttgcctcctcctttattaccctctgagttttgagaaacaaccatatacagatgaatctaataggaaaaaaaaaaatcttttcattgagaagaaaatcagtctcacctgagaactcaattatgaaccctattttaaaacacctatgcagggtttagcctaggagtgaaaagaaaaaccaactaccttttaccaaccctgaatctctaaataagcaaagtttcatgga

SEQ ID NO: 4364 - DNA, 1099 bp, Homo sapiens
actccactaggcggccaggcacagtgacttacacctgtaatcccagcactttgggaggccaaggtgggcgaatcacgaggccaagagtttgagaccaacctggccaacatggtgaaaccccatctctactaaaaatacaaaaaaaaatagccaggcgtggtggcgggcgcctgtaatcccagctactcgggaggctgagggaggcgaatcacttgaacccgggaggcagaggtttcagtgagtcaaaatcgcaccattgcactccagcccaggcaacagggcgagactctgtctcaaaaaacaaaaaaacctcaaataggctaagcagatccattcccataatagtggattctaaaaccgtccttaaataggcaaataactgactttttcaaaactttttttaggtgttgggttcacccttgaaagaactgtcctctaacaactggttttgtcagttaaagcccttgagaattgacatagctatatacctggttgagcaggtgataaaacttgtaactaatgttgtgtcctgaaaacctacacagggaggtactgttttcccttagtgtctacctggctgcttggccttgtgactactgattccattagagcagtggttctcaaagtatgtgctccaaaccagaagcatcagcatcagcatcagcatcacctaggaatttgttagaaatgcaaattctcgagccccaacccagacctactgaatcaaaaacgtgggggatgaggccctgctttctatgttttaacaagctctccaggagattttggtgcatgtcaaatttgaaagccactgcagtaaaggatactgctaccttccatagtttatggactgagctacctatctggctcctcctctgtgaataaccacacacacaaattttgcccaaggcacacaatatataaagcaaaactgttagtaatgtactttttaattattccttaacaaaatagaataaccaaaccaaatgcttcaaagtaatagcaacaagagagaagaagagtgggaatgaccagagctaacaaaacactctattcctttctctcttttttttttttttggagacagaatctcaccctgtag

SEQ ID NO: 4365 - DNA, 1180 bp, Homo sapiens
gcatatgttaaactatccttgcatcactgggataaatcccacttggtcttgatgaatgatctttttagtgtgttgttgaattcatttgctggtattttctggagggtttttgcatcaacattcatcagtgatattggcccatcattttcttcttttcatgtgtctttgtttagttttggtatcagggtaatattagcattgtagaatgagtttggaagtattctcttctctattatttggaattgtttgagtaggattggtattagtagctctttaaatgtttggtagaattcagcagtgaagccagcaggtcccagacttttctttgctgggaaactttattatggcttcatcctattatttgttattgttctgttcagatttgggatttcttcttggtacagtcttggtaagggttatgtatttaggaatttatccatttcttctagattttccaatttattatataattgctcataatagctgctaatgatcctttgaatttctgtagtattggttgtaatagctccttttttatttctaattttattaatttgggtcttctgtctttttttgttaatttttttgttaattagtctggctaaaggttggtcagttttgtttatctgtttaaaaatcaacttttcatttcattgatcttttgtattcttcatttcagttttatttatttctgctctgatctttattatttcttttctactagttttgggtttggtttgctcttgcttttcttgttctttaaggtgtaccattaggtcatttatttgaagttttcttttttgatgtaagtgcttatagctataaacgttcctcttggtactgctgttgctgtatcccataggatttggcatgttatatttctggtaccatttttttttttcaagaaatttttcagtttccttcttaatcccttcattgactcactgatcattcagtagcatgttatgttgtttcatttcgatttccatgcatttgtatcatttccaaattccccttgttgttgatttctaggtttattccattgtggtcagagaagatgtatgatattatttcaatttttgaatgttttaagacttgttttgtgacttaacttatggtctattcatgagctaacaaaaagcatatctgttctgcagccattggacaaaatgttctgtag

SEQ ID NO: 4366 - DNA, 1211 bp, Homo sapiens
ttctttatcaccttggctctaagagcaattaaattaataggaatgggccaaaaaaggaagagaggagacagtaagaaacctatgtaatcctcagattatctaattctcatcttatttgagccaaatgacttaaagtaccgaagtcccaaaatgaagaaaattagatctgcgtgtatttacataactaatttttgtctgtatctttttgaatgtatggtatttaaccagcactttttaaagttctttatagcctggctagctgatggttttatacttatctgaaatgtttcagtgatatctaatcttttccctaccatattttaactaatttagatccagggaggttccaagacagttggaggctttcagatggctttgtggcagctgaggcaaaaactattcttcctcatcgtgccagatccaggtagaatttaaaataaaaagggtttcaatttattagaattcgggtttttatgttagactgtgtaatctatgaaactttatttaaattgtttctgtgctgttttttccaggccagacctcatggataattatttggcactgatactctctgcatttattcgtaatggacttttagaggtaagacttataaaccttattttattccattttgtttattttctctaacagattctttcatgccaggtgtggtgactcacgcctgtaatcccaacactttgagaagccaaggcaggcggatcacttcaggccaggagttcgagaccagcctgaccaacatggtgaaactgtgtctcaactaaaaatacaaaaattagccatgcatgatggcatacccctgtagtcccagctactcaggaggctgacacacgagaattgcttgaacccggaaggcagaggttatactgagctgagatcttgccgttgcattccagcctgggcaacagagcaagcctcttgtcttaaaaaaaaaaaaaaaattttgaaaaataaatctgatgcataaatgttttcatatgtattattttgcaacagtggtgttatctttttattttcaaagggtctagttgaagtgataacaaacagtgatgatcatatctcagttagagctaccatccttttaggagagcttttacatatggtaagtttagcaacttctgattatatgtttcatacctttaatgtttgaatttataaaacaagttattttaatagtgttgctttgtattatc

SEQ ID NO: 4367 - DNA, 1172 bp, Homo sapiens
acatagaaattggaatgtgatttatagtacaatctcatgagtatgaaaaggctatattaaaaaaaattttattgaaagtccacagtcatattcacaaaccaatactgtcattgctaatctgaactattatttttatactatatattgtagtacaataatatagaactgttgggttctgttacttctgacactcaggaagatactattggtgtattaattttatctttgttagagatgaaagtagcccactttatgttaaagatcttactactgttggagcttataagtaatgatctacattttttatgaagatggtttttaaaacttttgttttattggaatgcatatctcttttcagggttggagaaattagcacttgccttgaaaagaatattctttccttaagttatatcatcagaaaattagctctggttagagaggttagtttcagagtgctccaaaaaatatgttaattattttattttgtttaataaagaacattctcaaaacgtaaataggtatctagagaagtgagtactcaacatttggtatattgttttgagtaatggatgtttgttttttgtgtaatttgtgaataaatagtttttttctgcattttgaagattttcctattattttatgttgttagcttttgaaaaattagattgatctacttagtgtctttcttatatgaacttaatatatttaaagtaccttgcatggtgcctcacacatgaagtaatgccagctatttcagtaaatgctagctatttctatgaagaacttgagttagtttggagatatttaacctcaatttcctctgattttaaaaaaggagaactttttttgtaatcctttccttatctgaaagtaagaagtctctgattccagtattataggagagatagtgggatttttcttgacagggtctatagctcaagtcccaaagaggcaagactcaggatggaatgcatgtggccactaggccctgttataagaacctagtgtttcctctgtactggcatggtaggccaagttagtctctttcttacccagatataagacataaaatagtttagacataagacagaggagaaaaagaaacagtaagttatggagaaggaaggcagctcatttctgcaggcccctcaaaatgcttattttagctcata

SEQ ID NO: 4368 - DNA, 1149 bp, Homo sapiens
gtttgctgtgcttggggggctggcaagattccggataaggggaactggtgggctggaaagaggcatgcggtggccctcaagagccagaagaatgactgctaactggtgcctgggggacctatcccgccgtaattgtggtgctagagccgcattgtgtcctttgcctcggtccaacctttggagacctttcacggctctagccttggttgggagccgagggaaggagtttgggaatgtttggctctgtgtaacaatgaaataattcattggtgatgctctctggccggagtctgtaaagataaggtgcatttcagaacattgcaactcttgcggagggttttaggtaacgtgaaatgcgggtagtggtctctgacttggcattcgtggaaagaggcttctcccgcagtttcgatctttacgattgcctttaaattttatcagtaattggtttcccggagaactcgagtaaatctagaagttgccaggtttcagaactatttattcctttaatgtgcagacgaagggaacgtcatcgtttggaaagcgtcgcaataagacgcacacgttgtgccgccgctgtggctctaaggcctaccaccttcagaagtcgacctgtggcaaatgtggctaccctgccaagcgcaagagaaagtgtaagtaacatttttcaggccaactgtgttagcttttgtttgtattgcacttaagtgggggcataggtttgaactttatttggtgcctatcttaaaactcgtacatctgtatgccgatgaggtggcataaaactcgtgtgttaacaacacctacaaggtgtgtgggagaacaccgtttgaaatcttttctgaacttatgttttagataactggagtgccaaggctaaaagacgaaataccaccggaactggtcgaatgaggcacctaaaaattgtataccgcagattcaggtacagtttgtatgttcgatcataattggtccagtgggcttgaatgaaaccctcgtgtttacttgtaaaaagataacagtaccctgatggttactggggatgagatgttggaagctttttatttattgttgtttttgaggcagggtttcactatgttgcccaggcttgagtgtagtggcacgatcacggctcagtgcagcctcagt

SEQ ID NO: 4369 - DNA, 1182 bp, Homo sapiens
gattttatcctagaccctgaggatatagctttttaaaaccccctcctgtttcagagcttatattctagtggaggaagttagacaagcattttaagtaataaatgtatagagagtgtcaagtgatgagtaccatgaagaagaataaatgagggtaaggggctagtgtgatagggagaggggtgggatgccatcatatttaggggtggttgggaactgtctactgctttagcatttgtgtcttcaaatttctctcctttggttatataccttgcgtattccgcacattgataaagtttctttcttacagaagttctgatattgaattaaggaatgggtcactacttaagactttatcatttcagctacacataaaaggtttctctcccctatggattttgctaatggttgagtgatacctaaaggccttgttgcattttttacacttggggtttctcttcggtttgaattctctcatggttaccaaaactctgttaaaggacttttcacagtcgttaaatgtgtatggctctttcccaatatgaatttttttgatgttaactaggcttttagacttagttaaagacctgtgtgctctgctgcatttatagggttttgggctgctgagaataattgatgctgattaaggtgcaaatcatgactaaagacttttctttcttcttttgcatatagtagagtgaggtgagggtcgtggctaaaaccccacaataactttacattcctagctttacagtcttgctgtgaattctctggtgttcattaaagtgtgagctgtgttaaaaggcattcttagattcattttaaccacatttttaaaaactcacagttggttaacatgatggtttcagattgcttgcctcttttctctttctaccttacagggctccttttctagcttaaataagggtactccatctgccacagaatccaggattctatagttttttagtttcacttccctatgttctttttttttttttaatttttaacaatgagatgataccatgttacagcggtattacattaagatacatttaatatagccacaattaaagtatgtattatgtatttatgctggtgttctttcatgttatttcttctagtgaaaatttccaagtaaactgttattgagcatatacatttttaaaaaaataaaaccataca

SEQ ID NO: 4370 - DNA, 1122 bp, Homo sapiens
gcaaatacaagacgtaacaagtaaaatactgttacgtggtgggtctctgtggcaggcttcctctcccccccatatggataattgtatactaaattcaccataaggtgaaaaatggatattgagttcccttcatgaaaagttatataaaatatatatttagcataaacttctccagagttgtcctttattaagtttctttacagaaactttaattggtgccatgattcttgtgggggaaagaatcataagagccatcaacttttttcctttcattttagcatattccaagccctgccaagaaagtaccaagactccctgccacagcagcagaacctgaagcagctgtcattagtaatggggaacattaagatactctgtgaggtgcaagacttcagggtggggtgggcatggggtgggggtatgggaacagttggaggaatgggatatctggggataattttaaaggattacatgttatgtaaatttttatgtgactgacatggagcctggatgactatcgtgtacttgggaaagtctctttgctctatttgctgacatgcttcctgttgtggtctggccaatgccaaatgtactcgaatgatgttaagggctctgtaaaacttcatacctctttggccatttgtatgcatgatgtttggtttttaaacatggtataatgaattgtgtacttctgtcagaagaaagcagaggtactaatctccaattaaaaaattttttaacatgtaagaattttgtactttgaacaacaagattacagaaagtacctgtggtttttggaaaacatttctagcttggggaatgtgacaacattccccagtgtggtaaaattggggtaaaatgtggtaaaatgtgatacgcacaaaccctttgaaaatagcaaaacaaacatgccctttttctaaaattgataaatcctaaagaggaagaaaagagctgggacaataaaacactggctctggaatctggaatgttaagtccaggccagcagtgacaaaagttattgtaatgacctctgaacagagaaacactgccattgaagaggcttctggtatagaaaacatggtacattcaggagctgtgaatatagctctaggtgtgctc

SEQ ID NO: 4371 - DNA, 1181 bp, Homo sapiens
aatagagacggggttttgccatgttggttaggctggtctcgaactcctgacctcaggtgatccacccacctcggcctcccaaagtgctgggattacaggtgtgagccactgcacctggcctatttacatcttatttcttagcaacgtttagagtttcttttatctccatgcatttcctgtgtatgcctacatttttgtgtaattggaaatggactttttctttccaattatatacttctttatagtttttaaaagtggctttatataggtgatactgatagctatatatttatcttgtaaaagaccaatttaagttgttcattagagccaataatttgtcagctgattctcatgaggtgtatataaccaatctgatttgcgttcttctgaaactgcttatcaaatagatggccattagcccctaaatggcaaaatccactggacagttttctgtattgtactcagtaaggtctgacatattttgcatgtttgaccgctccttcatttttaaaatagtttttttattgccttcagtgaaacatgctcttggttttcctcctatctcatttgctgttctgtcatatttctgtttgctgttcttcctctcacttttcttcaaatattggtgtacttttttttcttttctagactccatttttgtttaaccacactctccctagatgattttatcaaattccatggatttaaatatatttgtaagcacattcaaaattagtttgatttcaaccttgtgttttgtatctgaatgataagcatcagcattataactaaacagactgtgtggttaagattatggacagtttttccctctagttatctaattttcataattacccccagaacgtgagaacattatttttatgatcagaaagtattttaagaaactagttgagtggactctaatatggaaccatcaacatgtatcaaattccacttaattataagcaaattcattatgaaattatatttaaaaaggcatttcatgattacatttgttatttaagaaaatgttatttaaagaaatttacataagtttcattatacatgtattttagcttactcattctggaaatggaaaacttagatactaggcaagaaggctttagattttttttatgagatattttaatagaccagtacttaggtcttaatatttgtgt

SEQ ID NO: 4372 - DNA, 1197 bp, Homo sapiens
atgctttactttcttttggatagaatacctacacaaattatttggaattatttggaatttttctacatagtaggtttatctcttctaccccatttatttgttgatttattcaattatttacttatgtcagtagagactcatggatatttattttatactttgttttttgtttgttttgttgttgtttgttgttgttgttgtttttggagatgcagttttgccatattgctcctagtctccagggatcctcccgggccccagggatccttctgcctcagcctaccaagtagctaggattacaggtgtgtgccatcaagcctggttcatactttggattataattcaatactctgttattttgttgcttaaattgttccatttttggcataggatgttcttttaattagctcctacgtccctttgacatagcctcatcgttgtggggttttaggtgattttttttcttttggcacttcctaactctggcactgtaagaggctccacactcatcttgggtatttcttgccgcagacaggatcagccttttgttgaagaagccctggtcattggaaaatggaatcagaaaccaagatctgcgtgccctgtgtgccactggggtattattgcttctagacctcagctgatagagcgaactctgtgtgtgcacgtgtgcatgtgtgtgtgtgtgtgctggcccatgtatatacatataaaaacatttttatatgtaatcctctgtatattaaactaaatatgagttcatactgaggtcttcagctctaattcattcccataaggatcattctagcgtttttacccttgcttatctgtaatctctcagtaaaacagtgagaaatctggctcacgctatccaccatccatttactcaattgtttaattttagtatacatatataatggtttcaaaattaatccatacccctgtgggagacaattcttacgtacagtttcctttacctttagtcttacagacttccctttcttcaagagttacttagttctgcactttataccccaatacttttctgggaagttgttgtatgcaatgtaatatgtttagattatttataatatatttagattgcatttcatgctaggcttccccgactttctagttaattttttttaatttgcatacattgagatttattcgttgtgctataaagttctttgggtt

SEQ ID NO: 4373 - DNA, 1176 bp, Homo sapiens
ttcctggttctgaaatttatctatgtttcctttttaccagattgccccagaccatgtagttccagctccagaagagtgctatgtgtatagtccattgggctctgcttataaacttcaaagttacactgaaggatacggtaaaaacaccagtttagtaaccatgtgagtgaaactgctttttggagcatgacttaaactgtatatggatgaaaattactggttttttaaatttttgtctcaattaaaatgtttgaagagtgaaactccatttttttactgctattactctgtgttttcagttttatgatttggaataccatgatgggaacatctatactaagcattccttggggcataaaacaggtaatactaatttttcagcacactttttgcctaaatgtttttctctttatattgtaagttttataacagaggttttaataaatctacataaaattcattaaagaaaatagatggttatatttagtttttcatgagttgtcaagtttttatcatgattgtttagggtaaaataattgcatatgaatttatgcttacatgatgatatatgctgttttatacttttatttttaaacaggctggatttactactggaatgtgtgtcatcatactgatgggccttttaacactttattgctgctacagagtagtgaaatcacggactatgatgtgtaagaatttgacacagtgacaatagattatgggtattaataagcatttccctttgaggcagatcactagtgtgtatatgctacatgtgtgtcagctgtctactttgtacctaaagatttacttctgtaattcatcgctttcagctaaattgatttgctaataatatttagtggctgcttttgaaattcagagaagctgggagttatttgcagagtgcattcactttggtgctagtttcttcataagaatcatttaaaaactcatatttataaaataatgtctttgccaaaactaaattgagaattctgtgcttcctgtcagttaatggtgacttgttttgacctattcataccaaaagatctaaatgttagaatctgctaaaagtagaaattataactagaaaaatatgaaaatgtaagcaactccctagtaatgaatatttgaagttgtgtgaacaccttacctctactcgtatctacaaat

SEQ ID NO: 4374 - DNA, 1176 bp, Homo sapiens
atagtaatatcaaagtagatttcagagaatgttaccagtggtaaagaagggcatttcctaatgataaaagggtcaatttatcaaaaggatctaccaaataacatagtttcaaaacacaacagggtaaaaactgcaaggagaagtaaatccacagttatattcagggatttcaatatccctttttgaacaatgatagaagtagtagtcagaaaatcagtaaggatatggaagatttgaacactatcaaccaaattcacgtaatgaccatttatgtaacactctaccagcagcagcagtgctttttaagtgcacacagaatattgatttcaagatttataaggctaaagtcatcacgacagtgtggtggtagcatataaataagcaaattgatcagtggaacaaatagagtaggagtcatcctaccttctgttttcataaagtactgttagaacacagccacccctgtttgtttatgtattttctatggttgcttttgtgtcgtaacagtagattggtagctccaatagagaccttatggctcacaaacctagaatatttacctcctacctcatacatgaaaagcttgcccaccctggaattgagagtagccaaatagacccacacctgtgaacaactgatttttaagaaagacgcaaaggcaattcacttgagaaaggataattttttcagcaaatagttttgaaacaattatccgtatatacaaaatgaactcaaatttcagcttgacaccacacataaatattaacttgaaataactgagacctaaatgaccctaaaactataaaacttgtaggaaaaaacctttttgactttatttttattttttatatttttttttttttgagaaggagtctcattttgtcacccaggctggagtgcagtggtgctatctctgctcacttgcagcctcctctgcctcccgggttcaagcagttctcttgcctcagcttcctgtgtagctgggattacagatgtgcaccaccacacccggctaatttttaaaatattttagtagagacagggtttcaccatatacccaggctggtctcgaacttctgaactcaggtgatctacccacttcggcctcccaaagtgatgggattacaagtgtgagctactgcgtcgggccctttatgattttagattaagcaaaga

SEQ ID NO: 4375 - DNA, 1312 bp, Homo sapiens
catttaggctgggggcagtggctcagacatgtaatctcaacactttgggaggctgaagtgggatgatcgcttgagcccaggagtctgagaccagcctgggccacatagtgagaccctgtttctaccaaaaaaatttaacaattagctgggtgtgatggtgcatgctagtagccccagctacttgggaggctgaggtgggaggatcacttgatcatcccagaagttcaaggttgcagtgagctatgattgtgccactgtattccagagtatgtgacagactgagaccctgtctggaaaaaaaaagatcaccagacatttaaacaaattatatgtatatagttttgcagcctgtgccttaaggtatcagacaggcgttagttactaacattaaaatgcatctcagcctcatttggtccatccagtgataccatcagttgtgtcagatgaatactggcattatttttctaggctcagaggccttgttgattgtaggatgtactgttgatttctttttttttttttgagacggagtctcgctctgtcgcccaggctggagtgcagtggcgcaatcttggcttactgcaggctccgcctcccggattcacgccattctcctgcctcagcttcctgaatagctgggactataggtgcccgccaccaagcctggctaattttttttgtatttttttttttttagtagagacggggtttcaccgtgttagccaggatggtctcgatctcctgacctcgtgatctgccctcctcggcctcccaaagtgctgggattacaggcgtgagccaccgcgcccagcctactgttgacttctaaacagtgcaggtggtggaggaacgcttgtatatgaagtttgcactttagtatcaggctacatcctgattctgatatgtgagggagtgcatcataggatcaaggaaatgatggtatgtgaggaaatggaggtgagagggattaggtgatttgtccaagatattggttagcaattagtggatcttttgccctaaatctggttctcttcctgatataaatcctttgacttacagaacagttcatttataagtgtgactagactctactgtgtcccttaaaatgtaaataggttcaacaaaatacccaagaagaggaagagaaaaatccttatacccgggataaggtgatggatcacacttctaagctgatttagctaccacagatccttacagactttgagacttactaattcaattttgaaaaaattgtttttatgttttaaaggacttaagtgctttattaataggctctcaaagagagttcatt

SEQ ID NO: 4376 - DNA, 1204 bp, Homo sapiens
gggaggccgagccaggtggatcagtttaggtcaggagttcaagaccagcctggccaacatggtgaaaccccgtctctactaaaaatacaaaaaattagccaggcgtggtggtgggcgcctgtcatcccagctacttgggaggctgaggcaggagaatcgcttgaaccctggaggtggaggttgcggtgagccgagatcaagccattgcactccagcctgggcaacaagagtgagactccgtctcaaaaaaaacaacaataaaataaaaataaataaaactacaaaaattaaccaggtgtggtggtgggcacctgtaatcccagctacttgggaggctgaggcaggagaatcgcttgaacccaggcagcagaggttgcagtgagccgagatcacaccattgcactccaacctgggcaacagagcaagcctccatctcaaagaaaaataaatgataataataataggaaaggtgtccaacagtttatgaagctgttcattgataacttctttaaaaccccacacaaaaaaataggatggtccgagtgcagtgatgttttcaactaattgatgacaactggttagagatttctttgttccttctccactcccactgcttcacttgaccagccttaaaaaaaagaaaatgaaagaagaaaaccacaaaaaaaagagaaacaacctaaatgtctataataaattgacaaagtaaattatattacatccatagagtggaatatgaagccattaacaatggtatttattaaaagatggtcacatgaaaaaatgctcacagcatactattaagaaaaatgggctgggcgcggtggctcacgcctgtaatcccagcactttgggaggccaaggcaggcagatcacaaggtcaggagtttaagaccagcctaaccaacatggtgaaaccccatctctactaaaaatacaaaaattagccgggtgtggtggtgtgcacctgtaataccagctgctcaggaggctgtggcaggagaatagcttaaacccgggagacagaggttgcagtgagccaagattgagccactgcattccagcctgggcaacagagtgagactcagtctcaaaaaaaaaaaaaaaaaagaaagaaaaaaagaaaaatgagaggtagattacaaaactgtatgtataatatcctatttttgtcaaataaaaaagtataatcaaaggaaaaatt

SEQ ID NO: 4377 - DNA, 1152 bp, Homo sapiens
ttgcaaagaatatgtgtgtagttcttaatgtgctacctagaatcactgttgtaaacctcctgggtgcttagaattattacaaatcatttattataatacaaatttttctatcttgctagctctatcagcaacatcctcagatacagaaggcatacttcttttgctgccatgtggcttcttgttttttgtttttattaaaagtaatcacaaaaactgcaattacttttgcaccaacctaataattagacaattaaaatttcaaaggaagggggtaaaattaaagaactatgttgcgacctctcttagttctctgtgtgtaggacttttcaggtgcccaatgtcctcttgactgaccactcctcatgaagatactggtaaactttgtgctagtggattgataaccgctctccgagttcatgctcttctgaggtctagaaagaaatgggtgtctctgtcccaacctggttagttattctgtctctaaaaacacaattaagtcaatgttaagactaagttcattaagctgctcgtgtttttatgccttgacagtttgttaatggtggttgcataagttttacagaactagtttcgtcttgttgcccaggctggagggcaatggtgtgacctcagctcaccgcaacctccgcctcctgggttcaagcgattctcctgcctcagcctcccaagtagctgggattacaggcatgcgccaccatgcctggcttattttgtatttttagtagagacagggtttctccatgttggtctggctggtctcgaactcctgacctcaggtgatctgcccgccttgacctcccaaagtgcagggattacaggcatgagccaccgcggccagcctgtagtcagctctttaaggcaacaatttattggctcaggtgactggcacaagccagttttcttttgttcatttcatccattgtggcaaggattagcaacagtactaaatgagagcttgtcaacaccttctgtaaaaacaccaccaggagcaggagagctgcttctcccatgtggctcaaacacttaattccagcttctctacaccctgcatgatggtatcatccactattgtgtaaatctgtatattttctaaataaatacactgttcaaacttatgctaaaacaaagaacatt

SEQ ID NO: 4378 - DNA, 1199 bp, Homo sapiens
aaattaaataaaaaataggcttataaaaatgtaatgctctctcttattaaaatggcattgataagccccctgggttacaatattgttgaggtccttgtgaggacatgatagcatcagttgaactgattaggagcacgtcggattgccaggcatttttctttagaaataatctagaagctgaaatagatgtctgatcatagatttgcctttcttctttttgcttacttgaaagaaaatgaaagtaagtgtctaatttctaggagacattaaatatagttctcatatatctggcaaagattgatttgagtataggaaaccaaatggaaatgcattgtcctcattattcaccttacacttaccgttttttatataaaaaggaaaaaaacaccaaatcataccaaatggattcttgagcaaagtgaaattagttaattgcttgtcttgacagcatttggataacaagcagtagaaaaggtatggtaaggaacttacttggaacaagctacaagcctttctggtccttgggagaaaagatgctcatgtaatttaaaacaatataaaaagcagcaaaattttgttcttgttatctggaaaagaaaggttactttttttttttgctatttactcacttatttgagctactgttgactattgaatatttgctgaaaaggcaaaagttcaacaaccctaatgtatgaatacatatgtacctatataacgagacctctgtgtgccataaaattagaaaggtgggtgaggggtacagtcattgtcctagctacatatgtcaatgtaacatttatttcttctcagtgctgacagtagagtaaaattatgggatgtgagaagagcatcaggatgtttgattactcttgatcaacataatgggaaaaagtcacaagctgttgaatcaggtaaggaagaacgcattaataaatatgacaatgatagtatttttttacattgaaaatttttaattgaagccacataataaacgcatattgacaaattgcaaactttatgatttttcaaaaggcattcatcgtatatcactttcttaatttacataaactaaattatgattctctttctttaagatacaaataaaaatggcagtttcatttgcccccaaattttcaaaagtagaaatttttgtgaattaacttgctttacttgttttgtttttgctccattgaggc

SEQ ID NO: 4379 - DNA, 1167 bp, Homo sapiens
aataggagtggtgagagagggcatccctgtcttgtgccagttttcaaagggaatgtttccagtttttgtccattcagtatgatattggctgtgggtgtgtcatagatagctcttattattttgagatacgtcccatcaatacctaatttattgagagtttttagcatgaaggttgttgaatgttgtcaaaggccttttctgcatctattgagataatgtggtttttgttgttggttctgtttatatgctggattacgtgtattgttttttgtatgttgaaccagccttgcatcccagggatgaagcccacttgatcatggtggataagctttttgatgtgctgctggattcggtttgccagtattttattgaggttttttgcatcgatgttcatcagggatgttggtgtaaaattctctttttttgttgtgtctctgccaggctttgttatcaggatgatgctggcctcatcaaatgagttagggaggattccctcattttctattgattggaatagtttcagaggaaatggtaccagctcctccttgtacctctggtagaattcggctgtgaattcgtctggtcctggactgtttttggttggtaagctgttaattattgcctcaatttcagagcctgttattggtctattcagagattcagcttcttcatcgtttagtcttggaaggatgtatgtgtcaaggaatttatccatttcttgtagattttctagtttattttcgtagaggtgtttatagtattctatgatggtagtttgtatttctgtgggattggtggtgatatcccctttatcattttttgttgtgtctgttttattcttctttgttttcttctttgttagtcttgctagtggtctatcaattttgttgatcttttcagaaaaccaactcctggattcattgattttttgaaggcttttttgtgtctctatctccttcagttctgctctgatcttagttatttcttaccttctgctagcttttgaatgtgtttgctcttgcttctctagttcttttaattgtgatgttagggtgtcaattttagatctttcttgctttctcttgtgggcatctagtgctataaatttccgtctacacactgctttaaatgtgtcctggagattctggtatgttgtgtctttgttct

SEQ ID NO: 4380 - DNA, 1214 bp, Homo sapiens
agttaactggttgtgtgaggaaactttttcaaaatttgattaaccacatagtcttttctcctgtttttttcctctgtgttctccacccgcctcccccagccccagttttcataagactgctgtgaagatgtttgatataaaggcttgggctgagtatgttgtggaatgggctgcaaaggacccctatggcttccttacaaccgttattttggcccttactccactgttcctagcaagtgctgtactgtcttggaaattggccaagatgattgaggccagggagaaggagcaaaagaagaagcaaaaacgccaagaaaacattgcaaaagctaaacgactaaaaaaggattgaaggactgaacaggctttgcaaccagaggaaaatcatttggaaaattacacagctttggaagaatccactaaagtttcttctttggatttcttgacagtatgatttagtaaatgaaatttgaccaaatggaagaatcatgttagttctgacctcaatactatagtaacttttaggcgtgggtgtagaagtttataggtttctattgacagttattgtaaattagcatttactgtggtacaaattctttataactgacttagtcatttgccgcttagcagtttatatactgaaatgaaaacatcttgtggggaaaagtgactttagattatgaactcaattcaaatgaactctatttaaaatggggtcctattttggacaaaggaaattaagaatgtaaaagtcagaacagtcttgaggtaaaaagtgtgctttggcttaaaagggatacagtatattaattacatcttttattattattgtttatttcttagaatcatttctggctttctcaaaacaaaataatattaatgagtacttctatttgctgcatttttcttattacagcctttgagacagctggtaattataagtcattttccattttttaaaacataattttataaagaattctcttatctcgactatgtagaataccacctactggacagaacaatttttgtactcacaaacactgccattttcttagagatggcttgagaggagtaacactatggtttaaagcttgcagtaaaaatgccaaacactgtagtaccttggaacccagtttattcttgtgctaagcagaactgtaaaatagttaaaatgtcttatcaagtaattcgccgattacaaagacaccatt

SEQ ID NO: 4381 - DNA, 1099 bp, Homo sapiens
ccgcggcgcagcccttgtgccccgccgcccgagttttgtttgcgctgtgtggtcaggtcgtggtgccccgggcgagccgcggtcggcagttgcggatttgccgctcgcagccaaaggggcgagcgggctgcaggagcgcgaggcagagggctcggcggccgctcccgcgtccccgcggcgcggcagcccggcacgacccagcactttgttctcattttcaggtttttttgtgcccctttcagttttctgtcaccctccgaaaaggagaaaccaaacaaaagagtctctttcttttcagggcttgtaaagtagaatatatttgacaaaggcgagagaaggacttgtgatttagagctgcacagccttcctttctctgacagatcctgagagttttctcaaataccttagtttaaaagtgtctcctgttccccctcccctaaaatgttctttttcccctgtccagatctttttcagccatagcgatgggaatgtttgagccagactgaaaagaacaatgctgtagtgaaacttcccatttttttctcctgattgcaaatggcatattttctgaccccctcccatgttagtgtacttgaaattgtagcatggtgaacccggcaccgaatgaatggggatagatttggacgcatctctatctctttgattgttaacttaatcctttttctctttctgtagtcagttccttttatccttcttttctttggaagtggggtgggggtctggatagggtccccaagaaagaattaagatttgttttaatcctgtctggttaatttgaattctaatgccatctgcaaacgtggttttctgcatggtcatttatttccaaaggcagcccccagtgttgccttttctatgttgggcactctttccttctgtctagagggggtttagcttttgaggctattcatctatccttttttccttaaaacaaatctaattaacattcttcctagttatacctttttttttgtttgtttgtctgtttcctgccggttagcgatggatggaagcacatctatggcttctcagtataacaaactagagtctgcgaatttttatggcttggctggcaatg

SEQ ID NO: 4382 - DNA, 1226 bp, Homo sapiens
tgaacaatgagaacacatggacacggggaggggaacatcacacaccggggcctgttggggagcgtggggggttaggggagggatagcattaggagaaacacctaatgtagatgacgggttgatgggtgcagcacaccaccatggcatgtgtatacctatgtgcatgttctgcacatgtattccagaacttacagtaaaaataaataaatagttaaaacttagcattacagttaaatacatgaatttgcacttttgggggaaattattgttgtagacattaaatttcctggtctatgatgtatagggtacatgtcttattcctaaaatgttgagttgtatatagagtgaatttatgttttatctatctactagttatctttgcttgcagtcttatgagtaagtcaggaagatttctgtatcacatgagcagatttctaatttttattgctcagttaattttttttcttacattatagaattttagagttaaggaaatggaggcccgaagagcttaagttatttgctggaaaatgcatagtttttccagacagtgcctagaactgaaatcttctgaattctaatccatcctctcaactggtatgtagactttgggccatttttttttttctccagtgcatttccctcttgcccagtactatcaagaagtaagttaattctaatactagcttaccccaaaaaaataaaaataaaaaccccaacttaatgtatccattcatttttctgttgcttataacagaataccagaaattgagtaatttataaagaaaaggaagttatttcttatagttcttgagactgagaagtccaaggttgagaggctgcatcttgtgggagccttcttgctggtggggactctgtgggcacagggcgttgcgtggtaagggagctgagcatgctaacacgctagcttaggtatctcttcctcttcttataaagacaccagttccctcccatgataacccattaatccattaatacattaatccaagaatggattaatacattcaccagggcagagccctcatggtccattcacctcttaaaaggccccacctttcaatactgccacaatggggtttaaatttcaacatgagttttggagggaacaagtattcaaattttcttaaaacttgagaaaacataattgatgtatttatacatttgctattagatttttctccacttgaaccaaaatctgtatctat

SEQ ID NO: 4383 - DNA, 1197 bp, Homo sapiens
ttcagttcatatatataaagttacctagttgcactgtttttcttctttatcatctgaaggcatacatcatggtatccagcagagaagtgatgaccactgggtgtggtttaggtgatcctccagatgtgtgagcaattgtagctggccataagaagatttcctggctgcccataagctgccattttgtgaggcccttcagctaactatttctccactgcagcagtagatcagttcagaagaaaactgtacattcccagcaagaatgccaacagaaacaaatggttgctatttaaaataaatagtggttaaacgttcttttttcatatttgcatcagaaagggatacatacttcatgctgagaaaacactgccatcccagtgtttagatatgacacagcatatactataaaattattatttttctttcactaacgtataatggtttttttattttggaaaaagggaagctggtctcaatataaagattatctttacatcattaaagtcatgctttagtgaagcaaaacaaaaataatactaatttaagaactgccacacaacttctttgcccctgccccaacatataaacctgatttctctctgagacctagtaccttctcttcaaatcattcacttttaggattttcctacaagtgagggatattgggtctgtgaacgtaaagtgattattttaaagacatggtcagccatttccaacgtttgattcatctgtaggtctgcttctattgactttgttctcttgattatgggccacattttccagcttctttgtgtgttttaaacttttgtattatgtgtacttttaccttacacacaagcacataagccatgtaaagtccctgttttggtgaggttgcaatttttgagcctcaaattctgacaggaagccccagtgaagtagaactcattagcaaaaagccattgtctgaaatggcaagcagcacagtacaaataccagctaccaagaggattggttctttattatagcaagttcatgttcctttcaggcatttcactgaataacaattcataatgaccttattcttaaaggtttctcacaggcacattactttacaggattttctagcctagctcatgtcctatgatggttaacaatgtaaacactggttgtaaaagtcaaaataaggcaggacctctgggcagcctcctcgtcagt

SEQ ID NO: 4384 - DNA, 1156 bp, Homo sapiens
ggcaaactcaagagtaaaaagtgtcaaaaaaagaattgagaattttattctgtactttttaaaatttaagagccagggagttgcatcatgaaagcctttgtataataatggaaattttatatgggtaagcattttcaaacacatattagtagatacgttttttaaatttctattttcacattgatcagtgttactttgcttaatacttaggtagcccttatgtccactaaagtaaatgcttatgttgtagaagcatcgaacatcaaccaatgtcatggcacagcaccaaagattgcaaatacctcactatggtgcgcttagaaattttcaaattgataacctatagatacggctgcaggtgaattcatgatagtgaaatcagctaagtatacttaacctcacaggctagaaaggtttactgattcttgtttcacctggcacccaatgtggataccctcagtaagactcagggagccttataactcctcttaacatatgcttacccatgcttaaattctagggaagctgtatccacagccctctgcattgcagccatgagagctctcacgctttcaacccttccataacctaatttagtcatttgggcctctcaaaaggaaatgcttttgtttaaataggtcagtcagttactgggagaaaaaatacagagccagtaggtttttagggatttgttttgcctttgctgctagttttttgaaaatattcttcgattatcaagattttaaaaatcggtttttaatataaagcttttttaaaaacgaggctggcacaagtgcagtggtgtttctttactcccactgcttgacttgactagccttgaaaaaataacagtaaaataaaatattaaaaaataattagaaaatgctacaaaggcaatgaccttattccattgagtaagatagttaaaaatgatagtaattgtagtgaaatagttaattacttgtaagttttattactgttaattgtagagattataaattggctcattaggtttctgaatggtgacacaataatgactgagaagagcaaaagtcagtcctcgttaactaatgtagtatgcaaattaaaatattttaatgatcagtaattttccccccagaaatgatgttggcatttctaagtaaatttcccataa

SEQ ID NO: 4385 - DNA, 1157 bp, Homo sapiens
ctaattttattgaccttctcaaaaaaccaattttcattgcttttcccttatttttatttttttattttgtactgatttaacttctttgttgttattattatttcctcaacttactgtgggttttatttgctctttttcatatttcttatgatagaagctgaggttattaatttgagagctttcttttcttttaaaataggcttttaggccgggcgcagtggctcacgcctgtaatcccagcactttgggaggctgaggcgggcagatcacgaggtcaggagatcgagaccatcctggccaacatggtgaaaccccatctctactaaaaatacaaaaattagttgggtatggtggcatgcacctgtagtcccagctactcgggaggctgaagcaggagaatcacttgaacccgggaggcagaggttgcagtgagccgagatagtgccactgcactccagcctaacgacagagcgagattccgtctcaaaaaaaaaaaaaatagatttttagtgctctgaattctcatctgattactgcttttgcttcatcccagaaatcttgatgttgcatgtcaattgtttgggggatgaaaaaaaaaaaaagacaaattttgatgttaatgtttttatttctattcagttataataatttcctattttcatattggttgcttctttgacccattgattatttagatgtatgtttttggtatccaaatagttgcaaagatttctacatacctttctatttttcaatttaatgccattgttagaccatatttaatataatcaatatgattgcattgaaagctatgttattgatttatatttttctgggggagggagggttgggagcagaggatcttgctccgttgcccaggctgggtgcagtgttgatatcatagctcactgcagccttgaactcctggcctcaaacaaccctttcaccttagcctcctaaagtggtagaattacaggaatgagtcaccaggcttggccttgatttatctttcttttcatcctgtttttctgttcctgttttcttcttttcccactttcttggattgtgtgtgttgttgttgttgtctttgttgttgttgaggcagggtcttgccttgttacccaggctggcatgcagtggtatgatctcagcttact

SEQ ID NO: 4386 - DNA, 1202 bp, Homo sapiens
ggagtgcagtggcgggatctcggctcactgcaagctccgcctcccgggttcacgccattctcctgcctcagcctcccaagtagctgggactacaggcgcccgccactacgcccggctaattttttgtatttttagtagagacggggtttcacccttttagccgggatggtctcgatctcctgacctcgtgatccgcccgcctcggcctcccaaagtgctgggattacaggcgtgagccaccgcgcccggcccttccatgtaaattttacaatttgcttgtcaagtcccataaagagaaacaaaaactttcaggattttggttaagattcagtagctcaacttgggggagaattaacgtctttacaatgtgggtctttcagtccatgaatatgaagtatctttccatttatttaggtctgccttagaacttctctgttaataagttattgattaagcagtataaaatgcagaagttccatatgaataaagatattgaggaggggtattctgatttgcgtttgatgtggggtagacatcctcatcattctttattgcactgtctacctccttaaaattgcccagttttgaatcttatgccaccagactctaatcctcttccattctttgcaggaatcatctagcaagattgttttactcaccctcattccttgaagatttttagctcctggctcattgccctttgcagtactactatcataattcttagtgattttaatatccttatagatgatccaataacttggcctctctttttcttgaccttctttcccctagtgattatgttctctcttgtcttagctacttattcctatggccattctttcactttgtccctgtctgtacctgtggtgctacaccatagaagaaaacatacaaccatgctctggttttactttaaactcatgatactaatctcaggtgagcctgtaatgctactactgaataatcctgtaactttatcctctcccatttttttatatatctgttttatacatctcttttcctgtgctcttaaactcgcagtactttcttcccatcctttcatagctgataaccgtagttaccattttacggagaaaagagaaacaatccacatagaatttctacaagttcctagcaacacgtctacttacctacctgcatctacactcttgatattctgatgaccctcccattaaaat

SEQ ID NO: 4387 - DNA, 1099 bp, Homo sapiens
tgcataccttaattactcattgtaggagaaagagcacaataaagaaccagattcaagtgtgagcaaagaagtagatgacaaggatgcaccaaggactgaggaaaacaaaatacagcacaatgggaattgtcagctgaatgaagaaaacctctctaccaaaacagaagcagtataggaccgacaagtgtacctctgcactcaatgctggaatcaaatccaaagcttttaattctctcaacaagatgtaaacaggaaagaaatctagttgagcatgaagataggatctaacagcttttccagttgttagatgactttgtggccatcttgttattgagtaagaaaataaagcatggacatcatgaaaataacagatgttacccaaactcatcttctaaaatctgtgcatttccatggtggctgacacacttgtcatgtggtctgttagtgtttgccaagaaccattgcaaataaattgaacatcaaagatccaagtttgtactatccctaaagactggagataagcattggaggctcttttaaaaaatgctagttactgaattttgtattgttttacttttttttttatttcaatatatacagtttgatgatgtgcttgaaattggtgcaaatatatacacacccttgtaagtgcaaagtatgtaagaagttttaacatttacttcacaggacttgtgattgtgttaaattctcactattgtgttttcttttgctcactgtttaggacaatttttctttaaaatagttttgcagattaaaattgcttaaataagtggattaaaaaactgacaatgcatgctactgttctctttcaaaaggaagagcaaccgtgttgaatactaataatgatgaattagtattcagtgtttagaatcattgggactacccacaaagtgagcatttctttttaaattttcttgacatttccaagcttattatgaataatattgcagtgtgtcttgtcagctgtaggtggcaaaggtgcccttataaaaaaggaaactggcttttcaaaatgggctatgggagcacaagctgaagctttagtgccttctacaatgtggtatactgttttctagaa

SEQ ID NO: 4388 - DNA, 1226 bp, Homo sapiens
gttctagagtaactggtttgtttttttcttcttttccatttatttatttagagacagagtttcaccattgttgcttaggctacagtccagtggtgcaatcttggctcaccgcaacctccacctcctgggttcaagcgattctcctgccccagcctcctgagttgctgggattacaggcatatgccaccacgcctggctaattttgtatttttagtagagacagggtttctccatgtttgtcaggctggtcttgaactcctgacctcaggtgatccgcctgccttggcctcccatagtgctgggattgcaggtgtgagccactgcacccagccatggtttgttttttcttaggaacattgtttttcatgcatctcatcctgtttcttcttcacgttgtccatgaccacacagccacaaggcctcgctatagtgcctagaatttcgtatcatggatttttgttgttgttttgattctttaaaaaaattaaattcagtcttgtgctcatcttttttaaattttagaagattcctttttcctgctgatttcttccctcgtagaaaaaaatgcccccctttttggggactgctgtaggtgctttttgggacacattagggagcaaataatcataataggcactcagtgaatgttgaagccaatttcatgtggtcttctcagcaatgagcaatggaagttgtttacactttgttgcagctacctgaaccttggggctgtgtgagaacgttgggctgggcccaaggtagggcttgagtggtggaatcagctgtatctaccccagttactctgtgcggcccaaccaggcccaatattctgaagcccagtgtgagccctctgcttccttctcttaggacagtgctcttcagggctccctggtggtcccgccccatcagtgctccagatgtggccagatgtgcagaaaacccaatcctgcctctgggatgcaggtcctgccatcctagtattgtctttgaaaagctttgggccttccttcacaagtgagagaggtctacagcttctcattgttgtacatcaggtacatcattcttgttagcctaggttataccacacacctaaagagcaccaaatctttctggcttaaaacagcattatgttgcctatcacaggtccacaggggactcaggctccctgaacagccgccatttccaaccttgctggtaaccgtgccagagtgaaagagctctgggaa

SEQ ID NO: 4389 - DNA, 1197 bp, Homo sapiens
atggagtcctggtgaggtcagggctatatgtctccccagcagctggctcaggagcacttttattggctggatgccctcactggaattaccagtgcaaacggtcattcatacgtcaatgtcatcccaccctcccatggtgacacagaccttctcctactgaaaccacatgctgctttagtccaaaataagctctgaaaaagtaataaacattattttatttcattttatttcattttattttattttattttattttattttattttattttatttttattttgagacagagtctcgctctgttgccaggctggagtgcagtggcatgatctcagctcactgcaacctccacctcctgggttcaagtgattctcctgcctcagcctcccgagtagctgggattacaggtacacgccaccacactcagctaatttttgtatttttagtagacatgggatttcatcatgttggccaggatggtctcgatctcttgacctcgtgatccgcccacctcagcctcccaaagtgctgggataacccttacctgtttctcctttgcagggcagatagaacatgataattggagatgcatgaaacgtgattaatctctctgtataatcaggacttgcaacacacttaattttttttttaatagtgaaaattttattggagatcattgaagtgaagactgataaacacttgccctgggtgggttacaaccaacttttctttttttttctaagttttttaaattatattttaagttcttggatacatgtgtaaaacgtgcaggtttgttacataggtatacatgtgccatggtggtttcctgcacccatcaccccgtcatctacattaggtatttctcctaatgctatccctcccctagcaccccaactccccaacaggccccagtgtgtgatgttcccctcccagcgtccatgcaacacacttaatttctattgcatagtactataggggttacagaaagcataattttaagataatggatttatattctatgggcttctttctaaaaccttataattcaaatatgaatataagacaaatcccctccctgagctcaggtcattttaagagataacacctactatggaccacatgttcttcgaggcacaagagatacaaagatggataatgcatgagcctgcccttcttcagattctatgaaaccaga

SEQ ID NO: 4390 - DNA, 1547 bp, Homo sapiens
caggccagtctgggcgcagtggctcatgcctgtaatcccagcgggcgggtggatcacaaggttaggagatcgagaccatcctggccaacgcagtaaaaccctgtctctactaaaaatacaaaaaattagccgggcatggtggcgggcgcctgtagtcccagctactggaggcggaggttgcagtgagctgagatcacgccattgcactccagcctgggtgacagagcgagactcaaaaaaaaaagaaagaaataaactgactttttcaactaaaatctttcttgggggatatggtgtcattaagattttgctatgggagaatgtctttctacctctccttcatcatagctctgtgtctccttttcaaacattttattcaccctattgaaattcccattgcagaataattgtgtgcccaagaagatgctgcagctggttggtgtcactgccatgtttattgcaagcaaatatgaagaaatgtaccctccagaaattggtgactttgcttttgtgactgacaacacttatactaagcaccaaatcagacagatggaaatgaagattctaagagctttaaactttggtctgggtcggcctctacctttgcacttccttcggagagcatctaagattggagaggtacaggtttcttgagaaacctctccgtatgggtacattagggggaacactgctgctgaccaagcacgttgaattcaactgacctgtattatacctaactacatggggaagggataaagttgttctttatttctagtcaggctgcatgttaatattaggactttccatgggcatttgagagtttgtagacaaacatttgtagttaaagatacatatgggcatgcaggttagtgccaaaggaaaattttctgaaagaaactcagtaacatgggttttgtttcaggttgatgtcgagcaacatactttggccaaatacctgatggaactaactatgttggactatgacatggtgcactttcctccttctcaaattgcagcaggagctttttgcttagcactgaaaattctggataatggtgaatgggtaagctgtgtcccacagaactcctaagcttttaaattttaaagagtgactaaatacagaacttttgttattaaaaggcaattcaagtggttcataaatatgggatctactgaaggaatagttaaaaaagatgtcttagaatgtttccacatctttttgtttttgagacaaggtctcgctctgtcactcaggctggagtgcagtggtgcagtcttggcccactgcaacatcagcctccagagtagctgggattacaggtgtctgtctagtttttaaatttttttcatgtcagatgggtaatatgcccacattgtaacaaggtttgagggtggcacgtttcacatgttcacatgaacaccaaatcatcacacttatgaactacaaaagagtcgcccaccagcctgggcaacatagcaaatcctcatctttacaaaaaatatataaaatatatatatatatatatatatatatatatatacaggca

SEQ ID NO: 4391 - DNA, 1189 bp, Homo sapiens
tcaactgatctgcccacctcggcctcccaaagtgctgagattacaggcttgagccaccacacccagcctgcaacttgttattctgagtcaacattatttccgaaatcctctatatcgtatgatacatgtagatccagttgattcatgctcgttgattattagattccattatatgactacactgaaattttctatccaaactctcgttgataaacatttaggctgctttttaatgttttcctttaatacattccttctctggatagtcatctgtgagtcatcttgtatgcaggtttgagtttctctagagaatgtatctataattgaaacaaattatgaattgatgcttcagagtatcacaaccatcagctttaccagatatggtcaaattgctctccagaatgattggaccagtttactgtcccaccacattctcaacatcatttgcattgtcagactttaaaacgtttgtcaattacgtagattgaaaatggtatgtacttattgtttcaattaacatttctctgattactggtaaagttcatcatcttttcttacacttactggcttcttagattttctcctgttttctgttggattacgtactttttttgtcctattgatttattggacttattcatactttttgttttttttaatagagacaaggtttcactttgttgtccagtctggtatcaaactcctggccttaagcaatcctccagcatcggcctcccaaagagctgggattacaggtgtgaaccacagcaaccagccagaattcttttatattctggatattgatcctttgtcagaaatacacattgcatatatcatttcccagtctttggcaaggcttttagtttatttatggtatctttgaggtactgaaagttaaattttaatatgattgaatttgttaatttttttgaaatctttaaaggcttcctttttatgtgctttcctgtttctggattacaaagaattctgtacttgtaaaatttttaaaatattgattttaatacttagatctttattccatcaacaagtttttcctttgttgtatgatatgaggatccagtattttttttttttttcaatagagacagggtctttctatattggccaggctggtcttgaactcctggcctcaagccatcctcctgcctcagtctcccaaagtgcttgg

SEQ ID NO: 4392 - DNA, 1334 bp, Homo sapiens
aggcgtttccatacatcctctgacatctaggcagaggtttccaagcttcgatttttgttttctgtggacccacagggtcaacatcacatggaagtggccaaggctgggggcttgcatcatctgaagtaacatcctgagttgtaccatggccccttttagccattgctggagtgtctgggatgcagtcctgaggatgcacacagcagggggaccctggacttggcccaggaaacagtttttttccttctaggcctccaggcctgtgatggaagggactgccatggaggtttctgacatgccctggagacattttcccccttgtctgagtgaataacatttggctcctcgttacttatgtaaatttctgcagccagcttgaatttctcctcagaaaatgagtttttcttttctatcacatcatgaagctgcaaattttccaagcttttattttctgctttccttttaaacataagtttcaatttcaaaccatatctctgtgaatacataaaactgaatgcttttaatagcacccaagtcacctcttgaacactttgctgcttagaaatttcttccagtgcggtaacgtgaccgatcccggagaagccggcgggagccccggggagagttctcttttctttgtgaagggcagggcgccctggaatgggttcgccccgagagaggggcccgtgccttggaaagcgtcgcggttctggcggcatccggtgagctctcgctggcccttgaaaatccgggggagagggtgtaaatctcaacacattcaaaagctagcagaaggcaagaaataactaaaatcagagcagaactgaaggaaatagagacacaaaaaaacccttcaaaaaatcaatgaatccaggagctggttttttgaaaggatcaacaaaattgatagaccgctagcaagactaataaagaaaaaaagagagaagaatcaaatagacacaataaaaaatgataaaggggatatcaccaccgatcccacagaaatacaaactaccatcagagaatactacaaacacctctacacaaataaactagaaaatctagaagaaatggatacattcctcgacacatacatcctcccaagactaaaccaggaagaagttgaatctctgaatagaccaataacaggagctgaaattggggcaataatcaatagtttaccaaccaaaaagagtccaggaccagatggattcacagccgaattctaccagaggtacaaggaggaactggtaccattccttctgaaactattccaatcaatagaaaaagagggaatcctccctaactcattagatgaggccagcatcatcctg

SEQ ID NO: 4393 - DNA, 1099 bp, Homo sapiens
gtcatggtgatgcaagtcactaaatttctcagtttttgctgattgctaagggaaataacagtatttccacaatagggttcaaattcctgcaaaattacctaccccagttcatctctgctgaacatttggaaaccatgcactagccaacccaactgacttctgctaggtagaggcatttgtcttagagagagagagagcgcgggagagagtgagagagagtgagagcacaaagataacgcaggagagagagagagaaagaatgagaaagaaaaggaatgcaagagaaggagatgtaatgacagagagttctggtgagatacccagagagaaaaagagagagcagggtggggtaaggaggagaaaataaaccaacaattaggtctgcattttctcaggcagtaggcattctttagtctacataggcaaagttttccatttttgtcagtctgagtcatcaaaaagagtcttaattttctaaaacaagttggctagaagaaagtaaaaagaacaacacttgttatgagggcatgtgatattttcacatcttaattaagctccttcagtttgaaggctgcacactgacataatgtagtgagtgtagactggccatgcaagtggtttgggccccattcagaactctcagactctaaacacacaagtagattgatctaaggcatgctcccagcatttgtccacccacttagtccactctgagtcgattaacctgcatgcagcaacacccaagtccaccccaattaactgaagcaaataccaaagcagttgggagtacatatggtagacaatttgccttaggaagtgacttgaatgtacaaagatacttgatgcacttattttttaatgtgagacagcaagtttataaaacatccatataggattatagatacttaaaggaacacgtgggtgagcgtgtgtgggggtactagaagctgatctgattggtccaacagtttgatgctgagtcatgcgtgttgaatcccacttcagtgcacctgtggcctctcagtcaaacaagttgtgcctttcacagcttctttactactgcaagttcaagactgaaatggcttctatgatcagaact

SEQ ID NO: 4394 - DNA, 1210 bp, Homo sapiens
tatgcaataactatctctgtttctaaagtatttttattaccccaaaaggaaagctcatattcattaagcagttattcttcattacctgcttctccggctgctggcaacctagtctactttttgtttctatgaatttccctattctggatattttatgtaaatggaatcatacaatatagacctttgtgtctggcttctttcacttagcatgttttcaaggttcattcacattttaacatgtatcagtactttatttctttttacagtggaataatattcctttgtatgtatatactacattttatttattcactcatctgttgatggatgcttgggttgtttctatctttgggctattgtgtatagtgctgctacgaacatgcatgtacatgtacttgagaacctatttttagttcttttgggtatctacctaggaatagaatttttgggtcctacagtaattctgtctttagctgttttaggaactgccaaactattttccatagtggccagctgcaccattttacttttgctccagcagtgtacaagtctttccacattctcaaccaatacttttccatttttctagtcatagctctcctaattggtatggagtaatatctcactgtggttttcatttgcattttcctaatgactaatgatgttgagtaccttttcaggtgcctattttggccagttgtttatcttctttggagaaatatctcttaaagtactttgccatttattaattgggttgtctttttgttgttaagagttccttatatattctgcatactagatttttatcaaagaaattgcaaatatttcactctgtaagttgtctttttgctttttttgataatatttaatgcaaaaagtttttaattttgatgaattccagtttctctattttttcttttgttgttaatgcttttggtgtcatatctaaaaatccattgctaaattcagtgtcatgaaaatttaccccatgttttcttctgaggcttttatggctttaagttttatggtcattgattcatttgagttcatgttactactatgcacaatagtggataatattcacaaattctgaaagtgcctagcctcaaaggtcttatggtctaatgttctttaattcactgtgttactgatgaaggaaatccctaagaaataatcaaggggaaatgcttcgttttactagacattgcaa

SEQ ID NO: 4395 - DNA, 1120 bp, Homo sapiens
ggagagaaatctccatacgtaagtggaatggaatttagaaggaaggtgggtttcctctgagtgttggcaactcagctgaaaggaaaggagaggatatagaaacgagttatgagattgtttcttcctaaactgtatttcattataaacctatctttaagtgccatttggttcaaactacaatactctgtgtctttaaatttgaaaggttagaagtaataatactagggagagaagaattggttttatctcctaatgagtactttcaccttccataaggtttttgaacatgtttaggagctgactttatctttggaattatttaagcacttaggtatcatctgacttattttaaaacagagattggtgaaattgacttatgtaggcatttttatttcttgctgtgtattagtagaatacgaaaggtctttcattttagtttatgttaagtagatacttaagtattctaattgtgagggaccactgcagttttcagtatagaaacagcttttatttagttgctttactacagatgaaggagcttcaaacataactgcagtgtattttcaaatgacatgatgtctaggatttgataaaaaagcaattaggaatgtgaaggtggttgtgggtagaagtatggatgaaacaagattgaccatgtattaatgactgctgaagctagttaatggatacatttagttcattatatttttctatttttatatatgtatgtgaaattttctattttaaaaagtctgtaatattaactagataaaacagctatgagcttgaaataagttagctaaaaatgagttcgtttttgtccctcctgccttcacacccacctccaccccactttttgatatgtattagtgaaggtggtggaaagtatgattgacagattcttcccaaagaggggagaaattattttgggggcacagcattaagactaaagtattggccaggtgcggtggctcatgcctgtaatcccagcactttgggaggccaaggtgggcggatcacgaggtcaggagatcgaaaccatcctggctaacatggtgaaaccccgtctctactaaaaatacaaaaaattatccgggtgtggtggtgggcacctgtagtc

SEQ ID NO: 4396 - DNA, 1228 bp, Homo sapiens
cagtcgtccctcagtatctgcaggggattgtttccaggactccccttggatacagaaatccagcgatgctcaagtcccttatataaaatgatgtggtatttgcatatggcctatgcacctcctcccaatatactttaaatcattttaattgtttttctaaatacttttgattcaagattggttgaatccatagatacagagggccaactgtatatatattactttccggcaggatctcagaatgtgcccagtaaagtccattcacaacattgaccaggatgggagcatgaaatgaatctcttcaatttgagggaaaaatatgaacacataatactcaatctgtcctttaaagataatgtttcttgtagaaacgcttcctctgagtaaacctgacctgattggctggcaaactaacaacaatgaatggcttccaaaagagagggttggggtggggggaggggaacctgctactgtagaaactagtagagcaagctcataaatgatcaggatcctgttgagcgcagtttcaagcattcatcataatcttcagtatacccagaaagtttagcatgtgtactttattcttcctagtgcctatcttcagttgccacagcactgcagtctggattccttccgtactgtgaacctgtgtatcagcgttgtgtaaacctagtacagaagactcttgcacaagccatggtaatttttttaaaatgtcttcctcttcttgacatggtggacatttttctaaagataggtataatgtatacagactttttaagtagttaattaaaaccaaacttacaaaaaacattgtgtctaatttcagctaaacaatgctcaaccagatcaatatgaagctccagataaagattttatgatagtggctcttgatttactgagtggcctggctgaaggacttggaggcaacattgaacagctggtagcccgaagtaacatcctgacactaatgtatcagtgcatgcaggtgagacttgaaaggtgaaaatgaattgaagcctgtttctctgtgtcacattggggttaatttcttcttatttcttgtaggataaaatgccagaagttcgacagagttcttttgccctgttaggtgacctcacaaaagcttgctttcagcatgttaagccttgtataggtatgaatattttctactgctatgaatatggttttttaaagttaacatttacatcagctttgtttttttatt

SEQ ID NO: 4397 - DNA, 1208 bp, Homo sapiens
cctagatatatgcacacagggtgcaagttaaaagctacagagtgaaagttggtttggatcctcttcatttcatttgtttagcttttctgttatttttctctacttacatgtattcctgtgaataaatccttgttaagttaaccctttacttttccttccatgtgtattttcttatatactgtgaatgtgaaaacctaactggtacacttgatcttgtgttcatatgaaagtgcaagtctttattaatttggattgcctgaacagtgtatcccatgatgatgaaggaaaatggagagatttttctttttaactctgctggtcagagatgaagccacgcctttccatttttcaatgctgcatatttaatctgcaacaaaaatgttaagccataacagcctttttatattttagtttgtcacctttgcattgcagaataaatactgaataaccatttttataagcagttgctcctctttgcatggttctattctctaaaagtgttgaatgatacagccattgcactgaagtttgagctgtgtgcgtgtgaatttatactgtttcaaaaatttcaaatgcatggtagcatgtagaaaggtttttgttactatgtgtgtgtgtgtgttttgttttgttttgttctgttttttaacgttctttcacctttcctctactttggctttgcaaatttcagtctgtagagcctgaaattaaattattttatagtgcctgatatttttaatattataagttggattcaaagggtatacagcattttgttttctagtaccattgcttcactgggagctcaaaatttgcctccctgttagtctttaataactgagtagagtagcttttttattcttagattatagtgatattctgtagtgcttcaaatacttagaattctaatatgagagatagtttaatattctggaatagagagtattttaaattgaaatgaccaaattcgatttaaaacaaacacataacaatcttcagtaaagttatttgaacctgtggttgacaattctgtattgactaaaggcaatattgtcacctgtctcattaaaaattagtttccagttaggcagatgaataacactattaaaaatgcacccagttttgtagtcacttgactttttttttttatttaaatgaaatttaatttgaaaatagaaaataaaattaggtaaatatgactggcaacc

SEQ ID NO: 4398 - DNA, 1194 bp, Homo sapiens
tcactctaacttcgtgttcacactccatgtgtgaatggagttcaggctgggagacaggcagaggcctaggagaactaaaacagtgtttgtggtggagcggcaggacccgccagagccacagatatatggtgatccaggaggctcaaagagaagccaagtcagctttgttgtgatttgatttttttttttctaaactcttgtacaaaactgaaaaaaaaaatgctatttatatacaggtaaagtattagggacatgtatggggacagtaaacaataagcacatgatggaaattacttgtgatgagaatgtaaggggaatgggacaggagctgactttattcaaaataaaataattactttaaaaaatgtggtcaggcgcggtggctcacacctgtaatcccagcactttgggaggctgaggtgggtggatcacgaggtcaggagatcgagaccatcctggctaacacggtgaaaccccatctctactaaaaatacaacaaattagccaggcgtggtggcgggcgcctgtagtcccagctactctggaggctgaggcaggagaatggcgtgaacctgggaggcagagcttgcagtgagccgagatcgagccactgcactccagtctgggcaacagagcgaaactccgtctcaaaaaagaaaaaaaaaatgtaagtcacaggagcagtttactcttggtagatactataacattcatgcccaacagtgaattggtatgggtttcatatcattaatgcaaatgtctatgatctaaattagttaaaactatccagaggattaaagtactgctgggttaaataccgttgtcttcttttttgtgaaccccagtgggctcaccatagtacctagtatgccgtgaccactcaaaaaatatatgatgactagcgattacacataaataaatgattctgagtcttttcatgtaaaccaaaacaagtttaatgtaatgatttagatgcaattaaaggattttttttttttttgtctagagatgaggtctcactgtgtcacccaggctggagtgcagtggtggtatgatcatagctcactgcagcctggaactgctgggtgcaagcgatcacctcactgcctcagcctctcgaatagctgggatcacaggtgtgaatcatcaggcccggctcatgatttcttttttattaaaatattgagcaggagt

SEQ ID NO: 4399 - DNA, 1183 bp, Homo sapiens
agaaggtggttcatagaacagccacagcagatgacaaaaaacttcagttctccttaaagaagttaggggtaaacaatatctctggtattgaagaggcaagtatcaaattttgttactttaaaaaacaagatttggctgggaaaagttaacgttaatgcattaaatgggttgttttttttttttttaacttagggacttcaaagtccctaagatgtgtttctaccataaattaataaatatcagggagctcattaagtctgaatgctattagaatacatattccattccaggcaaaatttcacctgtgcttcacagtgaaatactagttagccagacttagtttaataaaacatttgtttttaaagagactggtcagcattgctaatttaaatttttcttttcttaataggtgaatatgtttacaaaccaaggaacagtgatccactttaacaaccctaaagttcaggcatctctggcagcgaacactttcaccattacaggccatgctgagacaaagcagctgacagaaatgctacccagcatcttaaaccagcttggtgcggatagtctgactagtttaaggagactggccgaagctctgcccaaacaatgtgagtttcctagtaatggttttaccagggaattactcatttagcagctgatttctgatctcagggctcagaatggatatgagtatttttaagtttggaaatgcaagctttaaaaataacagatttgtaactgattttaagcaactgtccttgctcaagtttgcagtaattgatgtagcgtgccatgattgttacacttgattttgtggaatgttttctacttacttgatttggatcagatactttattaactagaaatgatgaaaatgttaatttggtgctttgccaataactacttgtaagtttggaattgaaaaaaaaattagtgtaaattatgaaattacttcagtttcatctatatagttcgtattaccagtaatcttttaaaaatggcttgccagtattctggcatttttaattacagtgtgatagggattttattcggggcagaaaatagtgtagctgaatatacatctgaggatgtggcagtgttatgctgttttctgtgcttaaaattttgaagaataggaatgcaggaggaagtcagaggcttatatatggctctttagtta

SEQ ID NO: 4400 - DNA, 1142 bp, Homo sapiens
gcagtggcccctattgagaagttttccggtagagttggaaatcagttgtgaatacattctttgctagttggagtgcttgtttactaagcatgtgccgtcgtaggtattagtgctagtctcagataggtgcttcccctgaggtgcaggggaagaccaaagtttgcaactcgaactgctttcgtccatgtttctcacattgctgtattttagaaaataggggttaagactgataacaaccttttacattgtgactgtgtttgcattgtctaatgacagataaatccttaacatttctctccaccttagtactttagactaattgtgtttgtccgtccatgccatgaatgagtgggctgtagttgggcctaaataaatgagctgttggaagaaaagaatcacagtactttccagcagtcagtccctggttcctagatgtgttctaagcaatgcaaatgtctaattgtcccccagtgggcatagtcagtgtcgtttatattgtagcagttacagctctgtagtttatgatgcaaatctgccaagagagatgtatgtgtcactgcatggcttctgaaagcaggatgaattttctgcagctgtttcaaagttggggtctgttcttgaatcctctattaattactgtgtgtgagccagagggagctgtggtaagggttgggcccccagcctgtagggaactttctggactcccactctttgaatcgatataggcatttggtctcactacttgaccattctcaccctgtgaaacgtcccacactttgaagcaaatacaattcacagcacagtacacacaaaaaccttggcataagacagagaaggttcttcttattttgtgggctggttgctgtagaaacacataacaaagggcagccctccacttctggtataattgtgtagccccttttctttgggcttgacacctgtcttgaataagagtgattagagctgcataatgtccctctcttggctattgaccatgtggttcacgtacaaaactctgtataagttgaaggaaaatgttcatgttcatatgtacttgtttgctatgactacattttgaggttttgtaaaactgttatttttttttttttcacaatgtgaaactgaaggtcaataaattatta

SEQ ID NO: 4401 - DNA, 1196 bp, Homo sapiens
tcccctctgggaggtgaggagcgtctctgcccggccgccccgtctgagaggtggggagaccctccgcctggcagccgccccatatgagaagtgaggagcccctccgcccggcagccaccccgtctgggaagtgaggagcgtctctgcccggcagccaccccatccgggagggaggtgggggtcagcccccgccaggccagccgccccgtccgggagggaggtggggggggtcagacccccgcccggccagccgccccgtccgggagggaggtgggggggtcagccccccgcccggctagccgccccctccgggaggtgaggggcgcctctgcccggccgcccctactgggaagtgaggagcccctctgcccagccaccaccctgtctgggaggtgtacccaacagctcattgagaacgggccatgatgacaatggcagttttgtggaatagaaaggggggaaaggccgagaaaggattgagaaatcggatggttgccatgtctgtgtagaaagaggtagacacgggagacttttcattttgttctgtactaagaaaaattcttctgccttgtgatcctgttgatctgtgaccctacccccaaccctgtgctctctgaaacatgtgctgtgtccactcagggttaaatggattaagggtggtgcaagatgtgctttgttaaacagatgcttgaaggcagcatgctcgttaagagtcatcaccactccctaatctcaagcacccagggacacaaacactgcggagggccgcagggtcctctgcctaggaaaaccagagacctttgttcacttgtttatctgctgaccttccctccactattgtcctatgaccctgccaaatccccctctgtgagaaacacccaagaatgatcaataaaaaaaaaaaaaaaaaaaaaaaaaaggaaaatgtgtgactgtagcttttcttaaataaggaatagggcctacatctggaggagtggaaagctggacaaagggttaagatctatatagagcgatgggctgggtatcagaaaagggggaaagaaattgctacagcaaagaaggaggatctagctgggggagagaacctggaagaagtgagagctggttccaagagaaggaacagcctgcagaggggtgtgaatgcacaactagtaggatagcactagccagtagcacttttggtgatgatggga

SEQ ID NO: 4402 - DNA, 1176 bp, Homo sapiens
tacatgtggctcctgttatatttctatatagaggacagccccggtagagacaatattgtcagttcccatataaggctgctgctatggcctgaatgtgtgcccccaaattcatatgttgaaacttcatcaccattgtgatagcattaagaggtggatcctttaggagatgattaagtcatgagggcagagctctcatgaatgggattagtgaccttataaaagggctggagggaactaggtagggccttattgaccttccttccatcacttccaccaacggaggatgcagctacaagatgccatcttggaaacagataaccagctggtatgggacaccaaacccaccagtactttgatcttggacattcagtctccagaactgcgagaaacaaatttctgttctttataagttactcagtctcaggtactctgttataggggcacaagagactaagacagctgtgtgcccagggatgcacaaaaaattctctcacatcctcagtcaaggtacaccattatttcatttacatgacaactcacttctttccccctgcaaaatcccctaggaactgtagcagacatggtaagaattgacacattggggctgtatttggggagacaagataacatacagaacaataatatggaagttgcctatgtatatgagacacaaaaacactgagcttcctccatctgctattctgttatacatgacacagaagtgatatggacagtaagtgctaggggcgttcagaagaaaaattaccactatttgggtgaccaagaaatctgcagagaaaagataagctctgggttcatctatgaagaccaggtagactttaaaaggagtaaaatgataattgagggagaaaggaataagaaaactattccagagagaggggattagcaaaagtatggctgcgagaaagaagggccatgtttgagagaagaggacctcctctccacccagtcccttgagctcagctccatccagaacagagggtatgtgaaatatgtgccttatccctcagaggacacatatttgcttctccctgagcaggctgacattaatctgaggcacacagacaccccactgagtgaagttctgaggcagagaagtcaaagtctctggtgacactccctgcccagcccccacctacacaaacagctctgtgg

SEQ ID NO: 4403 - DNA, 1147 bp, Homo sapiens
ctcatatttctcgtctgtttttctgtcggtctttttgtctttttattgtgtttgaagagctctttgtgtgttacggttgtggctgaagtgtctgaagaggtttctccccctccacattgcaggggcagctgaaatgcactcgagttttttgttttttgtttatactttaagttctagggtacatgtgcacaacgtgcaggtttgttacatatgtatacatgtgccatgttggtgtgctgcacccgttaactcgtcatttacattaggtatatctcctaatgctatccctcccacgccaccccacgacaggcccctgtgtgtgatgttccccaccctgtgtccacgtgttctcattgctcaattcccacctatgaatgagaacatgcggtgtttggttttctgtccttgtgatagtttgctcagctaaccaggctgttacggcctgtggccatagactgctggtcactcagcagatactgagactgaggattgtattgagctagaatatagccgcatgatgtggaggactgagaaggtgaggcagttttgccccgtgctgccttccaccggttaagacctccaaaatcgaagggctgcccaggcagaggatgtccccttgccacccttggaggggcagcgctgtgctggccgacatttgtgatgcagcctgtccctggctcaggtgaggcttccactaggtcaaaaggattaagacatcgaagtcagtgcttctcatccttgtgcccactttaactcctaacagatggcattcacctgtgcgacactccctctgggcattccagtttttaaggaaacccagagaggtaaaaagcatgacagtaatcagtcacctctggcactatcaggggcacatcagtaaggatgactctcagactttggcacaagtaagagaatctgcgggtttatgtgcagtttccaagctttggctcaagaaagcatatcagaatgcaaagcaatactcttgatgttataggaaacgtttacatcccttttaatttataaagtaaattagtcgtaaagattcattataatagtctctgcacttttgtgtttgtccagtaataaaaaaggacctcaggaaagatcagattcaatatagaaggaaatagaaattttaaaaaagaaa

SEQ ID NO: 4404 - DNA, 1758 bp, Homo sapiens
ccttccccttacttggggcattttctccctttgaagctttttctgaatttctgtgacatgtcatagtctatactgcattatttagtacctgattacataatctctcattggtacctttattgtttcaattatgatttgcttttcagaatcttcttgagggtagggaccataaacgtagtgctgacacttaacacctatggattgagtatatctacttttatagagagctgaagccagtgtttatcttgggaaatttagaattcagacattttttccatagccattatacagtataagtaatggttaagtaaaaccaatacttgaaaaatcagatgatgaaaaaatctggaagaactatgagaattcatgtactttacaaaaatagctattctgtagttgaacaatattaacaaaattctgattaaaatattagatattatttgtatgtgacttaccaatactgaaaaatgaaatgaagttctacacccagatccaaaggagtctttaaggcacatatctcacacgcacatgtgttaatgtggtattagacacttctctgcttttcggggtccctataatcagttttaattttctttacagatgtttctatactttgaagatcatggactagtgacgtgctccgctgatcatctcattattttgtggaaaaatggagagcgagaatctggattgcgcagtttaagattatttcaaaaattagaggagaatggtgacttataccttgctgtctagtttaaggaattaaaaatacacatgcatgaaccttgaacatcaaatatcgggtactactctgaaaaccattaatatattgatcacttaaattggtaattttttttgtcagtccataaaattctacatgtttaaattttttgtggacctaccaaccaggaacatgttgcttctcaggtcctagtatatcctccaaagaatataccacaagtttttccatttgactttgagctgctgttgaagtggtgagtgctgtgttttgagcttattttgaacctagatccttgtgaaaggtacaaatagaggtaatagttaagttatggcatttattagaagttttattatttggcttcctttagaattattgtgaagtttaaaaatagcctttctcctgcaaattttcctagtctttagtaactgttagtgttctatatagcacaaacttgaatctctcagccaaaaaagggaacatatatactgtttaagtatggcaagttttctttggtaccaatttgtttagataattttaaaaatgttttttagttctagctactaaaacctgtatgaactcaaatggataggcatcttgtgagggtgtgtttttcccagtgtgaattggcttgaagagccatgggctaaatgggtactagaacaacaactgcccctcatgtacgccaaggatgagctctagatcatttgagaggcacagtgtttccggagtcagggactgcagctgagcgcaactgccccatctgaccactgactcaaatacgaactgcttgagacagacttcttttatgtagttctttgcagtgtccattgagacactataaccagccttgtaacaatatgttttctccttttggtgctaaaaaatgaaaatattagaaagtagtctacacattaaagattgaaattcttaaactactgatgaagaaagggcaacgtgacagatgttagcagactgacccttcttacagaaaacctacagatttatttgttcattat

SEQ ID NO: 4405 - DNA, 1123 bp, Homo sapiens
gagataatagacaaagacatttaataagatgaaatacagatatagccaaacagttttaccttctcagttggtgattacaaacagcaagtggttggtgatagaatgaaatgaaaaatatctagatggtgtccttttaataacatggagcccgtcatacacaggcaatacatctttaactgtcatcgcacttatttgttctcatttgtggtgttactgcttttcgaggttgattggtctccccgtagtccctccctgtgttacagctccattcaaaaaggctttgtatttttcattgctggtgtctctttagggagaggagagtaggggatatttaaaatgttttaaatctttaaaggcagaaatgtaaaatatatgaggaatcaagtccgcacgctttgaattacgcattactacaaaatcaagtaaacaatttttgaagagaggactcttccttcttaatgtttttggaacaataatagattatgtgtatattaggtaaatgggaaaaactttatctgttgactgataaaaacaaattattatgggtgcatttttgtatatatgaagataatttgtgtgacctggaatcagaatgcttgggttcagatttctgctcaaccagaaatttggtgtgtggccctgaggaagttcttcaacttctctgggcctcgcttgcctcatctataaagtgacctgcctcataggattaaatgaaataattccagtgaagcacttagaacccactgccagaacacagtaagtgcttaacaaatgatagctgctatcatcattatagtgatcaaaaatttctcatgccttttgaaaaaattttgtcacagtgtgatcttagttcaaggccaagcacagaggttctgatgtcagccattaagtttagtatgtaaatatctgacccacgctgactttataatcaatgtttctgacatcccaaagctagctatttattacttatgaattagtactctttccataactattttttgcatgtatgttgaagcatagcctgtgcaggagttaaatgatgaataaatctggggtagtggtttttgccttccgagggccaaaacaaaccaattttgatcatgctgtgttccaattaaatata

SEQ ID NO: 4406 - DNA, 1170 bp, Homo sapiens
ttcccagcctccagaactgtgagaaataaatttttattattaattatattattaataggcttcccagtttatggtattttctaacagtagcccaaatggactaagacattttgcagtttgaacgcatggagtggcttgtatgctctgctaagtagtatggaccttgtcctgcagaggaaagggaaaccacttttaatagtagtataatttaccagatttgcagtttagaatattcattttttaagtccattgactttttgagcagctgttaataagaggaatcatttttgcttccatgtacgaaatagggacttttcctatatctgaattgctattctctgtgagtggacttacctgtttagtaaattggaaaaagattcttgctcatttgcagctaggcttcttgggaagctttatgctctgtgtcctatctatttttctctaattttcacttttcctctgactcttacttttgcctttgtgattttttttctccacctcccctctctttgtttttgtccccttccccaaaactctttctgcctagatatctctctgacatccttcatcccttcgtgccccgcccccgtactacagtccagtgtgtttgtcattgtctcctttctcttccatccctgtttgtttctctctttttgtatttgctgtgtatctctctatatgtgtctccctctctgtctgcctttcctgcttccccatagaccacacttattttctagtaaactaatgtttgcctttcagaatccttaggtcgattcctcaaattcatttctatatgctttgggattatcttcatccctaatcgtgatatgagttatcttattatagcttttgctgattcatctacaagatttgtaaccagataattgcaaataatggagcatatttccattatttagattttgtctttacattttaagtcatctttaaaaggaatcagttaatcctttccaagtgtctgtagatttcttcatacattgagatgctttctaaaaactgagtaaagaaagacctatgtttgctgttgagtttcatgtttcttgataaaatagagggagttttagcctgaaactccatggtgttcactaaatccctgtggtatggcaaaagtcaatatgatacctagactcttaggatttttttctgtctggt

SEQ ID NO: 4407 - DNA, 1151 bp, Homo sapiens
gcacttgctagctctgtgactttgggcaagttatataaacctctgagccttactttccttatctttgagagggagataattgtacctaggatagatatgagaattaaacgagtaatataatgtagatgtagggccttacacatttaaattctagctggaaagttatagcagattgaggtgaagaacaaaagctgtcgcaggcagttttcctttcatattctgtatttcctaattaattttaatactagccagaatgacaagggtacttttagaaaagaaaggctgggctgggcgtggtggctcacgcctgtaatcccagcactttgggaggccggggtgggcggatcacctgaggtcaggagttcaagaccagcctgaacaatatgatgaaaccccgttctctactaaaaatagaaaaattagctgggcgtggtggcatgcgcctgtaatcccagctactctggaggttgagacaggacaatcgcttgaacccaggaggcggaggttgcggtgagctgagatcatgccattgcactccagcctgggcaacaagagcaaaacgccgtctcaaaaaaaaaaaaagaaaaaagaaaaacaaaggctgaggaacttctccagatgaaagaagaccaaggagacatgaaaacttaaatatgatgcatgatcccagatcagaaaaaatactataaatataggatgttattgagaatttctaaatatggattatttattagataataaataatgcactgatgttatgtttcctgaattttataattgtagtgttagcaattgaaaaacatagatgaaggcggccgggtgtggtggctcacgccagtaatcctagcactttgggaggccgaggtgggtggatcacttgacgtcaggagttcatgactagtctggccagcatggcaaaaccctgtctctactaaaaatacaaaaattagctgggcgtggtggtgtgcacctgtggtcccaacttttcgggaggctgaggcaggaaaatcatttgaacccaggaggcagaggctgcagtgagccgagattgtgccactgcactccagcctgggagacagaacaagactctgtctaaaaaaaaaagaaagaaagaataaaacataaatgaagcctatatgaggcttcagtga

SEQ ID NO: 4408 - DNA, 1108 bp, Homo sapiens
ggcagataaaacgtgttgcaaatttcattcacccctttgccctccccctctcctcatccacttcttctcctgtaccccttccattatctacttctttcaccaaaatcacatcttcttgcatttttgtgcatcttttcttctgaagtatagtaattctttgaatatcttttattctgaccaattagttaaataaaccaaacatttttaaattattcgaaactgtttctaaattgtgttatatttccgtttctaaattgtatgtttcagagagttttcttgtgagtagcccagcttcaaaaaactttttctcctagcttgccatgaataaaaaataaaaatttccatgttttatgtttttaagtctttgactcaaatttcagttgaaatttggttcatcagtaagcatacatcaaaggcagttttaacctcaagatgatattgtgtactttaacaaaagtgtaactattttttatcccccacccctttttttaaaggaatccgcaggcggggatcttcagtctcctttaacaccggaaagtatcaacgggacagatgatgaaagaacacctgatgtgacacagaactcagagccaagggctgaaccaactcagaatgcattgccattttcacataggtacagattcaattcagcaattatgattaagtaaatgtgtaaatatggaaatgtttggtttcaggaacccttgtagttacaagctttgagtgaaaactccaggttgactttgactttttttttttttttttttactgcttctgttaacctcagaaatgaaatacacaaactttttattaatttatagtttatagttgcatagatggactgcagtgaacatttcctttatgtagaaaaaggagcactaggctaattacagtacaaattgtttttcagtgaaataaaatcttgtaagttgcttctacctgtcttttaacatagcctctaaaaggcctcctttattaacctggtttctatttttgtgtatgttcttgaaggttataagttggaatttttttttaagtaggctttccactctgaaattaagctttatcatagtctttgagatgatctcaccacgtgatttcacagaag

SEQ ID NO: 4409 - DNA, 1218 bp, Homo sapiens
taagatttggggggttcctcacactctgccaaatcctatattacagactttacacttatcatcacatgtaattttcccaataaccctaagaagtacccattcaatagttgaggtaaaatgaggtcatagagggtaagtaactcatccagtcacaccagtcctcattgtccagatttccaaattgaaacccaggcctgagtccaaagcccaggctcttttatgggttacatattgttcaggatggtccgcagttaaagaaagtcaccaaaatgtctctctccgacctcaaacttctcccgacctaaatacctaattggtgacttgccatttccattaaatttataataggcatctctaatgtaacgaagccaagaaacttgggttttcctcaccaaatgtcctcttcctaacaatttcctacttcacctcagtaatgcgatcatcatctacccagtggctcaggccagaaaccgagcctgtctcattcccacatcccacttctaatccttgctcaaatccagttctacctctgaaatatacccaaagccaatgatgtcccactgtactcactcctacagccatagcctaaattaaggtaccacgctgtctcctcctgggactacagcaacagcagattgccaggattcgagctccatcaggaaaggatttttgttcactgccgaagcctagaacactgcttgcccctaagaggcaaatatccacttaggttttcctcaccaactgcttcatgaccaactcgaactgctttcctcacctccactctagcccgttacagtccagtcttcacgacatcccaattatcttctaagtgcaaatcaaaccacagctcgcccctgctcagaatcctcccacagcctctcactgcaaccagaattaaatccaaagtccaaaggcagctgacaggttctggccatttctggtcctgctcttctctctgacctcatctaagacaccccagccaccctagactcccttgcctctcctcactgagcagtctcaactccacaggcatcttctcagactccctcggcaaccctcctcaaggctgcttaccacacggccttctgacagtaccagtaccatattcattgtttcattgtttacatgtttatgaatgatctcccctgcccagataggccattgagagcagagatgcttgtctgacttatgactatatagcaggctcctggcaaaagg

SEQ ID NO: 4410 - DNA, 1155 bp, Homo sapiens
cagtggcacaatcttggctcactgcaacctctgcgtctcaggctcaagtgattctcctgcctcagcctcccaagtagctggaactacaggcacacgccatcatgcctggctaacttttgtatttttagtagaagtggagtttcaccatattggccagctggtctcaaactcctgacttcaagtgatccgcccacctcggcctcccaaagtgctgggattataggcgtgagccatcatgctcggcttaattcagagctttgggaggcccagagaggcagatcccttgagcccaggagttcaagaccagcctgggcaacatgctgaaaactcgcctctactaaaaataccaaaaaaaaaaaacaaattagctgggtgtggtggtgcatgcctgagtcccagctaccggggaggctaaggtgggaggatcacttgagaccaggaggtcaaggctacagtgagccatgatcacaccactgcactatagcctgggcaacagagtgagaccccaggtgtgtgtgtctgtatgtgtgtgtgtgtatgtgtgtataaaactacagaaaaatatgtgctgccaattctcttacactgatttcctcctatctcttttggctcctgttttgttgatgtattctggatttttttctaagttcattatgattgaattattctttctcattttaacattagcttttcttcaaaactttattacagttatagtctatttggtatctatacttacacgtatttttgtgtttatgtttaactggaagtgatgcttatttctagcttttccatatcaaaactttcctgcgagttctttattgtgatgcatcaacttaactggattatgtcttcagtattttttagaaaggattcatggttgctatatttcctgaattcccacatatgtgagcctggctttctttggtttgtatgtgtgaatggaagcttggctttttagggtctcgtttcattcaagccttgtgaactttgcatcattgctttttggcacctaatgttgctaaggagaaatgtaaggtcagtctgatttatttttcttggggattacatttccttatggtggatagatattctctatccttgaagttcaacactataaccagaatttgttttattaatgagtaagttctatta

SEQ ID NO: 4411 - DNA, 1177 bp, Homo sapiens
gaacaaacactggtgtgtgcctggtggatgtttgggatctcttagctgagatacgcagaggctgacagtgtcgacagctagaagtgaatgggtgctgataaataataaaagggtgagactgacataaaagtgtgtcgggcgtagtggctcacgcctgtaatcccagcactttggaaagttgaggcgggtggatcacaaggtcaggagttcgagaccagcctcgtcaatatggtgaaaccccgtttccactaaaaatacaaaaaaattagcttggtgtggtggcgcatgcctgtaatcccagctacttgggaggctgaggcaggagaattgcttgaacctgggaggtgtaggttgcagtgagccaagattgcaccactgaactccagcatggagacagagcgagactctgtctctgaaaaaaaaaaaaaaaaagtatataggccatcgattatcctctgacatggtgattgtataaaattatctgtggctaggcacagtggctcatgcccgtaatcccagcactttgggaggcggaggtggaaggatcacttgaggcaaggggtaggtcaaggctatagtgagctacgatcgcaccactgccccccagcctgggtgacagaacaagaccccatctcttaaaaaaaaaaaaaagaaacacacacagaaacaacaaaaaaaacataaaacaccatttgcaaggctgaagcagcagacaactcattagtcatttaaaaacatctcatagctgctagcatttcacattgagaccaaattttatcttcttattcctggtatccccatcagtcctaccagctggggacatgcccaggagcctcgtggcactctgtggtgcctgagcagtgggcagcatctcacccacttgtcaaggtgggatatctggggtcttgaggcttcaagaacagcgggggtttcctggcccttcaccgcgggcagctctgactgtacttcctgcaggcaggtggcctggggaggctggccggggcgtctgctgtcaccatctcagcctgggaggtgcagtggttgtcagcaggggcacagcactcctccctgcaccagcctttagcaagtacaaatcctttgagcaacacaaaatagactcagggtcaaaagtaactttcctaaggaaagattgagaaacagggaaagcattggcagt

SEQ ID NO: 4412 - DNA, 1138 bp, Homo sapiens
aactttggtgttatgctttaaaaatgtttctcccactatctctatgtcacttgacattccagccaaattgaagttgaacaaattggggagtgaatgaatgaattctaatccaactaacttttcttgtacatgtactatgattcaggtactatgccaggtgttttcactgaatccttgcaataaccccacgtatcattatctaaattttacagatgaaaaaatcaaatgacttgcctaacgcaacttatgtagcgagtaagtggcaatctgggagtcaaaagaaagttgtgtgactccaaagctagtgcggtttccaatataccacatttctttatctatataaacaatccttcttggactgactatatgatttaccagtcctcacaatgtttttacttgatcctggagaaaaataattttgtgtaaaacagctcaatgcctttcactgaagtattgagaattatgaacttgaagtcagatggccaccatcctctatcacttgcagaattattccttctgatcaaagagctcttgcgttttttgtttgtttgttgtggctttttttttttttttaagatctcactgtgtcacctaagctggactgcagtggcacagtcatggatcactgcagcctcaacctctcaggctcaagtgatattcccacctcaacctctcgagtagctgggagtacaggcatgcaccaccacactcaaataattttttaaaaaatttttataaagatagggttttgcaagattttgcccaggttagtcctgaactcctggcctcaagtgatcctcccacctcagactcccaaggtgttaggattgcaggcatgagccactgtgcctaccctcaaagagctcttctaaaggcagacttgagcaataatgctggcttttagggagatgattaggtgagctgaaggggcaaatatggatacaaataatgagattatgtaagcaaataagggaagtgaatgcctgagcaggtagaaagtatacctgcttttcactgttctatatacacaggtcctgtgaagtcatagactgggtgagtgaagatgatcagctgtatcacatcacctgtcctatactgaatgatgacaaacccaaagacttggtagtactcgtatcac

SEQ ID NO: 4413 - DNA, 1116 bp, Homo sapiens
ggaaagaccaagatcataaatattaatggtgaaaacactgtagtaataaattttcatatgccaaaaaatgtttgtatcttactgtcccctgttctcaccacgaagatcatgttcattaccaccaccacccccccttattttttttatcctaaaccagcaaacgcaggacctgtaccaattttaggagacaataagacagggttgtttcaggattctctagagttaataacatttgtaacctggcacagtttccctcatcctgtggaataagaaaatgggatagatctggaataaatgtgcagtattgtagtattactttaagaactttaagggaacttcaaaaactcactgaaattctagtgagatactttcttttttattcttggtattttccatatcgggtgcaacacttcagttaccaaatttcattgcacatagattatcttaggtacccttggaaatgcacattcttgtatccatcttacaggggcccaagatgataaatagtaaactcaaaattgctccccactctgtttattatttaaaggtgtcaggatctgtgttgtaatgtgtctacattaatgtgtttaggagaatacaggcattggatcatttagttgatggaagtatatgccaggcaagggagataaggtatacgacaagactgatgttttcagtatcttctcatgaggttgtcagagaccttcatgtcttcaaagactagtcagcaaatgaagtggtttagtgtagagacaagattggttgtgttttgataatttaagctaggtattgagtacatgtggattttgctgtccacaaatacttgtttcagagttttcatggatacagtggcatggttgaaatgaagctgtgagccttctgctttaaatctgatgtaagaaactcctgttaacaaatagtaagtatgggttaattagccctttgatcaaagcctagctttacattgtttaggatctttggaaaacaattggtttggttgcccactttccgtaggatcaagagcagaacctttcacatggcacagaagaacccaggttgcgcttcatacctgcatattccagccttagcctgccatttctctccttggcactttgt

SEQ ID NO: 4414 - DNA, 1099 bp, Homo sapiens
acagcggcgcggggtccttggctgggcggggcttgctcgcggtggcttgtggctccttcctgcggtgcttctctctttcgctcaggcccgtggcgccgacaggatgggtgagctgttgtggccggtttaagggcgctgcaagcgggacttggggtcttggggacgggcgggcggatgcgaatagagtagggcgggggatgccatggagaggctccatgggggagggccggggaagcgccgctccaggaggcacgtggtccggcgcggaaggggcccatgaggcgtggaggccgccgaggtcggggtaccgagggacgcagggaggccagcgcttcctcccgggcattcgagcggggcctcgtccttcgggagaacacattctccggagccctcttcgaacgtttattagtcggttcagggcaacttgaaggccaaatgtttggcccacaggccaataaatagtacgagagccaatcggcttaagggtttattccaggtgaggcgagtgtcttagaagatgggaaacacgtagatggcgtgtttttacggaagaactaaaatatttaatttttaggcaagtgtcgtggacttcgtactgctaggaagctccgtagtcaccgacgagaccagaagtggcatgataaacagtataagaaagctcatttgggcacagccctaaaggccaacccttttggaggtgcttctcatgcaaaaggaatcgtgctggaaaaagtgtaagtccattgctcccgtcaagttttagtttattataggaattcgagacatgaacttacgaattcttgttttgaaagtaattgcaggtttttgtgtagtagtattcatttgggcattgtggggtaaaattgcaaagcgtttgttctatttaaaagttggtaaaattagtttttgggaattaggtagttaaggttttaatttaacgttggcctggaaggaattggagaagatactagcaatgatgaagtaaaggacacaaacacctttactgtgggagttgttataagtaaatggcacgtgtcagctattgaactttatcgacttgataaaactaaggtgaagagaagtgacttgcatcagaatt

SEQ ID NO: 4415 - DNA, 1177 bp, Homo sapiens
ctccatttatgaaaaaaagtataagcattttaattatgattgacttgaatttatagattaattttgggaagaattgaaatctttataatattgagtcttccaactaattgatgtgatatgcttctcatttatttgcttttctttaatttttctccataatatttgatagtgtttaatatagagatcttagatatcttcttagatttactactgagtattagtttttgatgctattgtaaattatgtttttaaaatatctatttctgattcttgctaatattagacaattgatattgtttattaataattttctattggctggtcatggtggctcatgcttgtaatcccagcactttgggaggctgaggcagttggaccacttgagcccaggagtttgacatcagcctgggcattatggcaaaaccccatctctactaaaaatacaaaaattggccaggtgtggtggtgcgtgcctgtagtccgagctgcctgggaggttgaagtggaaggatcacttaagcctgggagttggaggtttcagtgagccgatcacaccactgcactccagcctgggcaaacaagtgaaatcctgtctgaaaaaaaaattgtctattggtgttttatcctgcatacttgataaactcatttattaggttcagtggatttttggtgagatcatagtattttctacatggatggtcatgtggtctgtgaataatgacagttttacttcctttccaaactggatgctgttatttatcttgccttactgcacttgctagaacttccagtacaaggttgaatagaagtagtgaaagtggatttcattcttgttgctaggattaggagggaaagcattcagtctttcaccagtaattatgtgagttataggtttttcatggataccctttattaggttgataaatcttaaattccaactgtgccaataatttttttttctttttaatcaagaatatgtttagatttttcaaatgctttctgtgtatccatttacatactttatggttttgggtgtttctttttttagttttctaatgtggtgaattatattgatcaatataaaatatgaaacaaaatttgcatttctaggataatccccatttgggcatgatgtattctttcttatataatgtttgatttgctttgctaatatttt

SEQ ID NO: 4416 - DNA, 1132 bp, Homo sapiens
tcgcatgagggatttaacctactgaaggtgaaaatagatgttagttgtccatcagtttttatgataatactccatctccttgtagacactgtcttctcttcattccacctttttcagtaaagtcctgttgaatttattcttcagtattcacccatttgttgaaattacgttatttgttgcttggctgtgcatgaagtctttctatccaagtagacagtttcattgtatctttcccttctgtacccgccaactgtaaacttagaattaaagcatatggtagactctagtaaacacttattcctattgatgactttattggaattctaatataatgcataatgtccatctaagatatttaagtgtttatctcattaaagaataattacatagtagtagaatactttccctatgctatcacgaaaattcttcttcaaaagcaagtaggttgcatgtggaaatgtctgcttctcattccttgggagcaggaatatgttcataacatgctacattaacaaaggagttctcagggctgccaaccttctagtaaaggttgagtggtagtatatttctccaacataaaagaccaaaaagagcatgcctatttttacattttaaaatatgtactaatacagtcaactgtttgaaagctttttttaaaacctttatttctacttatatacgtgttaagcaccattttatgttgatttataactaagaattattttgtatagaaaattttataggcctagtctctttctgttaaaattacatgtttttatgagactcgtaatcttttattatactgagaatatataccatgcttaggtggagatatctagacagattggataaagcaagttcttgatgacttcactgtttaaaataacttcagtttttgctacttcaaataatatagaactaagcagcagaaaaaaagattactacatggtctttatcctggtttcatagacctgatagcattatcagcaaatatacttattggtatttagccataataactaagcaacgtaattacattttttaaatcaactaacagggttcgtgtgtgtgtgtgtgtgcatgtgtaagtaaaattggggtattacagaaatatatctaggtagagaaatat

SEQ ID NO: 4417 - DNA, 1185 bp, Homo sapiens
cccacagatatatactgcttgcccttagagtatttggaatatttgataattgtcaccatttaagaatagagatttcttttctttttctttttctttttttttttttttgagatggagtcttgctctgttacccagggtggtgtgcagtagtgtgatcttggctcactgcaacctccgcctcccggattcaggtgattctcctgcctctgcctccccagtagccggggttacaggtacacaccaccatgcctggctaatttttgtatttttagtagagacggggtttcactctgttggccaggctggtctcgaactcctaacctcaggtgatccgcctgccttggcctcccaaagtgctgggattacaggcgtgagccacctcgcggccaataggaagatttcatatttaagaagtctcaacttctagcatctctagaaaacccacaggacttggctatacctggtggccattcctgcttgagactagattgccagagctgagtagcggttgacccttttaggtgggtactgaggtctccatttgcagtctccaccaggtctgctttgcctttgctattgcagtatttgcctggcatctggcctggatcttatgctgaacctaatattcagacttctcaagtctgaaactttaaggaaaagaaaataaggaatgtaaatagtacctttcttttttaaaaaaatcattttactgtctctacaaaaataaaatcattcttattaagtcaaataattggtgaaggttaatgttagaacatgtagcattcattaactttgtcactgattgcattatacatatgggtgagccattgtttcttaataaaaatgggggtgagacttgctaagattagttacggacaatgattgatgaccagaactcatattttttactgtatttgtataagtagcagagaaatatagtaggtgcttcaagggttgcaagagtaaaatgccccttttctcaatgggagaaaagggagtattagatctagtaggaaattaagtaaaccaattactgtgattcaggctaggttaagataaatatcacgagtgaagtatgagcaaaggtcatgagggttaaaagaaaaagaaatttgtgtaattaggatcagtaaattctttgaggaaaaatagcaggtatgtttttcctgctacttaatttatttt

SEQ ID NO: 4418 - DNA, 1178 bp, Homo sapiens
ccggcctcttgcaggaccgagaggccaaagaggacgcggcgcgccggccactgcttgccgtggccacccacgtgcacttcgaccactccggcggcctctaccagttcgaccgcgtggcagtgcaccacgccgaggccgaggcgctggctcgcggggacaactttgagaccgtgacctggctttccgatagcgaggtggtgcggacgcccagccccggctggagggccagacagttccgggtacaggcggtgcagcccaccctcatcctgcaggatggtaatgggcccccgcgggcgcgcgctctcgttaagggagggtattgggaagagactgtccgagtgccgcatgttgcagacttgcgtggccataaaggggattattttggcacctcgcagagccacttctgtttcacccttccctgagtaaaaacccacttgaccagagtcaaggccatcacagccttccctgccagagaccagctctggcatcgtgtagagattctgagtactcctttgaaagccggcaccaccccctccctagccactttcctgcatcggctgtagcagtaacactacaaagacttgtgactgactagggatttctcattctttccctaagcacctgcccgacatttccaggagctttcgtagtgagcagacttttaaggaatgacccctcacggagagtgcatgtcatgatctgtgcttttgagaattgcagacttcatcagcttggtccccaccgggtatgggcagttcccacctgtagccttagagagtcatcagaccagtgattccaatccgctaatgcgattggaaacctttcagataggtttctgttcttgatgttgcctcacgattgcaaaagcttaatagtaatcataaacgtagaatatgtctgagtcttactttatgacagatatttggtccggttgaaagcaaagcctgagaaagatcaataaggaagtaattttcggtagaggtaaattatgtggactaatgcataggtagccatggtcctctttggctctgtgaaagacaagtatggaattcagagagaaattcatggaatgaaaataaatagggcctcagcccattctccctacgtagggacttaaataattgagctaattcgccacatcagcaatatttggtatattagttttctattttcttttt

SEQ ID NO: 4419 - DNA, 1276 bp, Homo sapiens
tacatatcaataaatagggtttgatggaatttgaaatggcacgtcattgttaagttgctgccctcatgagcagcattttaaatatgtgaatgatgaatctctacagtcatattcctattttttaaaaaatcaatttcttcatgatttaatttttttcccagatcaggtttcattgttgctgaaattgaaccaatgggcgtcttccaattttccactagctcaagaaatatcatagtgtcagaagatacacagatgatcagattacatgtacaaagactatttgggttccacagcgatcttattaaagtttcttatcagaccactgcaggaagcgccaagccactggaagattttgagcctgttcagaatggggaactgttttttcaaaaattccaaactgaggttgattttgaaataaccattattaatgatcagctttctgagatagaagaatttttttacattaaccttacttcagtagaaattaggggattacaaaagtttgatgttaattggagcccacgcctgaatctagatttcagtgttgcagtgattacaatattggataatgatgacctggcaggaatggatatttccttccccgagacaactgtggctgtagcagttgacacaactctcattcctgtagaaactgaatccaccacatacctcagcacaagcaagacgactaccattctgcagccaaccaacgtggttgccattgttactgaggcaactggtgtatctgccatccctgagaaacttgtcacccttcatggcacacctgctgtgtctgaaaagcctgatgtggccactgtaactgccaatgtttccattcatggaacattcagccttgggccatccattgtttatattgaagaggagatgaagaatggcacattcaacactgcagaagttcttatccgaagaactggtgggtttactggcaatgtcagcataacagttaaaactttcggtgaaagatgtgctcagatggaaccaaatgcattgccctttcgtggtatctatgggatttccaacctaacatgggcagttgaagaagaagactttgaagaacaaactcttacccttatattcctagatggagaaagagaacgtaaagtatcagttcaaattttggatgatgatgagcctgaggggcaggaattcttctacgtgtttctcacaaaccctcaagggggagcacagattgtggaggagaaggatgatactggatttgcagcttttgccatggttattattacaggtatatctt

SEQ ID NO: 4420 - DNA, 1192 bp, Homo sapiens
accttgggcgcttcccacctgccccgtccccctagagactcagaggacccacctgggccaaggactccaaagccgcggggacaccgggaagtgcagcgggccaggcaggctgggtgggagggaggagggccgagacaggagcagcccacccagcagaaatacaatccgagctacaaagcatgggaaaaagagactcttttaggatcagatctgtgagcacgttggcgaggaaaaacaaaacaaacaaaaaaaagaaccttgtgtctgtctggtgaaaaaaagaaaaacaaattggaagagaggaccatgagaattttaataaaacagaaggaaactaatggaccttccaggatttattgtggacggatgtggatatattctgtacaggaacaacacatatggaagtggactgaagcctatgtagaaacacacacacactgaacattgttattcattttgtaaaatactagtctttattttcattttttgtaaaatttaaacatcgtatgcgcataaagaaaaaggaaacaagaattaggggaaaataacattttccaaataattataaaaaattgtcctgtgtctatgtatctatatctgttttgtatttttttctggttccaaaccagatttcctgtgattctatactaataatttttgatataaccctttgcttcttataatgagtgcgatatatgttgtcgaggctgttcttcaagaattaaaattgaagtgaaaatttaaacaaaaataaaagaatttagcaaaacccatgtgtctggttgcttgatagatgttatccgtggaagagaactccttggttaatttccacctcaactattattagaattgaaggttttggtgtgtaaaaggggagacttttaaagtctactacaaagttggttagattcatttccaaaaaccaagctgctaccttggttttgtaaatgcggagggccaggctctacatgggctggggtccgcggggaggcagggcgccttggtcgctgacttcagccgttgagacctggtgggctgcgggcggtcccgtgctcagttgggccagggagtggtgtaggcagggtcgcgcgcccggtaagtctccaggcaccaagcaccgggggcgcagccggcttcagtgtctggcggcggcaaccggggctttaccgcatgtgggaacttgctgagctgg

SEQ ID NO: 4421 - DNA, 1654 bp, Homo sapiens
aacactgcaattctgactcccagggccagattcctaactaacaacatgcaaatacattcattttcctcatggagcatatgttccagctacccatttatttaacaaatatgtatcaagtgtctgctatgtgccaggcacagtcctaggccctgagttacagagaaaaagagtttgacacggtcattgctatcatggcttacaccttccagagcctctaatagaggttttgtaaaaagggagaaagtatgcacgtattaatgcaagtactagacataattaaagtaattaataacattgacaagaattactaaactattgaaatataatacagtttctttaaaaatacatactgtatattcagaaagggtaatgttatttttacatcttaaaaagaattcattttcatctctggttcaaaatatatatctttaaaaaaaaaactttttgcctggtgtgattccgtcctgcgcggctgttctctgcagcagcgttgttttatctccgtccgccttctctcctacctaagtgcgtgccgccacccgatggaagattcgatggacatggacatgagccccctgaggccccagaactatcttttcggttgtgaactaaaggccgacaaagatgatcactttaaggtggataatgatgaaaatgagcgccagttatccttaagaacggccagtttagggctggtgcaaaggatgaactgcacattgttgaagcagaggccatgaattacgaaggcagtccaattaaagtaacactggcaactttgaaaatgtctgtacagccaacagtttcccttgggggctttgaaataacaccaccagtggtcttaaggttgaagtgtggttcagggccagtgcatattagtggacagcacttagtagctgtggaggaagatgcagagtcagaagatgaagaggaggaggatgtgaaactctgaagtatatctggaaagcggtctgcccctggaggtggtagcaaggttccacagaaaaaagtaaaacttgctgctgatgaagatgatgacgatgatgatgaagaggatgatgatgaagatgatgatgatgatgattttgatgatgaggaagctgaagaaaaagcgccagtgaagaaatctatacgagatactccagccaaaaatgcacaaaagtcaaatcagaatggaaaagactcaaaaccatcaacaccaagatcaaaaggacaagaatccttcaaaaaacaggaaaaaactcctaaaacaccaaaaggacctagttctgtagaagacattaaagcaaaaatgcaagcaagtatagaaaaaggtggttctcttcccaaagtggaagccaaattcatcaattatgtgaagaattgcttccggatgactaaccaagaggctattcaagatctctggcagtggaggaagtctctttaagaaaatagtttaaacaatttgttaaaaattttccgtcttatttcatttctgttaacagttgatatctggctgtcctttttataatgcagagtgagaactttctctaccgtgtttgataaatgttgtccaggttctattgccaagaatgtgttgtccaaaatgcctgtttagtttttaaagatcaactccaccctttgcttggttttaagtatgtatggaatgttatgatag

SEQ ID NO: 4422 - DNA, 1148 bp, Homo sapiens
ggaagtgttcatttaaacagcccttaaaagttagttgaatagaagtttcttcaagcaacagtattcacttgcagggaacagaagtttcaggtatttagcataagttcctaggtagaagagccatctggagatcctcgttcaaatattttcaaacaatatagaaggcctgtgacttatacttattataatgatgtcactttctcatttacagatgggtgtcaacctctcccagtatctggcagctgtaataacccacagttgattaacacatcctgtcttaagaacatttaaatggtttttattgagctggtcaagaaccaccccccaccatataggccaatcacattagtgctataccatttcagcttcataaacctgagcttacattgaagaaatgtgatcaaatgaagattaccctgaatttctagaggcaaaaatttagaaacatttgagggcataaaacaactaagattggaaaagaatcaaaatctcaaatgtctttagtccccaaatttatatcgcacagtctttattttctttgtatcatagggaataaaggctgagatttgaaaagccgtcttgttacttttacagtgaaacctctctgtccatacttatccttccttcccctaccaacaccatcaggtttcagcgtattacgccagatgctaagtagtgatgattgcatactttatttgaagtttgggttattttaaacttagatgcatttagttttgaaatcacaggtataacttgctttatctgacatatacatttcatttgaaattcagaaaatccaatcattccccatggatttataggatgatttttgaaatttgtgattttgatttttttttttttttgcttttcaatagtcttctgaaagcagacctcacattcttttagctctgtgtttttctcttcataatccaacatttagtgggttaatatggtgtcagtgtgtaagaggtctgaaatctaagatctaagaaaaacctacttgatctcttagctattagtgagtcaaatcatgatgtgatcttgagtacatgaataagacaatggagtgttagcaggttggaaggaaaatttagatttgaatgtagaggattaagatggcagatgggggcaggactagtatgcagctc

SEQ ID NO: 4423 - DNA, 1161 bp, Homo sapiens
gggtgagtaggtaaagcagaatctgggagtaatgtgatgtatacataagcacatggctacagttgattataaaattttgtggatattcagtggagatagcttcaacttggcggtgatagaaaagtaccagtattggaaaaaaactgaaacatgtttctgaaggtgaatttcgaccttttgtacttctctgtgagcttactgaccatagggatggtatctgaggggagtatttatctctgtgttccagcacatggcctggttgatcagttcattcattggttggttggttgattaatgagcaaaaaagcgtagatattcacaatattctggcttagacaatttcagagacattaaatattctgggactaatagtgggaagaattataatggaatgtggtctttaatcgcactatactgcttagagaattttaacaccaagacctctgaggatcccttcagtctaatcagtccacatctgcccctggctacccgatcatcatcctccttgcccagcatcatcttgttgccttttctatgccaaaatccctcacatctactcaaaatatatactctaaagctctctgaatgttatgcttgcaacaggacaaccatgcatttaatacatttatttgtccactcaacatttatctatggagcacttcctatgtatctggctagacggtgctggatgctaagaagcagatctactaatatgatagagaatttcaagttcaaatgggtaaagacttaaggtatgtactgagatgccctttctgcccagtcttttccagtgcattgtatgggagtttctggaaatagcattccagtattgttctctgactctagtgcagtgagcctaataacttagttgcatcttctcggagatccaagaggaaggtattggttctacatgtctcccacatgtcctccatatcataggaatttgcagttgagacattttcagttacaagaatattattatgaaaatttaaattgacttcaagtaactcttatgtatcaattcactatgaagcagagctaaactgaaacagcagctaaatgactgtccttttggaattagggttaacacctctgccttaatgaaacttttataacttacataatattctggcaggaaagatgctgggtaagtgtaaagta

SEQ ID NO: 4424 - DNA, 1129 bp, Homo sapiens
agggacagcttcgaagacatttccatctggtatacttcactagttagcaatgcccaggaatgcaatacttgctatttaatcattggtagctatgaaagacactctgggtatctttgttgtccttggacatttggggagtgcctgcccattggcaatgatcagagtttagtcacctctggggaagcataaagtgcttactcacaaaggggctgaggaggcagtgacttcttagagcaaattcttgttttccctctaggagatacagttgtattttaaaatgcaaacagaatcacttaagaaacagaacacttggaaatctctttagaagaagtgaaattgaaactgtgactttgcactcctcatgaaggttgctctcacagcattttgcttggactgtatggtgggtgtttgttgttgtgatctttttaatggaattcattctcagtatttaaaaatctggaggtctcacaaaacaattcggacttaaaacttctctctgaaaagtcaggtcgggcaatacagagcttgcaccttttagtggaagctgctggggctgacagctgttgccccctttgtatagggcaagtagtggctttggtttgccacaggtcccaacgacaggcccatgcctgagacaccggcttcaccccataaccatttgagttggtaacccttgaacagcagtttaatatggaggcaaattccaacacaatccttgatacaaaactacagatgaaatgagaatctttttttctggttgagcctatgtttgtgaccctctgcttttaactgtttgtgaggggaagtagtgttgtaactcagacaccacattcacttcaagtgttataagacacgggttgtaacagtaggaaatctttcgctcttccccagggtgcccattctccttatcccgcaaagcaaagtcctctactcctgggtctagttccggccccctctagtgtatggtagcttaaataaacaaatcaaggaaaaactatgtcctttaaacgtgaatcatcctttccccaggaagttttatggtgaaaccagagtatcttcaaagaggcggggccaaggccagagctggacaccacgactgccacgtaagaggaatcccaagcatactgcg

SEQ ID NO: 4425 - DNA, 1209 bp, Homo sapiens
acaaagcatttggtaactgcatctccagaaaagttgtgaattagcttctcagtttgataatggagaaggcaaaatgactgcagaggcaattcacacatagactactattgatatatggcagtaattatgtgattgtgtatatacatatagatatctaaatatatatatatatacgtgtgtgtgtgtgtgtgcgcgtatctcaaagtgtagataaactttacccccaagcgaggcatgagagttattagtgttgatcatttgatagaatctagagcatcatctcatcctggtaacatattagaatcccttgggtagcctttaaaacatgccagtgcctgaactccacctgagaccaacaaaagccaagtatctgaaggtggggcctaggcactcatattctatatggccctaatgattctaatatacgagctgaaaccactggcctagtgaaaacacagaaaggctaacaacatcgaccattttttgagcatatactatgtgccaggcacagtgctaggcatttcacgtgcacgatctcatttatcctcccaagaaagatatcaggcatattcataactttgacataaaccaattatacctaaattccctttcctgaacattgctagcagctaacaaaaaaaaataaaatgactttgctctaataaaactgaccaaaagtaggcaccagagaaaagaagagccgcaagatacatacaaatcatcccaaaattggttattctgtcccagacaaactagttgggaaacaagttacctaaaataattaatcaggctttgcctgtgccagtagagataatttgcttatttgttacttacacagtagttttcagaaccctgtggacattattaattcatcaaagtaataggtttttaaaataaactaagatgttggctcccggtaaaatttgtacctaaatttaaaagtgcttaacatccaccaggaaatttgtgtattgctgtttattattaaactggtatgtattaataaaacctttttttcttagaatgaccttttatggaaaaactaaattttaacaatcagaaactagataaagttgaataatgtatccagcttaacatttggatatttggctcaagctcaacattcattcattcaattcaacttattaagtacctacagtgtaccagacactgttttaaatgctggaatcccaaagtaaccccaataga

SEQ ID NO: 4426 - DNA, 1099 bp, Homo sapiens
gcctttaatgatgctactcaaaaagtaaactaagtttttaatggtaagtgtagactgtaatattaagcgctaaataatggttcactcacctttggattgaaagactttatgtcaaggatttttcagaatcctttcaaaaggatattataactggcttaaatctgaaataattcaattaattccacttcaggtgttgcactacatatttagcctttgatttagagtttgcagccttgataaagcctaagaagcccaatctaaaagagtcaggtttgctgctgcttcaagactcagctgaatactacgttctccatgaagcatttctttctttccccagctggaattaatcattccctctctgatctttcatagcactttaattatctcttttttgtagttcttaatactcattggtataaaacccccagcactttttatgtatcccaaaatgtatgcagtcttggcattttccccccttcttttcttccttcctcttcactctctctcttcctttttccccctttctctcatctgctgtgtttgcttcacactacctgtaggattacattcagattcatcatttgataatcaaggccttccttataaattcagcaatatttcttttcttgtttaaaatttattttttccacccatctgcacactgatctttcttttttctttttcttttcttttttttttttttttgagacagagtctcgcactgtcgcctggggtggagtacaagtggcacaatttcggttcaccacaacctctgcctcccgggttcaagcaattctcctgcctcagcctcctgagcagctgggattacaggtgccctccaccacgcccggctaattttttgtatttttggtagagatgaggtttcattatttggcctgctggtctctaactcctgaccttgtgatccgcccgcctcagcctcccaaagtgctgggatcttttttaaaaatttttttagtgacagggtctcactctgccacccaggctggagtacatggtgcaatcatagctcaccgtaacattaaagttctgggctcaagtgattctctcccaagtcattgggactacagacaggcac

SEQ ID NO: 4427 - DNA, 1197 bp, Homo sapiens
agtctttcagtaaatgttactgaaaccattggaaatccttaagttaaaataacctgacttaaatccataactcataccatatacaaacattaactcaaagtgtgttataaacttgaagataaaacttacaattgtaagacttctagaagaaaacataggacatttttaggacccagggataggcaaatatttcttagatatgatgccaaaagcattatctacaaaataaaatattgataaatgtagtttctttaaaattaaaaaacgttcctttactaacaccattaagagaatgtattaataaaggcaggatgtgaaggcgatctggctgtgacatctgtcaccccattgatcatcagggttgatttggctgacgtagctggctaggtgtgtgtccccttcctccctcactgctccatgtgcgttcttcctgaagctgcatgcttggcagaagaggacaaccatccttgatagaggaagatgcgtcttctgtcaagggtatacgagtagctgtgctcccctgctagaatctccaaacaagctctcaaggtctatttgtaggaggacgtgggtaataaggcttccaagactccagacacatcccaatgaggcactggatgaggcagcagtctacctttgtgtgtgtgtatacacacacacacacacacacacacacacacacacacacacacgaaaggcattgagaaaaatacttttaataatatatatgaaaaggatgaaaagggatttatatccagaataaagagctttcaaaactgaataatattacacaactaagtgagcaaaatattttaatagattttgcatcaaagaagatatgtggatggaaaataagcacaagaataaatgttgaatatcattggttacacaaattaaaacaacagtgatgtataactgtgcacctgtaagaattgctaaatttagaaagaagagacatgatgagtgttgacagtgatgcagaggatctagaacttttacataccactggtgcaatgtaaagtactacctaactttggaaagaatttggcacttccttaaaaagttaaacataaaccttatataggatccagccattatgctctttagtatttacccaagggaatgacagcacatgtcccaaactgctatgaacatacatgaatgttcatagcagaatgttcatacatgtaatagcct

SEQ ID NO: 4428 - DNA, 1195 bp, Homo sapiens
ttccgtttaaaaccttcccataaagaaaaagtggtgaattctaccaagcatataagaactaataccaattctaaacaaattctttcagaaaatcagaagtgattccaactcattctatggtgccagaattactcatcatttatctggacctcatcatagtatccaccccaaattaccttttatccttgtgattatgataaataaatgtgtgttaattgatggtaactattagtatagttgagacagataattctttttgattgaatgactataacaaaacaatgactgaataacacattagtgtcaacatagagaaagaactgtaataaatgccgagaacatgtattaggataagctatcaagaatgtgagggccatctggctgcaacatctttcaccccattgatcatcagggttgatttggctgatgtggctggctaggggggtgtccccttccctcctcaccgctccatgtgcgttgctctggaagctgtgtcctgggtctaagaggacaaccatctctagcagaagagggcgggtcttccctcaagaatataggagtagctgtgcttccctgctaggacctccaaacaagctctcaaggacaggctatcaaacaatcccatgtggtaaaaacaataaataatggctctcctggaacgttttccttcaaattatgaattcatggatccatcttcctcccgttttctgattctctcatttcagagttattttctccctgcaagtaaattggggacagggtgaagatcttcatgctagatgtttctgcccagcactgaaatatatcatatggtatttttgcccatatgccactgaccaaaacttagtcccttgccctaccaagatattagaggggttggttatgtagttgtcctgtatgccaggaggaaaataaaataacttggtcaacacatagcaatgtatctgccataaatattataaatactttgtataagagcatcaggaccaaacaggctaaaaccatgattcatatctaacaagctgatataggttaaaaaaatttttacaaatcaacttaaatcaaaactgtaagataagagagatttatctaaacatcagcaaattaaaacataggtcaaaaataaataaatgtgaaggacattaattaaagtattgaatccaggttaatatttttctctctatctgtgccattc

SEQ ID NO: 4429 - DNA, 1196 bp, Homo sapiens
agtactgattggtggatttacaaaccttgagctagacacagggtgctgattgatgcatttacaaaccttgagctagacacagagtgctgattggtgtattcacaatcccttagctagacataaagattctccaggtccccaccagattagctagatacagagtgctgattggtgcatccacaaaccctgagctagacacagagtgctgatggagcagggggcagcgctagtctaggaggcttggggaggttcggtagcgcaggagcccacagccttgggggaggctcaggcatggcgggctgcaggtcccgagccctgccccgcagggaggtagctaaggcccagcgagaaatcgagtgcagtgccagtgggccagcactgctgggggaccaggcgcaccctccgcagctgctggcccgggtgctaagcccctcactgccctggcgggcgaggccggccggccactccgagtgtgggcccgccaagcccacgcccacccggaactctagctggcctgcaagcgccctgctcagccctggttcccgccctcgcctctccctccacacctccctgcaagctgagggagccggctccgacctccgccattgcaggaaggggctcccacagtgcagcggcgggctgaagggctcctcaagcgcggccagagtgggcgccaaggccacggaggtgcccagagcaagcgagggctgccggcatgctgtcacctctcactggttggcacagccaattttagctgtgctgtcagacgcccagtagtgcacctcacctcagagcctcagacttacagcctcaaggcattccattctgtgtgcaggccagcttgggcagtggagccaaccacctccacttaggtgaggagaagcctcccttttcactctcctcagggctccaccccacctgaggttgtctctgcactctgtcattacaaaactagtccttagtgtcccagttttactttcaaaaatactatatccaatttaatttaaaaaatctctttctccgccccccgcttgtttcctctaatgctcaaaaggctaggccattgaaagttcaagagggtagaaatttctctttttcttctcatcaaaagagaaatagtccttgaaagaaccttattaaacttatatcctttctgaatatggtaatcccttggtattgattattttaattttata

SEQ ID NO: 4430 - DNA, 1215 bp, Homo sapiens
atatagctccttccaaagccctgcatctttcctggcctcctttcccacttttgtgtctctcatccctcatttctgtgttataaatagtgtcatagataaacaaagctggacactcctaaagtggtagggacagattttaatcaacaatggattttacagaagtaactgggcattttaaagggagaattagggagtaggaaaaagtagtatgtgggggctcagtagagtcagggaagtaaaacattacaaaaggttagttggcgtaaacccgatggggccagctgtgtttgctagctggaaattactgaagctatgattccatcccgtcacagagactggaaggcaaaggctctattctcaggtattggctagagcaaacagtagatttttttggcagccttgagtcttgtcttctcaagcaagcactttaagcggagctagagtcatcttagggatatggcattgagctgttagaaactgttagtgtttgttcaagtctttgtaagccaaggtgaaggcctagtcaagaagagggcttggaggagcctggctatggtttagtcaaggagataatatttatcagtcattatagatacaaaacaaatcagaactctgtcccaccacttgctggctgcaagaccttaggcaagatacttaaactataactttagttttctcatctgtaaaattgggataataatagttcctatctgataggattgcagttaagtaaattaatatgtgtaaaacacagtaaatgctcagtaaatttagttattaacatttctgccctgaactgcattacaatggattagttaagaaatgttagcaagtagctaatgcaaggccctatatgataaatacattagaatacttgaaataaagaattacagaggatcaacctgggaataaagagagtaattgcaacaatattttagtcaggactgcaatcataattttctagagcacattatggaaacaggttagaatctacatttctctcttgctttatttagaaaatatttatggaggcagcaggatttgaagaatgtagttcaagaggtagggagagagacttggaaacaaaagtttagaattcctgtaaagctaccattctagaaatacggctgtaaacagatgaagtattcagaacctcaacttttataattttgtctttaaaagaaactagtaattattaaaggtacaatttgctaa

SEQ ID NO: 4431 - DNA, 1129 bp, Homo sapiens
taaatctactttagcttatactaacagattcaatttgaaattatgtttaggtaaaatcagaattaaatgtatcttgatcacagggattaagtacagtatcttactgtgtaacttgtgtcacttgtgtatctggtaggagtttatcttctacatggagtttcattactgcctctccattgataaatgagcatctatagatgtagtttcacgggaaaaaatattaaatttatttgctgtcagaatagttttactgttacaatctatgtacccaggtattcacttctgagaagtggatactgagttttcaaatgctgataacttttagttggtagtatttattggataggggaccaaactgatttttttatgtgttgaattggcacaaatttgtgaaatagccactcagaactatcagtttgaatagaaatatatgataacatttgcctaaatagatcttctatatttccaaaatttgaaaacttgtataagttttacctaaaagtgtaaataatcaaatcatccttttaatattattctgaattctaaactggaatgtcaccaagtaactttgagtaatgaaaatccacatcaagaagaatataactatttgtccttaatttctttaagaatgtaaaaagcttttaaataaagttaaaaagacttccagtaataaaagtttatttacattctcctttagtagctatgcttataaagagagtcataatactaagaacatgcctcttcatctgaagtatgccataagcagtttggtgcttctaataagaatatacttttaaacatcatgtgcgtattctaagttcttcttggattattttgactatttgctgaaatgatattagggtaattaaacatatctcctactggttggcattattgatgcaatagtcaaataatacagcagcaaatatgaccaacacacttttaggaataccagtcgtcctcaacctggtgctttgcttctgttaaggtttgagtatcatcaatttaaaaggttatactcttaagaggaaaatatctgtgtaagtcatgaaggatttactaaactttaacctaatcatgttttctttggactttttcaattcttgtagggacttgtatattaaacatt

SEQ ID NO: 4432 - DNA, 1166 bp, Homo sapiens
atctctatgctttactgttatttcacctttattttaccctggataataaatgggatcttccaaaatgattctaaaacatttgtataatttttaaaaatcactaataactgattctctaactacaacaatccattttctctaatcctcactgggaacctgaatagcccgatatgatttggctgtgtcctcacccaaatctcaaattgtagcccccctaattcccacgtatcatgagagggacctgttgggaggtaattgaaacatgatggggggtcttttctgtgctgttctcgcggcagtacgtgagtctcatgagatctggtggtttcataagggggatcccctgcacatgctctctctcttgcctgctgccatgtaagacgtgtcttgcttcccctgcaccttccaccatgattgtgaggcctccccaggcatgtggaactgtgagtcaattaaacctctttcctttcccctgtcctctttctggtccagcccgcaggaccagcaccacgctcttctattattttttcaagtcccttgagggcaagcatgtggtcgtggaactcaagaatgacctgagcatctgtggaaccctccattctgtggatcggtatctcaacatcaaactaactaatatcagtgtcatagactctgagaaatatcctcacatgttatcagtgaagaactgcttcattcagggctcagtggtccgatacatgcagttgccagcagacgaggtccacaaacagttgctacaggatgcagcaaggaaggaacccttgcagcagaaacagtgatggctcctcctcctcttccccttcctctttcattggtgacccccaagtcccaacctgaacccctaatgcccaatacttgaagaggttttgtttgtttgtttactaatgatcgttttgtggggttttttaagggatgagtggatgagaggaataatagagaacagctatcctctgttgagaaggtgagaaaaagtaggatggaaaacttcaaagccttccagtccccagcacctgcctttgttgctacttccctggagatggtggaagagtttcctaggtctttcaggggcagcatgtgattcatttggagatggaaggaatctgtcccacatcaggaataaaatttatgatgcaggggaaaaaaaaaaa

SEQ ID NO: 4433 - DNA, 1212 bp, Homo sapiens
atagctccagagtgtatcaagaagctgtcacataatgggcattcagttaatgtggcatgaaagaaggaatgaatatatgctccctccaactactacttaaaaaaaaaagtcacacgtttgcttctctatctacatcttaaccatttttaatttatctaaaagtcaattttaaaagaaagtattatttgacgccaagaactggtatttcaagttttactacaaaagaaaccgatacagcagttttaaaaagtgctgaacagcaaaatcaaaatggaacgacactactgtgataactgcaaaggggctagcacatgttgctttaataaaaaagccatattactatgtgctagaaacaaggggcttatcaaatcatacatatacaaaaaaatcaagatgtatgttaactgtcaaacacaaaaacaacttttttctataactagattgagtctgaaattatttctgaagacaccaattccatactttcaaattaccacctacagagacatttagaacaaaacagtctttaaaaaaaatcaacattaagaagataactttaaaagcaaacatagtgctcgcttcagcagcacatatactaaaattggaacgatacagggaagattagcatggcccctgcgcaaggatgacacgcaaattcattaagcattccatatttttagaataaaatacctaggaatccaacttacaagggacgtgatggacctcttcaaggagaactacaaaccactgctcaatgaaataaaagaggatacaaacaaatggaagaatattccatgttcatgggtaggaagaatcaatatcatgaaaatggccatactgcccaaggtaatttatagattcaatgccatccccatcaagctaccaatgactttcttcacagaattggaaaaaactacttcaaagttcatatggaaccaaaaaagagcccacatcgccaagtcaatcctaagccaaaagaacaaagctggaggcatcacgctacctgacttcaaactatactacaaggctacagtaaccaaaacagcatggtgctggtaccaaaacagagatatagatcaatggaacagaacagagccctcagaaataaggccgtatatctacaactatctgatctttgacaaacctgacaaaaacaacaatggggaaaggattccctatttaataaatggtgctgggaaaactggctagccatat

SEQ ID NO: 4434 - DNA, 1225 bp, Homo sapiens
tctcatcacaaaggaaacaaagcactatcagttctagaagaagcatggcagtttgaggaaacagtaattgtgaacgaccaaaaaaaaaaaaaaaaaccggcaaaacttcatactttcaatcctgagtaggcacaagggaccaaaatgttggtgcataatgagttgtaaaatgattttttaaataatgagattcaagagacaggaatcaataacttctatttcctctgacgctaacaaaaagggaaaggaattagaaatagacagaaaaaacaaaaactacatatcaggaagtcatggtccagaagttaaggaaactgaaatatagcatgattctcaccagctggaatataagagactccacttgctctaatgctcagaatatttccttcaagtggcacaggtgtaattatcaagattatccctccttcttatgaagccaaactacctgacatatactgcatggtatttaatatcataaaattgaaaacactatgtactggttttcttttttttaacattttttatttctttaactgacaaataggatgtgagggcgatctggctgcgaaatctgtcaccccattgatcgccagggttgattcggctgatctggctggctaggcgggtgtccccttcctccctcaccactctatgtgagcccctcctgaagctgcatgctcagtcgtagaggatgaccatccctgatggaggacgggtcttcggtcaagggtatacaaggagctgcactcccctgctggaacctccaaacgagctctaactgacaaataaaaattgtatatatttatcaagtatatcattttgaaaaatgcatacattgtagaatgctaaatcaagctaattaacatatgcattacatcacttatttattcttttttgtggtgagaacacttaaaatctactctttgcaattttcaaaactacatgctttattattaattataatcagtatgttgtacaatagatctcttgaacttattcctcctacctaaaattccgtatccttgtttactggttttcaatttttgtaaccaacctatagtcagagtacataacacattcagtcacagaatgaaatgtagatgatataaggtatgttgatgtaaaaaaactgatggctgagggagggtgagaaatgagaaggaagagaaattgagtgggagaaggctgagaagtaccaaattccttgactgacagagtggggagt

SEQ ID NO: 4435 - DNA, 1198 bp, Homo sapiens
atttataagagcactttacaagttttactattttttttttttttagtttttgttctttaatctcatttttaagatagaaaaatttttagttttttgttaccaaatctgtcagccttttacttcattgtatttttcagttatggctagaaagaccttttgtaccacagattatatatttattttttctactaactttgtatcttttttatgtttcaaaatttacatttatctggaatcagtgttgacatattgttttaatgcatctagtaaccatttgtcttgctcatctattattaaggatgtatgtatattatagaattgttttgcccatctcatgatcattttccttccctcacctttcttccaagaaatgaaattcagtgggattttggttggcactgcataagacttacgaatgaattttgggagagttgtgcttttgcattattttagttttcttatttagaaagatatgtctctccattcatttttatgttctactaagtgacattttttcattttctgcgtatattatacattctgctcattttgtataaaattaattttctgttttgattggtctcctgaagattgttaatcttcctaacagccgtgtgtgtgtgtgtgtgtgtgtgtgtgtgtgtgtctgtgtctgtgtgtctgcatgcatacgtatgcatcccatgacatgctattacatacctttgtcttattgcctaccctgttatattgaacttaccagtttgtttctgtgcctctccctcctaaactgtaggtactttgttgactgggattatgtattcatattcataagtttataactacacataccatacagcatctttctctcctttctttgcttgctttttaacttagccataagccatgtggttactttgaatgtgtattctcaccactaccatgttatcagaattcttgtttcaagatatctgtattatcacctgttgttaatttcctttatttagatttatacatgccttacacaaaaaaaggatttatgacagctcattgacctgggtttgttaaatcgttcactgtactacccagtgtgatgatgtgccagggtccttggtcaggataccatgagagtcttgtaagggaaaggagagaagtgaattgttattgagattctttttttgtgcttggtctgagctaggtggttttctaaacattttat

SEQ ID NO: 4436 - DNA, 1200 bp, Homo sapiens
tggtctattcagagattcaacttcttcctggtttagtcttgggagagtgtatgtgtcgaggaatttatccatttcttctagattttctagtttatttgcatagaggtgtttgtagtattctctgatgttagtttgtatttctgtgggatcggtggtgatatcccctttatcattttttattgtgtctatttgatgcttatcttttctttaagaatgttgaatattggccccaactctcttctggcttgtagggtttctgctgagagatctgccgttagtctgatgggcttcccttcgtaggtaacctgatctttctctctggctgcccttaacaatttttccttcatttcatccttggagaatcagacaattatgtgtcttggggttgctcttctcgaggagtatcttagtggtgttctctgtatttcctgaatttgcatgttggcctctcttactaggttggggaagttcttccggataatatcctgaagtgtgttttccaacttggttccattctccccatcactttcaggtacactaatcagttgtaggtttggtctttccacatggtcccacatctcttgggggttttgttcattccttttcattcttttttctctgattttgtctttatgctttgtttcattaagttgatcttcaatctctgatatcttttcttccacttgatcgattcagctattgatacttgtgtatgcttcacaaagttctcatgctgtgtttttcagctccatcaggtcatttatattcttttctaaactggatattctagttagcagttcctgtaaccttttatcaaaattcttagtttccttgtattgggttagaacatgctcctttagctcagaggagtttgttactacccaccttttgaagcctacttctgtcaactcatcaaactctttcttcatacggttttgtgcccttgttggaaaggagttgcgatcatttggaggagaaaaggcattctggtttttagaattttcagcatttttgcactggttttccctcatctttgtgaatttatctacctttgatctttgatgctgatgccttttggatagtgtttttgagtgggtgtccttttagttgatattgatgttattgctttttgtttctagttttccttctaacagtcaggcccctcttctgcacgtctgctggagtttgctggaggtccac

SEQ ID NO: 4437 - DNA, 1187 bp, Homo sapiens
acgtgcctgtaatcccggctgctcaggaggctgaggcaggagaattgcttgaacccgggaggcggaggttgcagtgagctgagatcgcaccacttcactccagcctaggcaatggagtgaaattccatctcaaaaaaaaaaatgttcctgagatactgatatgtagcagtgtacttaccaaaacaaaattctttcaatggaaatttcagtagagtttttgctaatataattttactagcatttgaaatacttataaaccagcaatcatgttttcttgaattttaaaagcacaaggtactaaagaaaaaattccagcaaaatagaaaaattagagctgtactttgaaaggaaattatcaaattacttataatgtcagtctgcttctggctccaaagttcctttggagaaaagtaatttaagaaactcttttgtattaagcatttatgtaaattttgctttccatcctgttttgtgaaagagtttgtactcaatacaaaaggaagtttaaaattacttaattgttatatcttcatgtaaatatattcatatttcaggaaaatgagctgtgtttgtcttagaacttcccctgtgccctgtcactttttttctgccttatcggcaagggtgctagagatctgcattgggaagcccaagttaaggatagctgtggtattggtcagaagagatcatattttaacattcttatgtgaaagagtttcattcctcttttactttttggtatttgttttaaaattgatttgaaattaaatatgagaaactgttggcaagataattcctatttttctttctcattttctcttaatcagaaaaagaataaaccaaaggaaccacccaaagtacccaaatcagcaccatttttcattccaacaattcctggccttgtacccagatatgctgcacctgaacaaaataatgatccccagcaggtaaaaaacaaattagaagattctaagtatatcggtgtatgtttgtatgtgttttctgcacttctttaccaagacctagttttacagatatagggtaaattaatgatagcttttaattacaaactatacatttttgggtgatacttgaattatttgaataatgtgtatttgtttttgtttaagtctaaagtggtaaatcttggagttttggctcaaaaatcagatttctgcttgaaactt

SEQ ID NO: 4438 - DNA, 1200 bp, Homo sapiens
gtctggtgagtcgactgcggcggcctgtgtccgaagtgtccggggccgtgaacaagggcagcggcctggcctcaggcctgcgttcccacgtttggaaacggggagcttcgtcgatttgtgtttacatcatcgactatgccagggagttctccagataagcctggttttattttcgtcagtgaaaaggccttaccgtataactgactttatgcttgccctgcccccgtataaaataacttaaaagcagcgtgcctggttacagctgtttccacgtgcggtgctcgtcgggagtgatcacctaccctacaggtgagttttcacgttcgtgcaagaccagtcgccatttaaaacgcatcgcatttcacttttcattattaagtcggattttaaatcgtgagaaaatttctctgaaatgtattgtccgtttttaggctgtaatcggcattactgtcagccagtcagcaaccttatgccataaagcctacctcacgcagtgtcagcctttgtgttgcccattcactttggaaactagtgaatgtggtgtcaaaaaaggcgtaaattaaacgctttgcagccttttcctgcccttaaatttgatacctttggtgtaggagctgcataagtaacagttgctgcttttacgtttccacgcgtgatcttgaccctgctagccttaagtgtatggtttctcttagccagttctaatttttgttcaggtggaagatggatgcctgaagtgtagactgctgctagctgaataccatctgggagcataaaggtgacctgaaggtagggtgatatgtcttaaagcactttgtaatgggaatttttatcaccttttaaattggggttccttctctagtgagttttaatgtcagtggtacattcgtagtgttgctctgtctgtagctattaaggtgagttaataaatgggatagcctccacagcttatttttgggaaggttttgctgatacttcctgagaagcccagggaaataaatacgcatagtactggcattctgcatctctttaagatttgtttttatgtgtagtaattgagttttttaaaagcttgtgaaatcgcaggcatattaccaagttcttgattaaaatgtaatacaaaaatatttgctgtcgaattgagtactttattttttctcttaggatgtccttggtgaggattttgaaaatttgatcttc

SEQ ID NO: 4439 - DNA, 1200 bp, Homo sapiens; identical to SEQ ID NO: 4438

SEQ ID NO: 4440 - DNA, 1275 bp, Homo sapiens
gaccataatgctataatgaaaatcttggacctttgatagcagcacatgtattgtaaatgtcccaggatcagagacctgttgaatttgagtgggtgtctcctcaagccttacctttctcaggtgttttaaagaaatgcagggaggcaatgtttctgaagacattttctgtttataagagagtagaaagaaacacgagtttgcactgtaaatgcagttataaccttttatacagatttaccttttcagtgttcagtacaagtttaagttgctttctttgagggcatttattctgtgtgactgtgggttttattttgtattctggttaagaaaataatgtattgagttactgtcaagtagccaagttaatgggaatgctccatctacctgttacagtgattgcaataatagtatattggagtttttcaaagaaacttaaagtaatgcccaattattaaatgaacacaagagctgagatgtcacattcgtcagcattacaggtgatctattttggtggcattttgtacttctctctgcttctaaccactgaggctctctaatcttcctctggagttttagtgaaaggatttattgagcagcttctggaatataatgtgcatgtccaaaatgaactcagcgcttcaaaaggacaaagtctgtagcctggaggggcttgagtggatgggagctgatgctgtgattttgagctgtggttacatgcagtcagtaaacctgtgagactgctggaggaaatgtagcagacagcatggaggctgggacccagcagctactttgggtcatgtctttactgtcctgcctccaaccctttagtctcgtagacttttgttcttgtggaaatttcttctgtattccagttgtgtaaatatgtatggaaaactgatattactaggttttacgttgcatctccagtattgatctttggaaactgatgttacattaggttccaattcgcaatagtagcagagactgacatgcttttattgacctgctaagcccctggatgatggagcgagaagggaaggggtatgcagtttacccaagtccaaataaagcatttcactaggttacacgttatgtatatgtgttacataacagtaacatacataactcactcctaggaatgtattttgcttcaggatttttaaattcaaataaggatggcagtgcccattttaaggaggatttcagctataactgaggacaatcaccagggcgttaagggggctttagtgttttggctgcatctgacctcattga

SEQ ID NO: 4441 - DNA, 1149 bp, Homo sapiens
atggtgcacaatttaaaacttactgtttatttctagaatttcccatttaatattttcagaccatggttgaccttgaggaaccgaaaccacagaaagcaaaactgcagttaagggggagctacagtacttctgtaccaatgactgcatttattatcgcccttaagtctcacaggtctgaggaaagaatagttatccccatttacatgagaaaaatgaggctcaaagaagtgaggagtctcactgctgataaatggtagaattgggatttagcccagatccactaacgggctctcttctctccactgcatttcctccttgactccttcctgctggcgttgctaccgtcacagggtggtaagcaggaatcagcctgccggcagaggaggaggaaggaagccttgggttacgaagtccacatcatctgaaagcaggctgtctggtgatagaattttgcaaactcactcttttatcagcccccaggtgtttttttttttttctggaatccaagttcattccattatcctgtatctcagaattttccaaatactgtgttgggaaaaaaacaactgtggactctaaagaattatatcccttgtccaagggtcatctatattctgtgcatcatatttttctgttcttaataaatgcaagcttctcttgacccccatttgtttcagacccaggactcgcagacatatgccaacttgctagtctaataagctgcttctcatagcataagtgcaggatcgtctccaggagagccatatacctgggaaagaaggaacagtactgatgtcatgtgacagtgaattgtcactccctacatagttaagaactctgaagcatgattcacaaatggccacagctacacccttctccacctcccacttgctgaggagccaagacaagacacagctgtggcacccagccaggccagccctcccaagaccctggctgctttttattcatccattcagctgataaatgtgatttggcactcacagcgtgccagaaccaaggcagggtgctagaggcagctctgtggtagacaggcagtctgtcctctaggaatttacattcttaggaggagactggtgggcaaatgggtgatcgcagagcagtgagagaatgtccccagtgcgaggctga

SEQ ID NO: 4442 - DNA, 1192 bp, Homo sapiens
ggatactcagaggcatagcagacttgggcccagagcacagggataggcaaaacttttctgttaagggctacttagtaaatattttaagctttgcaggtcctatggtctctgacattactactcaactgtcccatggtaagataaaagtcacagacaatatgtaaacaaaatggacatagctgtgttccagtgcaacttttttttttgagacagtcttgctctgcctccaggctagagagcagtggcgtgatcttggctcactgcaacttccgcctcccaagttaagcgattctcctgccgcagcctcccaagtagctgggactacaggcatgtgccaccacacctggctaatttttgtatttttagtagagatggggtttcaccatgtggccaggctggtctcaaactcctaacctcaggtgatctgcccacttcgacttcccaaagtgctgggattacaggcctgagccaccatgcctggcccagtgcaactttatttacagacactgaaatgtgaatttcatataatttttacatcataagatattcttcttttgatttttttaaccatttaaaagtgggaaaattctttttaccttgtaggctctacaaaaacatatggcaggtgaatttggcccatgggctgtggtttgcagccccctagagtatcacagggaagtaagggggagtgtttacttttataatagctgagatggatgagaatagctctcattgagtgtaagtccttaatattttaaccttttcattaatcccacaagacctctggaagatagttggccagcatcctaactaacctttgagaggaagaaaagattttaagttcagtgagctagttttcaagctgggagctaataattaccaggccagactttaggtgtttgacccgtgactaaggccctctgctcattgtatcactggggagggaggcagatgccgttttcgtatttatatagagaaaccaagtctcctggaagattgtgtaatgctttgtatgtaaacgtcaatgcaagttttggcagggacaaactgcattaaaaaagcattgcagcagcgaagtgtgctggctttaggaagcagtttttagtggatatttacctcacaaagtcttacaactgaaaaatcatatctttcggaatcacttaatttttgtttctaaagagcaaagtgcctc

SEQ ID NO: 4443 - DNA, 1192 bp, Homo sapiens
gtattttaattgaaaaattaatcaggcttttaaaaattacttttttattgtattagttggcttttaaattcagattctttatatttgcttgatttttcctggaagttccaagttttatgaatttgtagctgatagtaggttttacttgtgtaccccatctgcactttgatgttgtgtagatcgttttgtgagttatttgaaccgtgtaactcagagaatagtatttcctcatacataaagtgacctcacttttaatcagctcctttatagtatgttgaaaatcactgcgtgtaatgagaggtattgagagtttcttgcacacatgagtgtaaaaggttgagaactagattatacaaagtagtaagtcacagtgcatggcaactttctacaggttggattataagacttatgtggaataggagaattatattgggaaaaaattattttctctaacttgaagactccagagacacttttcttagtcatgaccagtaatatttttcatatattttggaagaaataagctcctcactataccaccagttagtgatttatttatttatgtattttagagacagggcctccttctgtcacccagtttggagtgcagtggtgtaatcatagcttactgcagcatcaaactcctgggctcaagtgttcctcctgcctcagcctcccaagtagctagaacctcagccccatgccaccacactcagctaattttaaattttactaatttcatttaatttttgtggagatgggggtcttgctgtgttgtttaggctggtcctgaactcctggcctcaagcgatccttctgccttggcctctcagtaaattatatagaagagcacttctgtataatttactcagtttcttcatcacatatttccaactgttgccctaaataggtttaaaaatgtgatcatgttattagaaaatcctttccattgaatttcagggatgctgaatttcagggagctaaattgttgacccttgcctgtagttgttattggttcagaagtaaattttattgatgctacaagtaaaaaattagatctgacttagtaaactcaaaagttttacaaaactgtattttactatgtagatgtatttctttaaaataggtatggatggatatttttatgaataaataatattgcattatagatggaatgaaactttgcatttaa

SEQ ID NO: 4444 - DNA, 1184 bp, Homo sapiens
ttataggaggaataagaactcctaagtgttggatgcaagaagtgtagatgagaagttaatgtgaagaagatatagagccgcagaaacaaagattgaagaccaacttagactttaccaattttaaccagaggtacccttgcttaaccttttcgttttaactaatggggacaaattgagactgtgcatggagaattttgttcttacgtgtatttgaaggtagtttttggccataagttataaaggttttaagaaaagagttcctttggaaataaaaattgagtttttactgcatttggggtcctgctatctaaaaatatgagaaagaattacgaataaacatgattcttgcccttcaggagcctgattttattgttgtctgaattgattgctgactgtcataactatttcccagaggaagttttcttaaggttatatatatatatatatatatatacacacacacacacacacacacacacacacacacacatacacgtatatacatgttcttagaatgttttataaaatcaatttttattttatttatttttaattttttttagagacagagtcttacagtgtttcccaggctgcagtgtagtggcgcagtcgtaactcactgcagcctcaaactcttgagtttaaacagtcatgctacctcagcctcttgagtagctgggactacagacatgtgccaccatgcctggcttattttatttttttagagacagggtctcactctgttgcccaggttggagtgcaatagtgtgaactcagctcactgtagcttcaacttccttggctcaagtagatcctcccaccgcagtgtcccaagtagctgggacgacaggcatgtcccaccatgcctggctaatttttaaaattttttgtagagtggggtctcactgtattacccagactggtcgtgaactcctgggctcaagcaatcctcccacattggcctcccagagtgctgggattatttatagatgtgagctgccatgcctggccttattttattttttaattgatgcctaatagatgtacatgctttcaaagtaaatgtgataatttaatacattcatataatttgtgaagattaaatcactgtacttggcatatccagcaccttaaatatttgtgtttatgctagaactatttgaattcgtctagctgttttgaaa

SEQ ID NO: 4445 - DNA, 1205 bp, Homo sapiens
taacatatgcattatgattctggagtctttgcagtgctattcctaattcatcaacctgaactgcttgcttgatgtttttttttttttttactaattccatggaattacatccacaaaacaaatgttgaccaaacaaaggtgaaaagcagctttgaagacagaaatatatcaacataaaataatgctttaagtgttactcattttttaaaaaggatccgaaatacatcagcacagtggaatttgccataagcattttttcttttcctttcaaaaaaatgctatttttgcaaaacatatatgtgctcattggagtgatacagttatttgaagaaggaaaaacttaaaaaagcccatatttccaatcttaaactgtgagtctcatagaagtttacacatttatattgaaaatatggaacatacatttctgataatcatataagcatatttataattcttataaacatcattttttacatttcttcaggcctgtctacaagtcattttgcttgggcatttcactcagtagcagaagaagaactgctgaacatgttgccagccatgcagaaagatgatcccacttggtctgaactaagagctatgggtgtggggtggtgggtccggaatacccgcatcttacgcaaatgcatagaaaaagtaagtgttttattttggtgtataagtgaattaatattttttggacgtttctttaaatggcatttcatatcttctctgccattactccctcttgtttttgaagcagcaaaaggcttttgaatagtctttacatttcatttataacgtgtttcaaaatatctaaagttttaaaatgtatattctaattcccaagtttttaattgacaaacttgttagtagtatatgtctgatttttacaaaataatatatatgtttagaaaaatttaaaaatagtacagaagaacttgtaatgaaaggcaatagtcctattattctctgtatccattgaagccaccactgtaagtcacttttgttattattttatatatacatgcacatattattcatatacatatttttaaaattttattaaacattcaatggatatgtgccagcctttcatatgaaagaaattacttgttcaaaactgtttctgtgaaattttgatcaatattttttgattataggtagctaaagcagccttttatagaaagaatgatcctttagatgct

SEQ ID NO: 4446 - DNA, 1157 bp, Homo sapiens
aggtcatgggtgaattttattatgtgatgtatatattttctaaatattctaagttttccacagttagcgtgcataaaaaacgcttagtagtcataaaaaaccaaccaaccaaccaaccttatttccttcccacttgggcttttggagttggctttggtttaacctttggattgctatagctgctggtcagaattaaaccatgtgtctacttttctctcaccagacagtggtgcactccatagagctccaagcaactgatgggcatgaccgtccactcaccaactgctcgatcatcaacagtggcaagatagacgtgaaaacgccttttgtggttgagatcgctgattggtgacacaactggcagaaaacaaggatatgctttggcaggggtgtgtgtgtgtgtgtgtgtgtgtgtgtgttgtgttgtctttcaattatttgcttttttttttttactttctttttgtattctatcccagatcacaggaaagttataaaaatcaaaccgtcaccctttagtttgcttgaactttagtaaaccacctgcttagggactttgaacttaaatatatccccttcctcaagtggtgctattttaaaactaaaaaaaactttgaattggctatttttttaatgcaatattttttttctgaattcattatgatccccatattgggtaatgctgaacatttatctgaaacagatgaggatattattattttgtatccaaacagaaattcagataaagggaaatttgactagtgtaatctgagatatgtcatagggatttctttctgacaaaagggtgctttgctgttctttatattaaatacttttagatcaactctttttgcaagactttttaaaaatgtaaagttctttaagaaatatacaaaaatacacacactctagcattaacagtgaacagattagaaagattttataaatcaaactacaaacataattagataactcagaaattatgcccatccacatctcatatacttaaggtgattatttacttattgttattcaatgtaacatttttagaaagttatctttagcccagttgcaataggaatattttttgttacttacataaggggattaagactcaggctataaggcctgggtatggtggctcatgcctataatcc

SEQ ID NO: 4447 - DNA, 1194 bp, Homo sapiens
taaggatagacatgggtagtactaagagtctcctgtattgaaagcagtgtcttacatgtacaataagtataaaataatattataccaggtgtaaatatatgcaagacataggcctttccatcacagagcttgcaatttagtaataaggaagaaacaactataaatataaaatttactgcctaatagtaagagccttgacacaggccatatagagtactcaggaggagaaagtacgtctatttaataggagttggaaaggtgtcataggagaggaggtatttgtgatagacctctggagatagatacttaagattttaatagaggaattggttgtgatttaggaaagtagtgggggaaatgtaaatataatgaacagaatgatcatagcaaagaggcatgaagtgggaaagcataggctgttcttataaaacagaggagggcccgttttctaagtcatttctggtaataagggctggaacttaagtagtagcagtaggaatgcaacaagaagattcttgtcaaagatgatgccaagggctcaagcttcagtgtctggtccagttttggaaatacagttactaaaaagctgtttggagggtgggaaggagataggatttgcaaatttggatgttttaatttttacagaatgaaattcggctaccagttagaaatatggatctgttgttgggagaatgattgggcttaaaaatagacataaaggagtcctttgcagaggtagtgtttaaagttgtgccagctagaacttggaattcttatgtttaggaaagagaaaagaaagctaatgaaggaaataacagctagagaaaatgtgaagatcactatgatgatactgttagagcaattagcatgtctggaaggcttactttgtgctaggtgtaacactgagcccttcagaatttatcatttaatcctgacaaagatccctacatagcaggtaatattcccattttattaggtaggtgcaaaagtgaaagcggcaaaaaccgcagttacttttgcaccaacctaatgaagaaactgagacttaaagaagttaagttgcatgtgatcacataggtactaagtgatagacccagcattgaaagcttttgatgaatccagcctcaggctctttcccttttatgatatggtcttagtccattgaagtcaaggaatgaaataatttctaggaga

SEQ ID NO: 4448 - DNA, 1220 bp, Homo sapiens
gtctaattgaggtaattttaagttgggaggtttatattagtgaatgtatgttgatttatgaaacagtataattttgttcctttaatttttaagaagtaattgaatccctgatatctttgtttcgtatctttgttattaaggtatataaataaagggtagtggttaatttaaaagtatactgtggtttgatttcaatgggcatcaatagatagcagtaattcttgcctaagcttttgttatgttatctaatttcccagacatatattttaaaattcttagttgactaatttccttttcttaatattctagctctctatcaatatcagctcacatcattgaaaagataattttgaagacatgttttgctgaaaagacactaagaaaaattttacgaatgggatgaacatgctccagttaattgactacctactgcaatttgaatgttaacattacccatctggtacagttacctagtgatgtacctattttcacaataccctgtttcagtgtgcttgtcttgattaaagaattcaaagtggagtaccgcaaacttgatatggaaaataaaaagaaagacaaggacaaatcagatgatagaatggcacgacctagtggtcgatcgggacacaacactcgaggaactgggtcttcatcgtctggagttttaatggttggacctaactttagagttggaaaaaaaattggatgtggcaattttggagaattacgattaggtaagactattttgtttattccattatgttagaaacattttaaaaattggaagatactttttaatgaaaatgatttagttatttaattgtttagttgtttaatggttgtggtaattttaaagaataaagatgttggaaatttcttttgtagttgtattttcatgtgtaaggaattccctagtataggagtgtctactttagccatccagagattgactatccagattatgagaaaacaaacaattaaattaaaatagcccagtaggctgaaatagctgccagtaaagcctttgcaatgttctttaggaatgatatttaggccactttttcagattcaaaaatgtttagtaattgataacttttggggcataggtatggcttaaagtcaagttaatatactgaaactgcatacaattaatgaaatttacatcattgtaatttaattttttccttttacccttccttctgccccaagtatgtttgggg

SEQ ID NO: 4449 - DNA, 1200 bp, Homo sapiens
ttttataagtctgttttcacactgctctaaagaactactctgagactgggtgatttacaaagaacagaggtttaattttctcacagttccacatggctggggaggcttcaggaaacttacaatcatgatggaaggcgaaggtgtggaggcaagtccttctgaacataaccagatcagacatggcaacctgctgaatttaagcatattagtcagtggaggaaaagaaattaacctggactccctcagtaacagcaagtgaacagggaagagcccagcattgaatccctgccccacagtagggtgcaggaaatgtggcatattgaagacccactccccggtgatgctcatggggggcccaagtccttctgattgaggcccagctcatggacggtgtgaggctggtagtggtccccagtgtgccaggcccaggtcttcccagagttgggctgcttgggaatgcagacgaaagagggtggtaaactccatctatggctaaatactggcatgagaccaatagtcaacaagtaccataagtgaaagttgaaaagaacttagaagagagacttcaagagggtatgacccgctctggggatggtatcaagtagggagtttgactggggcagtcaaggcatgtcttacatagtggcaggaggagtaggggactgccaaaatctttaaagccatcagatcttgtgagaactcattatcctgagaacagcatggaggaagcaccctgtgatccaatcacctcccaccaggtccctccctctcatgtgatgattacaatttgagatggggtttgggtggggacacaaagccaaaacatatcatttcaccctggcccctcccaaatctcatgtccttctcacattttaaaacacaatcatgccttcccaacagtcctacaagtctaaactaattccagcattaactcaaaagtccgattccaaagtatcatttgggacaaagcaagtcctttctgtgagcctgtaaaatcaaaaacaagttagttacttcctagatacatggcaatacaggcattggataaatacacccgttccaaataggagaaattagccaaaacaaagaggttacaggccccatgcaagtccaaagcccagtgggggagtcattaaatcttaaaacttcaaaatgatctcctttgactccatgtctcacatccagggcacagtgatgcaa

SEQ ID NO: 4450 - DNA, 1387 bp, Homo sapiens
cctattcagacatatctgatgctgctgacgatggtggttctgacagcaggtcggagggtatgagatcaaaggccagttccccatcagatattatttctagtaaggacagtgttgtaaaagggcattcttcaactacagcacaatcatctcaactgaaagagtcccattctccctattaccacagctatgatccttattattctccaagttacatgcaccctgggcaggtcggtgcccctgcagctggaaatagtgggagcacgcagggaatgaagatcaagaaggagtctgaggaagatgctgaaaagaaagacaaggcagagcagttagattctaagaaagtggaccacaattctgcatccttacagcctcagcaccagtcggtgatcacacaaagacatcctgccctggctcagtcactttattatggccagtatgcatatgggctctatatggaccagaagtctctgatggccaccagccctgcctatagacagcagtatgagaagtactatgaggaccagaggctggcagagcagaaaatggcccagactgggagaggagactgtgaaaggaaaagtgagctccccttgaaagagctgggcaaggaggaaactaaacagaaaaatatgccatcggccacaatctcaaaagctccctctactccggagcctaacaaaaaccattctaaactagggccatcagtgcctaataaaactgaggagacaggtaaatcgcagcttctctccaatcaccagcagcagcttcaggccgacagcttcaaagctaagcagatggaaaaccaccagcttattaaggaggctgtagaaatgaagtctgtcatggactctatgaagcagacaggtgtagacccaacctcgagatttaaacaagtaagattgtggagcgtggccccaacagggagagagcagtctgagacttgtattatacatgtctgggcttgatctggttagacttctgacacaggaaagaaacccatattagttttttcctctgctcttgaaaaatatcttaagattctcaggagttactatgtagctctaaaatgtacattatcagtattttcttgtcatggtgtatagtaaaaggaactgtggatgggtgctttgcagatttgtgtttcatgccactaacttgctctgtgactctgatgaggtccattaatttctttttttaaattttttaaattttttgagacggaatctctctctgtcacccaggctggagtgcagtggtgcaatcttggctctctgcaacctccgcctccgttcaagcgattctcctgcgtcagcctcctgagtagctgggactacaggcacgtgccaccatgcccggctaattttttgtatttttagtagagatgggg

SEQ ID NO: 4451 - DNA, 1137 bp, Homo sapiens
taatattaaaattaagtagaactgaatggcaccagaaaatgtaatcggccgcaccaggagactttatcaagacagaaagcattgttctcctaaccagtacctttttggaaagcttatcaaatttagtattactttcacatatcttggagtcaatccattatctagcacacaaatggaacagaatttaaaatggctttctgctcaccggtttgggaaagtgtgcactaattcatatatactaattcatatgctgagatgtactaaataaagtattaatagcataatactttggctaaatgtcaaagtcttttgtggctgaaaatttctcaatcaaaagctgtgtataaaaccaaaccatttggtttttgtgctttttccctgaacccaagaaatttgatttccgaaatgtcaacatgtgctttctcacttgaagcattcacattgtagcctgtcgtttaccactttgaacagcaaggttttgtggggtggggcaggttttgtgcatgctgtgtggtaggccaggtctgggtccccactgcagtgagcaacagacctggacgctctggtgtgtaccttctacggccacaccactcgcctttccctcctgtctcccctgagaggcctgtttgggtaagaagagataatgggctgcctgttttctctttcaaagaaaaccggaaagcctttggaccaataattctgccacccctttagagtgctgaatttcttcaaaggaagcctgaatggaatgctgtactcttcaccctgaggctatccagtctgttgctggctgctcacaaatagagctactagtttccactgaaaaagatctttagttattttaagcaaaggacatcagaaggaaataataggtttctacctcattcttccatcaggcattttcctgccctatatactaatccccacagatatttgccatgaaaaaatttatttattgttccaggtggcaacccccaagtgttagcattgtccagccaaacattctgtttgcattggtattagatttactggttcagggactgtggcgagtacaaatcagatttttgtccagaagtgtgtgtgtctgtgtgtgtgtgtgtgtctgtgtgtctgtaactcttgagagaattacaaggc

SEQ ID NO: 4452 - DNA, 1197 bp, Homo sapiens
agggacgtttatatttgaatttccctgaaccgccgagtgtgggcggtggcgcagatccgtcccggaaacctccgggctccttcccgcctttctcaggcccggcccctccaaggggtccccgcggggcggcgggagggccctgggcccagagccgcgcgggtgggcagtcccaggcgtccttccttacagccctgagcctggtccgggaaccgcccagccgggagggccgagctgacggttgcccaagggccagattttaaatttacaggcccggcccccgaaccgccgaagcgcgctgcctgctccccattggcccatggtagtcacgtggaggcgccggggcgtgccggccatgttggggagtgcggcgccgcggcccgcgccacctccgccccccgcggcttgcctccagcccgcccctcccggccctcctccccccgcccgccgctccgtgcagcctgagaggaaacaaagtgctgcgagcaggagacggcggcggcgcgaaccctgctgggcctccagtcaccctcgtcttgcattttcccgcgtgcgtgtgtgagtgggtgtgtgtgttttcttacaaagggtatttcgcgatcgatcgattgattcgtagttcccccccgcgcgcctttgccctttgtgctgtaatcgagctcccgccatcccaggtgcttctccgttcctctaaacgccagcgtctggacgtgagcgcaggtcgccggtttgtgccttcggtccccgcttcgccccctgccgtcccctccttatcacggtcccgctcgcggcctcgccgccccgctgtctccgccgcccgccatggcgactgcgacccccgtgccgccgcggatgggcagccgcgctggcggccccaccacgccgctgagccccacgcgcctgtcgcggctccaggagaaggaggagctgcgcgagctcaatgaccggctggcggtgtacatcgacaaggtgcgcagcctggagacggagaacagcgcgctgcagctgcaggtgacggagcgcgaggaggtgcgcggccgtgagctcaccggcctcaaggcgctctacgagaccgagctggccgacgcgcgacgcgcgctcgacgacacggcccgcgagcgcgccaagctgcagatcgagctgggcaagtgcaaggcggaacacgaccagctgctcctcaagtgagtgctagctggcggc

SEQ ID NO: 4453 - DNA, 1199 bp, Homo sapiens
tccatttacttatctgttcagccccagtatatgttaaagcagtttcaaaattttgaacctgtactgctgtgaaaagtaaatttaccagcaagagtacagtttttatgtatttggtagctcctttttatctctagccttctagatttagtttttgcacattagatgccctttctctcctgctctgttgcaggtacttgtgattctgagggcctaagctatccatcagtctttttgagttgtcactttctgaggctactgagatgaattctgtcatggagaaacacagaagaataattacccagcgagccacaaggtttctaagatgaactttctggtgtaggatgtgtgatttttaatttttttatgccaaatatacagcttctatattcacagtaatactttacaaatcaccctatattgtgtgtcctttgtgtgctaactgaacatgagatagcccagcaatcctaaagggacactaggtagtgccttccacatagtaaccagagtccctttgccttggtttctgaatattcctcagcagtctgctaaaacgtacttttacccactcttaggtttattttgtcagtcagtgtttatatctttttttttttttttttgagacagagtctcgctctgttgcccaggttggagtgcaatggcgtgatcttggctcactgcaacctctgcctccggggttcaagcgattgtcctgcctcagcctcccaagtagctgggattacaggcgcccaccactacaacctgctaattttttttgtatttttagtagagacggggtttcgccatgttagtcaggctggtctcaaactcctgacctcaggtgatccacctgccccggcctcccaaagtgttgggattacaggcgtaagccaccacacccacccagtgttcttatctttttaagttctttatttaatttatacttttggaagtaaaggctttgtaagggagccagacttgacttttaccaaaaccacatcttaacatttttttggctaagtacagaaaaattatatgtatatttacagaacttacatttgtggaatatgtcttttattcttttatcagccaaaactatcctgaggtctgtgttttgtatttgaggaattttgggttttaatttcttaaaatctcttgaattctagtgagttagagattccatagggttgtactgttttcca

SEQ ID NO: 4454 - DNA, 1196 bp, Homo sapiens
caaatactgacatttcattagatgattattttcctagaatccccaaagagcagtggcagtccatggcttggttgaagctagaaattttcctgcccctggtgacctggtaagcctcctgctcggaaccgtgtgagtgggtgaggaagatgagagatggtcagatggaagagagaaatacatgaactgctctggcctctctggttctgttcttggcccagagtttttgaaaagcagcggagcatgactgacttcacatgctcagctttctcagccttttgtttattttgttgtccttagatttccctgttgtaaaaggggcaagaaaagtaactcatcatctctaacacaccatggcagcttagccaggtagtcttagtggtggtgtttaggcataagatatgctgatcatcagtctcaggccacagtttccttcactaatcgtccagcttgagtgttctgttctcttcctgcccatttccttgaacctcctgctctagccttggcggagggagagtgctatttgcttttgttctccctctgtcttaggaaaagccatctttaatatagttcttcaccactgttggggttgttttgtgattttttttttcttccgaagaactcctggttgttattggattttgtattttaatacaaattattgaattttataagcttgtacacaatatttaattagtgtgaaaggaaacaaagaatgcaggaaaaataatttaatatcaacctcagttgacaaggtgctcagattattcaattcgggatcctccttttgttaggtttttgagacaaccctagacctaaactgtgtcacagacttctgaatgtttaggcagtgctagtaatttcctcgtaatgattctgttattactttcctattctttattcctctttcttctgaagattaatgaagttgaaaattgaggtggataaatacaaaaaggtagtgtgatagtataagtatctaagtgcagatgaaagtgtgttatatacatccattcaaaattatgcaagttagtaattactcagggttaactaaattactttaatatgctgttgaatctactctgttccttggctagaaaaaattataaacaggactttgtagtttgggaagccaaattgataatattctatgttctaaaagttgggctatacataaattattaagaaatatggatttt

SEQ ID NO: 4455 - DNA, 1176 bp, Homo sapiens
ttttgcactgttcacagctcattggtacaatcataacagaagattgtattttgctttggttttagtcttgttcctaagggaaaaatcagtgttgtgtgttttcccagggagatgctgtaccaggacacttttcccaaaggaatgcagctttgattcacccatttttaattttttttattgctttagttttatttcctttctatccttgctaatgttaataaaatgcatgccataaagaaataaactcctgaggacatgaaaggacagacctcatggctatttactctgctgacggctcctgctctttagctcctgctctttagtacccgcgcattcacgagtttgaagctggccctccgcgacagctttctgttcacaatagagctgcatactaaacggggttggtgccacccctcccttgcagtgtgacaaatctctgctaagaggataatgctaagttctttcaccatctgtctagttttgttttcttccctcccccactgctaccaggaatgtctaaaaacatagtattctacagctgcgtggtttacgtgactattactgtccaaaggggaaacattcagtgtttgctcttgaacatttccttttttttgtttccttccaatacgaacatgatagtatacattcaaacacatgaacttgaacttgagtttgtcacctaggagactatttggtatcagactttacctggatgacacttaataaacttttattgttttcttattgggaatctacaaattctcatcagagaccacaggtgggatgtcatgagtagagaaaactggggcttctggtaaacatcctggagggtccttgacctcttggggaggatggggactccgctcagcttccagctgctgaatcttcctttccttttcctccaaaacttctttcagctgagtaattctctcagtctgaagggaaacctgggttgacagttccattatcaggctaatttttctatcaccttcttccacaggtgggagacctccacagaacccttccagcaagctgtcttctaaagcaaacaagaaaaggaaagtctgagcagttttgattagatttcccagaagtcaaagcaaggaaaaatgaaaaagcttcatttctcacgttcttaaaagagagcacagatgttgcatcatctggttagatacc

SEQ ID NO: 4456 - DNA, 1193 bp, Homo sapiens
ccaggcgactgctaaaacttctattagtggaggcaataagaattagataaataattccttaaattatactccccttttgtcattgccaccatgagaactatgttatgttttggaatgtgggaaaatgatactacttttctgctttatgccaaatcattttgagactcaatttttattcatattttttcttcattgtttccataaaggatttgtgtgaaatgactaagcaaacatgtttttattacattattattacaggtttgaaaatctcacataatagtttatccaaatgcagtgattattgagccttgtttttgtcattttaattgtggttcttgatattagcttataaggataacaaaacaaccagaagtctggtgaggttttcaacttgagaattatgaaaaaagttcatgtgatggtggttgctatagataagaaggcatggaaactatgtataataatgaataatacagtgaaagccttttggatattgctgttatcctagtttctgaaaactctaaagcccctaagtgaagttagaaatgtggaaaaagtctacggccataccaccatgaacgcgcccaatctcgtctgatcctggaagctaagcagggtcgggcctggttagtacttggatgggagaaatgtggtaaaaatacttctaaaatctctgcatactatgagtaatagtagtatacacctcatggagatattgtgaggattaagtaaggtaatatatgtaaagttcttagaacagcgtctactacacactgtcatggaactctgaaaaatcggtaatgaattaaccaccaaaagagtcacttaaagtttctttatgtggtatgcctaaaacaaaaagctttttcctctgaattctccttgccattttcaaaatatctgcaagtagtgttcagagtgtgtcccttccaagctgtcagtttaggacgtcatctggcactcctaggctgcatgacacgatcttttttgtccctttcctggtacctgtttctgttcctatctgttgcctacaggaccatctgtccttagctgactcctgaagatgccactcaactattgaacagtcctctctaaatttgtcctaggtctttaactattaatgggatctatagctatcactttggaatgtgcaacagagatgggttaaaatccaattttaaaaaattgcttgc

SEQ ID NO: 4457 - DNA, 1200 bp, Homo sapiens
agaatcacttgaatgtgggaggcagaggctgcagtgagccaagatcatgccaccacactccagcctgggcaacagagtgagactccatctcaaaaacaaaaacaaaggccaggcgtggtggctcaacgcctgtaatcccagcactttgggaggccgaggcgggcggatcacgaggtcaggagatcgagaccatcctggctaacacagtgaaaccccatctctactaaaaatacaaaaaattagccaggcatggtggtgggcacctatggtcccagctattctggaggctgaggcaggagaatggcatgaacccgggaggcggagcttgcagtgagtcaagatcgagccactgccctgcagcctgggcaacagagcaagactccgtctcccaaaaaaaaaaaaaaaaaaaaaaaaaaagctatattgtttgatcttttccatttggttgtttatatcaactagagttggtttgtatatggtatgagatgggagggtcaagatttatttttttacatgtgactatccagttgatccagcaacacttattgaaaagaccactcttccccctactactctacaggatcacctttgtcataaaatctaagaactatatatgtgtgcatctgtttctggactttataatctcttcaatctgtttttctgtcctgcatcatataccttcatgtcttgatttttacagccttataatagatcttcctacctggtagtataagtccaaagggcttttaaagttacttttaattaatggggacttatcagaaattattagatcttgggctgggcactgtggttcacacctgtaatcccagcactttgggaggctgaggtgggcaaatcacctgagctcaggagtttgagactagccagggcaacatagtaaaaccctgtctctaccagaaatacgaaaaattcaccaggcatggtaatgtgcacccatggccccagctactagggaggctgaggtgggaggatcacttgagcctgagaggcggatattgcaatgacccgagatcgcaccactgcacctcagcctgggtgacagagccagaccctgtctcacaaaaaaaaaaaaaagaaaagaaaaaaaaagaaattattagatctgagttatggttttttcgttttgttttgtttagtttagatggagtcttgctctgtctcctacgctggagtgcagtg

SEQ ID NO: 4458 - DNA, 1177 bp, Homo sapiens
agatggaatctcgttctgtcacccaggctggagtgcggtggcacgatctcagctcattgcaacctccgcctcccacattcaactgattcttctgcctcagcctccctgagtagctggaattacaggcatgtgccaccatgcccagctaatttttgtatttttagtagagacggggtttcaccatgttggccaggctggtctcgagctcctgacctcaggtgatctgcccacctgggcctcccaaagtgctgggattacaggtgtgagccactgcacccagccaatttttttaatttttaacttttgtgggtacataggtatatatatttatggggtacatgagatgttttgatacaggcatgcaacatgaaataatcagagggagaatggggcatccattccctcaaacgtttatcttttatattacaagcaatccaattacacacttttatttaaaaatgtatattactgactgtagttaccctattgtgctgtcaaatagtaagtcttactcattctaactatgtttttgtacctctggtaaccacccttctactctctatgtccatgaattcaattgttttgatttttagatcacacacgtgagaacgtgtgatgtttgtctttctgtgcctgacttatttcacttaacgtaatgatctccagttccaaccatgttgttgcaaatgacacgcaggatcacattcttttttatagctgaatagtattccattgtgtatatgtgccactcaattttttttttttttttttttttgaggcagggtctctgtcacccaggatggaatgcagtggcgtggtcttggctcactgcaacctccacctcctgggctcaagtgatcctcccacctcagtcccccgagtagctgggaccacaggcatgtgccactacgcccagctaatttttgtatttttagtagagacaaggtttttgtcatgttgcccaggctagtctcaaactcctgagctcaagctgtctgcctgcctcagcctcccgaagtgctgggattacaggcatgagccaccgcgcctggcctgtgctacgttttctttatccattcatctgttgatggacacttaggttgcttccaaatcttagcttttatgagcagtgctgtaacaaacatgggagtgcagatatctttcctttgttttgggt

SEQ ID NO: 4459 - DNA, 1169 bp, Homo sapiens
ctaaaatctctcataactcaagtatggaatactttttttaaagaaattcttatcatgggtgttgtaataatgaagacgaatttgactttatgcagtgttctgcagcatgcctcccccacatctcatagcaccaggttgtgtctgacctgacataccctgcagctctcagctggctgcagtaacattttgtgggagaaagaggagctggagttacagaaatgattgtctcttggttctcagtttttagcccttgagaggacatacttttccagcctcatgggtatggcactcttaattaaaatttcagtgactgtttactggatgaggcagatttttcacatttttgcaaattaaatatattttatatatattaagtttaattttttcagtttttttaatgtaaaagcaagtgaaattttaataaacttctgtaattaccaaaaaaaaaaaaaaaaaaaaagccaaagccattaacgtgcactacccagatcaacttggagccaaaaggggtttacttctgaatggctgtccgtatgtgtccacataggatttagttggtttgtggcctcctttatagaaatgtgttgtctttccctagctgtctctgctgtctgtcttcctgcatatcccccttcattttaaaatcatgaatcagttgtaagtggtaaatggtagtagttcatctttcccatcaacatgattgtctctttattttaggaataatagcatttcaaaaattcctgtggtaaagaaacattaatctgaaacttaagccttagaaattaatcgcaggtatgatagaatgaggcttggtggttccatagctttcttggtcctttgaaatgggaaataacctgaaccaaaaatcctagtttgaaagttacacttcagtgatttggcctataaacagtggtcctatgattatacattttttccttcactgatttgcataattttgttttcatggccacagcaaaacaatgtgaaatatatttttgctatacccactttttttatcaaattcagatgtctactctcaccattttatattcatttccccagaaaaatgtgctgttttcataatgtctttatttagcaggtctttcaaaccaaatggaagccttacctgtctttgtccttaatagtgtaaatatcttgcacagagtgtt

SEQ ID NO: 4460 - DNA, 1174 bp, Homo sapiens
ttgtatgtactatttatatgtcttatttggtttttactaagcttcttcatagtaaaatctaccttacaattctagacctacatagttactttacagaaataattctagttacctgatatttttgtcatatttttccttatgattttaccagcttggcttcctttcaacagtttttttgtttttgtttttgtttttatttttatcaccagcttgtgctgataaaggtaatctttctcctgcattctgtcttgcaataactgatgtgtatatgttttatatataagtagatttttttccatgcattaaaaaatatgttgctagatttcaatttttcagatattatcaagatgttagaatttttaaatagtgaaatattatgtaaacaaggctaattgtgattgaccatgtcagggtttttgcatctctccctccagttggcagtatcatatctgatcacagcagcaagatcagtggccagagctgccccggaataggtggggcttacttgcaaaagaaaatccttcagattaccaggagcacagccaaaagaacagacagtactgagaaggccactgaggagaatagagacaggacaagttgtgagaacacaaccagaaaaagaatgacatccccgtttagaagacttagggaaagaatgctttcaagggagagactagtcaacagccaaaaagaggacacagatcacaatcaagctacagaaagctgtgagaaagtgaaggatgttggaagcaacatcaaagatgagaaagggagtgccatcttcaattcaaatagccaaggcaacagtaacactttaaactgcttctatacgcgattcaagtctaaaaggaggaagacactctgatgaagttccttatttaattttagtgttaagtttgttttcagttattaatgtatacatggcttaaattaaaccatttgtcaaagcttaggcagacaacttagtaaaatactatttataaacacttgaaaatgcctcatttgtacataagttattttactgatgtattgagttagtaaattttatactcttgttttctgtagttgactttatttcctactgttagctggatctgtgagtgaaatatgtagaggaggcttttttatcttctactttttacgtatctttgattgggggagaagggactagtct

SEQ ID NO: 4461 - DNA, 1177 bp, Homo sapiens
cccaaagtgctgggattacaggtgtgagccactgcacccatgcccggctactttttgtatttttagtagagacggggtttctccttgttggtcaggctggtctcgaactcccgacctcaagtgatctgcccgcctcgacctcccaaagtgctgggattacaggcgtgagcaactgcgcccagccattgccagattaatttttacaaacatattttactgtgtgtatcatgatacagaatacagataaagaatattaccagcactccagaaatttcccctttttccttctcagtctcccaaaggaaaccactcttctggttctgtcattgcagatttttttctttgtgcctttgaacttaatttgagtggagtgtttttgtttgtttgtttgtttgtttgttttgtttttaaagacaaggtcttgctgtgttgcccaggttggcctccagcccctgggctcaagcaattttcccaagtagctgggagtacaggtgtataccaccatgcccagctcattgtaagtattctttctggcagccaagaggactatgaagctaccttggttctttgcattttgcctttgtattggacttttaacctcctctcttggggctttccttgctagtcatctgattatctatcctttatatcctgacactaaaatctcttctgtttctgtgcattgcataggatgggaacagtatggtaacggtgtcactggcctttgaattttgcatttggacaagcctacttcaaatctggactccagttctgagaatttgaccataggcaagttatctaacttctctaggattgaatatctttttgggattcttgtgtggaccaaatgagataatatatgtgaaataattagcaaagtatcttgataataaacagtaaatgatagcctacatattagctgactattttctctgtctggaaaaccatcctctggcctggtacattctgattcttcactgaaagctctagtgctcatttgcagaattgtgcatccttccttcctcacttttccactcctctgtgttcctagatactttgcgccttcttccaccgtagtaattactgtgctgtgttatgattacttgcatatttctctctgattgtaagctccttgaagacagtgagtgtacccttatctcccagtgttcattacaca

SEQ ID NO: 4462 - DNA, 1099 bp, Homo sapiens
gtgtgtctgcaatctgtttggcccatgaccttttacctagtcccagttattacctgagtctcccatggatgacttgctgccaaggagtgtttgtggatatattttctttggcttaattttcttattctgtgcattaacaaaattatccagttgtctgattttggaattctatgagtcaatctttttggcagaattcagaatattaaaaagttcatacatttgcgggccattgtacctttttttttttttttttttttttgacggagtttcactcttgttacccaggctggagtgcaatggtgcgatctcagctcactgcaacctccgcctcccagttcaagtgattctcctgcctcagcccccaagtagctgggattacaagtgtgcgccaccacacccagctaattttttatttttagtagagatgagatttcaccatgtgttggtcaggctggtcttgaactcctgaactcaagtgatccacctgcctcgacctcccaaagtactgggattacaggcgtgagccactgtgcccagccttgtacttttttttttttttattgtagctctgtatagcacttggataatgtctgggtgtctccttaaccatcaaactgttctttatttaaaatgtttaattaccgtttagaaattctagtcctcaataagtgggtggctcatgctattgttgttcctaaagctaagctttgctgggaaggaaatgacctatagtttcttaaagaatcattaatccttataggattcctgagttactgttttgttcctccccactgcttcccattcctgagttttgtaattcctaatccttctataatttctattaccttcaccatagtcattctttccttacgcaaagcccaaggaatgagctgctgctactttaaagtgtggtcattatgatgaatgtgaaaagagttttggcttgttctaaataatttttacaagttatggtacagacagttgttacatatcaaaaaaaacctgtttattgaaacaggaaataaaaaagggatcttttacattatagaattaaaactaattttttcttgtatataaactaattggtttgattttaaat

SEQ ID NO: 4463 - DNA, 1202 bp, Homo sapiens
tatgagaagcctaggctgatgaaaaggagccagggaggccggaaataaaggagaacttgaatcacgaagtgcttcgctagaggaaaaaaaaaaaactgtccgaagtgtctactgggtttggccactaggaggacccagaacactttaccagacaattccagagaattagttgggggagactcactgcgtcaaaaatttaagaatggaaggtgaggacagtaaatctagcataagcagcttgccttaagcttcttgaaatcaaagaagcaggcaagatgacagctgtgagcccactgggtacaaaagcagtttgggtcattactttagtgaggctccgttggctgcaaatttcaagagaaagagatggacttttcagagaagagtaagagaagggaggaccaagctggggtgtggggagggggctgatcctccatgttataaacgcactttcagaaagacactgaaaagtgccttaaaaacaaaaaactttgagcttgccaaatacccatggcctttcctaccacttatcttctcacaacccccaaatgctttacaaaaaaaaaaagttggcagaaggggtatagctcagtggtagagcatttgactgcagatcaaaaaaaaaaagtttcccccgagtttagaataaagaatcttcacaaaagttaaacctcttcaaagtagcgtcagccttagatattacgtccaagacatcatttgacgcacccagacccccgctcagagcacatccttgactcaccagcctctctctgactctgtccttgcggagggaccgcctcacaggacagagccccactggccccaggagccttgcgagctggtcctgcggggctgctctgccagaccaggtcggaaaggaggggccagccagagccctaagccagggcagccacagacacagcctgtagccccactgctgtccgctgaccccgccattctcaccacctgacctctaggaacacgcccacaggtcaaaggcctttccagaaacctctgaccctgccagaccccgcccccaggtcctcagaggccacgccccttcctgtggcctcgcacggcctcgccctttcccgaggcctgcgcgggggaaggggtggtgtcctttatctggggggtgtcctttatctgggtactgagctccgagtgccatttcagtgcccactgagcaagagaggctgctcgat

SEQ ID NO: 4464 - DNA, 1201 bp, Homo sapiens
acactcaatgtccgtgcagctcagtgtcttcattctgtgacatggggatgacagtaccgtacctcacagggttggggtgagcattgtgtggagtgacttatgtccagaagcacacctttgcaccagtggccttggcacccccaaggcatgctccacaaacagcttgcacattcctttctcacagcgtgtgctgctgaaacattgaggtttgtggaccggacttctctgtagcccttgtatttagttttcacttcctctttcttgacctcctcccaccccccacccaactgcaaggtagggaggctactgaggggccagcctgtggattccagagggcacagggctatctgggatggaggggacagggttctgaagacagaaggtgggaaggtcacactgtaagggcagacataccccatttcttctacctaaacaactgggtgtaataccactgtttccctgagaaacactttcaggattaaaaagtatataagtaaagaaaataaagcatataagtgatctggtaaagatgaaaacatggctgatctgaaggtagtgaattatctcaattgacttcacagtcagttacagatcgaactccttgttctactcttttcccccttctcactactgcccttgactagtctttttttgttgttgttttttgttttttttttgagatggagtctcgctttgtcacccaggctggagtgcagtggcgcgatctcagctcactgcaagctctgcctcccgggttcacgccattctcttgcctcagcctcctgagtagctgggactacaggcgcctgccaccacgcctggctaattttttgtatttttaatagagatgggatttcaccgtgttagccaggatggtttcaatctcccaacctcatgatccaccggcctcggcctcccaaagtgctgggattacaggtgtgagccaccgcgcccagcgactagtctttaaaaaaatgaataatataaatttttttaaaagatgaaaacatatatataccctgtaacccaagagtcccactcctcagactcttctcaaaccacactcttacccatgtgcaccagaatacccacacagcaccagaaaatgtccaaatgaccatcaaaagtggagagtacaaataaattgtgcagtgttcctggagtgaaatgaactacagcgacttgcaataactgtaatatt

SEQ ID NO: 4465 - DNA, 1096 bp, Homo sapiens
gcagcagtcactgcgcctcccctctgagcgctggcggccgggcaggcgctctgtaacttgccgtacacacctttctcattgaatattcctgaccgcccttaagctggtcatattatcctccccatcttacacggggaaaactgagctacagaactgaaatgactggcccaaggtcactcgggtgattccagcatgttcctctgaggtcacctttatttagttcttaccagtggtgaaatgctttgtgttaaacgtgcagcagatagtgatgatagttgcatggccttggatatgctaagaactactgaagtgtatgctttaaagaagacaagaggactgagacctttttttttcttctatatgtcttatatgtgtgctctctgtttactctcttaatttttaaagagtttgtagtgttttatcttatctacacatgggggactgaagagttcgagagatccaagaggaagaatccagctgcctatgaaaatgacaaatgagcaacgcatccggatgacggttccctgtctctgaaagacctttctctggaagaggagtctgcattgtagtgtctcaaagacacaataaacttcctatggtctgcactgttgtgatattacatttttgtgagtagaatcctgtgtgaccactaatattcaagttcatgaagcgcccctcctcagcatgagtcttgaagttttgcctggtctcgggttttggtgaaagagcagggctccccctttgttccattatctacaagaaagtagctgcaggtactcctgcatctaaccatttgtgggtgacatgggctatggcgagtgctggttcttggccctctgctcccatagcaacaataaagtctactaactatattgtaattagtatgtgtcagggacgcttttattttttattttttgagatggagtcttgctctctcacccaggctggagtgcagtggtgtgatctcggctcactgccatctgtgcctcctgggttcaaacgattctcctgtctcagcctccgagtagctgggattacaggtgcaggacaccacacctggctaattttttgtatttttagtagagacaggtttcac

SEQ ID NO: 4466 - DNA, 1374 bp, Homo sapiens
actaattgtaccaggggaacagtgagaggaaaaaggaaagtggggttccagaagtagatttgggtaggctctctgggcggtgggataattatagttgttttataagcccactgtagtatgcctgttggtcagatagtgctaagtaacaaggattgaagggccatgtagtttggaccctgctgataatacctggaacaggttctgaatttggtgttaatctttcttgtcatttctttcctccattcctcctcctttcctctccctcatttttctccctgcaggtattaaactgacactgtcagctcttctggatggcaagaacgtcaatgctggtggccacaagcttggtctaggactggaatttcaagcataaatgaatactgtacaattgtttaattttaaactattttgcagcatagctaccttcagaatttagtgtatcttttaatgttgtatgtctgggatgcaagtattgctaaatatgttagccctccaggttaaagttgattcagctttaagatgttacccttccagaggtacagaagaaacctatttccaaaaaaggtcctttcagtggtagactcggggagaacttggtggcccctttgagatgccaggtttcttttttatctagaaatggctgcaagtggaagcggataatatgtaggcactttgtaaattcatattgagtaaatgaatgaaattgtgatttcctgagaatcgaaccttggttccctaaccctaattgatgagaggctcgctgcttgatggtgtgtacaaactcacctgaatgggacttttttagacagatcttcatgacctgttcccaccccagttcatcatcatctcttttacaccaaaaggtctgcagggtgtggtaactgtttcttttgtgccattttggggtggagaaggtggatgtgatgaagccaataattcaggacttattccttcttgtgttgtgtttttttttggcccttgcaccagagtatgaaatagcttccaggagctccagctataagcttggaagtgtctgtgtgattgtaatcacatggtgacaacactcagaatctaaattggacttctgttgtattctcaccactcaatttgttttttagcagtttaatgggtacattttagagtcttccattttgttggaattagatcctccccttcaaatgctgtaattaacaacacttaaaaaacttgaataaaatattgaaacctcatccttcttctgttgtctttattaataaaatataaataaacagggcatttgtttagatttattttgtcttcatgctctgtgtattatatattattcgttttcactcactgtacaacagattaccatatgtttagcagcttaaaaca

SEQ ID NO: 4467 - DNA, 1163 bp, Homo sapiens
gaggctgggtcagtgccaactgtatctccccagcagtggctgcagcaggttgtgccaagggctctaacttgccttctgaggcatatgtgcagccccacctttcttgccatttctggctgtgttctcttctcattttcttctctttccataacattttttatttttacttttattttttgagccagagtctcactctgtcacccagactggagtgcagtggtgagatctcagctcactgcaacctctgcctcctgggttcagacgattctcctgcctcacccccccaggttgctgggattacaggcacctgccaccatgcccagctaatttttatgtttttagtagagacagggtttcatcatgttagccaggctggtctcaaactcctgacctcaaatgatctgcccgccttggcctcccaaagtgctgggattataggcatgaaccactgcacccggacttccatgccatttttctggtagaatcgtttataaaagtaataacatcagtagcagtaaaaataaatcactcagaatctcagtgctctacttgctgcttcttttttttttttttccttatagagacaggatctcgctctgttgcccaagctatatcctgggctcaagcagtcctgctgcctcggcctcccaaaatgctaggattacaggcgtgagtcaccacgtaccccctctcccctggctttttctttttttgtttgagacaatgtcttgctctgttgcccaggctggagtgcagtggcgcgatctcggcttactgcaacctctgcctcccaggttcaagcgattctcctgcctcagcctcttgagtagctgggattacaggcgtatggcaccagcccggtcaatttttgtatttttagtagaaacagggtttcaccatgttggccaggctggtctcaaacccctgacctcaagtgatctgcccatctcggcctcccaaagtgctgggattacaggtgtgagccactgtgcctggctaggtgcctgttccatacttatcagacttcctgtaatttagtacctgttttgtgaaatttggtgaacttctgacttcccttaataccagtattggttcagtccatttctgtcatccctgtcttctgggagacttgggtggatctgtctgggctgcagctcacctcc

SEQ ID NO: 4468 - DNA, 1217 bp, Homo sapiens
ccctagagagaagtatatactagggtactttagagcaacttaatgaggggaggaaatgaaagaatagatcagaatgattttgttgacatgactacagactgaaataatgtgaatgaattaactgaatttgctctgtcaactttagtaaattgcccattgcctttgctttgttcataatttcagcagggcagaataaaaaccatgggaggcaaagaaaggaaatccggaaatatagtcttaacctggtgttgttctaattttccatctgttcttctgactcaactcactggctatcgatgaatcagtaggtagtatttataagtcttaggaaagactactcaagttaaggtacttccctatatccatctcttttaggtacgcaaagagaaccagtggtgtgaagagaagtgaaatgttgtgcctgacactgtaacactgtaaggattgttccaaatactagttgcactgctctgtttataattgttaatattagacaaacagtagacaaatgcagcagcaagtcaattgtattagcagaatattgtcctcattgcatgtgtagtttgagcacagatcccaaaccttacggccaagtttcttctagtatgatggaaagtttcttttttctttgctctgaataaaactgaactgtgggttctctataagtggcattttgggctttccctcttttttgtaaagcaatgtctgcctagtttattgtccagttaactttagtgaccttttaaaagttggcattgtaaataaaacaacttgcaaaaaagttttctggaatagaattaacaaaatattatctttattcatgagttggaaactggaaaaaggcttcttgaagtaaatgttctgagtggagctactaggatgtcttccagcctcctgcagtcaaggagtaccactgtattgattagcctgtatgtagcagggctcccttcattgcatctgaggacttgttttctttttctttatttttaatcctcttagttttaaatatattgcctagagactcagttactacccagtttgtggttttttgggagaaatgtaactggacagttagcttttcaattaaaaagacacttaacccatgtgggatgtcatctttttataattagtgttcccatgtggagaaaattattcacactacttgcatgtaaagaataatttaacttttaacattaaaatatgtggtaaaacccaga

SEQ ID NO: 4469 - DNA, 1122 bp, Homo sapiens
tggaaatgggaagagcaacagtaactccaaagtgtcagaaaatagttaacattcaaaaaacttgttttcacatggaccaaaagatgtgccatataaaaatacaaagcctcttgtcatcaacagccgtgaccactttagaatgaaccagttcattgcatgctgaagcgacattgttggtcaagaaaccagtttctggcatagcgctatttgtagttacttttgctttctctgagagactgcagataataagatgtaaacattaacacctcgtgaatacaatttaacttccatttagctatagctttactcagcatgactgtagataaggatagcagcaaacaatcattggagcttaatgaacatttttaaaaataattaccaaggcctcccttctacttgtgagttttgaaattgttctttttattttcagggataccgtttaatttaattatatgatttgtctgcactcagtttattccctactcaaatctcagccccatgttgttctttgttattgtcagaacctggtgagttgttttgaacagaactgttttttccccttcctgtaagacgatgtgactgcacaagagcactgcagtgtttttcataataaacttgtgaactaagaactgagaaggtcaaattttaattgtatcaatgggcaagactggtgctgtttattaaaaaagttaaatcaattgagtaaattttagaatttgtagacttgtaggtaaaataaaaatcaagggcactacataacctctctggtaactccttgacattcttcagattaacttcaggatttatttgtatttcacatattacaatttgtcacattgttggtgtgcactttgtgggttcttcctgcatattaacttgtttgtaagaaaggaaatctgtgctgcttcagtaagacttaattgtaaaaccatataacttgagatttaagtctttgggttttgttttaataaaacagcatgttttcaggtagagcttaaactaaatgatgtgtttacttagtgcagtttctggttatgaatattatattgctatgtgtatattatatggactctttaaaatgattgacagattggcaaattcttaaatctttgtacattgttg

SEQ ID NO: 4470 - DNA, 1209 bp, Homo sapiens
ttgggattacaggcgtgagccacggcacctggccgaaaccagcttttctttaatgcagaatcggtatttatttattttgatgcagaggctgctgagttctagctgcaacagcatattttaaaacataaacatgtaaggtgtttgccagtatggaataaatacataaggcttttacatttcttttctcagaagaagaaagtcaaacaaaatcaaagcagcaggacagtgataaactgaactccctcagcgttccttccgtttcaaagcgagtagtgctgggtgattcagtcagtacaggaacaactgaccagcagggtggtgtggccgaggtaaaggggacccaactgggagacaaattggactcgttcattaaaccacctgagtgcagtagtgatgtcaaccttgagctccggcagcggaacagaggggacctgacagcggactcggtccagaggggttcccgccatggcctagagcagtacctttccagattcgaagaagcaatgaagctaaggaaacagctgattagtgaaaaacccagtcaagaggatggaaatacaacagaagaatttgactcttttcgaatatttagattggtgggatgtgctcttcttgctcttggagtcagagcttttgtttgcaaatacttggtaagaaaagatctgtaaattattaactaacttaatggaaaatgcaaaatgttaataattatgagtgcttttgatcatagaagtcattgccagtattaatatctaccagatccatgtggctgtttgaagatatattattaactttgctattcatctcatagaatgaagtgttctggttaaatacagagcctaataattactgttggccctccatatcagttggttctgcaccctatgtggattcaaccaattgtggattgaaaatatttggatttagccgggcgtggtggtgcacgcctgtaatcccagttacttgggaggctgaggcaggagaatcgcttgaacccgggaggtggaggttgcagtgagccaggataacggcactgcactccagcctgggtgacagagtgagaccccgtctcaaaaatatatgtatgtgtatatatttgggggaaaaataacaatacaacaataacaaatagtaaataatacaaataaaaacagtataacaactatttacattgcattaggcataaaaaatctagaaatgatttaaagt

SEQ ID NO: 4471 - DNA, 2297 bp, Homo sapiens
ctcggccttattttattttttatttaagaaaatgttttttagagacagggtctcgctgtgttacccaggctggagtgcagtggcatgatcatacctcatacgcctgggctgaagcaatcgttctgcttcaaccttcttagtagttaggactacaggcatgtaccaccacatctggctaattgtttatagagatggaatctcacgtgttacccaggctggtctcgaactcctggactcaagtgatcttcctgtcttggcctcccaaagtgctgggattacacacatgaaccactgtacctagcctagtagtagtttaaaaatacataatcatgccggacgtggtggctcatgcctgtaatcccaacattttgggaggccgaggcagacggatcacctgaggtcaggagttagagatcagcctggccaacatggcaaaatgccatctctactaaaaatacaagaattagctgggtgtgatggcggacgcctctaatccaagctacttgggaggctgaggcaggggaatagcttgaactgggagcaattagcctagatcacaccactgtactctagcctgggtgacagaataagactcagtctgaaaaaaatatatgtgtgtgtgtgtgtgtgtgtgtgtgtgtgtgtgtgtgtgtatatgtatatatgtgcatgtatatgtgtatatgtatatgtgtgtatgtatatatgtatgtgtatgtgtatatgtgtgtatatgtgtgtgcgtatatgtgtatatattatatatttttatatatattattgttatatataattggctgggtgtgctgactcacgcctgtcatctcagcacttttgcaggggctgaggtgggtggattacctgaggtaaggagttcgagaccagcctgccaacatgatgaaaccctgtttctactaaagatgcaaaaattagccggactagtggcgggtgcctgtaatcccagctcctggggaggctgaggcaggagaattgcttgaatccaggaggcagaggttacagtgagctgaaatcatgccattgcactccagcctgggtgacaagagcaaaactttatctcaataaataaataaataaataaataaataaataaataaagtatgtataattatataaaattatttataatacagtaaattatgaatggatgtattataaaatataattatattatgcttaaaaatttatacaaattaatgagaaaaacaggctattgtttgtcttttcatttaataactcagttggctcagtgccctggctcacacctgcaatcccagaactttggtaggctgaggctggtggatcactggagccaagtagttcaagaccagcctgggcaacatagcatgactctttctactaaaaaacaaaaaaaattaactgggtttggtgacatgtgcttgtagtcctagcaactcaggaggactgatgggacgaatccttgagcccagaaatttgaggttacagtgagctatgatcacaccactcaagcctgggtgactgagaccatgtcactaaaaaaagaaaaaaaactaaagatgaaattgtgtcagttactgtgtgcttcagcagtcatataacttgtgtttcagctttgcaaaatattctatatttgttctttattttagaagtctgggccaacggtcacaaaagttgtcactgttgtgacaaccaaaaaagcagttgtggattctgataagaagaaaggtgagctgatggagaatgaccaggatgccatggaggtgatttttcttaattttgactttgtttatgatactatcctggaagcatttattagaaagcattcatggagatgtgcgtttcatttgtgtgagctaggagaaattcccagaattgagagacattcttgctattcttagtagtataatagtatctagttaaatatctgtttagtggaacattctgatgtcttcattcctaactgtatgatctttctgcccctcatcagctcacttcaggcatacaatatggagagaaaaaaatggagtaacagaatgaattaattttctttccattaacacgtaaagatttatatagtaaaaacagtagcaaagccttattagagctgtctctgatgattactgttttagctttatattggcattttaaccttctaaaggcaaagaaaaaaaaactaagttgaaaaattcttcaggagctgcttgatacgtttctaattcaaggtgtcatacgtcatttgaggtgattttaaaattatgaggtttaagtgtgctggagcactataaaaatcttgtggg

SEQ ID NO: 4472 - DNA, 1186 bp, Homo sapiens
ttgaaaaagaattcttttcgtaattcatttattaatttaaatgcagtgtttgcttagtatggtataattgatatatcaaatttcaatttatgtataactttatcagaacacatctctactaccaagtgatgtgaagtgagatattcactgattccacagctccgatgtagttttcctttcatccagaatggttctggtcatttgtctccactgtcaatttacactcaggaaataacgtctaatttttataataatctaagcaagtctcctcagtaaaaaagcaactttgttgaagcaaatcttaagaataatctagaaatataatgataatggccgggcgcggtggctcacgcctgtaatcccagcactttgggaggccgaagcgggcggatcacaaggtcaagagtttgagaccagcctggccaacatagtgaaaccccgtctctactaaatacaaaaattagctgggcatggtggcgggagcctgtatcccagctactcgagaggctgagtaccttggaaacagaaggtagaggttgcagtgagctgagatggcgccactgcactccagcctgggcaaaaacagcgaaactctgtctcaaaaaaaagaaaagaaaagaaaaagaaatataatgatattgaataagagctagggtttggtaatttaagtgatctaaatcttttagaattttcagaggtaattagattttttaaaggatcatttagtttttgaaactccgaactcaactaaacactaacaggatgaaaacaggtgttgctactgtggaatgagcctagtgtcatctgtttctagttctgtaattggagggaccccactgcctggctggctccttggaggctctgtttggctcagcagctccaggcctcccaccaggcaaagggaaggagaacaggaaggacttacatgcctagtcagcctgtataatttatatagcctgttctgtgaccctctctttttactagtggagaatcccttaaaagcagccacagttgttttaggaccaatgaaaggaaatgccctttttttcatagctgcttataaacatatgtaacctattacaagaagttacataagtcagaatttaaactggtccaaattgtcgggctctgataaaagtaggaaaattgattttccagttaaatctaggtgagagtgtcattttcc

SEQ ID NO: 4473 - DNA, 1171 bp, Homo sapiens
agtagcctcctcagattcattggaccagatctgttccgatgtatgggacggcggatagcaggtttgtaattactgtggcccctcagaaggatatttggcctcatgggaggacatagcccatgaaggctgttgctatagttgtaagtaggaggatgatgccaatgtttcaggtttctaggtaaagaaatgagccgtaatataggcctcggccgatgtgtaggaagaggcagatgaagaatattgaggcgccattggcgtgaaggtagcggatgattcagccataatttacgtctcgggtgatatgggcgatcgatgagaaggcggttgaagcgtctggtgagtagtgtatggctaggaatagtcctgtggtgatttggaggattaggcaggcaccaagaagtgagccgaagtttcatcatgcggagatattggatggggtggggaggtcgataaatgagcggttaattaattttatcaaggggttaattttgcgtattggggtcattagtgttcttgtagttgaaatacaatgatggtttttcatatcattggtcgtggttgtagcccgtgcaagaataatgatgtatgctttatttctgttgagtgtgggtttagtaatggggtttgtggggttttcttctaagccttctcctatttatgggggtttagtattgattgttagtggtgtgattgggtgtgttattattctgaattacgggggaggttacatgggtttaatggtttttttaatttatttggggggaatgatggttgtttttggatatactacagcggtggctattgaggagtatcctgaggcatgggggtcaggggttgaggtcttggtaagtgttttagtggggttggtgatggaagtaggattagtgttatgggtgaaagagtatgatggggtggtggttgtggtaaattttaatagtgtgggaagttgaataatttatgaaggagaagggtcagggctgattcgggaggatcctattggtgcgggggctttgtatgattatgggcgttgattagtagtagttactggttgaacattgtttgttggtgtgtatattgtactagagattgctcgggggaatagattatgtgattaggagtagggttaggatgagtgggaagaagaaagagaggaaataaagtttgattatgc

SEQ ID NO: 4474 - DNA, 1227 bp, Homo sapiens
atcttcttcgaaaccacacttatccccaccctggctatcatcacccgatgaggcaaccaaccagaacgcctgaacgcaggtacatacttcctattctacaccctagtaggctccctccccctactcatcgcactaatctacacccacaacaccctaggctcactgaatattctattactcactcttactgcccaagaactatcaaactcctgagccaataacttaatatggctagcgtacacaatagcttttatagtaaaaatacctctttacggtctccacctatggctccctaaagcccatgtcgaagcccccatcgctgggtcaatagtacttgctgcagtactcttaaaattaggcggctatggtataatacgcctcacactcattctcaaccccctgacaaaacatatagcctaccccttccttgtactatccctgtgaggcataattataacaagctccatctgcctgcgacaaacagacctaaaatcgctcattgcatactcttcaatcagccacatagccctcgtagtaacagccatcctcatccaaaccccctgaagcttcaccggcgcagtcattctcatagtcgcccacggacttacatcctcattactattctgcctagcaaactcaaactacgaacgtacccacagtcgcatcataattctctctcaaggacttcaaaccctactcccactaatagccttttgatgacttctagcaagcctcactaatctcgccttaccccccactattaacctactaggagaactctctgtgctagtaaccacattctcctgatcaaatatcactctcctacttacaggactcaacatactaatcacagccctatactccctctacatatttaccacaacacaatgaggctcgctcagccaccacattaacaacataaaaccctcattcacacgagaaaacactctcatgttcatacacctatcccctatcctcctcctatccctcaaccccgatatcattaccgggttttcctcctgtaaatatagtttaaccaaaacatcagattgtgaatctgacaacagaggctcacgaccccttatttaccgagaaagcgcataagaactgctaactcatatccccatgtctaacaacatggctttctcaacttttaaaggataacagccatccgttggtcttaggccccaaaaattttggtgcaactccaaataaaagtaataacca

SEQ ID NO: 4475 - DNA, 1186 bp, Homo sapiens
atacaccgttctctctctttccccctcctctgcctcgcctcctgtatctgtcccctgtgtccccctcagctcccacccctatccttttttaagtttccaacataaaggggaaagtaacagtaatttgaacttggctttcacgcaaaatggaccaattttttttaagtgttggtaatttgtcctgaaaatggatatcgggagttgggctggaaagactttgaagaatggggttttatgagtggaaaatgcggcctgagcatgcgggaatgcaagccgccccccctccatgcctgggacagtgcagcacgtgtaataatcgcagctaatagcaccattattgctattatcacattatattattattcctcatcaaaatcagacaatgcttattaacccatttaattgaaccaagggtttaacatcccaatgacttcacagaaagtgcttggcaaactctctaaggcatcgtagccacaaagtggctggccacttcaccacctgccaggctgtggcggggcccagcaagggtttccccaaaccgttccctcctgtggcctatctgggaactttccaggacacactgggatggatgcgcatcaccacccagactccagcctctttgtgcacacacatgcccacacaggcgcacacacacacacgcacacctctctcccgctgggtaaatgcaactcaataaaggatacccttacacaaaagaccccaccccaggcacggtgtggccaaggatccttcctccatccccaagctggcattcctattgtcaccaaggccggaatgagtacaggcacacacaattcatggtgaacccctggcttctcccaagcttggcattatctccaccaaggcctctcaactctcccacagtccagagcccacagtggggcaactgaagcccacccagccccccaggctcacagagactcacccagcccctccaggcagggatatccactgagcccaggctggtggaggggcctggaggagggcacgatcccctcggggagtccagaagcccaaatcctagcccgtgagctgggctcttcccagggcatgatgtcacctcacagaaccccagtaaccctctgtcaagcgggcattggccccacctgcctacctcttgggatttcctgtcagggtttgaaaagaccctggatatgaccattaa

SEQ ID NO: 4476 - DNA, 1197 bp, Homo sapiens
attggtagttttgtttgtattttatttccaaatttgctttggcttttatgtgttcaagggtgataaatacaaggagtggattgcactaatttttgtttctatatacatatccattcatttacccgggatatattgcctgagctcctgctccgtgacaggcatgttctaggcagggaggatgcagcagtgagtaaagatgaagaaagctctgccctcgtagagtctaccacctagaggcggaaatagcccccaaaacaaaaagaaccctgaacaaaccaaaaccccacaaacaaattagtagatatacaacaaaatattcggtggagatgaaggaaaagttagctgggtaagaagatggagcaaaagaggcattccccttaggcgaggtggtctgggtgggcctgtctgaagaggtgacatttactcagagacctgtgtgaggcaagggagtggagcacaccagttggggaagcgggttttagcttaggaagcaggaagtgcaaagacccctgagacgggcatgtgatcagtgcatgttgtatgtttcaattatgctgagaatgaagattttatattcgtcagcacatgggggtttgggagcctgcagcaagaggtggggtagctagcctagtgtgggggcctaggaggaccccagatccagacagaggagaagcctggggggcagaaggcttccctcaggcttgtgagctgacaggtcggcatagcaccttggctgagggagggcagagggaggagccggggggcacccctccccccacctgcagcctgttccccccacaacatgggcgcatagagcggtggttctcaaccttgagcagaatcacctagagggcttgttaaaacacagactgctgagctccaccccaggatttctgattcaggagacctggggtggggcatgagaatgcagttcaccaaggttcccagatgatgctgatgttgctggtccagggaccacaccttgagagcactgatcgagagcaaacgcagaccgtgccaggatttgccaagaatgactgtggagagaaagtgaggcacaaagccttcactaaaggtgcccccaggggtttgactaggtctgcagtgtcccttgctgaacaccactgcgtgtatgtgtgacaggtgttgcccatgcatctcagtccatggtcactactgtcaggggcctgactacat

SEQ ID NO: 4477 - DNA, 1177 bp, Homo sapiens
gacgccaactaggctgagcaatgacagaaccagctgcaccatgtaccccaccttcagtttaaaagaaaaaaaaaatccccttcactcctactgggaggtgggacccctttcattttcagttttgctcatctagggaaaataaggctttggtttccagtttaattgtttttgaccttctaaaatgtttttatgttagcactgatagttggcattactgttgttaagcactgtgttccagaccgtgtctgacttagtgtaacctaggagattttatagttttattttaatgaaaccctgattgacgcacagcagtggggagaacagcgtcttttacctgtcaccgaagccaggaagccccgtttgtaagcgtgtgttgtggtgctttattgtacatcctccagtggcgttctttttactctaatgttcttttggtttcccccctcagaagaatcatgaatttgcaacagacctaatttttggttactttttgtcttattgatggatttgaaaatgaaagatttaataaggcaaagcagaatctgttgtccttaattatatttgcaatttggaatttgtgtgagttgatttagtaaaatgttaaaccgttgttgtgactggtgtgttccagttattgtgcccgtgagtcacaggtcttaagtcggcttctgcagtcccaggatgtgggggcagggcagtccatccccctcaacccccaccctgctcccacaactccttggatgctccacagtgttcactgcaacctgggtgggtgtgggccatctgctggccccagtggtttgtagagagaatttttataaagtctcaccttttggttctgtgtgacccttgggccagggtgttatccccattccccgttccacagatgaaggagggagtgtatccaaagccgtgcaggtggcatgtggcaggctccagaccctgagcccagctctctcctaccattgtccccttctgacagtctgtgacttagggctgggcctggccacttgctgatgaagctgctggagcctcattccctctgccgaggctgctgggtctgtcatccctgcaggacaggatccctggcagaagggtgcgtggagctttccaaggagaagccgccacagccaaggctcctgggatgtgctggcagctttcacgtgccttctcaccgcca

SEQ ID NO: 4478 - DNA, 1202 bp, Homo sapiens
tgttgtgaggattaaaagactttaaagtgcttaagtgtgtggccatagttagctctcaagaaatgttacttattattgttgttatcacaatactttgtgtataactgtctactaagctcttatcacctctgtttataaacacttttgtatatctgccttactagacttgtgttccttaaggacaggtgcatatcttgttcactttttctggccttgtatatggaagtttacagtaaatgttggttaaatgagtgattgcacacagatttgccttcacaatggaagtgggcaatagatagagtaaggaatgcttaaggctgggtttgtaggtgatcacagacccaaagctgatgtgaccttgatgttacctggtttatcctcttctgtgcctgaatcccttctgctgcctcctggagcccaggaagtgcttttatgtttccaagacagggcaggagaccatctggaaggtaaacatatcccaggtaccacatttatgtcattttgtttttgttgtaaactctaggtgacatgtctgagagtaaagccaaaaagatagaaatcaaggacgtggatgggcagacgctgagtaagctgattgactacatctatactgctgaaatcgaggtgactgaagagaatgtccaggtaaactcaggctcactaatagctcagtgtattgcacactcaggacccaccattttacagcgttattttatttaaccctcacaacaattcagttggttactgaagaggaaactaaagctccagagaggtcaggtgacctgccctgggccacatggccaggaggtggtcgagctggtcctcaaactcatgccttcctggcttgggcacccatgcttttagccactaggccatgatatccctgaatgagcctgggccccgggagtagaagatctttaactcatgtcttcaaaatcttgtgaaggaaaagctgggagcttaggtgactcctattctccccaggtcatcgtctcatctcagaattcaaacaggtgaataacttttgggtactaacagtaagtgcaaagtaatttggcataaaatgagtagaggggaggtagtagaagtctataattggaaccagctctctttgctcttttcatcatgtatttatttaataacttttttttcctgtaaaatacaaagtgtttacaaacttggataattagaagatattctac

SEQ ID NO: 4479 - DNA, 1104 bp, Homo sapiens
ggaggcggcggctacaatgcctacggaggcggcggcggcggttcgtcctacggtgggagcgactacggtaacggcttcggcggcttcggcagctacagccagcatcagtcctcctatgggcccatgaagagcggcggcggcggcggcggtggaggcagtagctggggcggtcgcagtaatagtggaccttacagaggcggctatggcggtgggggtggctatggaggcagctccttctaaaagaaaatttaaaatgcctgggagtggctataggggtagctctttccaacagcccaagtggggtcaactcctaagccccaccccctcacacacaccgccttccctgttttgcccttgggggagccacttctaaggctgcttacccttgggggtgttcctctatttgcctgccacctctcttgtctctccctctgaagatggactcggccccacatacacatttttgtgttacagtcattgatggactctatttttttattattacttggaccttggtcgtttttatactagcaaaatgtcttgttttaatttgtgttttttggggggagggagggagtgaacttgctgattctgtagcaaaacctgggtgggggttggggtggggggtagtttactttgttgtaaggacttgataacctggctacagcgttttctatgaaatctacttggatcccatgcctgaaatttggaagcatatgtacaaaaatcatttttacgttttatttttaataaatcattgtgtttgaccgtacatgtctaacattttttttctaggatccattccgtaccgttttttaagggatatttgtttaagactttacgtgttaattctttattcttgatgtgtacttagagaaacttaagaggtcctgtggtttttttcccctctcctgttgccctgctagttgcgtgttgaattatatcccttacaggcaaaacttttgaagtggtggatgtggctttttaaactcttaagtttctgtgcatccatctcttgtactaagcgaattgtttatcatcttgacatggttggtcatttctatgacaatttacttcaaactgtgtactgtgtagttctatata

SEQ ID NO: 4480 - DNA, 1124 bp, Homo sapiens
tcatacacctgacatcatttggcttttaaattaaatttctaagaaagaactgttcagttcttgctgtttctggttttcccctacttgaaaactaacatttgtaaataaaacatcttttgaaaagttcagaattatattaaataacatctttagaattaaattgagttttaaagagcttgacaatgtcctttcttgctttgccactgggttcagaaatttaaatttatatggaaatagaactctgggctgggcacagtggctcatgcctgtaatccctgcacactgagaggctgagatgggaggatcacttgagcctagcagttcaagaccagcctggccaacatagtgagacctcgtctctaccaacaacaaaaaaaagaaaattagtcaggcgtagtggcaagcgcctgtagtcccagctactcgggaggctaaggtgggaggattgcttgagcctagaaggtcgaggctgcagtgagccaccatcatgacactgaattccagagcctgggcagcagagcgagaccttatctcaaaaaaaaaaaattgaactctggactaaaaagtgaagcttgaataattttaaactatagtaggctttatgaagattatatatatatatatatacacacacacatgtatgtgtgtgtgtgtgtgtgtatgtgtgtatgtatatatgaaccactacataatgatatgatttaaggaacacatagctgatattttgtgacttttttcccacgtggaatcaagagacccatggtactattctttgtgtttgttttatagagccatttcctgcttttaagtcttggcaggaggactctgagtctggagaagctcagctgtctccacaagctggaagaatgaatcatcaccccttggaagaggactgtcctccagtattatcacaccgcagtttagattttggtcaaagccagcgtttcctacatgatccagaaaagttggattcctcatctaaagcactgtcttttactaggtatatgatttttatgtacttacaagaggcaattcctattatgtacccaagtcttttgagagatttagtcttccagcctgggcttcaatagtgaaactccatctcaaaaaaaaaaaaaaaaaaa

SEQ ID NO: 4481 - DNA, 1136 bp, Homo sapiens
aaggtttgaatggtcaacgcctgcggctgttgatattcttgctcagaggccgtaactttggccttctgctcagggaagactctgagtccgacgttggcctacccagtcggaaggcagagctgcaatctagttaactacctcctttcccctagatttcctttcattctgctcaagtcttcgcctgtgtccgatccctatctactttctctcctcttgtaggcaagcctcagactccaggcttgaggtaagtccgcagccgtctccgccacggaatcacggagaccccattgtcccccttagggtccagtcgggcccccacagacagaggttgggagggccgaatggggactatcgcgagttacgagacccgggttctttctagtcaggagtctcgagctgtgtggcgtggaacaagtcaaaatcctctcttcattccatctttaaggtcctaaggttgcctctcgtcggtgaattcaggttctaaccttaagccaggctgtgaatcacccttcggggttgcccctcttccagtgttgattcgcctggctggaaagggtggaggagtttaggaaagctgagggaactgtgatgtaccgatttagatgacgttttcctcctagctaggttttgtttttctcctggtgagaattcgaagaccatgtctacggaactcttctcatccacaagagaggaaggaagctctggctcaggacccagttttaggtctaatcaaaggaaaatgttaaacctgctcctggagagagacacttcctttaccgtctgtccagatgtccctagaactccagtgggcaaatttcttggtgattctgcaaacctaagcattttgtctgggtaaatatacttttatttttacactgtattgcctttgctatttccaaacagttgggtttgtttgttggtttgttttcaattatcccggctcaaaggtcaggctttaagtctcaactctgcccttgactgtgtaacccttttgagtctcaccttcttttctgtgacaagaaataatctcagccaggcgaggtggctcatgcctgtaatctccgcactttgggaggccaaggagggcggatcgcctgagtctaggagttcaagaccagcctgggcaacatggcaag

SEQ ID NO: 4482 - DNA, 1172 bp, Homo sapiens
tggggctgctgtgaactgactttgctgtacaccttctctaggtgaagaacatcatttaccatgcagtgaaagatgcggttggcaccctcaaggctcatgaatccaaactggcaaggtcctaggcatggagaaactccaagctcctctgtgaagcaggtctttcactcacaacacttaacagggaacggcagggctctttgctggagcagaggcccttcacccagagccagtgtggtcagtattccaaactctccagccactctcttctacgctgcctcaacactgaaggttgacacaggaaagtcgtactgttcacacacacagtttgagactccaagccaagagtgccacatccctatcctgtggccttttggaaatccaaattgcctgaacatggcggggctttcctgcacattctcctgatttgagattcacgggcacacctttcttttcttttcctcttgtgcctagttaagtggaaatgtgtttggagataggggaaatcacataactggtacaagtatggggtaattgcttaaacatgcctggtggaagtctgatagcgtctctgcacgtgacctctgacaaagcccatcccaggagacggggtgaagctattccccacactctcctgtgaacactggagtcttgcaagacccagggagaacccactgcttttcccaggaggctccaggattaggaaatgtgtgtatttagtgaaaaataggtttgtagtgaaatagttactatttcatgaaagtagatatttttagaatttttgaaataccacagttgttttcctggattataaggaaaggcacattacatttagtcttcctttcgatataaaactctttgaagaaatatgatttttagaaatcagctacccattatagcacaaaatcagccaaagcagaatttttaaaaattggcttttttaggattctttttctccccctcccatcttagtcttaccttgagggaacagtcatatgagaaggaactttgtcacatctaagctgtggtgtgttccccatgtgtgtgtacaacactggtgactccaggaaccattttcacctattaccagtgttccctggggactcctcttaatgtttccaaatgggaaggacagttgatttccaacatgaggttttttgttttttatccagaaa

SEQ ID NO: 4483 - DNA, 1612 bp, Homo sapiens
gcaaggatgaagcctcaggaggggcctcagacccagcccctgctccacactgtgccagtagcctaggtgtctcaggcccctgggccccgcagatggccatttccggtgcctgcccagtggccactcttctggaaggggcttggaaaagaggaaggaggcccagctgtgggggttgagggtagagggtggaccagaggctgaggactgagccacccaaggaggtggggactgctcggcctccaccgctgttccgctgcagccccgccctgccccacccacccagtgccttgctgaagcccatagcaatccgcttctcagaggtcctgtcgtgtttccactgctcgccttggtttgggagcagggagggggaagtcctagcccagatggaccaaggacgggcctgaaggcacatgggggaaagggagcacacggggaggacgttggggaccctgggtggggcctccaggtgcagctgtggatggaagacagggattggcctgtgcttcagcgaccaggatggccaggccagagctgcagctgggggctcttttcctggtcattgggtggggctgagtgccacatgttcccacattaaaaaggggggtccagggctgtgtgagtgtgtctttctgggtctagggctcggggtagtttgggtcaaggactgtccctccagcagtcgcctcctcccaccctgagccccacagtcatctggccctttccctgctcaaccctccatcctaggctctgagcctcagaggacccagcccatgagagaacggggatctggggggcctctcacctgctcctatgaccttgctcccttttaggtcaccccattgccaccgtgcccctgggctggactcccgtgctcctcagggcccacccctgctctgtctggtacaggcccctgctgagtgggcccctctcctctgcccctggggtccatcccctcttgcccagggtccccatcctgtaccaagcagactgggccctaagacccctggcagaacccagcctctgctcacacccgccccagcttctgccacggcttcagtcagggccaggaggaacacgtgaaggagaaagagaaatgcaggagccgcggggctcccggttccttgggaagagggtgcccattggacctttggcactggatgagccaataaaccaaactctggcacctcatttattttggcctctgtgctttgttcttgccacaccagctgacaggtgggaaggacctcaagtgagaagcagggttcagctgggggagtggggaggccagcctgtgactgacaggagctctggtgcccagctaagagatgggcttgagggggctcagtctgggaaaatggttttgggactcaagataaaaccagaggcctaggctgggcgcagtggctcatgcctgtaatcccagcactttgggaggccgaggcgggcagatcacgaggtcaggagatcaagaccatcctggccaacatggtgaaaccccatctctactaaaaatacaaaaattaaccaggcatggtggcgcgtgcctgtagtcccagctacttgggaggctgaggcaggggaattgcttgaacgtgggaggcagagattgcag

SEQ ID NO: 4484 - DNA, 1141 bp, Homo sapiens
tgactcatgaagcatttgggccagtgcactgtttacttccatctgtttgcagacacatttgtgcccggcgtttgggagccctttgtatcaatgttctgacaagggtccctataaccttaacctactcgaaaccggtttgggatggatatgatggggcttctgtgctattgctgggattgggagaaataaaacatgcaatttaagtggaagcgaagaaatttaaagaggattttattttgcttgggtcaatccttgttaaaagggaggtggatgtgttttccttgtgttggatggcatgagattatgtgaatgttttgatttattaaaatgaactgcaaggtttttcacaggaacgacagacatgtatgactgcatgtaattataaactcctgacctcctggtggggttggagcatctgtttcaaatgtgggacttacaagcacttctcacatgagaaattaggggcgggtgggaagggatgggacacagcttctggcaccatggatttaagaccatgttggatccaaaagttggcctgaaaccctgaagcttatgcttcacagctgggctgtaagtcagacttgaacccagctgatatgcaaggtcatggcgtgcccagggtggtgacagttgaacaaagtgtatagtacgtgcccagtggtagcgatggaaaaaagtataccaaatggactttgaaggaccaaaggttttaaaagtcaattggtatcacctccacactgactagggtagtggggtgcatttggttttcaaattgggtacttttaacactttagtgcctgactgctgttctttactgacttgattcagtcactcgtagctttattggtctgaaccagctccttgttcccaggttacagacctgcctatcgttccaataatcctgtttcacttgaatgaagggagtatgtcttaaatgtaaagtttctggttctcacactgtactctgaggtccaaatactgtctgtcaatgtgtaacctgatgtctcaaccccctgtgagaagagtccattatttggtgttcaccaacgtgggagacttcaccggaacaggcttttttgctttgggctctgctatttgtttgcagaacacccaagagcgagcaaacatgctctcttcacag

SEQ ID NO: 4485 - DNA, 1202 bp, Homo sapiens
actatcgctccatgccaaaaagctatgcaagatgcagaagtcagcaagagtgacataggagaagtgattcttgtgggtggcatgactaggatgcccaaggtatggaccagtggaattctgtcgtggagagagagggctggcgcatagtgtattcttgggacaggtggcacaaatatatggcccattctgctggggtgacctaaaagggagatgagattatatactcactaaagaattcttttctgtttgttttgttaaaattgaaaaataggctgggcatggtggttcacgcctataatcccaacacttcgggaggctgaggcgggcagatcacatgagtctaatttatatatatatatgtatgtatgtatgtatgaaaaattagggaggggcagaatttctttaggggcagtagcagggaggatcccgaactcagtcatagaatttttaggattgaaacaaagtttgaggtcagaggggaacataaaaccttggtaataccccgcccccggccaccatctttgtacatgtgtctttgcagcttagtgcatctctttgacaaagatttgtgcaatgatgtattttattcaacacatcattctgaaagaacgtgtggaaaactaatgactgagcacaaacctgttgaagatgcagttcttcttggtagcctaaataggattatcttggacctaagatagtgaccttgttttttttcttaatttttccattgaaatacatggccttaaggaaatatgcaaaaaaaaaaaaaatgaacctggaaaaaaaaggtcctggaccaggtggatgcctcatatattaagaaatccccgaggccgggtacagtggcttacgcctgtaatcccagcactttgggaggccaaggcgggcggatcacgaggtcaagagatcgagaccatcctggctaacacggtgaaaccctgtctctactaaaaatataaaaaatttggtgggcgcctgtagtcccagctacttgggaggctgaggtaggagaatggcgtgaacgcaggaggtggagcttgcggtgagtggagattgcgccaccgcactccagcctgagcgacacagcgagactccgtctcaaaaaaaaaaaaaagaagaagaaaaagtatccccgatactattcaaatggaactttatcactaataaacacaagggaagaccatgccccatgttagcaatgc

SEQ ID NO: 4486 - DNA, 1202 bp, Homo sapiens; identical to SEQ ID NO: 4485

SEQ ID NO: 4487 - DNA, 1193 bp, Homo sapiens
agttattggagatgtattaagttggactggctcattttaatcatgagagatgcttgcagagggacatctggagaatctgaatccacttctcttgggtatttcaagtaatagttaagtcttagaaatgttgtaacacaaattgataggaaagaaatgggaccgaagtttacttttcatcctgtgtaatacttctttttagttcatgctgaagagatgggtgtgataaaatggaaaaatatctacctactctgaaaatactctagaaattgtcctattgtgtcagaatagtatgttaaatcagccatgcatatttgaactggttggagcttgacataaatctgggtataaaggaatcatgttttgggaaattcagaattgataaaaagtaaaatggtaatccacagtttactaataattaatgctagaaaaattgtccttattatgttacaaatgtggaaggaagactttaaatacggaagataaacttcttgaaacctgcagtttttatttttagtagagatggggtttcactagttgcccaggctggtctcaaactcccaagctcaaacaatccgcctgcctcggcctgccagagtgctgggattgcaggcatgagccacagtgcccggccttgaaacctgtagttgtgtgttaggtttcttttccagtcggagaatttcaacaatgatgtaggttttttaggttattggatatcagctaaggtaaatcgagccctgctatttacaggtgctttactaacccttgggagaacttcatagatctttcgtgcctgatggtagattgcatagtccagagtcttatgtcaaattcatccctgtggcagtacccataaatgggcagtgccttagatggagataacatctccaattgttttctgaatttgtgaacaaataaccttcaatggtaaatattttttcagttttcaggctgaagataaatatttctaatactgaaaatgatgaaattattagaattccacagtactaattaggcaggtatattagtttcctagggcttctataacataaattattacaagcttggtggcttagaataatagaaatttattctctcatcattctgaaggccagaaatctgaaatcaaggtgttggcaggcttgattccttgttgggacttaggaagaatctgtggatgcctctttcctagcttc

SEQ ID NO: 4488 - DNA, 1296 bp, Homo sapiens
tatatatatacacacacacacacaatgcattgctatttattatattctgtgtactagatcactaagtttgcttgtcttcctttttaggatgacttgaaagtagggcatccttcacccatctgaagggaggaaatagtggcaggtgacagtctgcatgtgcagttttcaggtaaatatccctattcattccaacattgactacctcctctgtgccaggcctgtgggctagttggtatctatcaggaaacaaatgggaggtaaattaacctgtatttgtaagatccatgaaggaaaggacaatatatcttgttttattcactgctagatcccaatcgcagtgcttggcacatggcaggacctccctgaatgttgcataaaacaactgaaaacacagaaggggattcctgttaaagggtttgacaacagggtctgcaattagtgcttccacgcctgttttgcagtcaatattcaactgatacgtcttctacctggagtgcctaggtatctgaaacaaataatgagaaagctgtttcaggaatcatccagcggttgtcagctatccaggctcatgtggtgcctgtgatggtgttacactgttggaagagcaaacactgtctttattgaggtttggctccaagcactgttttggtgttgtagctgagtacctttgggcagtgttttgcacctctgagagtggaatgactcctgtggagttgatcctagtctgggtgcaaacaatttttttctgtttgcagaaaaagacaggttgtcttagggacagcctgtcattctttacctctttgaatcctagatgccttcacctgaatgacatctacctccatcaggaccccagatgtctgacagccctgtgtgacaccaagataagtaacgtatgtagtcttcttgtcatgtaggtcccaattaaattactatagctcagatgggggtaggggacttaaaattatgatgtgaaaaattatgtagagtatcagacttttttttggggggggacggagtcttgctcagttgcccaggctagagtacagtggctcgatctcggctcactgcaacctctgcctcctgggttcaagcgattctcctgcctcagcctcccgagtagctgggactacaggcacctgccaccatgccaggctaatttttttattttaagtagagacgaggtttcaccatattggccaggctggtctgaaactcctgaccttgcgatttgcctgccttggcctcccaaaatgctgggattacaggtttttttgtttgttttttgagacggagtct

SEQ ID NO: 4489 - DNA, 1296 bp, Homo sapiens; identical to SEQ ID NO: 4488

SEQ ID NO: 4490 - DNA, 1296 bp, Homo sapiens; identical to SEQ ID NO: 4488

SEQ ID NO: 4491 - DNA, 1102 bp, Homo sapiens
actctccctcaaaaaaaaaagaataaaagtgcatgtcatttaaacccatagttcttgaatagtgtcagttcagtgtgactgtggtctttgttttctcatctctaaaaattagggttaattataacatttgaaatacccattttataccttttaccattttttccccgtgccttattgtaatgtcctgaaagtttttgtgtgctaatgaggattaactaattgttgaaaatattgacaaaattatagtttaagtccctaaacttggatataggatatttgattttggaattaatccattttgctgcatttctcttaggtgacttaatggctgtaattctctttctttatagaaatttctgaataaattggcagaagaacgcagacagaagaaggaaacttaagatgtgcaaggagatttaatgatttcaaagaaaataatggttctttgtttttaatgttaaccttttttaaatacaatactgatagttagaagaaaactattgtactcttttgttttagtggagaaataatagatgtctgttcatgtgttaagtgttatagcaaaaaaaatacacatatggttaagttaatgaatagtttttgttttatcagaatggcaacagacagaagtactttgtagagattgacttcctaagctacttaagacaacttgcaccactaagaaaaaaatgtagaaccatttggaaaaatgaaatttagtagttccaagtttcaaagaaatgtcaacattttattccattcaataaagaacaaaaccaatagtgtttttattactttcatctgaaacattccatgttttaatctgagccttgcagactttcatttggagtttgaacccgttttggttgcatttcatttttggagaacttaattaacgtgagattggcaattgaaatgcaggtgcagttttctgttaatgtcatgctgttgtttaggtaataagaaatattaagtaattggctttagattttgtaatttttttccctgagttcctgctagatttcgtattctagtagtcaatgtattttcagtgaaatgcaaaaatattcccgttatctttgaccagtattaatttttgaga

SEQ ID NO: 4492 - DNA, 1212 bp, Homo sapiens
tttagatttagtgttttacttgattatgacaaatgtgaggtaagcagacctcaataagcctttctttggcacaagtcactatactgcttgagtttacgtacaggtgaattgttttatgtaaatctatttttagtgatttcaaacttaatgaattggaatattttagaatgtgaaaccttgtgcttcagatatttagcctgcaatgtatcaattaggttagatcatgttatcagctattgagtagtataagacatcaggcttgtatttgatactacttttactcaggtgaaaagatactgggctgggcgcgatggctcatgcatgtaatcccagcactttgggaggctgagacaggtggatcatttgaggtcttgagttcaaggctagcctggccaacatggtgaaacccagtctctactaaaaatacaaaagttagccaggtgataatggcatacgcctgtaatcccagctactctggaggctgaggcaggagaattgcttgagcctgggaggcggaggttgcggtgagctgagatcacgccactgcactcgtctgggtgagaccctgtctcaaaaaaaaaaaaaaaaaaaagatgcctgaaactcactgtacagtgaggaactccagacatggaagaacttgacatggacctagagaaaaagcagacacagaatatgggctatcaaggagagatccagagctatatacatgaagaacctaagaagttattaaaaatctgttagttttcactttcaatccctggactttttgaagtcagtttttaaaaattgaatttgcttttcatcatttcatcacttgatgactcagtctttcagaccgtgtttggtttttgttgttgttgttgttgttgtttgaggtggagtttccctctgttgcctaggctggagtgcagtggtgcagtctcggctcactgtaccctctgcctcctggtttcaagtgattctcccacctcagcctcctgagtagctgggattacaggcatgtaccaccatgcccagctaaattttttgtttttgggtgttttttttttttttttttttttgagatggagtttcactctttttgcccaggctggagtgcaacggcgcaatcttggctcaccacagcctccgcctcccgggttcaagcaattctcctgcctcagcctccggagtagctgggattacaggcatgtgccaccacgcccggct

SEQ ID NO: 4493 - DNA, 1099 bp, Homo sapiens
gagttttagatttcttaaaataatagcacactaatggagtgcgtgattttctttagattaaatgtttacatatttataccatctgtattagtttcctagggttgccataataaattaccacaaaccgggtggcttaaagtaacagaactatattctctcacagttctggaggccagcagtctaaagtcagtctgtcttcaggtccatactctggatgttctaggggagaatccttccttgcctcttccaactttggtggatgtcagcattccttggctcctttggtttgtggctacatcactccagcatctgcctccatctttgtatcaccttctctgtgtgtgtcttctcttttgtgtcttatatggccacttgtcattaaacttgcccatccacgtaacccaaagatgatttttttttttgagacggactacagacacgtgccaccacgcccggcaaattttttgttttttagtagagatggggtttcacgttgttagccaggatggtctcaatctcctgacctcgtgatctgcccgcctcagccttccaaagtgctgggattacaggtatgagccactgcgcccagccagtaaattctttttattactgtagtagatgatacttgattaaatgccatctcgggtgctttcattgtcaacaaaggtgctcccatctctaagcttacataaaatgtaattttaaaaagacatttctttagatgtacctgttcacatttttgttaatagtctctcatgtctagttttggaggctggaatgttcaagggagccacaaaaatctctgtcagttggtgttttgaataattgttctgaaatatactcccaggcttgaaacttggatctggccttttttttttttttttaacttgaatttttttttttttttttgctcttatgttattcatatgaattttgcaaatagagagccagtcttgtagcatagtaaaatttaacagtttatgtgactattgatctacccatcttatagagattgtctgtctgtaggaagacggtggtaaccgtggtcagactcatcattttgaacactctaggttagtgttggagaatttgtaaaaca

SEQ ID NO: 4494 - DNA, 1134 bp, Homo sapiens
ctttgggtgctccaactcttgtaacttcacaggcaacaacgttatctacgttccagcccgctaataaacttaataagaatgttccaacaaatgtacgttcttctttcccagtttctctacccttagcttatcctcaccctcattttgccctgctggctgctcaaactatgcaacagattcggcatcctcgcttacccatggcccagtttggaggaaccttctcaccttctcctaacacatggggaccattcccagtgagacctgtgaatcctggcaacacaaatagctctccaaagcataataacacaagccgtctacctaaccagaacgggactgttttaccctcagagtctgctggactagctactgccagttgtcctatcactgtctcttctgtagttgctgccagtcagcaactgtgtgtcactaatacccggactccttcatcagtcagaaagcagttgtttgcctgtgtgcctaagacaagtcctccagcaacagtgatttcttctgtgacaagcacttgtagttccctgccttctgtctcctctgcacctatcactagcgggcaagctcccaccacatttctacctgcaagtacttctcaagcacagctttcttcacaaaagatggagtctttctctgctgtgccacccaccaaagagaaagtgtccacacaggaccagcccatggcaaacctatgtaccccatcttcaactgcaaacagttgcagtagctctgccagcaacaccccgggagctccagaaactcacccatccagtagtcccactcctacttccagtaacacacaagaggaggcacagccatccagtgtgtctgatttaagtcctatgtcaatgccttttgcatctaactcagaacctgctccattgactttgacatcacccagaatggttgctgctgataatcaggacaccagtaatttacctcagttagctgtaccagcacctcgagtttctcatcgaatgcagcccagaggttctttttactccatggtaccaaatgcaactattcaccaggatccccagtctatttttgttacgaatccagttactttaacaccacctcaaggcccaccagctgcagtgcagctttcttcagctgtgaacatta

SEQ ID NO: 4495 - DNA, 1134 bp, Homo sapiens; identical to SEQ ID NO: 4494

SEQ ID NO: 4496 - DNA, 1167 bp, Homo sapiens
ggctggaacgacccgccgcagttctcatacgggctgcagacccaggccggcggacccaggcgctcgctgcttaccaagagggtcgccgcaccccaggatggatcccccagaggtgcgtggggcccctgtgctcggagacagacggagaatgggggggggggggtgtaaggcataagcctgtttggaaggcttttttctctccccgagggctccttaaggagagaagttttggggctccagtaagggtctcagagcaggtgcttttccgagccccttctctgctgctcaggttaataaatggtgtattgatttaaaaagactattttttcatcctagatgatcttatccagacctgtggcttttaatatagttttaatcctgaagttatttttctttgttaacctatacctcttgccagaaccgtatagtggcatattcatttgtccattctgtcttcacttaggtatatgataatcgtcagacttcacagtttttcattcatttaatcactgttatttactgagcacttctataagtcaggcactgtttgagggcgaactagacagcagtgagaaaaaaaaaaaaaagatctctgctttcaggaagtccacgttgcagcactggagatgggctgaaagatgaaatagtggtgagggtgctacagaaaataagcggtgatgtaatatgactgggtaacgaggtgtctgaggggctgacatttaagccacacaaagatcatgtacaaaagcattccaagcaaaagaaacagctgcaaaaggaataagtttggccaattcagagactgatgaaatacagagtggctggctacagcatagtgggctttgtaaagcaggatgaggaatttgtattttaatctacataaagttagaagccattgaaaagtttaaagtagaggagagccacctttccccccgagaattttccaagccattaaatgggctgtgccgtggcccccataaaggggctcaggtttggttctttcagtggccctccattctccacaccctttttgctgtagaagaatgatacaaggcttggtttcttaaactcagcagtattgataggttgtggccagataattctttgtgagggactttcctgtgtcttatgttaatcagcaactctgacttctacccaaaagatgtc

SEQ ID NO: 4497 - DNA, 1197 bp, Homo sapiens
tttcgctggcgttcgtgggcctcccccggacccacacacggaaacacgcaaccattcggggatccagacgcccgtttacacgcaccacccctgggcgggctgtgcggctcaggccctcccccgggaccggcccgtgtcccgccccgtgtcccgccccgtatttgtgcggcgccagctggccccgcagcctgcggcgcagagaggctgggcttgcaggcgcagtagctccagaggtcgcgctgggctgagagtgcgggccggcagaggctggcggggagcagccggggttatgctgggcaaggattacatgctggccatcattctggtcaactgcgatggtgtgcacggaggggcccggtgggaagaccaggagctgagggaggacgagggaatccgaaaggctactctggggctcaaagacggtgggggatacctctctgtgtagggaccagggggcgaatgaacccggtctttacatgtgatgtcttcaagattgaggagcctggatcttcagcctaagaactgacccattttggggatggagaggggattatgacagcatgttattctgaactcacaaatcatatgctccctcctctctaatccggtgttcctgtagatgacttgtggggggaccacagtctggaggtggaggctggcctgcctcctggctggaggaagatccacgatgctgcaggtacttactactggcatgtacccagcggtagcacccagtggcagcgcccaacctgggaactaggagatgcagaggacccaggcacggtaggtagagtgtgaggaggaggtctgagcccatgtgtggacctaggtctgctgttaaactgactaactcccactctacagggaacggaggggatctggggactgcggccccccaaagggagatccttctccagcctggagagttcactggaccggaggtaacgggtggcccaggcaaaatgaaaggcttggggttccatggtgttcaaaaatgcagctggacccatggtctgctttccagcccaggttctggattctgtcacatgttttgggttctgttacgttcttggctctgtcccaggttcttaactgtcagtattttgagttttatcccttgttctaagctcttgtttgtagctacatgtttttcatattcttggtcctaacctatcatgttctagaccttggccatta

SEQ ID NO: 4498 - DNA, 1218 bp, Homo sapiens
tgcctccggcaccgcctctctgtgcgtcaggggttagcgctgctgctgctgatggctgcgggagcctgctatgcagcagggggccttcaagttcccgggaacacccttcccagtccccctccagcagctgctgccagccccatgcccctgcatatcactccgctaggcctgctgctcctcattctgtactgcctcatctcaggcttgtcgtcagtgtacacagagctgctcatgaagcgacagcggctgcccctggcacttcagaacctcttcctctacacttttggtgtgcttctgaatctaggtctgcatgctggcggcggctctggcccaggcctcctggaaggtttctcaggatgggcagcactcgtggtgctgagccaggcactaaatggactgctcatgtctgctgtcatgaagcatggcagcagcatcacacgcctctttgtggtgtcctgctcgctggtggtcaacgccgtgctctcagcagtcctgctacggctgcagctcacagccgccttcttcctggccacattgctcattggcctggccatgcgcctgtactatggcagccgctagtccctgacaacttccaccctgattccggaccctgtagattgggcgccaccaccagatccccctcccaggccttcctccctctcccatcagcagccctgtaacaagtgccttgtgagaaaagctggagaagtgagggcagccaggttattctctggaggttggtggatgaaggggtacccctaggagatgtgaagtgtgggtttggttaaggaaatgcttaccatcccccacccccaaccaagttcttccagactaaagaattaaggtaacatcaatacctaggcctgagaaataaccccatccttgttgggcagctccctgctttgtcctgcatgaacagagttgatgaaagtggggtgtgggcaacaagtggctttccttgcctactttagtcacccagcagagccactggagctggctagtccagcccagccatggtgcatgactcttccataagggatcctcacccttccactttcatgcaagaaggcccagttgccacagattatacaaccattacccaaaccactctgacagtctcctccagttccagcaatgcctagagacatgctccctgccctctccacagtgctgctccccacacctagcctttgttctggaaaccccagagagggctgg

SEQ ID NO: 4499 - DNA, 1140 bp, Homo sapiens
gggctcaagcgtcacacatacatacatacacacacacacacacacacacacacacacacacacacccggcttaagctcagaagctacaataatgcgccaagtgccccaagtgccatggggaagaaataacggatggcctgagccttactatctcgctccggcattttgttatcgttctttcgctgtcaccaacaatcgagtctccaacagcaacaccgcagcgacaagctctttcccacagtgcacctcagaatcaacccacactgctttgcgttcgcagcctttccgcttcctgtttttccctccgaccaaccccgagcgcaaagaaattgacctcgcagcggtcctacaatacttttatatcattggccaagctttaccccgcccctgcctcatgcagcctatgggctaggctttagggtccgcggttggtcagaccggagcacttggcctgaagacctggaattggcgacttcgatattaacaaggatggcggcggccgcagcaagtcgaggagtcggggcaaagctgggcctgcgtgagattcgcatccacttatgtcagcgctcgcccggcagccagggcgtcaggtgaggcgcggcgtggtgaggcgggcgggcttcgggacgccagggtcacgacctcgacctccctgaagttgagggaagcccccgcccacagcacgcgcggcgctctctccggccccgcagggacttcattgagaaacgctacgtggagctgaagaaggcgaatcccgacctacccatcctaatccgcgaatgctccgatgtgcagcccaagctctgggcccgctacggtgagtgcgggacgccaggggtctggggctccggtaggggaacaagggtttgagaagagaagggaccgcccaaggtcgtgcagaaacccgtggagaaactagaactcggactttagccttgctgttgatcttgtttccatgaagaaatttatattcgcagggttatatgatgcgttgtattccgggcaacataagtatgcaggctgaccgaatcctgcgtagggaccaggagctgacgtttttgtagttaagaatgggcttcagacaggagagaagttagtcaatatagtttctccaaataacgtgtagccagtgtcagtcca

SEQ ID NO: 4500 - DNA, 1210 bp, Homo sapiens
gccagtgcactgcggcctgggtgacagagggagattctgtttctaaaaaaattaaaaagagtaacaggaagtttcactgggcgggggttggaatgtttatctagtttagcagcgaagttctaagataaggtctgaaatacaatttacaccttgtaaagactccactcccctggcccaagcactagttgtaaaagtcgatttgatcacgaagtgaccctgtgtggttgttttgggagcgcagagtctggaagcgaaggaggtgggggcgtttcgagagttgtggaccaggtgactgctgagaaggagacagtaaaccggggacacacctgcggaagagctcttcagggattaggaaaggctacgtccttgtcactgctgtgtgtccccagatggacaactcctcaattgtctggaggtcgggggcgtgttggacagtcctggtcgctgagtcatgctgaagcactctctttttgactcactctttgtgacgtaggtctttctcaccagtcaataaaatataatccgaaagcaacctccgggctggctttagctcagcggttacttcgacagttctttaattgaaacaagcaacctgtctgggttgttcgagacccgcgggcgctctccagtccttttacctctctgggcggttcgagacccgcgggagctctccagtccttttcactgctgaagttcagctccctttccatggtaaaaggaatcagggctcctcggagaaatggctgattttagtactgggcaggaaatatagaaatggacgtggagcatctcatagagctagaaagtaaggaaatgcttaaaaaccaagaacaaccaaactcaacttttaaagttttttcaatgtttagtatgttcatgtgtttgttctaacagttgcctgtatacttgtatcttctcgcccttttttactgaggcccacaggatttttttctttcaaatctaatggatgttctaagatataccttagacttgatcattccatataagttttcctaggtttcctttcgatatgtagacccaatttttttttattatagttttgaagattacatcggttccattattttattcttcttcagggactgcaatgtatgttggatctttgcctctataccactttctctctgatcctttgaattgctttcttgattttatttttattttattggctgttttaatgcctttcctc

SEQ ID NO: 4501 - DNA, 1240 bp, Homo sapiens
tatgggttaagcctagatggggccattgcactccagactgggtgacagagggagagtctgtctctaacaaaaaaaatttaaaaagcataacaggaagtttcacctgggccggggttggaaggtttatctagtttagcagcgaagttctaagataaggtctgaaatacaatttacaccttgtaaagacgccactcccctggcccaagcactagttgtaaaagtcgatttgatcacaaagtgaccctgcgtggttgttttgggagcgcagtggctgaaggcgaaggaggtgggggtgtgtcgagacttgtggaccaggtgactgctgagaaggagaaaataagccaggtacacaactgcggaagagctctccagggttaggggaaggctgtgtccttgtcactgctgtgtgtccctggctgtacactccaattgtctggaggcggtggcgtgttggacagtcctggttgctgagtcatgctaaaacactgttgttttgactcactttgtgacgtaggtctttctcaccagtcaagaaaatataatccggagatagcctctgggctggctttagctcagcggttacttcgagtacattgtaaccacctctctgggtggttcgagacccgcgggtgctttccagctcttttactgctgaagttcagctccttttccatggggaaccatggagaaatggctgattttagcactgggcaggaaatacagagatggacagggtgcatctcacagtgctagaaagtaaggaagtgcttgaaaaccaaaaacaggccgggcgcggtggctcatgcctgtaatcccagcactttgggaggccgaggcgggcggatcacgaggtcaggaaatcaagaccatcctcgctaacccggtgaaaccccgtctctactaaaaatacaaaaaaattagccgggtgtggtggcgggcgcctgtagccccagctactcgggaggctgaggcaggagaatggcgtgagccattcgggaggtggagcttgctgtgagccgagatcgcgccactgcactccagcctgggcgacagagcaagactccgtatcacaaaaaaaaaaaaaaaaagaaaaaaaagaaaagaaaacctaaaacaaccaaactcttaactttaaaaatatttttcaatgttcagtaatgttcatgtgtttgttgtaacagttaattgtatacttgtatcttctcatcctttttgcctgaggcccagaggagtttttctt

SEQ ID NO: 4502 - DNA, 1271 bp, Homo sapiens
tgcactgcagcctgggtgacagggtgacagaggggtattctgtcaaaaaaaaaaaaaaaaaaaagcgccgcaggaagtttcccctggggagaggatgtaaggtttatctagtttagcagcgaagttctaagataaggtctgaaatacaatttacaccttgtaaagactccactcttatgacccaagctctacttgtaaaagtcgatttgatcacaaagtgaccctgcgtggttgttttgggagcgcaaaagctggaggcaaaggaggtgggggcgtgtggagagttgtggaccaggtgactgctgaggagagaataaaccgggggcacaaccgcggaagagctctccaggggttagaggaaggctgagtacttgtcactgctgtatgtccccagatggacactctgcaattgcctggagatagcggcggattggacagtccaggtcgctgagtcaagctaaagcaccgttgttttgactcactctttgtgacgtaggtctttctcaccagtcaagaaaatacaatccgaaagcaacctctgggctggctttagctcagcggttacttcgcgtgtcatcaaaccacctctctgggttgttcgagacccgcgggcgctctccagccctcttactgctgaagttcagctcactttccataataaaaggatccagggtttcttggagaaatggctgattttagtagtgggcaggaaatatagaaatggacacggagcacctcgtagtgctagaaagcaaggaagtgcttaaaatccaaacacaaccaaactcttaacttttaaagttttttcagtgttcagtaatgttcacgtgtttgttctaacagttacctgtatatttgtatcttcttgtcctttttgcctgaggcccacaggagtttttctttcaaatctaatggatgctctaagatatacctcagacttgatcattccatataatttttcctaggtttcctttcgatatgtagacccaagtttcttttattatagttttgaagattacatcggttccattgttttattcttcttcagggactgcaatgtatgttggatctttgcctctacaccaacgccactttctgtctgatcctttgaatggcttttttttttttcagatggaatctcactctgttgcccaggatggagtgcaatggtgcgatctccgctcactgcaacttccatctccttttttcaagcgattctcctgcctcagcctcctgagtagctgggactacaggcacatgccaccatacct

SEQ ID NO: 4503 - DNA, 1361 bp, Homo sapiens
cttctccaggaatgtctggtcacaggcagggccatgactcattagaacatgatgagcttcgggagatattcaatgacctcagcagcagcagtgaggatgaagatgagacccagcatcaagatgaagaagatataaacatcattgacacggaggaagatctggagagacagctacaggacaagctaaatgaatcagatgaacagcaccaggaaaatgaaggaaccaatcagctggttatgggaattcagaagcagattgacaacatgaaaggcaagctccaagagacccaggacagggcaaaacgacaagaggatctcatcatgaaagtggaaaatctggctctcaagaacagatttcaggctgtactggatgagctcaaacaaaaggaagaccgagaaaaggagcaactcagctctttgcaagaggagctagaatcactcctagagaagtaaaaagaactgatatttaatttcagtcttcagactggtcagcattagaaaattcttggctttattgtactgggtattaagaccttgctcttcctagtccttttaatgctgtgtgttctgttaagttctttcatttgtttgtaattttgtttttcagcaaatttatattgttttgctaggtgttcatcctataagaagcaggattgtataggcagaaaaatgattgtaggaaagttgcaggattagcggaatgtatggttcaaccttaattatagcttcattgcaggactttactgtttctccattttctagaagctgctgttgctgctttgtgatgacgtgagatcaataagaagaacctagtctagagacaatgatgctagtttgcatatgttttcctatgcaataattgttttcccagttattcaaagcagctttctatatgtagagatgcaaattattaagttgtttccaatacaataaataaaagcatctgtttttcactttatagtgtatcttgttctttcatggttggtgggagtcaggtcctcttgtgaggtggttttatggtggagtttagtgactaagcaatttgatcccgttctgcaggtagaggcagtagggtttatgaaaaaaaggaacacagcaggggtaaagaaattgggaatggtcatgtttgcatcatattaagattccaattctatttgatctacttgaaagctgggaaacattagatacagagctttcttaaagtaccctaatttttgtagatgaaggcctttgtgccttttttaaaaagcgctaaatctacctgcataaaatgttggaaacaaagcagtggttatcaagtgcagtccaatgaaccattccattggtttggattaatatttctaattttcttcagttgagttc

SEQ ID NO: 4504 - DNA, 1187 bp, Homo sapiens
gtgaaaccccatctctactaaaaatacaaaaattcgctgggcatggtggcatgtgtgcacttgtcgtcccagctgctcaagaggctgaggcaggagaatcacttgaacctgggaggcagaggttgcagtgagccgagatcgcgccactgtactccagcctgggtgacagagcgagactccagctcaaaaaaaaaaaaaaaagaaaaaagaaaagaaataattattgaatcaatggaaacagaattacaactcttcccacttttgggaaggagaattgagattcctgctttccccttcaaccctagctttatgtttgttgtgatggtatagaggtcacacatggcagccttgtgtctgttcttaggctgagttcatctacttagggacggggaatcccagattgggcaaaaccaaaagcagggacagaccttggaaaaattgtaaagcagttcttggttgtgctcacccaccatgacaaaatatgcacacacacaacgcaacacacacacagacattttcatgccttcaaggcctaccctacagcctttcccatggtgccaaacccttcttcttaccttacagtcacttaactgtctctgctggtctcttcccactcatttaggcaacaaatatttattgaaaaacttctctgagccagatggtgccaaacagttacctaaagggcagactgtgtgtgtgccagggctgtttcccgccaacactcccctgcaaattgaaataatttcatccttggaaattcaaaaaaatcatgaaaattgtcactgtgggaaaattccaagtagagctgaaccttctaagaagcagagagttcttcttatggtttagtatttttttaaattatgaatcatttcatgttttttcaacactcggagtttctaaaagtctcacttaggtccaagtgctaggctttgtgctaggtgcttcagtaggaagcaggtggagtcgctgcctcacagaagccagtgtggtggaggaacagacaggcactacaacagctgcagtgtgactagtgccatgtggggcagccgctgggatgggagtacagtggaggcacctgcccagtctgagtggatctcctctgatatattttattcgtgtcatcatggcaaatgttgggggactggcattctagggaacaccatctgcccaggattcacagcaagagg

SEQ ID NO: 4505 - DNA, 1187 bp, Homo sapiens; identical to SEQ ID NO: 4504

SEQ ID NO: 4506 - DNA, 1187 bp, Homo sapiens; identical to SEQ ID NO: 4504

SEQ ID NO: 4507 - DNA, 1187 bp, Homo sapiens; identical to SEQ ID NO: 4504

SEQ ID NO: 4508 - DNA, 1187 bp, Homo sapiens; identical to SEQ ID NO: 4504

SEQ ID NO: 4509 - DNA, 1187 bp, Homo sapiens; identical to SEQ ID NO: 4504

SEQ ID NO: 4510 - DNA, 1187 bp, Homo sapiens; identical to SEQ ID NO: 4504

SEQ ID NO: 4511 - DNA, 1187 bp, Homo sapiens; identical to SEQ ID NO: 4504

SEQ ID NO: 4512 - DNA, 1187 bp, Homo sapiens; identical to SEQ ID NO: 4504

SEQ ID NO: 4513 - DNA, 1187 bp, Homo sapiens; identical to SEQ ID NO: 4504

SEQ ID NO: 4514 - DNA, 1187 bp, Homo sapiens; identical to SEQ ID NO: 4504

SEQ ID NO: 4515 - DNA, 1187 bp, Homo sapiens; identical to SEQ ID NO: 4504

SEQ ID NO: 4516 - DNA, 1187 bp, Homo sapiens; identical to SEQ ID NO: 4504

SEQ ID NO: 4517 - DNA, 1187 bp, Homo sapiens; identical to SEQ ID NO: 4504

SEQ ID NO: 4518 - DNA, 1187 bp, Homo sapiens; identical to SEQ ID NO: 4504

SEQ ID NO: 4519 - DNA, 1187 bp, Homo sapiens; identical to SEQ ID NO: 4504

SEQ ID NO: 4520 - DNA, 1187 bp, Homo sapiens; identical to SEQ ID NO: 4504

SEQ ID NO: 4521 - DNA, 1187 bp, Homo sapiens; identical to SEQ ID NO: 4504

SEQ ID NO: 4522 - DNA, 1187 bp, Homo sapiens; identical to SEQ ID NO: 4504

SEQ ID NO: 4523 - DNA, 1187 bp, Homo sapiens; identical to SEQ ID NO: 4504

SEQ ID NO: 4524 - DNA, 1187 bp, Homo sapiens; identical to SEQ ID NO: 4504

SEQ ID NO: 4525 - DNA, 1187 bp, Homo sapiens; identical to SEQ ID NO: 4504

SEQ ID NO: 4526 - DNA, 1164 bp, Homo sapiens
tttcttctcacaggcccaatcctgaatgtgcccctggaccttctggacccttgagtccaaggcagatcctctctcccagggaatccgacacaggaggaaccccttctctggttgagctgggccaggcctaagagtagcaggaactctaagaccacagagttttttataaatgtataaatgtatcaagccaaatgtgcagatgctaactggacattctggggaactgggcaccaggagtgccttcatacactgtaccccagctctcttctaaaagagaagtgggtgggcacactgaactgtttggtggccccaaccacaggaagctgcaattctctggcttagggtgatacttttgccctccttgtgcccctctcagctttccatccccagctaggaagaaagaatggcactcttgggcttggcccagaattagagttattagagcaagagagagcttaggaagcatgagggcaactatagtgaggccttattgccaggagggagggttttggttgctggcgcttgtgtataaaggggcaagagcagctcctttggactattcctgggaggactctgatgcagggcgtctgttgctcccctgggtcacctcctccctgctcgctgacatctggggctttgaccctttcttttttaatctacttttgctaagatgcatttaataaaaaaaaagagagagagagagaggtgtgagggacaaaatgcaaacctatttcccttgcctcataggcttctgggatgtcatcacctccagtttgttggttttgtttccaactgttaataaagcattgaaacagtactgccttacagcttcctgtgtgaatttctgagctgttttcttttcactctagtccaggctcctctagtctttcctgcctcaaatccctggttgacctgacaaatcactgtgaaaaagctaaaggtgccagacactttacttgggcacagggctagagatgattaatacatggtggctgctgccccaccagagctcacctcagggccgtttggccacagtaaaggagtgggcgcctggttcagctccctgactcttccacattgctgctacttggtttggagcccttttttggaactcacttggaacctttcatgttcccagatgtcacgcaaggtttcctggcagta

SEQ ID NO: 4527 - DNA, 1191 bp, Homo sapiens
cccgcctcggcctcccaaagtgctaggattacaagcgtgagccactgcgcccagccaacttacagatattttttaaagcagatttcactatctgttctaggtgatcatttttacaaatgatactgcagtgaacatccttgtgcatatcttctttcacatttatgcccatatgttggatacatttctagaagtagactatatgttacatgcatgagaaattgattagtactgttaaatgcccctccaaaagttgtatcaatttatacttcattgaataggggacttgatttggtatttatggacaggagcctagggatggattgtagggaatgcatttccctgaagagatggtccttagctttcagcagtttctggaaactgagtggtgagaataataatgtgagaaatccggaacactgataatgtcctgtttcctaatcggtctgtgcccctgtgtaatttactcattatacgtgtccgtgtcacagtacctggaaagttctctccgtttcctttctcttgggcaggaatgaaagggttttggaggcaatgacagaaagagctgagatggatgaagtggaacgtttccagccgctgctggatggattaaaaagtggaaccactattgcactgaaggcatgtatatcccctgaaactgggcccaagaatagaattcaagatggacagacttaaattcatttgaccttttaataaaatacatggagtgcctcccaactatatattttacatttcagaatctgttatgaagggaaaatgattaaccttctttctaagaaggtaaagaatgaactgttttcctcattatgagatggaaaaaggcatgatatctatttacaatctaggaaaaccaagacctacaataacatatactctcaaatccttgaaaccatttagagtttaggctctccggatctgtactcaaaccaggtctcattgctatagtagaaaagtcatctttagagtttttgtattgtatctttcaggttgtattggggacctaagaatgcatgtaaagaaaatggattcttgatctccaggagttagcattgacatagctgctgaattttcttattttaggttggatgcctacagctgatcaatgctctcatcacaccagcggaggaacttgacttccgagttcacatcagaagtgaactgatgcgtttgggg

SEQ ID NO: 4528 - DNA, 1153 bp, Homo sapiens
tatatatacacacacacacacacatatatatgtttttttttttcttttttgagatggagtcttgctctgtcacccaggctggagtgcagtggcacgatcttggctcagtgcaagctctgcctcctgggttcaagcatttctcctgcctcagcctcctgagtagctgggactactacaaaggcgtgagcaccgcgccgggcgtgagttatattttcaaggctagaattgacagaacttgggttgatgagaatagttgattagcaggcagggtgccagggagggtgttgagcagaacagaggggggactgtgctttattttaaaatttttattgagacacagcatataaagtatacccaaatcttaagggtataacataatgaatttcactatcaagataaagatttagaacatttatagttttcttgtgctcctttcaggcaatacctaaaggtatttaccttgtcttttgataacctcctccacatcttcctctggttccttttaacagggaatgcgttgaatatgtcaagagcttcaatatccctctactcgtgctgggtggtggtggttatactgtccgaaatgttgcccgctgctggtgagcactctcctgatttcctcccctgttgtccagtgtgagctagggtgtccctcagatatggccacatgggtccttcagcccacttggtcagcctgctcccctctgctggttggtttcaggacatatgagacatcgctgctggtagaagaggccattagtgaggagcttccctatagtggtaaggaccaccccacaacacccccataacaggaaggccattctcaccagattccagaatgacctggtttgaaggcacatgggaaattttacactctcagagctctgcagactaaacccctgggctcagagcagggaagagattgggcagctattatgtaggtgctctggatgggaaggaaaaagattgggaagtcttgttagctgcctttctcagtctgagccatactttctcctctcctccccaagaatacttcgagtactttgccccagacttcacacttcatccagatgtcagcacccgcatcgagaatcagaactcacgccaggtcagcagctcagaaaagctgagcacaaacttctcctgaaaggtg

SEQ ID NO: 4529 - DNA, 1125 bp, Homo sapiens
ttttaaattttagcttatctgaattttctgactagtctataattattatgtattagttaattaaaataatttttaaaaatttcactgagtgcaaaagatgcttacagagttgccagccgactgggtgtttctccctttgccccaggcggtcctttattatcagttggctgccagccagggccacagcctggctcagtaccgctatgccaggtgcctactacgagacccagcctcttcgtggaaccctgagcggcagagggcagtgtccttgctgaagcaggctgcagactcaggcttgagagaggtgagtgccattggcagggtctgttcaaggtctctgaggcctgtggagcctgaaagtgaccaagatgccttcttttccttcctccttgaccacaggcccaagctttcctcggggtgcttttcaccaaggagccctacctggatgagcagagagctgtgaaatatctttggcttgcagccaacaatggggtatgcgatctcagtggacaagcatgttggggatgaagcctgataagagaagggattttggaactggtactgagttcttctgtgcttaggagattgttggataggagccttggcctggcttcaagccttagcgctcactgacttactgtgtgaccgttgggcagttgcagtagtacgccagagctggcttgcaccaggctgtgagagctgttggcagcttaaaatctgctatggtgggaatatttgcaccacagaaattgctaaatgccataaaacagggctttttccctcctcgagagccagttgttcaacatttaccagcacactactgggcctggtcacttcttgattcaaacctgtttcctcgtctttaaaatcagaataataatgcttgccttacctgtccagtacttcacagggtggttgtgaggatcaaaatctaactgagataactaacaggtgtgacagtgctgtgaaacctgtacacatgaaaaacacatcattacaagtgatggtaacccagggaaattagaagacgcatcaagtggagacagtaaacagggaacactgctcagtttggggtgggtggggatgtctggttgtctgtgaactggggtcattggcattcagaca

SEQ ID NO: 4530 - DNA, 1120 bp, Homo sapiens
tggctcctctgttttacatactcattagtaagtgggaggtccactggggcaacagacactgccacaatttcagtgttgtgttcagccaaggggacggtctgggcaggcagcttaagtgtgagtttagtcacaactcctgagtgtcccgctctcctgcttacctaggaggtgagtgccaggaaaatacaccaaatgcttctagtattgtttccccacttaaaatagtcctgcttaaattcacatggtgtggtctgatgttctgagagcatcaggaaatacaacccttttgcccatttacccttctccccggatcccaaggtggtctgttgctctggcttcctttcattgtcttaggccttcatggagtggatgctgcctcctcctggctgtttttgtgcctgtttgaagctactgctgcctccatttctgggaaagacctttgagagcctagcccaggcctaagggctatgtttggtaccagtgttttgtctttagcttttctatgtgattgtgccgtcattctgttttaagctcatggatcaatggatttgtttacaatgtgatattttctattaaatccagtattttcaaataacatgtcatttgtggatttgagcccccaattttagaagactctctgggctatttatatattttagaaagagctggtaagcaaagcctcacattcagtcctcacaagagcctgcaggaaggccacaagcatagcaaccatcatcagagtgaaaaataagattttatgaaaatggagcacttacaggaaaaagggtaggaatgaacagatgagcaataaattgtcatgttggggctgtacctgagatccaaacgaggatacagctgttataaagattaaggcagatttgtgatgagggatattattgcaaggtatgcaaaaatacatataggtttttttttttttaaagttaatataatggaatatcttagggcaatatagccaattaaggaggtagatatagaagttaaaagaagggtttaatttttttaactattttgaggctgggtgcagtggctcatgcctataatcccagtgctttgggaggccaaagcaggagaatcacctgagatcagcagttcaaaacca

SEQ ID NO: 4531 - DNA, 1099 bp, Homo sapiens
actggtatagagcacctagtccagtgacctgctgggtaaactgtggatgatggttgcaaaagactaatttaaaaaataactaccaagaggccctgtctgtacctaacgccctatttttgcaatggctatatggcaagaaagctggtaaactatttgtctttcaggaccttttgaagtagtttgtataacttcttaaaagttgtgattccagataaccagctgtaacacagctgagagacttttaatcagacaaagtaattcctctcactaaactttacccaaaaactaaatctctaatatggcaaaaatggctagacacccattttcacattcccatctgtcaccaattggttaatctttcctgatggtacaggaaagctcagctactgatttttgtgatttagaactgtatgtcagacatccatgtttgtaaaactacacatccctaatgtgtgccatagagtttaacacaagtcctgtgaatttcttcactgttgaaaattattttaaacaaaatagaagctgtagtagccctttctgtgtgcaccttaccaactttctgtaaactcaaaacttaacatatttactaagccacaagaaatttgatttctattcaaggtggccaaattatttgtgtaatagaaaactgaaaatctaatattaaaaatatggaacttctaatatatttttatatttagttatagtttcagatatatatcatattggtattcactaatctgggaagggaagggctactgcagctttacatgcaatttattaaaatgattgtaaaatagcttgtatagtgtaaaataagaatgatttttagatgagattgttttatcatgacatgttatatattttttgtaggggtcaaagaaatgctgatggataacctatatgatttatagtttgtacatgcattcatacaggcagcgatggtctcagaaaccaaacagtttgctctaggggaagagggagatggagactggtcctgtgtgcagtgaaggttgctgaggctctgacccagtgagattacagaggaagttatcctctgcctcccattctgaccacccttctcattccaacagtgagtctg

SEQ ID NO: 4532 - DNA, 1210 bp, Homo sapiens
ccccaaaatttacagcatcaataagatttgtaatggccctctgctgtgcatagagcttgtattagtgtgttttcttttctttttcttttttttttttttgagacagaatcttgctctgtcatctagactggagtgcagtcgaatgatcttggctcactgcaacctctgccttccaggttcaagcgatcctcttgcctcagcctcctgagtagctgggattacagtgcctgccaccacgcctggctaatttttgtatttttaagtagagatggggtttcaccacgttggccaggctggtctgaaactcctgacctcagatgatctgcccgtctcagcctcccaaagtgctgggattacaggtgtgagccactgcatctggcctagtgtgtttttatactgctataaaaaactacctgagactgggtaatttatttaaaaaagagttttaattgactcagttccacaggctatacaggaggcatggctggggaggcctcaggaacctacaatcatggaggaagggtgaagggtaatgttaaagatacattttgatcacttctaggaccttctgatgtaaaggcatatttgttaaaatcacacccagagcttttattgtaagggtactttttttttcttacactttcagaactttccaatgtaaatatgcattttgagtacttctggaatttttcatagttaaggtacattttctcttttgcaattagaaatatgtggaatagttatatttttgcaccttgagaatatttggttcctaatcttttttatctaatggttttaatgcttctgaatttccttcctgatatgttgttatgctggggctatgcaaaatggtgatattctaatgctattatttctttttcataaatatttggcattcttttataaagcacatgccttttctattcttttcattttatttttaaatgaaaaagctgtgtagcatgtggattagtcacttcatacaatagacgtttgattagaaaagttgggcgcaaatgaaatgtaaaaatatggagtcatagcttatatgtaccatggtggtttactcttcaaaggaatcttactgtaaatctttttttttttttttttttttttttgcaaagctagtaatcacctcttaatttctgttattcttataaacctgaattttcatgtagggcacatttattcaacaaattattgagtgctt

SEQ ID NO: 4533 - DNA, 1212 bp, Homo sapiens
agcttaagtaagagccatctaaattgtaaatgaaatcaaccacatcaaatgattaaatctgcctgtaagtgtgaagtgacttacacaaggtcactgggtagttggcagggtctggactaaacctcaggtctcctcaatcatagtttatacaatttgcccccatatatcggtagcatctttttatttcttgcccctccagttaaagtattgtctttagcattggggagattgcatatctggatagagaacttctattgtagaaaaataccttatgtttgtatttccatgatgttcttgtgaaatatttttgttccttctattcatgcaagtaggcttttgtttttcagaaaggttgtaagtggtaggaatgcaaatcacaatagatggaaaatttatagacgttccaaataccattaaagtaacttccagagtcatttgtatagatcctttccctagagcctttgtttacctatcaatacttaagatacttgcaatctaaatttccttatctataaaatgagaataagaatattctggtgttatcactgactagctgccttaagaaaatatttttctgtgctatcatttcctctgtaaaaatggtgtcaaacttaccttattgggctgtagtgaggattaagagttaatacggataatgtctgtataaccatgctggtatataggaactttactatcattattaaaacaataatgtgttttaatgtgttgcaacagtatactaaagggaactatatactagtggctaaagataatacagaagtaaatgggagatttcttcatagcatttatcataatcgaaaactcaaattaggaataatgatcctgagagggcctgtagaggccagaagtgggaaaacagtttgaggtgacatttgaactagaggctgagtaatgagaaggagctagttatgtgaaaatctggggaagaacatgctcggcaaagagaacaggtgcagaggcttcaaagtaataaacttgaaatatttaaaggaaaagactagaatttgtggaaaggttaatgtgggccaggttatacagggcctgatataataattatagtaataatagctaacattactaatattaatattatttaacacttaccagtactattactgtcctaatgttacagaaacagtaatgatagctaataacttagatagcacttacatactaagcactattccaagt

SEQ ID NO: 4534 - DNA, 1193 bp, Homo sapiens
tccgggaaagctatgtgttaccacagtgcccataaaattgcccaaggccaaaagcaattcagaagaatctttactctctgaaacaggctaagtcccaaacattgcttggtgggctcaagaagaaagaggtatattgttatataagtaaaggtagacagttgtaaattaaaaatcacgcacctttaatgtaatctttcttttttccccttgaaatgttgctactttgttgatatgcacctctattaccttggggaagatgaaatttctaggagtccttttcttggttcactatccaaatattgtctatttctggtgtagtggtcctggaaccctttgaaaaactggtaaaagctatggactttcattccagagaaatccaggtaggtacacataaatttgactttaactttagggggtttatagactacccaacgctcattggtggcaaatgtccctgacgtaaacacttggttctgatctgactgaagaataaaaatagtttgtgttctgttggaatttttagtaataagcctatttttttcagaaattttagtaaataaaaagttgattgcatggggaacctggcactaaaccattcgtagatgacctacttctgggttggggttttgtacgtggcagaacggctttcttgctgcgtcctattgaaagtcagccctcaacacgagggtttgtaagtttttaaaaaaaatttttctaaattaaaaaaaagtcagttgcaagttttttgagggcatacattagacttaatcagcttacaaatgatttccttctgccatttcctcccaaaataatgtattttagtttgatcactgtattagtctgttttcatgctgctgataaagacataccccagactgggcaacttacaaaagaaagaggtttaatggacttacagttccacatggctggggaggcctcacaatcatggtggaaggaaaggaagggcaagtcacatcttacttggatggcagcaggcaaagagagagcttgtgcagggaaactcatgtttttaaaaccatcagatctcatgagactcattcactatcatgagaacagtgcaggaaagacctgccccataattcaataatctcccactgcgttcctcccgtgacacatgggaattgtgggagttacaattcaagatgagatagtcttaactcgtgtcaacatta

SEQ ID NO: 4535 - DNA, 1946 bp, Homo sapiens
ttcctgggttgggaaggccaggcagggacagagcaaatgacacttctcttcctcttgccctccctgcctctttggtgctcttaaaagccagcagctgagaacatagcacaggcccacgtggtgagggcacccacagcttaaagacgcttccttctaaacacggcgaggtcacctctcactcttctgtctttgcaaaccgagaagagtggcatgcttctggcatcccaagtcaggattttagctcagatgaggcagaatgaagggcctctcttacaggcagtttgtgtttgattctctcgatcctggcacatccatgataaataggagtttttgaaagttggttttattaggtgttccctaatttttaccgtaataggtcatctcagcttatatgaaagtcaagtggggaactgggaaagccaaagtcagtcttgagcagagggagcacattttgtggacctggttccacctttccattccaaaccacctgtttccccttccattagcagaaactctgggggaactttgtgtctcagtcctagaatctccccaagtgagtggaagtgacatgatgcagtcttcctcatggggcacctgaaagaaattagtgtgggtgcttcgatctaccttgtctgtcagagttgaatatctctttccctatcatgctgcttctgaaaattcagttttggagcaagtcctgtgagcaagataagaatctatagaaccaagatgctcattttcagaagaaatatgttcaacctgggatcagacttccatgctctggggaatccaagtggtagcacctgtaaccctgtgtactaagtgctttgaagagaagagcaggcctcagacaccttttaattgcttaggagaaaccattgtctctgactgcaggtttgaataagttgaagaccagagaaaagtacacactgggctacaaaggaatttggagatagccaaggaacaggatttcccctagcaagctaccttctgttcaaatcatgaaaaaagactatttccccttagaatagggaagcttgctattttaaagctcttgtagtgcttttcttttaagggagatgtagtaaaagggaaaatgtagctcttagtttacacttcaaagatgtgggggtctttcagagaactaagaataacagttttatgtgcagagagagtttgccagatctgaagcatatacctcattgactaggctgttactttgggataggttgcagtaccagccacagccagcagatagaggaaaagacacacataaactcgcttctgagcgtccacttctgcactctctgctctgctgttactcagcccctgagtctgactcatctctgcacaacctctctgtgccatgaagataagtcttccatggccaaatcggtcatccgcactgcccttgggacttccgaagtgaaccattccaccagaacctttgattctgcacaagatttccttgctctgggaacaacccccaaatgcccttgggaggaacaacatgagctcaggaagcctctctttcttcacttaccattactaactctccaagcatagaaatccctgggaattgcgagaataactcccactattttaaaatttatattcagatttgtttcgtttcataagacacatcaaacaggcctatacaaaaggtttaggaaaagaaaacaatggtgagtcccggccctcttcgaattcactggcacctcatgcaagtgtaggaaggcacgctggatcgtctatctgattccaaagctgtcctttgccatctcatcccttggcctgccccccaaccctgaggatgcccctgccatccccccaacctcctcatattgcctctgaacccagatggcaatccatcccggttctctctgagggccacgggcttgggtagtggaaagggtgtttgggaaattgttaaatcagttacccgt

SEQ ID NO: 4536 - DNA, 1193 bp, Homo sapiens
aatgaatcttgtgaactgtgtcttcccttaggaaaagtaatggaagagttcagtttcttcacgatggaagttgctaaattctccatggacatagagagaaaggaatgatattctcatcatcatcttcatcatcccaggctctgactgagtttctttcagttttactgatgttctgggtgggggacagagccagattcagagtaatcttgactgaatggagaaagtttctgtgctacccctacaaacccatgcctcactgacagaccagcattttttttttaacacgtcaataaaaaaataatctcccagaaagtttatctttgcttctgtttgtgtttgtttcttagatcggggtataaaataacacaattataaaagaaaattgaaaaacacacaagtcttgatgtttaggaaatacttttatacaaagaatcccaatcagcttccaagaaacacatgcacaccacacacacaaacacacacacacgatacatagacatacacacacacacaaatgccagtgaacaccacaccttctcctggagtctttatccactagcgacaagtctatgtactatactgttgctttacattggtctctttttttaaaagacccttaaaagagaacctctcttgttccaagaagtcatttctggaagggaagtttttcttcctattcctttccagaaacataccacaatttctcataggccagctcttctagagtgctgatgggaaagccactgcttcaacaggaagcatgtccattgttgtagagatctgattgttgagatgttctacttgtctagaattgaagactacattcatgaggctatcaaccatcagcgccagtgagactatataacaaagaagttcaccctttttgccaattaacagaattttcattatttaaaaatgaatattctgtctccattgaaatttattttctccaggataaaaatctctggttaattcaacccttttttctcaagtgttatttcccttataatatttctatcctggaccatactccttggatctgttacaattaggcattgtccatcttaaaatatgttagtatgttgtccaaaaatagactaatcaccaaaattttttttttccgacagatacagagaaattaaaactaccacctctctactaaaccttcccttctattaatgcagctgaatacg

SEQ ID NO: 4537 - DNA, 1198 bp, Homo sapiens
ccactggcatagcatggaactctcctgaaggtgacgccttggtgacagtgtctatactgtggcttcagccactttgcccaggcaaaaccaatatccctgatgcccccaccccattacccttccttccagcccactctcacactcacaatcaacctgcctcctgtgcttgccctaccccagcacctcccctgctcagacttgaaaggttaagtccaaaagctactgaatatgcaggcatatcaatggtgataaatccctcccccttcctagccccagtctttgctcatttccttcatgtaagcagtggcttccttggaggcctcttcccttccaacaccctcccctaacaagggcaggtcctctggggtagagattggcattgtcctctctctgactccagccggtattgctcactcagccaggcatcatggactaggacaaggactccacgggagcccactcccagaggggccccaggaagccaggcaatgacggagtctctctctgtcctccttcttgggcagggggaaggccgcgtggtgtacattcaaaatctctccagcgacatgagctcccgagagctgaagaggcgctttgaagtgtttggtgagattgaggagtgcgaggtgctgacaagaaataggaggtgagttgaaccaagccatggcaaatgaagggagcagagaggggcactggtcctgatccagaattgggtaccagaagatgcccaagatttgtgaaatgaatctgacaaaatccatagcctagatgtggaaagccaggcccatgagaaggaccagaaatggtaatgcagtcagtaatagcagcaaacacgtgctgatggtttacgaagtgccaggcagtttcctttcattcttttatctaaacttcccagcacgccagggacataagcactcctggtctttcaattgctctcctttctgcaggagttcagacaagttagctgggcagctagttggtggcagagccagaaccggagcccatgtgtctgcttcagggcctttggcctggagatagtgcggggcagcagcccctggcagcttgaagacttgcactgggactccactctacctcagccctgtgcttcctctgcagcaccctcccttcctctgcagcagcaagtcccaggccttggttgggtatggcggctcacacttgtaatcccagcatttgggga

SEQ ID NO: 4538 - DNA, 1216 bp, Homo sapiens
gaggtgggaggatctactgcgtaaacctcatttgttaagcactttacttgcttaatattgcttacttgtggcagggctgggattcaaacccaggaggctcacaacaaagctagcactccaaacactacagagtgctatatagctggttctgggaactactaatattgagaggagacatagaaagagaatgaagcaagagccaaatcagacaagtcttggtcaagctaagacgtctgaattttattttaagtgaatgagacactggagggttttaagcagggagtgacttgatcagacttacagtgcaaaatgatcaatctgactgcttcgtggagaatggattgtagaggggatgtggggagaactacatcagtccaggcaggagatgatggtggctagaaggttggtgatggcggtagatgcagagaagtaggcagactggaatacagtgagggttgtgcgggaacttgtacaaatgtggacaacttgtgacactggagagaaaggacaatccaatccaatccctatttgatttacggaagctctccatacggtcattcagctcagcttgagtcactccaggaactcactaccatcactattcgtgggccagtgggagagacggattgagggcagatcactggagtgatgaaggcgctacttgatgcggcactacgtatgaacccgatcctgaatgagagggaaagactgagacaggctgaggtcaggccttgaacgtcgtgctgaggagagggtggtattgtaggcttcccagcgcccgacgtggctctgaaaggtgaggcggggcctagatccctcacgctcagcacagccccgcccctgttacctgaacgccccacagcagtgcccgggggctgagcggccggggcgtcccaccgccggcagccacagcttcctcctccgcccgggacctctggccggaagcagtccgttcgccttactagacccgctccaagcctttgagcagttcgtgtgggtccgctcccaagctagggctgggctgttgcgcttgcgccaggggtcgcatgcagtcacgcgctgccgaccgcttccggtgcgccgcgagggccgccgggacgggtctccctggcgatccgtggtgtgccgctactgccggtgcagccgccaaaccggtgcctcggtgacgaccgtgtccctgccgtcttcctcgagctccccggggcttgacccccgg

SEQ ID NO: 4539 - DNA, 1157 bp, Homo sapiens
catgcgccaccacgcctggctaatttttgtatttttttttttttagtagacatagggtttcaccacgttggccaggctggtcttgaactcctgacctcaggtgatccgcccgcctcggcctcccaaagtgctgggattacaggcgtgagccgccgtgcccggccgccactagcctgtttaaagcaggtaaatagggtgctgagaacacttgaaagggttagaattggattctctcactaactgcttatgtgatcttagaagtcctaaatgtcttagaacctcagttttctcatctataaaataaacatagcacacttcctgtggaaatagttttctctttgttcttaaactttttgagataatcataaattcattccttttgataagcacattgggatgagtacactgtctgttattaaacttaatccaggcttccagtgttgagtggcctgggtgttctttattactctgtttcagtgaaactgtccttctcttcattgcccataggattccagtgagagtagctcctctgcaccagccacacagttcatcatgttgcctctgcctgcctactcggttgtggagaaccccacctccatcaaactggtcagtactgtatgtgggggattgatggcaattagggtgtcataagcattttttttctaagtagatttgtctttttttctttctgagctaccagttgtaggaccaagaagatttctaaaagtcttagaacctcaggatgcgaggactggcaaagatttcagggattatgtggtccatatgttcttaatgggggtgagggggttgtagatagatctccatgggatccatgaactcacctcaagttttatacaaacttttttcctggaatggattccatgacttttataaaattttcgtaagcatacatgatttaggaaaatgagcagccactgatctaattcaatactgtgatcgtacagattaggaaaagggccataggagagaaaggacttgttcaaggttacaagacaagtcagactggattcgtttcttgattcccagttgatatttttttcagcatcggggctgagatttatccctgtttatctttttctcacactattataaatggcatttttagaaaattttcaatatctgattgcctacaacta

SEQ ID NO: 4540 - DNA, 1157 bp, Homo sapiens
gaataattttaattttgtatgctttatcttttctttcttttttttagctatataagtaaaatatacattccttataaaacatttgaggccaggcatggtggctcttgcctgtaatcccagcactttgggaggctgaggtgggagcattgcttgagtccagcagttcaagaccagcctgggcaacatagtgagacccacatcgctaccaaaaaaaaagcaaattttgtagatagtggtaaagagggagaaacaaccatgattgtcctcttaccctgtgacattttagtgaatagtctttcagacatctttctatgcaaagttgttcaaccatgtatttatatgtataaaagctattatgtgcttttataactcagtagtagttgtaaatctgattcatggtgtttctaatacatggtattagaaactgcacagaagcatgtggcaaggcctggacttgaacatgacactcagcctttggtgggcttgtgactgccaactggcagtccagagggctcatttggagaatagctctacaaattccccgggaaagcattccctcaagtcgtttcaggacatgggagctcaggagtttggctaaggttcaaaagcactaaataatttgttctgatccacagctaccaagtggcccatccaacaggacttctcaggtgaaagttgtggaggtcaagcccgatatgtttcctccatataagtacagctgcactgtcacattggtaagtatgcagctaggtggtggtgggttgacatggaggttgttttgattttgtggttgaaggtcagtaggaggctgggggagagggtggtggtagctgggagggagaacagggtcaggtatagattgttaatgatgaagatcccatccctgatgcaaataatagctactggatgaatctgctgggttgttttggtctctttccaggtgagatttataaagtgtaggacagctgagattagtgtatttttattgagagttgccagagatgagaatctagtccagatttaacatttagctgtcttggaaccttttagcttagaaagggtgttccacagttacatttaggcaacgttgcctttttctccctaaaacagagtccagttcaacacgagtatcttaaagtaaaatagagaagtacttt

SEQ ID NO: 4541 - DNA, 1215 bp, Homo sapiens
ctgagtagctgggacaacagtgtgtgccacaccgggctttttttttttgtagcggggagtttcaccatgttgcccaggttggtcccaaactcctggcctcaggcgttccaccagcctcagtctcccaaagcccaaagtgctaggattacaggcatgagccaccgcgcccagccttaaaagattttttcagactttttttcagtgtctttttacttaatgaaaacgagacagttgcagttaccctgtctaaaagggttttttcctctagagaagacggtgggctagatgtcagaacctggatttgtcctgtgcctctgacatcttgcgcacagctcagcctgtttccctttctggaaagtgagttaagaccacgtcaggaaattcgaggaactggcagatggggccacttcatgttcacatccatctgttaggtactggggagtcatttggggagcagcaggatctgttgctgattggttaggccattggtctagggagtcctgggggcccttcccatccagctccaggcaatgacgctttctcttcctccccacagaggatgtcacccccatcccctctgacagcactcgcaggaaggggggtcgccgtggtcgccgtctgtgaacaagattcctcaaaatattttctgttaataaattgccttcatgtaaactgtttcaactccagccttctctccttcatcaggggctactcaggcatttgatttcttcctcctatttggcttcttgggagaaaggagcctgaggagagctgagatcctggtgctgcatttggggtcttttccatgctacttgcggcattaagttgccttggtcatctaaagcagaccaaggcgttggagacctcgttttgagtggagatgctggttctaaatatggaccaattcttaaagagccagagtgggaactgttgatccaagtgtagcctgaagcgaaagaggagccttccagacccatgccatatataaacacacgtgggtgtgcattctccccccacaccttctgtgcaaagctgggagctcactccactgcgtcttgctttttttcacttggcagatcttggagattgttccacatcagtacataaagtacataaagattgtcaccccacaaatacacaccaagtcctattttcatcagcgataaaaaagaaaagttcttgctttccggaagcttgcatgcggctctgagtacc

SEQ ID NO: 4542 - DNA, 1113 bp, Homo sapiens
aatagttgtgggagtcaaatcagttgcatttttgaacattttgaagggatcaggtggagcacaggaaaacaggagatgagaggcttgagggctgtgttggtaagggtcccttgaattctaagctgaggagttcatgcaggaatcaagcagctccctcgccccatgaagggtgttaggaatggtaccagtacatgggtagctgttggtcttgggtttcttcttgccttttggggtgcagccttcaggcatctgctgctagatccctaggcttctatcttgtaggtgctgtgagctgagctgttggtagtttctggggaaaggatacttctcatggtactttgccatgtggccacagttgatacccccccaagtgcaaggagaaagaagttttagtgaggcagaaatgagagaatacagtagagtattggatggaagaagacagggacatgaagcaggactagggtttcatttaatagccaggggaaagggattctggaaatgttttgtctgttaaccttgagtttcttttccttccactcagaaatggcacctcgaaaggggaaggaaaagaaggaagaacaggtcatcagcctcggacctcaggtggctgaaggagagaatgtatttggtgtctgccatatctttgcatccttcaatgacacttttgtccatgtcactgatctttctggcaagtgagtacctgggtggagaggcatccagctggcaaaaggctgaggaaggcaatggctgggacgggctagcagttcaggggattctctctaaagaaatgctgttttgtccaggtaagaaaatgtgcttgtccatttagcccacaaatattgtgatttcccaggggttacaagagaggagacacattcttcgtccttacagcgtgatggtcattgaatccttggtttcttgggaattatcttctttccctagttccctttgcaggagcagcagtggactgcaagtgggctctgggtgcgggttcgacggccatttagcaagttgtgacttgtgtgaaatcactcagattctgagttttggtttcctcatatgtaaaattaggacagtaatgtctaccttgtggagtaatggtaaggattaaat

SEQ ID NO: 4543 - DNA, 1199 bp, Homo sapiens
gacagactggacatttccctgtttcgagccaggctcttccaaggggccagctgggtccccggagtcagtcctaggctggatgggagggtggccccctcaagaggactcccagcctccacatctggttcctaccttcacatctcaccctcccgttctggggaagaatttctggttcctacagtatccactccatcctcaaggcttcccgcagggccttggggcactgccttgccatcgggcccagttctccgggccccacctgcacccctttcttccccctgggatatgatgtgtggtgtttcctgtggtaaaagactgaggcaggccaggggtctgccagtaacatgttcccatgtacagacacggtccccacaccctcccagcctcaggcccaggcagacatgggcgagctggtgagactgccagccacggctttgcttagccacctgtggccgagggctctcagagacccccttaacctcccaaatactaagaagctaaaatattttaatattttgtttttttttttcttggtgccagagtttataccctgggtgctggggtcgcactgtgttatatatatatatatatatatataatgtgtatatatatatattctattttttttggttgggttcgtttttaattcagtcctacaaaatggtggtaagccccagtctcaggggtcaccctgtcttagagctagagatgaggtggcagggagggaggctgtgtcctcagtggcctggggctgagcagaccttaggaaggggccctccccagtgccgtggctgctctggggctaccccaggtgaacagaggtggtgagatgcgcagggaagaccagctctctccaggacatcgggctgcgtgaagtccagtgaccctgaggggattttggccaaaggaaacagccagggctgggctaggagagctggggtcaaaagctgccccacccactctccctcacatggtgctaggctgggagctgccctgagagctgggatgcccaccaaggcccacagaactgtctccaggcccttgtagacagtgggatctctgggctgatttctggttggggtctgctcctaccccaccccatttaacaatgtgaagtgactgaggctggggtgcctctccctggccccctccaactgccaaattctgcttccctctgaaccccaggaaatactttctgg

SEQ ID NO: 4544 - DNA, 1448 bp, Homo sapiens
gtaaaccataaaatagttcagcaagtagcccacagttctggcctaacagcagacttgctgttttcacttggtatcctggagttgggttgctaaccttaatttctatgatgttttctaaaatgaaacttgataaagtagaccaccagctgcaccgtgttttctgtaaaagtattgttagtaagtggccaagagacttgaggaaaatacagattttttgtttaccttggtcttgttttaagtcttaaaaaattaaagataacattataatgtagaatacagatgggacatagtccttgtaagcttcccttgaaaatgttttaaatatttaggaagcttttaaaagacactaaattgtactctaaaagacactaaattgtactaattgtacaaaggtcaagccaattttatgaaacagtcctacagagtaatatatgtgatgcagtgtaagaaggaaaatactcatctctaacattatggtaataacatttagcctcttaggagttggagcagggggatgggtaattacagatttgcagactatagaaagagtttcatttttttgtgaccccacagagtctcaaatttttatttcactacctgctagagcctactgtgaaatcactgctccatatttgccagtggaggaaatgggcatagagtagagaatagcttcatatgtttacacgtttgcatagactacacacatgtcatgcgtttatggcaggtagctggtatttattccccaaagtaataatgttgaagtatgggtctcatcattcccatacacagaaacacaaaacactttgatcataaacttttttcttcagaagccaaactaacttgcagaataatagagccactggtttaatgtttcctcaagataggttttagtgtaagctagtattctgtgtgttcgtagaaatgattcaatacctgcagctggtgaattaggaattgtatttgttgccttttttatattagatgaggtgcaaaaattttaatgctagtcagtatgcaccaccacaggaaagttagatcccattagcacttgaaactacagctttggaaacttaggctaagttaatttggatttgttacttgattcacctactgaccttttcttttgtttgaagtgcttatcagcataatgagctaagtgtcatgcatatttgtgaagaaacaccctttttggtcccttttgggacagagaggtactccttgatctttatgaatgacaggttactgttttgccttattgcttaacttaatgtagtgaaataaagcagacaaagcttgagcgtgtcttttgtttgctctcatgtagatactaagtagcatggctcagagccaaaagacaagcgtgaagttaagagagttggctaagagagttggtggggcatgctcccttccattccttaaatgaagtaatctaaaatctcttagcaggt

SEQ ID NO: 4545 - DNA, 1224 bp, Homo sapiens
gggctactgtgaggcttttaaaaatcttattcttataatagttattttaagctgataacaacttaactttaattgtatacaaaaatctctagattaatttccaaaacatcttttatgatattgatgtcaaattttacatctttttgtaatttgtatttcttaacaacgtattgtagctacagtttttaaaatagttttatcctgtaaccctcatagcagagataaaattgctttactcaccacccttacagtattagcgtattctgaatattgattatattacttataccattgaggtctttttacttttctatgttttgtgttattcatttgcagtcttttatttcagcttaatgaaaaaaaatccctttagcagtttctttaaggcaagcctagtggtgatgaaatactttagcttctgtttgtttgagaaagttatttctcccccatttctgagcaacagctttgttaggtaaagtatcttgattagtagttttttcacccttcagcacattatatatagtctgactctcttccctggcctccaggctttctgctcaaagatctgctgatagccatattgagactcacttgagtctacggccatgccaccctgaacgcgcccaatctcatctgatctcaggagactcacttgaatatgatgtaattcttatctcttgttaccttcagaatactttgtctttgatttttgaaaatttgaatatgatgtgtcctggtgaaatattcttttggttgaatttaattggaggccactgttggtgtcttatacctggatgctgttattattctccaaattttgaaaaatttcagccattatttccttttttctacattctccttctgaaaattatattgtgtgaatattcattctcttgatggtgtctcataattcccataagtcttcatgattgtttgaaattcttttctttttgttcctctgactaaataatttcaaatgtcttgtctttaagctcactgattctttcttctgcttgatcatgtcttctgttgaagctttctactgaatttctcagttcagttattatagttattatctccaggatttatatttttcagctgtttttatttctttgttaaatttcttattttgttcatgaattgttttccaaattccattaatatttagtttgctatctgcattttcttgtagttctctgagcttctttaagagggttattctaa

SEQ ID NO: 4546 - DNA, 1111 bp, Homo sapiens
gaacacagataaattatgaaagtagtaaaaccacagaaacaatttttctatatatatagaaacatgttttaatatactgtcttaactttcttacttgataatctggagtcatctttcagggtaatacttgtatcccattaattttagtggctacacagctttttatagagatgtagtgtactttaatctcctaatgatggatctatagattgcttctattattttctcttacaatgtcgctttatacaaaactgtctatttatgtggacttgttagaataatttcatagaagtttcaaaatgtgtatttgctggaccagaactattttttcccttacaccttgaccagcttgcatattggataccacatgattatcaggtataaaataaaatttatgaatgtattcaatatgaatattttcaattcataaaataaaatttatgaatgttttgacattgctctgacaatggaatatatctcgtgtgtgtgtgtgtgtgcatgtgtgtgtgtgtgtgagagagagagagagagttaagtctcagctgtctcccgggctggagtgcagtggcaaggtcacagctcactgcagccttgaactcttgggctcagacgatcctcccacctcagcctcctgagtagctgggactgaggtgcaatccaccacgcccagctaattttttgtagagacagttttaccatgttgcccaggctgatctcgaactcctgggctcaagcaattcgcctgcttcagccttccaaaatactgggattacaggtgtaattgggtttttttttaaggctttaaaatttccagaacattttttctcatttcctcctgatcattacaaaaatctttactgaaaggtagggcattgtaagagagttaacttcattttgcagatacactcagaggggttaaaaatttgcaggtacatatgcacatgactattaagtgataaaacaagtctcaaagctgtttttaccctttctttctttttttttgagacagtcttactctgttgcccaggctggagtgcagtggtgagatcatagcttactacagccttgacctccagggctcaagtgatcctcctgcctcagcttcctacat

SEQ ID NO: 4547 - DNA, 1146 bp, Homo sapiens
ttttttcatcttaaccatttttaagtgtaaagtacagtagtgttaactgtatagatgtggttctatgacagatatctaggacttttcaccttacaacttttattgaagataactttatataccttataaacagactatacccattgaatggcaactttctttcccgccccccccgccccagcctattttgagagtttttctgatgttgtatgctaaatgaattgtaatagttgtgggattccagccataaagtggtttggttcattttgatgtcctgattcatttgcttatcagaatttgccaaacaaatggattccagttaagttattgagtggcattttaaaaattactttttaaaaactcagatagatatacaattcttagatttttgttttggatagaaggagctaactctgtgttctggtttctgattaataaatgatggaggaattttttgtgaaataaatggtggcagaatgatatttctcaaattttcctgtcaaagtaatgacatggaagaacatttagaggagcctgttgctgaaccagagcctgatcctgaaccagaaccagaacaagaacctgtatctgaaatccaagaggaaaagcctgagccagtattagaagaaactgcccctgaggatgctcagaagagttcttctccagcacctgcagacatagctcagacagtacaggaagacttgagggtatgaaacgtgtcttcatttttattctattcctagttattttttttaaaaaaagtttctgttcttttgtattgctgtttggttgacttgtagatacattttcatattggtggttcatttcagggaaatttcttagatattgagccatatgtttgataagagagaggtaagatgtgtattagtttatttcatcaaaagaaaccactcccttccccgaggtaacttgaatgcctgttagaccagaaattttaggtgccactgtagcaccctatcagtgattccttttctatttaatatttaatcttttacactataaattattacatacttgttactacaagtgcataacatcttttcaagaaaaataacatggcagaatatactttttctatgaaattttattgaagataactttatagtggaagtagaaatgaactgc

SEQ ID NO: 4548 - DNA, 1377 bp, Homo sapiens
tctgagtcggagtctcgctctttttcccagactggagtacaatggcgtgatcttggctcactgcaacctccgcctcctgggttcaagcaattctcctgcctcagcctccttgaatagctggaactacaggcgtgtgtcaccatgtctggctaatttttgtgtttttttagtagagacggggtttcaccatgttggtcaggctggtcttgaactcctgacctcgtaatccacccgtctcggcctcccaaagtgctgggattacaggcatgagtcaccgtgcccagcctctgctggttcattattacagctttctttatctttgatagtgatagccagctcatcagtactcttaagtctggtcaccttgattcttacagcccatcatgttcagaggtgaggtccgtctgaatgtcgaagagaagaagactcgagctgccagggaaggcgaccgacgagataatcgccttcggggacctggaggccctcgaggtgggctgggtggtggaatgagaggccctccccgtggaggcatggtgcagaaaccaggatttggagtgggaagggggcttgcgccacggcagtgaatcttcatggatcttcatgcagccatacaaaccctggttccaacagaatggtgaattttcgacagcctttggtatcttggagtatgaccccagtctgttataaactgcttaagtttgtataattttactttttttgtgtgttaatggtgtgtgctccctctccctctcttccctttcctgacctttagtctttcacttccaattttgtggaatgatattttaggaataacggacttttaaagaagcaaaaaaaaagactgaatttccttgcttactttgcatatacagactggattttttttttttttttacagccatttccccaaaggaatgtcttgcatattactgacatttggtatgtttcattcattggaatatttcttattttctacgtgtttgaaaagcctgtaagaaatacaggatttgataatattttgaaggcaggaaaaacccaaattgtttcttctttgagagtcatgactaccttctggtgtggagaaattgccattggaaaatttgacaattttgattctcactggtatgtttaaaaactgaataaaaggaatagaatttttttttgataaaggatcacaaaacaattctaaaacctaactgtttttaccattgaaatttaaattgtgataataggttttaaatgtctagaatgcaactgataggcttttcttgaactgttagtttttttgaagtagttttttcatgtttaatttgtatttgtaaaaaaacaaaaagcaaaaaaattcccaaaacccagataacaaccagagcaaaactg

SEQ ID NO: 4549 - DNA, 1173 bp, Homo sapiens
ttagctgatgaaaatatttaataatgacaataactgctcagctataacttctgtaattttctagttataagcttaagctttgggaaaaattggaacttctgtgtaacttggtaaagccatctgtgagtaggtgtgaagtaaatatcctccgatgtagcctgccagacaattgtctagagccattgcaatggcctttgaaagagaacaaatggaacgtggcaggcttttggccttccttctgaggactgactcttggctctgatgttcagacttctgcggaccagctggccaaataaagtacagctgactttctccccactctgttcctcacaatagcaaatggaggggagaatacaagaaggtattatggaagaggtatgataaaccctgaggccctattgtcaataagaaaattgcaacatcgatgaagacattctggagggaataagggaaactgagaagtaatggccagtaggaataagtattctttgtaaaaagtacttcccattagttaaaagagacttcagattaaatgtgggtctcctcacagaatcctatattcggggggctgtatagctcagtggtagagcatttgactacagaatcctatactcaggggaaggagaactgggggtttctcagtgggtcaaaggacttgtagtggtaaatcaaaagcaactctataagctatgtaacaaactttaaagtcatatgtagctgggttcaaatcctgtttctgccattaatgagctgtctgatttggggcaactgatttccactctccatgtgttacttttctcatctattaatggagacactatttgtttccctctcattgttgataaagaatttcagataatgatgggaaagcacttagcctaatgtatggcactggtaatcattcagtaaatgttagctgaatgaatagtaaaggtaagattagtattaatagattaattctctattaatcttagtattaatagattaattctctattaatcttagtattaatagattaaaagattaataccaatgttacctattaataaagggaatattatattgaaatcttgtctctggctaagaaaatcccctttatctttctcgaatctcagtatgcaacaagaaacccagaaacaaatcagcagtgcccccaaaggcctctgcataagg

SEQ ID NO: 4550 - DNA, 1099 bp, Homo sapiens
tcttcatgtttagcaggctgagaaggaggggttggtcttgctctctcgagtggcaaaggggaatcatcataaaggtcctcatcctcatggtcttcacattgagcaggctgagaaggaggggttggtcttgctgtctcaagagtggcaaaggtggaagaaatctgcgtataagtggacccacgcgtggatccatgcatttcaaacccatgttgttcaagggttcactgtagatggattgacccatgatggctcattaaaaggttaaatgcttaaagttaataaatggttaaaagctcaagttttatcattggacacgtttctgccattaaatagtcttatgaccctggatgagtctcctaatctctgtaagcctcagtatcctctgtaaaactctctgagagttgatgcagagttaatcagacccatggatataagttaaaggtccgtaactgggcctccttgtttgataccctgtgagaggatggatcttggctgacagaacggatcagagggacccctcctgacatggtggggctgctgtggggaacctggtgacagtattttttgtggtttctgtagctccagcccctcagaagggacgcctacagttggcagctatggctgtacccctcagtcattgcccaagttccagcatccttcccatgaactgctcaaggaaaatggcttcacacaacacgtctaccataagtatcgtaggcgctgccttaatggtaagaagtgtggggggcaggagatgagcctctgggcccgttatttagacccagagtataagagttgggggatacggggataggtgactcttttctctgacttcagagcaaaaaaaagacatgacattatagcaagaaagactgaagttagactcgggccaggtagttttaaactgtaggaagctagggggatatggcactcacaacgttcgtgttctttgatcttcctctattgattattaaagctgtcaattaagtatttccatatctctggcaagattactgactcagccattgtcaggtctagtccactgtccatcacaaaagggtatgtaagaggtgacatatgctctctagaacaaaggttg

SEQ ID NO: 4551 - DNA, 1725 bp, Homo sapiens
ggaaaccaaaggatctaaaactggggtttgggggaaggtttcagcctctccccactccccttgccccacaccctttactccccagcccagagagacgctgcttttaccaggaaagactattgaaagatgttttattttatttttctctgacctttccatccttgaaaaaatggggaaaaaagaagaaaaaagacaaaatcgaccataaaagaccaaaaaaaaaaaaaaaatcagaaaacccccacctaatccacagaaagtaatgtctttcccctccccttggaatttttgttttgtttttggaaataatatttttttaaaagttgccttattgtggagcgggaatctgaaatacccaaatgcctgttttcctcggtggagtcaacccgaagagctcccaccttctctggatgtgcctgggcttggactggctagaatctttctctggactgttgcatgtacagtgcctccatcctggaggcaagagagttgggagtggctcgaatcagagccgtgcccaagatatccctgctgttgcatcgtttgaagctgacgtcctgtgtctgtacactgctgccactgttgtgtcctcgctctgcttgctgttgcctcacgccaggccccgtcctgccgtgacacccttcatcctacccttggaaccccaaggccaagttggttcaaactgttggagaacagagttggcctgcatctggaacacacttgtcctcagcttaccatctcctcacaccccagagtggaaaggtgaacacctgcagctgaggcttggaaacgtttcttgtgttgccctgaaaaatctttgagacctcagggaggctctgtctctcttaaaaggtggagaaagatgccattctctccctaaggtctggtggagtctccccatcttgcatacccttctgcaagccatctatctctgctcactctccaattgacccgcctgggaacaagggatgaggaggagttgggggctggggggaatcctgccagttggtgaagccctgtggcaggaaggtatatgtggacatagagtatacctgattctctttcttcagccactgactgcttgggttgggctgtgaatgataatggaatggctggagtctgctgttgtcagaaggcagggagggtgatgaaggactgacccacatggactgggatgtgtgtcggttatgggcatgactgcacgttcactctcagtgggatctgggcaacatggagttcattgtcctgttgcttacttactgcaatgtctttggccctccttttcaactggttcctctgttgggcccaaaggttgggagtaggagacagtatcccaggctgacaagggcttgccctttaccttgggcaccttgttaatttttagcctgtgcccttccccacctttgccctcccagtggttggtatgtgggaagcccatctcagttcctgtgacttcatgtctcaaaccaaggatgagcgtctggtctctgctatgatggtggtatccgaggcctttccctgcccagtctggtgcctgccccacattgtaccggacactggattcctggacccccttctcctttcctttctttccttcaggtcacgcagccctgtactgtatccagcaccacagaaacctcagtgtttttcctctgctggtttggggcacaaggaagccttagggtatggggaaaggctgttattacctagagtttactcccaggc

SEQ ID NO: 4552 - DNA, 1218 bp, Homo sapiens
ttattgtactttaagttctggggtacatgtgcagaacgtgcagttttgttacataggtatacacatgccatggtggtttgctgcacccatcaacccgtcatctacatcaggtatttctcctaatgctattcctcccctagtcccccatccatgacaggccccggtgtgtgatattcccctccctgtgtccatgtgttcccattgttcaactcctacttatgagtgagaacatgcagtgtttggttttctgttcttatgttagtttgctgagaatgtccatcatcttatttttaaaatgggtttgcctacctttcatgagctaatatgcatgaagcacttggcatagtcatttttccatttatagtaattactaccaaattttaacctagaaattccaggtacctgctgccttccatgtcacctctgtggcttggtcatttgatgatgacagtaggaaggagtgagataatgtgccttcttctcagtggatttggcagaaaaatgaaggagccaaattataaggcccacaactggttttacaaattactgtctacggccataccaccctgaacgcgcctgatctcgtctgatctcggaagctaagcagggtcgggcctgcttagtacttggatgggagacaaattacctttcctgtcattttcttcttgtccaaatgaagttattacaatgaataattttaatacaactctctttctccaaaaatgttcagcgttctcatcctgcttaaccatcagctggaaataaagcttggagatatttcacggttgtaaccacagtggtgaaaaggtgggagacttttaggaagacatcaaatgcctttttatatttcacacaacctcctgggaggtggaggctaggagtctctggcaaaactaattcattatctgtaaacctgttttttatgccaacctagacctcacagaggaccaggacagaatgctatctgaattatgctgtctctctggggcactgctgtctcttcatctttgatgttctgtgccacatgctcatttttctgggccatttgcccatgtactttgttctggataggtttgcttttttaaatttcacatgtaaacttgagaagaaaggaacttgggagtttttcatgattggcaaagcaatgagctctgcagctatccatggaagattatggcgatggatgaaaccagcattctggaggtcatctccagcaac

SEQ ID NO: 4553 - DNA, 1190 bp, Homo sapiens
cactaacatggccaacactaaatattagaaagattaatgtggtcatgtagaagatgaatgaaaagaagatacctcagaagtggagagatagttaaatggcttttgtaggaatctcagctagaagtgtcagtattcttaagtgcagaactaacaggtgtgggaaagtaatgggaagtagacaccaaacaaatagttccccaaagatggtatcaaatatcccagtgacagcttgcagcctgctcagctttatgatatgcccctgagatcatttttcaggacaaaaagtagtgaaactacctttatttacttctcaaatttacctttatttacttctcaaatatacatagaaagtaatattgtaaaaagcagctctggctgggcgctgtggctcaagcctataatcccagcactttgggaggctgaggggggcagatgacttgaggtcaagagttcaagaccatcctggccaacatggcaaaaccgcatttctactaaaaatacaaaaattcgcgtggcagcacgtgcctgtaaccccagctactctggaggctgaggtacaagagtcgcttgaatttgggaggtggagactgcagcgagccgagatcctaccactgcactccagcttgggggacagtgcgagactctgtcttaaaaaacagtggcctggcgcactggctcacgcttgtaatcccagcactttgggaggccgaggtgggcgggggtggatcatgaggtcaggagatcaagaccatcccggccaacgtggtgcaaccccgtctctactacaaatacaaaaattagctggacatggtggtgtacgcctgtagtcccagctactcaggagagtaagatgggaatcgcttgaacctgggaggtggaggttgcagtgagccaagattgtgccactgcactccagcctggcgacagagcaagactgtcttaaaaaaaaaaaaaaaaaaaaaggatattttcactcttgggacttgataaagctagtttatttttattatctcctatatcctatacatatttaattggcccctatgaacaatgttacctctttatgaggggacccaaagaagtagctgctggtgtgagagtgagagatcatccatcttttttattgtgctttttgttgtttctttgtcctgctatgtgttataagtaaggccgggcacggtggctcatgc

SEQ ID NO: 4554 - DNA, 1229 bp, Homo sapiens
gatccacccaccttggcctcccaaagtgctcgaattacaggcctgagccaccgtgcctggcgagctgtccatttttgtgctttgattggatgaaaaatggacagctgtgtagaaatatgattggactaaaagagtatgacccaatgctaataggctgcgtggggaagcccagcaaggcctatgcagtttcttcttgccctctctgttgtagcatttcttcctcctaggtatggatgaggcaggacccctctggaatgacagtcttctgacctaatattgcacaaggataagacagagaatttctttatgtccagctcctagccagaacagtaaagaaaggttacagtaattattctagtttttatggctggctttggaaaagagaagttctagtttctatgacccaccttggggaagaggaattctggtttctatgacttgcttcaagacagaatgaagggtaagagacagcaaggcagaaaatctaagagaccttggttctgagattgcttctgaggccttctgacatcctttaatttattgcttctagatattttggctaagatcaagtgtagtatctgttcttatcagtttaatatttgatatgtcctctatccaagggcaatatattaaatggatttttggagcagggagatagagtaggagcttgctccatccactccacacactgacttggtattgcagtacctccaggaatgatgcaaccctccaggatatttttatttttaatcctttaatttaaagtgctcagcatgccaaagtgccatactttgaagtatcactttctgagccccaatagaagtataatatagtagttaaaaacaaaggctccatagttagccttctgcccattactcaccaggtaatcttggcacactaatctctctgactcaggtttcctatatagaaactagacataataatctccctatctcctaagtctttttgcaagaacaaagtataaaaatataagtaaaatgtctaccatataacaatagcataagaagtcaccagtattgtttttattatttgtattgcttttgttgttatcacatagctagtgatccaacactagctatgtgataacgccagctgtgtggcaaagtggagacacacatccatgacctgaaagtcatactacctacctccaactttcaataaagagagtgggaactctggctgtcctgctctcccaaatgagaagcaag

SEQ ID NO: 4555 - DNA, 1179 bp, Homo sapiens
ccccctttgtttatcagggacacatataaccaatcaatacctcagccacctcctcggaaaattaagcgacccaaacgaaaaatgtacagggaagaacccacttcaataatgaatgctattaaactacgacccaggcaagttctgtgtgataaatgtaaaaacagtgttgttgctgaaaaaaaggaaattagaaaaggtagtagtgcaactgactcttctaaatatgaagataaaaaacggagaaatgaaagtgtaactactgtgaacaaaaaactgaaaactgaccataaagtggatgggaaaaaccaaaatgaaagccagaaaagaaatgctgtggttaaggtttcaaatattgctcacagcagaggcagagtagtaaaagtttctgctcaggcaaatacatcaaaagctcagttaagtactaaaaaagttctccagagtaagaacatggatcatgcgaaagctcgggaagtgttaaaaattgccaaagaaaaggcacaaaagaagcaaaatgaaacctctacttccaaaaatgcacattcaaaagtccatttcacacgtcgatatcagaatcctagctcaggttcccttccaccccgggttcgtttaaaaccacagaggtacaggaatgaagaaaatgactcttctctgaagacaggacttgagaaaatgcggagtggcaagatggcacccaagccccagtctcgctgcacctctacccgctcagcaggtgaggccccttcagaaaatcagagtccctcaaaaggccctgaagaggccagcagtgaggttcaggacacaaatgaagtgcatgtgcctggtgatcaggatgaaccacagacattgggcaaaaagggcagcaaaaacaatatctctgtttatatgaccctaaatcaaaagaaatctgactcttccagtgcttcagtgtgtagcattgatagcacagatgatttgaaatcttccaactctgagtgtagttcttctgaaagctttgattttcctccaggcagtatgcatgcaccttccacctcctccacttcctcctcttcaaaggaagagaaaaagctcagtaattccttgaaaatgaaagtcttttccaaaaacgtctctaaatgcgtcacaccagatggcaggaccatatgtgtaggggacattgtttgggccaagatatatggcttc

SEQ ID NO: 4556 - DNA, 1173 bp, Homo sapiens
aatctcaaatcttccttgaagctttgcatgactattttgtccctgtccacacaccccaaattactccctctataatacccttagcattttaacctaaatgtctcttaggtccttaatcattttctgatttgtagttttagagaagtaaatttcttatttcttgactgtgaatgtttgtctttcacgataaattaaagttggttgaaatgataaatctaaaaattatcttacagaatatattgcttcatctgccttaaagaagatacaaggcctgtttttagtttataatgatggataaattcgttttaatctagattactaatccttcttttcaataattcttctaggcaatacaaactgttaccgagctcctatggagtgtcaagaatcatggaagtaaacatctgagaaacctgttgaagattatttcattcgtcttgttgttattgatgttgctgttattatatttgacatgggtattttataatgttgtatttaattttaactgccaatccttaaatatgtgaaaggaacattttttaccaaagtgtcttttgacattttattttttcttgcaaatacctcctccctaatgctcacctttatcacctcattctgaaccctttcgctggctttccagcttagaatgcatctcatcaacttaaaagtcagtatcatattattatcctcctgttctgaaaccttagtttcaagagtctaaaccccagattcttcagcttgatcctggaggtcttttctagtctgagcttctttagctaggctaaaacaccttggcttgttattgcctctactttgattctgataatgctcacttggtcctacctattatccttctacttgtccagttcaaataagaaataaggacaagcctaacttcatagaaacctctctatttttaatcagttgtttaataatttacaggttcttaggctccatcctgtttgtatgaaattataatctgtggattggcctttaagcctgcattcttaacaaactcttcagttaattcttagatacactaaaaatctgagaaactctacatgtaactatttcttcagagtttgtcatatactgcttgtcatctgcatgtctactcagcatttgattaacatttgtgtaatatgaaataaaattacacagtaagtcatttaa

SEQ ID NO: 4557 - DNA, 1194 bp, Homo sapiens
aggagacagaagaattatgaccaatgtttgattttccataatgagattttaccaaaaatacaaaggttgtccaaaggttgacaaagtagataagacaatcaataactctcatgatgttgactttcattttaaaacataaatcaattctacagctcttgaatattcaatttagaaactatgaactatggaatataaattagcaaaatttatgtctaactgttgaattgaggagagaacatacagagaaaacagtgctcaattttaacaaaatacgtattttcgaaatgtactttttaaaattttttcacacaatattcaggatctggagcagtatatagaacatagcacactctcctttctttctttcttgtttcttttcttttctttccatttttttccttttttgagacagtgtctcactctgtcactcaggctggagtgtagtggcacgatcttggctaactgcaacctctacctcccaggctcaagcaatcctcccacctcagccttccgagtagctgggactacaggggtgtgccactatgcttagctaatttttttgtattttttatagaaacgaggtcttgccacattgcccaggctggtctccgaactcttgggctcaagtgatccacctgccttggcctcccaaagttctgggattacaggtgtgagccactgtgactggccccataacacactcttaataaggatatattaacttgaattttacttaaaggggcttcatattttgttttgcattgatttaaaaaataagtctcatatagggactattcactcttttctttttaatataaacattatatatttgcatggtaaattaaatgcaaaccatacaaaatgtgaaattccccaccccaagtttaactccttaattattgccactttttacaagctactgcttgttgtactttaacacaatgtatttttaagcaattttaaagactgcagagaaaacaagcattgtttttatgcactcttcctaaacaagctctgcccgtcaaagatactgagttgatgtcagataaaatgtcccttcatcaaaaggctcctaaaacctttcaacccctctctttttctctgtgcttgagtggttacaggatttaccttctgctgctggaggctatagttggtaacttactccatagtcaagatggaacttgtgggttctta

SEQ ID NO: 4558 - DNA, 1099 bp, Homo sapiens
gctgtaatgatgagtgagttttatagcattactgaggacctgaaaacttgctgccaaggacactttgaaggttttgttggctggaagaagtgtctctggaatcccactcctagctcttcttgaatatttgaaaagaattagataagggccatggggacccaggtcaccccacctcttcttttcagtttggctacaacattggagtcatcagtgctcctgagacagtcatacaggactttctcagttacactttgaaagagaggtcagaagactctccctctgaggttttgctcatgtccccctggcccttgtctgtggccatcttccccaatggtgatatgattggctcctttctgttgcactctttgtcaaccactttggcaggtgcagttcaatgcttatcataatttgttggctattactggttgccttatgggattctgcagacaagctgagttggttgaaatgctgatcctgggccactagattactggcttgtaatgcggactctgcacaagttttgtgcccatgtacattggagagatctcgcctactcccctttggggtacctttagtgctctcaaccagctggacgtcgttggtattctggagatccagatctttggtctggagttcatcttggggtctgaagagctatgcccagtgatactgggctttaccatccttccagctgtcctataaagtgtagcccttccattttgccctggaagtcgtaagtttttgctcattaacagaaaggaagagtactaatgagatccttcagcaattgtaggggactcaggatgtgtcccaggacatctaggagataagagtgctaggatgatacaagaaaagcaagtcactacactggcgctctttagagtacccagctaccaacaacccactgtcatttccatcatgctccagctctctcagtagctctctggaatcaatgttgtcttctattactcaatgagaatcttcaaggatgcaggtgttgagaagccaatctatagattagtgcaggagtggttaatattatcttcttgactgtagtctctctgtttgtggttgaaagggcaggaaggactttacatat

SEQ ID NO: 4559 - DNA, 1223 bp, Homo sapiens
tattctatcttatatctttgacttgcaaaagcctatatttttagaatcagtttttttagacattagtctgatacagaaaccaaggttctctgcagcagaccattctgaggttgtggggatattgttggaaaaaaatatgattaggatttattatacattcttacctttatttgttttttgtcagagaagcagtcacccctgattgttgctttaggccatcaattgatgtgcactgcaaggggtaaattgttctacacattagtaagctgggtaagcaaattgttgtgcaaacctaatttgtttcctagagaaagtgactgacatacaattttgaaaatggaaatattcataaattgggtgaccatggtggaatagatccattgtgaaataaccactacgtttaagaatcctgtactcattggtgagactgacaaaaaacagtactgtgactgaggtaaacacaaggttacagcagcccttaagaggagtactttcctcaggcttggggaaggtaggacagacaggagagaggaatcagaagtcttcacaatattgatatctattctgggccttgaagatgaagtgggagttggctaggtagatggaaggtaggaggggaagggggtaaatttttccaggttgtgagagcaacatgtttgaggaactataagataggggaatagaatgagaatactgggtgttagagaagaatgagatttttctagatgtaacttttttgcactatatagcccaccagttagagggtctgttttgtgaagaaactagtcagttcagaggaggaaaatgatggaagtagtattcattaaactaaatattttattctgttgacttggtcaatcaagtcagacttggagcctgataatccatttgggcatcgatttgtctttattgttaactttgtaacttggaaaaattttttcaaaatcttcacatggttctcaatactggttttacaatataatcacacgaggaagttttgtaaaaataacactgtggatttgctgtaaaatgtcccaatggaaattttttttaatgtttgggggtggggaaatagatgatgtaagatttgcaaaatattgctaatcactgacacttggtaatatatttccattatgtttgtatatgtttgagcatttacataactaaaagtttaaaaagtaaaattagaattttttctgaacagccatcaaaagatactcata

SEQ ID NO: 4560 - DNA, 1209 bp, Homo sapiens
aatacttatggaacatttactgtgtatcaagctctgctaggcattttcacataaatttatcacatttatttggcacagtgcctctgtgagaaatgcattattagccccttttatagatgacaaaagtaagcctgataaattgccttgccttaagttttaaagctgggattcaaattcgagtcttatgacatcaaatatagaactcttttccttacatcttcctcacttggggaatgtgactgccattctgcgtatatcatagtacatgtaggtcacttggccagttttattttgtcctgaagttattaaggatattcattaggaatttttaaatgccagtgcctttctaggatagactctaaattatgttgtggggccgcttgcatgcaagccgatgttcaagatttgctgttattaaataatgtctagaccctgtacatatctgttttgtgtaattatcaatcctcatcttttttttcagatttggcattattcagaaacaaagtatattaagactctaaatgcttagctacactactggaattatgacttagctaaatttataagaagtaaagtggagttgatcagcagatttgatggtctgtttaaagagtctgtgcttttctgtagaaagaggtctgaacgagacattttagctaatgaatcaaaatcagatatgtggtcattattgcctgattattactccatctgctctgcgctaacgtgaaaatcaattactgtgtctctttcccactgacagcgtatgttgatcgggctggcaagagatcttcgagggattgcctttgcactgaacacaaagaccagctacaccatgctgtttgactggatgtatccttattacactgtgacaataccagctctgtgcacagagggatgccaggcccctcgctttcgtttaatagtatggcacagtagggaagaggaaacaaagctaaatgaactaatgtgtaatcagctaaaaattacagcacagtggcagcagagcagataactgagcacagtatttggagacccagctcagagaagtcacttttttggtgccgttaaatattgataacttaaaaatgacttcccccaaatgattgtttatgttggagttgaagggataatctggctaacatctttagggatcaatgaatcctaccatttgacatttttgaggggagatttgaatctccatctcaatta

SEQ ID NO: 4561 - DNA, 1247 bp, Homo sapiens
cagaggttgcagtgagccaatattgcaccattgcactccagcctgggcaacaagagtgaaactctgtctcaaaaaataaaataaaaataaaatcatataaagtggaaatgctttgcctcctagaggtaaaaatgaacccctttaaaaaattttctaaatacaatttgccatactttttgtatatatctaattccattctatgttttatcatataagatgtgtgtctggaccttttttcaaaaacagcatggtatattagaaaaagcacagttttcagatttgcaagatctcagtactaatcctgttaccaatacttaccgacttcatgaccttcagctaaaatactatatatacctctttgtggctagttttcttttgtataaaattaggactactaaatacctactgacttatctgcctagttgggattaagaaggctaattgagctattctggtaaaaggcctggcacaggaggtaacatggaagagttactcgctgtttatgcctctccttccaaagcctttctcttatactcaccaacccagccttctttggacaggggttcaacaacccacatcattgttttgctcagcagtgtttcctgtttggaccacactgccctgcttcctctgcctgtagccagtgattagtttttatttcctctcttatttaaaggaaataaacagcatatatgtataagaatctcttagtaatcagtagaactttaactatgcatatgttagattcctgttaccagtcacagttgtgtcattcctacccctttttctggatctttcttttcactaaatatattttttcctttagggtttatttactgttgcactagggctgttaagggaagtgagcttcctcttccagtgtcactgactttctaggacagaatgtatgtccagtaagtgacaccaaaaggattctcacagaataatgccaaatctatgggcttcaaaggttgttctgttctctgttgggttgtctgacatagaaaaaggcattgcagcaaaagttgagaaaaataactatgtgaggattatgtcggaggaggaggaagaggagacagaagagaaaggaaatgaagggataggagaagtgaagtggagtgggggaagagacaaaacgtccagagcattcttgcaaagaaaagccagtaaggagttttcttacacggaagaaagatgagattagagtaaggctctgctcctcaatttagactaatagtattggtagc

SEQ ID NO: 4562 - DNA, 1198 bp, Homo sapiens
cctgaactttggggtaacgattaactgcgatccgaagccttcaggcaagtaaaaaattcctgaagtgattacgcctgtttggaggcttgcagggcactaggggatggggaaaggtgaatcgaggtgctctctggctcattcgcagccggctaacccgccatatcttacacagctaagggctgccgacgccattttgcagggtgggctgcgcagactcttggcgggaggccggcgcgcttgagcgggagaggacgtggaagggttggaggtggggagtgcgcgttacgactggaaagcacgcgtgcgcacaggcgacagcagcggaggggtggggccagtgtacgagtgcgcgtgctcggtgggagcccgcggagtacctggaaggaggtgggggcgaggtagaaaggagtggggttgaaaagcgcttgcgcaggacggctacggtacgggggtgggagggcttcggagcacgcgcgcggaggcgggacttgggaagcgctcgcgagatcttcagggtctatatataagcgcggggagcctgcgtcctttccctggtgtgattccgtcctgcgcggttgttctctggagcagcgttcttttatctccgtccgccttctctcctacctaagtgcgtgccgccacccgatggaagattcgatggacatggacatgagccccctgaggccccagaactatcttttcggtaactgctggggggagctggagcgaggccgagcggggcctggtggcggtgagggtgggggtgaggggcgggaatccggctgcaaccgggtctggtggagaccgccagaccgacgggaggcctgagcgggtgggaagagctgcctgagccctggacctggagggattggagccgcggggggagccggtggcgtgaagggggaggagacgagcggcctgaagcgtctggggcgtgagcggtccgaggcccggggcctgaggtaaagtggaaccggccgcctggaagttcggcctttgccggggatacgtggcggagctccaggcgtggtttattttctaacggcggtggttcataggcttctgatgccaggccccgggttggtggtcctggaggctgggttcaccgggaagcatgggcctgcttgttggagcgggtagatgcacagcctggcgttattctggcctcagagcctggagctgccggacgtagacttac

SEQ ID NO: 4563 - DNA, 1240 bp, Homo sapiens
tctcatctgcttgactgggggatttgagtaggatatggaataaatggtttaaatgccttggaagcacatttgagagaagctttaattctatgaataatacttttagactccaactattgagagcaaatgtggggtggtgaaaaattgccaactcatttccccatgtttttcttgtaatctatagatttttcgtggcttcagtagattccttgtacagtgataagtccactggaaaaagaattttagaactggaacatatttcttttagtcacactgtaaaccctttagccttcctggttatcactgatttttgtcccttggatacaatgctaaaatgacatcttttagatgcccctcccctccattttaatatggtcctatctccttggtttaattgcaggcgcattgaacagtcctgggcactacatgtaaattaagcccaaagatggggagaaaggaaaaggagagacaaatatagtccatactgagtgtcatcaacaatccagactgaagtcttctattttaatctcaatccccttttctgatttgccacccatgcctcttcaggctggaaacaatctcttggttccctaaagcactttcttctgactgctgtgattcagtgaaccttgccctttgctttctattacttgtgcatttgcctcacctgacaatgttttaaatcgcctttgtatctccttagctgctcaataaatatttgaatgcatcaattaagaatgtatgtgacaataattttgaaatggaaattgtgaggtttattttactaggttattggaggcagttaagtttcttaatgctatacctgattctgccaaagtcccttggacatttgaaaaccttttcaatcttttaaaaatgcataaaagatacttagagggaaaggtattaattaaatttagtaaaaacaaatatattcaatgctttaaattccaaagtagtgataaatacaaacatttcaagatatttgcaatagtaatgttttgaaattttggttacaaagtcacaggtcttgccaatactgttgtagtttcttgcctatatccgtaatttgaaggaaatggtgagagtgattagagaagtgtaattactgtaattttttcccctattgtagtttcttgcctgtatccataatttgaaggaaatggtaagagtgattagtgaaatgtaattactgtaattttttccccattcaactttatatatctttaactgatgacca

SEQ ID NO: 4564 - DNA, 1215 bp, Homo sapiens
cagggtttcaccatgttgcccaggctggtctcaaattcctgagctgaagtgatctgcccgcctcagtctcccaaagtgtagggattacaggcgtgagccaccatgcctagcctcagcatatagttttttctaaatgtacacatgcccaggcacacatgcacaggcaattcagaataagtttctggtgtttatgtaactttatttgccaaatctggccaactctaaagctgatctcgggagatgaagttggaagtaacattggccatatgggtctctgttctttctgttgatttccttaagtaaataatgctaaactattaaataattattagtatattgttcacatttttatgactgattaaagtgtttggaattaaattacatctgagtataaattttcttggagtcatatctttatctagagttaactctctggtggtagaatgaaaaatagatgttgaactatgcaaagagacatttaatttattgatgtctatgaagtgttgtggttccttaaccacatttctttttttttttttccaggctattcaagatctctggcagtggaggaagtctctttaagaaaatagtttaaacaatttgttaaaaaattttccgtcttatttcatttctgtaacagttgatatctggctgtcctttttataatgcagagtgagaactttccctaccgtgtttgataaatgttgtccaggttctattgccaagaatgtgttgtccaaaatgcctgtttagtttttaaagatggaactccaccctttgcttggttttaagtatgtatggaatgttatgataggacatagtagtagcggtggtcagacatggaaatggtggggagacaaaaatatacatgtgaaataaaactcagtattttaataaagtagcacggtttctattgacttatttaactgctttatactttgtcaaagaaataattaatgtagttaggaatggcaaatagtcttgtaaaattctatgagaatgtccctgccctccccttcaatattctctctggagctaaccactttttcatcataaggatttagtgctgtgttcccacctcctgatgatagttaacaattattataactatgcaacatgtttccaaatgttccattagacctcctatctgcctattctagcctcacttgcaaagaaaatgtggcatgttaaaacagcttaaaagcagcctttcaa

SEQ ID NO: 4565 - DNA, 1232 bp, Homo sapiens
tgacaacaagacaaataatttcttggaccttttatcttggacaccatttattttccctcagccccggggcaggactgacctcatggtagggcccaagcgtggcagctgcaccgtcactgggggctgggccaggccaggccaggctgggcagggctgagccatgctgggcttgtgcacctccgggccagctgcctcccttctcccaggcatcactctttaccgcctccgttcccctcccactctctttccccttcttcctttcgcagcttttccccgttccccgttttgtttttgtccacctctctgtccccctccccaccagctctgtctccctccttcggaccacagcttccctcctccccacctctcccaggccctctgctggctgcctctatggggcctcccatccctcgtggccccctccacagacgcctggctgtgctaggctgacccaggtggtggttttccctcggatctgctgtccagtggctgccagaaggggcagctggctggccgtggcaggaggaggtgcccttctggggagtcccagagctctcattggcccctccaggctgggagagtacaggggggtcagactctggtctgaaccatctgtccacgccctgagacaggaggcgggagctcgagagggaggggagcctggaaatggccggcccctcaccccagaagtcacttgccctctcattccctctgcctgaactgggaactcagggaatctttcctgctgtgtgacctcagacaagcactttgccttctctgggccttggtttctcctctgcacaatggttgggctaacgcagtgcttcttctttttcttttctttttttttttttttttgagacagtgtcttgctctgttgcccaggctggagtggtgcagtggcatgatctcggctcactgcaacctctgcctcctgggttcaagcgattctcctgcctcagcctcccgagaagctgggattacaggcgcccaccaccacgcctggctaatttttgtatttttaatagagacggggtttcgccatgttggccagggtggtcttgaactcttgacctcaggtgatccacccgccttggcctcccaaagtgctgggattacaggtgtgagcatggccgcgcccggccatgcttcttaagtgtaacatgggtgtgaccacggagggatcctgtccaaatgcccatgttggttcagtgggtctcgggggcgaggcc

SEQ ID NO: 4566 - DNA, 1172 bp, Homo sapiens
attgaatttcctattgcctgattaaatatatctgtaattgtaacatcatgtttctgagagctttaactacttccttatttttatgcaatcattttaaagattgtggctatatctaatttaaatttgctgatgattgaatctaaattcaagtgaagaccacagcattaatcccaaaggagattttttttatgtttagaggtggagatattagggtaaatcagtatattgctcctgtcatcaaagtttttgttcatttgtgtgccacatcgaatagcagcacttctcaaagtttgtcaactggaaaaaagtgtttaaaactgtttttttcttaagcagatttggtgatgtcatcaatatctatgatatcgattggtaaaaggtctttctttgttgaggatttgagctctctttttaagagtttattttattttaaaggaacatatgctttgaataacaattctctgggcatgtttaactaacctaggtgggaaaaccatggtgctgtttaattgtaaatagattgatataagattggaccagtacttgatgtgtataattttagtatgtagggtttatgtgctttttttaaaaaaaaaaaaaaggttcaatttttctctttgtctttgcctttattattggtttctaattgtttttactctctataagggtaattgcctcattctaagtgagaattatgaaggttttcctcctttttaaaacctctgctcagtaaataacaggttcattatcaccaaacttaggctctgctatgccaagtcatacatggtaatttataaatgtgcttcatcttctgcactgaaatcttggtctaaaataggttgttgtgggtttttttttttgttgtttgttttgttttgttttgttttgagacggagtcttgctctgtcgcccaggctggagtgctgtggcatgatctcagctcactgcaagctccacttcccgggttcacgccattctcctgcgtgaactcagcctcccgagtagctgggactacaggcgcccaccaccacgcccggctaatttttttgtatttttagtagagacgggatttcactgtgttaaccaggatggtctcaatctcctgatctcgtgatctgtccgcctcggcctcccaaagtgctgggattacaggcgtgagccaccacgcccgg

SEQ ID NO: 4567 - DNA, 1136 bp, Homo sapiens
ccaaaaaaaaaaaaaaaacactaaatcaaccactttccaatttattcttggcaagggtggctagttctagaataggcttttaaaggtctcatcttatgcagcagatgatgtctgaatcttgtgaagttgtgtgtaatttaggattctctgtatgccgacttatttcttgaaatgggagaggctgtcagtcggcgccacatgtgggctggtggctctgtggcagtggtggcggctggactccggcaccatgagcggcttcagcactgaggagcgcgccacgcccttctccctgaagtaccgagtcttcctcaaaaatgagaaaggacaatatatgtctccatttcaagatattccaatttatgcagataaggatgtgttccacgtggtagttgaagtaccactgtggtctaatgcaaaaatggaggttgctacaaaggaccctttaaaccccattaaacaagatgtgaaaaaaagaaaacttcgctatgttgcgaatttgttcccgtataaaggatatgtctggaactatggtgccatccctcagacttgggaagacccagggcacaatgataaacatactggctgttgtggtgacaatgacccaattgatgtgtgtgaaattggaagcaaggtatgtgcaagaggtgaaataattggtgtgaaagttctaggcatattggctatgattgacgaaggggaaaccgactggaaagtcattgccattaatatggatgatcctgatgcaggcaattatactgatatcagtgatgtcaaacggctgaaacccggctacttagaggctactgtggactggtttagaaggtataaggttcctgatggaaaaccagaaaatgagtttgttttaatgcagaatttgaagataaggactttgcaattgatattattaaaagcactcatgaccattggaaagcattagtgactaagaaaatgaatggaaaaggaatcagctgcatgaacaaaactgtgtctgagagcctgttcaagtgtgatcctgatgctgccagagccattgtggatgctttaccaccaccctgtgaatctgcctgcacagtaccaacagacgtggatacgtggttccatcaccagaagaactaatgggatttctctggaataca

SEQ ID NO: 4568 - DNA, 1244 bp, Homo sapiens
aatggtcatgttccaacatgatttcaccgcttcgttgtttctctcccatccttcttttagttggctgattgcaattctggcccaactcaaccctctctttggaccgcaattgaaaaatgaaaccatctggtatctgaagtatcattggccttgaggaagaagacatgctctacagtgctcagtctttgaggtgactatgcttgtgacctttcttatcagtatggtcaggcagtcagagtttgccttgactttttctcacattttatggccattttaacacgtggcaagggcaagctgctgaatgcaaacacgatctgaagagcagaaataaaattggaacttaagccttagcttacctaaatctcattaagattctttttagattctgctatcaccctgcctttttaaataaatacagtttaatttacaaaattaagcttgcatgcactctttcagacgcagatcaaaaaagtaactgtttatacttggcattgtgagatccagcaactttaaaaagtggctggcagatttaaaattgagcaggtttctttccagcagtagtcagccatccggacagaaccgttcctgtgatggtgttacactgctgggagaggaatgtcttgtcttcatccggttgcctgcgccactgttctggtggcgtctggcactggtgcaagacagagctgtgcttccccgagagtgtgctaagcattcactttggctgcttagttctagtctgggagcagacagagaaaacaaaattaaggtttttgaatgctttggatggagaaaggtgcctgcgtccgtttgttttgtgttgctataaaggaatacatgagactgggtaatttatatttggctcgcagttctgcaggctgtataaacatgacacccgtatctgtttggcttctggtgaggcctcaggaggtttttacttatggcagaaagcaaaaggggggcagccgtgtcatatggccagagagggagcaagagagagagaaggaggtgccaggctcctttaaacaagcagctcttgtgtgcactaacaactacttcactcgttactatggggaggtatattagcccattttcacgctgctgataaagacatacccaagactgggtaatttataaagaaagagaggtttaatggactcacagttcctcgtggctggggaggcctcacaataatggcggaggatgaaaggcagttcttacatggtagcagcaagagagaatcagaa

SEQ ID NO: 4569 - DNA, 1244 bp, Homo sapiens; identical to SEQ ID NO: 4568

SEQ ID NO: 4570 - DNA, 1486 bp, Homo sapiens
acagggctttgtagctcagctgaggttgactaagctttgggatccttcagggtctcctctttctatctgtgtgactctgggtacattacacacctattttaacttactcatctgtaaaattaggatgataatagcacctgccattggtagttgtcgagagaattaaatgagataatacatgaagagaggttagcccagtgccgggaatattttaagtttttaataaatgttctgtggtatttttattatcggcaagcaggctcagatccacagactgattttattcttacatgaaccttaagaggttgaaattaggactttcccccagttatgattcttagaagaatcttaattgagattcaggcagatgaagtgacttgcctgagggcaaacttcttagaagtggcaggtttgggtcttgaactttgattttgatgccacgtctcacaggttttctgttccactgtgacctcatgccctggagaggaacacaaatgtggggggcagacagcatgcaaatggaggcagcctgtagtccttacctggaaacttcacgggaaacctcacccagcctggacaaggacgggattgacagattgacagctctttctcgattctgtgggtggtggtgcatggccattcttagttggtggagtgatttgtctggttaattctgataaggaaccagaccctgacatggtgactggttacacgatccctgagcagtcggcatcccccaacttcttagaaggacaagtggtgttcagtgacccaagattgggcaataacaggtctgtgacgctcatagatatctggggctgcacgtgcactacaccaactggctcagtgtgtgcctcccctacaccagcaggcgctggtaaactcttgaaccctattcgtgatggggattggggattgcaattattccccatgaccgaggaattcctagtaagtgcaggtcataagcttgcattgattaaatccctgtttgccttgataagtccggctcaaactggacttgaggtctgactttggtgagactcactctgacatcccaggtaggagactataccttctagtctctttccagaaacagggcatcaaaagtcttactttactcctgaaggtttgcagtaaaaattaaatattcagctatgataagtggctatagagatgcagagtgtgaatgggaccctactaggtatcctaggtatagggaaataagacacataagaaatttgcttctgtttatgacaggagtcattctgctaggcattcacaaatctgctgccatctagcccagtctgaggctgagggtacacccaaactcattgaagaggaaggggctttcattctgctcagtctcttgctggctgactccccaagacctaagccctgcaagtgtccccagacccatctctcactatgcctatcacctctctcctatgctcttccagaacagaaatttgtcatcttcatgtttgaa

SEQ ID NO: 4571 - DNA, 1214 bp, Homo sapiens
ccaatgaaggtgatgaagcttttggatttggagggtaaaagctccttcacaccccttccaaaagtcagtcacagaccactgcaacatgccttccctgctggatcattatatacattcagattgtgagtggattgccttggttgacttttaatttattgttttttgttcttataaagatgataatcttaccttgcagttattgactttatattcaattatttacatcaaataatgaaataactgaaatgtacaaatgtcaaattttggaagtatattcaataccaatgctgtatgagtgggctgaatccagttcattgttttttttttggtaagaagtgagactacagttccagctacctacatgtcttttcttgtcatccttatagatctctttggctttcagaaagatacagtgataatgtgtgtatgaatcagtcacaatgaattttacttgaatattgtatgttgcattccacttcatttgaaaataatgaaaccatgtaccactgtttacatcatctgtagtgatttcatagataatatatttaatatgacagattatgtttcaactctgtagatgtttaacgtcatagacagttggccctctgtatccgtgagctctatatctgtgaattcaaccaagtttggatggaaaattttttttttttttttttttttgagacggagtctcgctctgtcacccaggctggagtgcagtggcgtagtctcggctcactgcaagctccgcctcccgggttcacgccgttctcctgcctcagcctctctgagaagctgggactacaggcgcccgccaccacgcccggctaatttttttgtatttttagtagagacggggtttcactgtggtctcgatctcctgacctcgtgatccgcccgccttggcctcccaaggtgctgggattacaagcgtgagccaccgcacccggcctgaaaatattttctaaaaagataaaaaatatacataacgatgaaaaataatacaaatttaaaaaccaatacagtataacaactatttacatagtgcttacattgtattaggtgttataagcaatctagagatgatttagcaagtatacaggaggatgtgcctaggttatatgcaaatactgtgccattttatatcaggaacttgagcatctgcagatattggtatcggagggcggtcctggaaccaagcatccacggatactgag

SEQ ID NO: 4572 - DNA, 1119 bp, Homo sapiens
attagagattaagtttcaacatgaattttggcaaggacaaaaacatttaaaacatagcaatcactatcatcatcatcatcctcatcctcagcatcatcatcatcaccataatcagtaccaccatcattatccttatcatcaccatcaccatcatcaccattaccaacattatcaccatcaccatcatcatccttaccatcatcatcctcaccatcatcatcctcaccatcatcaccataattataatcaccacagtaataattatcatcattcaccatcgctatcatcatcctcaccatcaccattgtcatcctcaccatcaccaccatcaccatcatcatcatcattctcaccatcaccatcactgtcaccaccatcaccatcaccatgatcatcatccttaccatcaccatcactaacattgatctagtgcttaccatgtgccagatcctctcttgaatttctgccacacattccatagcagtccagtgaggtggaaaccatagctatcctcattttacctggggaacttgagggcaggaaaagtgaaatgacttctctggtaaatgccagtgaaagtccactaggatctaaagcccaggctacctcattgcagagcctgcgctcacagatactatcttgtaagctgccatgcagaagtcttcctgcttcctccccttatccaattccaggctgctatagatggactatgtctcgcccagaattcatatgttgaagccttaactctcagtgtggctgtatttggagatattaaggaagtaataaaggctaaatgaggtggtcacaagaatgggtttctgatcctgtaggattagtttccttccaagaagcaataccagagcgctgtttctctgcacatgctcaaagaggtcagatgtgcacacagtgagatggtggccacctataagccaggaagagaggtcttaccagaaagtgaccgtatggacaccttgatctcagacttccagcctcctgaactgtgagaaaacacatttctgttgttcaagccaccagtctgttgtattttgttatagcagcctggagcagacaaatacacaggtagactcagtaaagggaaggagatggggagggaagtct

SEQ ID NO: 4573 - DNA, 1140 bp, Homo sapiens
aagcaaaccttgtgactggtcaagatgagagaaggcaatcttaactcaggtttctggctaagccaattgtagggtactcaacttagaaagcccctctgagtaattcagaagatcactgtgttgtttaactattgcttgtacttccttactgacaacccagttggtatttatttagcagcaactataacgcagatactgttctgcaagctgagggtacagtactaaacacaagtcagtgttcttataaagcttacctttttgtgagggaaacagataataaatacaatttaagaaaaacaaggcaagaagaggggatggagagtgactagaacagaggaaaaagggggctcgattaaagagaaagatcaagggagacttcttgaggtgatatttgaatagagtcattctaggtcagggaataaatacaaaggccctaaagcaagagtgtgtttggcatgtttcttagagctgcaggaaagacacaatgactgaattagattgagcgacagggggaaaggagagaagaaataaacagtggtcagatcatgtgaggtgaggtttttgtacttcattccaaatatgatgaaaagccataggggggttgagaacgagggaatgatgtaatctaactctggctacaatgtggaaaataatctatagagggatggggcaaaaatggaattgaggagactaagcaggggtggaggggagtggctgttgcattattccagggaagatctgatgtttgctttgaccatagaggtagctgtgaggtaaagaagttgtcagatttgggaatgttttgaaggttgaacctacaggatttattggagtgtgagagaacaagaaagactaaggtgaaatcaaggttttgccccaagcaactgggttaatgatgacttcgttgtttgagagcgggaacactggggcaggaacaggtttggaggaagaaattaagaatttggttttgtacataattttaagatgcccagtgaataaccaaatgaagatgttgagcagacagcaggatatacaagtctagaaataaccttatgggaaatattactgcatatttgtatgctgatggaatgatctaaaaaaagagggaaaaattgatgtttcaggagagatgatggcagg

SEQ ID NO: 4574 - DNA, 1177 bp, Homo sapiens
gcagcatcaggggtgcggagcctgggaggcacgcgagggccgggccgggccggggctcggcgcacacccgccgccaggctcgtagctcagtcaccaccgcaccgcgcccaagcagctgccgccgccgccgccgccgccatgagttgtccggccgcgcgccacttccggcgcagccacacagtagccaccgcttccggcgcccgcgccacgtgaccttgcggccccgccccctcgccctctagccccctcccgcgggagtcgcggcgctgcgggtaggagccgggttgcgggagaccccaggttcggttgggattcccagccagaacggagcttaagccgggcaggcgagcgaatgacggagtagcgagctgcacggcggcgtgctgcgctgttgaggacgctgtcccgcgcgctcccaggccgccccgaggcttggggtcttcgaaggataatcggcgcccggggccgaacagcgggggcacacggggcgctgccgaagtgcaaggccacggccagagctcgagcccgacgcgctgtctggagtcgtaggttggcgccgtttggggtcggggtctgaggcttgggcgctgcctgggccgagcggagatcggggtttgcctcccgtccccgctcaggaccctgacgtggctgaagcggccccgggagcatgagcgggcagcgcgtggacgtcaaggtggtgatgctgggcaaggagtacgtgggcaagactagcctggtggagcgctacgtgcacgaccgctttctggtggggccttatcagaacgtgagtgcatccggaggggccaggcacggtgggcgggggagtggggggccggtaatctgcacctatggccccgatctcttccctctcgttgcagaccatcggggccgccttcgtggccaaggtgatgtcggtcggagaccggactgtgacattaggtatttgggtaagtcccccggccatctattcttgggagactcattcctgaggaggtgtaggtcctgcctattactggttgatttgtggcctcacagacccatttctcatagacccgtttccttatctggaaaatagcggggtctggagaacgtggccttaagtttgactcaggccttactctttaggacacagcaggctctgagcgctatgaggccatgagtagaatctactatcggg

SEQ ID NO: 4575 - DNA, 1165 bp, Homo sapiens
cccctggcctggctgagtttggcagggcctgggccatccctgggacaaaggtgcgtcccttcagctcttctccgtggagctcggggctttctgtatttatgtatttgtacgaatgtatatagcgaccagagcattcttaattcccgccgcagacctggcgcccccgccttggctcctgggggcagccagccctggctgggagagcgggagctggcagaggagccactgccaaactcaaggctcctctggcccagcttggatggctgagggtggtcacacccctgagccttcagcactgtgctggccaccccggcctctgagtaagactcgtgcctccccctgctgccctgggctcaggctgctaccctctggggcccaaagctgtcccttctcagtgcttgtcagcgctgggtctggggcctctgtatgccctaggcctgtgccaaagtggccagagattgggctgcctgtgatacccatcagcccactgccccggccggcccagataggtctgcctctgccttccagctcccacagcctggtccctgatactgggctctgtcctgcagacacctctttcagaaacgcccaagcccagcccctaggagggggtggggcatccctggtcaaccctcaaacattccggactcccctcataacaatagacacatgtgcccagcaataatccgccccttcctgtgtgcgcctgtggggtgcgtgcgcgcgcgtgtgtacctgtgtgggtgaaggggatagggcgaggctgtgcctgtgccccaggtcccagccctggcccttcccagactgtgatggccatcctggtcccagtgttagggtagcatgggattacagggccctgttttttccatatttaaagccaatttttattactcgttttgtccaacgtaagctgccacatgtctctgtgtgaatagtccgagcacaaacctggctagccgcccctgcctgcctctttcttgcttccggtgctccaggggtcttcctgctcccctggcccagctggaagcgggaagggattggaggtgggcctggagggaagcagggtgtgcccttccgaggcccaggagcccccagggctgactctgaactagcctctccagacagccaggctttggtagcctttgggctcacccagtgggtttcc

SEQ ID NO: 4576 - DNA, 1195 bp, Homo sapiens
ctcgttcggactcagagctggagtccgtccttcgcgcgccccctgctggcccgcctcggctcccctcggcgcccgggctccgcggcggcggccggggctcagatcggggaaaccctaccggggaaacctcgaggcgtgacgtcaccctcctcggtgacgtcaccgggcccccggggagcgcgaggttcccacggaggaggctttccccggactgcgcagggcgcgggcgggggccgggaagtcgttgggggccgcggcgcgccttcactgcgccccgtgtctgccctacaggtcccgcgcggccccgggtgaggcacgcccgcgcgcccgccggcgccatgggaaggagcgggcgccgctgctgtcccccgccggcgcgcgcacgacttgagacctgccacgggcagcccccggccgcgggtccccgagtgacgctggcggcacctgagagtgtggcgcgggcccggggccacgcagcggagcccagtgtccagtgaagcgtctgaggacccgccgcccgtgccgccgccatggtgatgtcccagggcacctacacgttcctcacgtgcttcgccggcttctggctcatctggggtctcatcgtcctgctctgctgcttctgcagcttcctgcgccgccgcctcaaacggcgccaggaggagcgactgcgcgagcagaacctgcgcgccctagagctggagcccctcgaactcgagggcagtctggccgggagccccccgggcctggcgccgccgcagccaccaccacaccgtagccgcctggaggcgccggctcacgcgcactcgcatccgcacgtgcacgtgcacccgctgctgcaccacgggcccgcgcagccgcacgcgcacgcgcacccacacccgcaccaccacgcgctcccgcacccgccgcctacgcacctgtcggtgccgccacggccctggagctacccgcgccaaggtgagtaccgacctccgccagggggcgatccgggccgccggaagtgggcgggcgttggagggctcgctgcttaccctcagggcttccatccgcagcctccgggagaacacgggcggcggcgggctcgggttcgggctagggctggggcgcgggcggcccctggccggggcctctgcgagaggctgggaaccggcggcctcacctcctccgaccgcctcccactccgcagcggaatcgg

SEQ ID NO: 4577 - DNA, 1120 bp, Homo sapiens
gcccaatcggaagagctctgtgccaaggctccgcctcctgtgttctacaacaagcctccaggtagtactgggctggatgatggggaggaatttgggtgcgggggctggatttgagtgtgggtagccaccccaccactacccaccgctcacagaggctggggacacaagcggtctgctaggtccctaactcctctccctttctaacgccacagagatcgacatcacatgctgggatgcagacccagttccagaagaggaggagggcttcgagggtggtgattagcggtggcgccagccctaggctacccttgccaaggccgcccacctgcatcagcctctggccagacggcccgccgtgcctgcattcgcagcagctccgcctggcacccactccggattccggccctggctggggacttggccgcttccctacccacagggcctgacttttacagcttttctctttttttaaaaagttgataggagacttgtacagttgactggctttcctctcgttggtagttgagacgctgttgcaaattccacccctccttccctggtccagattgtagctcttagtcctccctgctcagctggccgggttggaggcctcaccctgcttggggcctggcgtggggggagctctggtgggaaaatgtcccccacctcttttcctagttttatgtttcttgggaaaatatcactttgtattctctgtccagggcttcagatattttgcacgaattttaaaacatggcaataaatggctcgtgggctctggctccctgggaccccctccccgcccttcttttgaccccttcctgtctggcccaaaggaagtagcaggcccagctggggcccctcggctaccccccgtctcctgccgggcaggtcccaggttggaggccctaggcgcggttcaggtcagggctatggatggggcccaggggctttggtggcccctccccaactccttcctctttgcttgggttcctttttcacgtttagtaactgttttttttttttttttttttttttttttggaaagcacaaacttctgtaacgggtcgtgctcatgtctgttaataaagaaatccagatcccttcgggctgccgcctg

SEQ ID NO: 4578 - DNA, 2174 bp, Homo sapiens
tccttccagatgggcattggtccctgggctgtacaggcagcccaagaattgtggacactcccagccatgccagagagggaagggccatcttctctttaacctttaagatttggggatgtcagagaattaggatatttgagcatgagttttggagccagactcactagggttcaaccactcgctagcttttaaccttgggcaactcatttaacttcttgaaatctgtttcttcatcttaaaaaatgggaataagaacacctcgtttgcagagctgttacaaggactaaattttaattatgtctaaaaagtgcctaacccagtgcctggcacgtaataagtggcattactaatattgttactattattttgaaggagagcctttcccctcctgggaaaccctgtttctgtctgttggacaggtcccccccgcctccagccagcctgtgcagacttgctgcctgctgtgtcaccgggaacgcaaaggctgggaagaaggcccttctcaaaatggactggtgttgcagggtgagaagctgccccctgacttcatgccaaagctcgtcaagaatctcctaggcgagatgcctctgtgggtctgccagagttgccgaaagagcatggaggaagatgaaaggcagacaggtcgagaacatgcagtggcggtaggtaaccgctgacaggggtccctgaatgcaggagggctcctccccaaggaagtcaggctgttccctgtcctcaggtggctctccttgggcagctcccatgcccaggcactgagagacttctgggctgcactggcacagcattggcagctcaagttcagatttgggggaagaagagaaacttctggcagcccaccggtcagtccctcagggtggtctgtgcacaggatgagggcccactcataggtactggtagatcacgagcctgctgccttcggctctgtggcagcttgaaagccaaccagtatgacatgggagacagagatgagtttgagggtctgaaatgtgccctagttagaaggacagacacttgggagtcatctaagtctgctgtttcatgaatcacgatggccagactttcctcatttctcacgtcgctgcagatcttcccttttacccaggaacagtttagcttcaggactcctggtcaaaaggcccttcctgtcattggccgctctctactccccaaaggcccgcagttcacaggcagtctctgcccctaccagagtctctctccccagtctccacacattgcatgtaagtgggaccaccgcagccctttcccagcaaaggcctggccctcatttgttcttatagctggagttgtattaattgtgtttttgctatggcacatggtctggaggagaaggagctccctcaggaaaagctgaggcagcagagggtcagctccgatgtttgctgtttgaccgtgagcctttttcctcccccttctccagatctccttgtcacacacatcctgcaaatcacagtcttgtggagatgactctcattcgtcctcgtcttcctcctcatcatcctcatcctcgtcctcctcttcctgccctgggaactcgggagactgggatcctagctcgttcctgtcggcacataagctctcgggcctctggaattccccacattccagtggggccatgccaggcagctctcttgggagtcctcctaccatccccggtgagtctccaggctcgggagagagccaggccctataaatgtggacagctgtgttttcctatccactttgttcaaacaaatcataagactggttactaaaataagtaaaagtggaactgttctggtggaagcaggggcagcttagaccttgactatttctggaactcctttccccacaactctgaacttgaaaaatactgctaatagaaaaacgtttgcctctcaaagttgtcattggctctggtagttcacattggatcaagagggcatccggtgaggtctgtctgagtagaaagtggagtcataggacttagatcacctgacccctgcagcaccacagaggacctgggcaaccttgtcttcctaggccttgatttccccacctaagggatgggtataaaagcactgaatttaaatgcccaagagattggcagtgtaagccgtaatagttattagctaatttagcagctgtgtaagtct

SEQ ID NO: 4579 - DNA, 1300 bp, Homo sapiens
atgtctgtctctgctacttagctatataatcttaaggtagataacctaacccctctgaactctagtttcctcatctgtatgatggattgataatgcctaccttatcaggtcattgtgaaaattaaagatacgtgaaaatactcagcatgttcttagcacatagattctcttacatttgcttcacttcttaaaatgtagcttttgttgtaggttatcctgtgtatttgaccttccaaacaaaggttgcttttgactttgtgacttaaggttggaatatctcctactactcccctgtcctccttggaccagaaaaaaaaaaaaatcccactatgatcctagtcatgcttatgtggcatttggagaatttaagaaggtatagaaattgacagctttggcaatattattgcttatgttatacaagatgtgtaacttatcagtaaggtgaaatggcaaagtaatgcttatccttaaaagctaagacttaaatcgtctcagataaagctaatactcccatcttgacctcttctattcacacaatccttcaacaggacttcattgacttaactagagagatcagaccaaggacaaaagatcgcagtggactgtgtgattgacctgacaagagctgagggagaaaatagacctattgccactcttgacttaactttagaacctgtcactccttcccagagggagccaaccagtcttcagacatgtgccagcctctctggcaaagcggtgatggaagggcaggtggacagaagctctcagcctacagcacggagactcattaacagtgatcctgtagatttggacctagtggaagaaaacacctttgtaggtcccccacccgctacatccatcagtggaggctctgtttatccaacagagcctaattgtagctcagccacattcacaggtaacctcagcttcttggcaagtctacagctgtcttcagatgttagctccctctccccaacaagcaataatagtagcagcagcagcagcaatcaaaaagtacccttgccatgcccacagcaagatgtgtctcgcccaccacaagccttgccttgcccactgagagcctcaccttgtccaccacgagccttgtcatgcccatcacaaaccatgcagtgcaaactaccagctctaactcaaccacctcaagaagtgccatgccctcggcagaatatcccaagcccacctcaagactcgttatggcatcctcaacactcaccaagcccacctcaagactctctgggcctacctcaagatgtgccaggcccgcctcaaagcatat

SEQ ID NO: 4580 - DNA, 1201 bp, Homo sapiens
gtccagcatccagccatgcagatccttcatgtaactgcatgtccctgtgacgcggagacactttcctgctcagtgacctgctcttgagttaacccacctgtgctcagaaccggctctgtcctccgctggcttgtgggctctctgtgcctgggggttctctgtaaaatgaggtaatagttgtatctatctcatgggattagtaggtggattaaaccagttaatacaggtaagtacttaatgaatgtgtccttcgttttgaacgtattgattggtttctctctattgttttctataggggacaaactatgggaggtacagtgtgagtctccgaccttcacagtggcatggcaccccaaaaggcctctgctggcatttgcctgtgatgacaaagacggcaaatatgacagcagccgggaagccggaactgtgaagctgtttgggcttcctaatgattcttgagaggaggttgtagggagaggaggccccggcagaggtcttccttcatgtggttagtttggtctgttctctcggagttggtgggcaccctaaatatttgtaagttggtataaattgtaaacgtctctggtcaggctgcgcatttcgttcttttgctttgtctgtgtattagctctttccattctttgcccccagcatgagttaactcgcgtggactctgcagtgcgagtagtgaccccagcataccttgtcctctggacctcctgtcttctctgcttctgggtgcatggtagactttgtggcatttgatacaacttggacaatacctagtttggagggaggggaatggaagggcatggaagtttttttaaataattaaaaaaatatatatataattttgagaattgagcatttaataaactgacttttgttattatggaacttctaagacttttaaaattattatgtccttgagttgcagttttgtatttttttttttttaatttcagaaagagaatttaaatgttataattctgtcatttaatgtcccaaccaagaagcctctgaaatatagggacaaagctaattgaatgaccgaactaaaattttgactctgagcttcctggtggcaaagtgaagaggggagtaagtcagttagctttcttattgaaaagaaaaacacttattggttcctcatggaaagcaaagctttattagttcttccctctaaaaaaaagggcttatg

SEQ ID NO: 4581 - DNA, 1178 bp, Homo sapiens
tttattgggtggacattttgtggcatgttcaagcttttgaattcagagagtgagagaatgagaaagaaaaggctggtctgggtcactcctgggaggcctggccctaagcaccgtgtggctcacgtgccctggagcccctgtgcaccggacatccctgactgccctgctgcaagctttatagctcccccatcacctttcccggaccagctggtacaatctcaaacttttcaccaattctgacatctaaacaactaacgccagagacaggctctgtgggaccagcagctgcgacctcacctccggtcactggaacactgagctgttaaatgaaaggtgcgtcctttttttttttttttttttttgagacagcgtctcgctctgtcacccaggctggagtacagtggcacgatctccgctcaccgcaacctctgcctcccaggttcaagcgattctcatgcctcagcctcctgagtagctgggattacaggtgcctctcatcacgcccagctaatgtttgtatttgttgtagagacagggtatcaccagactcctgggacctccgcctcccgggatggtctccatctcctgacctcgtgatccgcctgcctctgtctcccaaagtgctgggattacaggcctgagccaccgcgcccggccaggtgcgtccttctttctccctttccagggagaatgctctgctcttcttcctgctggatccctcctctacctgcttctctcccacctcctgcagcccccggagccccatggcgatgcaggcagactcatctgtaccctcattctgtttgcagagccacatctctgggctggctctgcccaaggacaccacaccttctccattcctcttgccctttccccgtggggtgcaggtggggctgggcccacgatggcatcaggcccactctctctaatgcaggaagggatcagatgccgggagccatggagattgtcctcatcccgatcatctcccatcttagcaaatgatgatgaagacagttttcccacaagataggcatagcctctgggacagtgcctcgtttattttctagcacaaaatagacgttagaacagtggggctttgtgggcatatggagatttttaaggctccttaggaggcaggtaaaaatttcttcaataagacaaaacactatccccaaaga

SEQ ID NO: 4582 - DNA, 1168 bp, Homo sapiens
tgcctggcacatggtgagctctcagtacatattcactgttattatccttggcctttgacaatcaagattaccaccagcccccttggctggtgaagtgaaaccagttgacagtcaccccccaccccacctttgtcatacaagcctcaaaaggccttccagcctgggcaacataatgagaccttgtctctaccaaaaaaaaacttaaaaattagccaggcatggtgactggtgtctatagccccacctgctcaggaggctgaggtgggaggaccacttgagcccaggagtgtgaggatgcagtgaatgccatgatcacaccatacactccagcctgggtgacagagtaaggccctgttaaaaaaaaaaaaaaaagtcctccttaaagacatgggctttctagacagggttcttctgctgaagcggctttccttctgccagaatctcaggaactcctggatctgcctttccagaaccagcttctctctccctgctctgccttcagactgccctctttctacctctccctctagaactacatctcttctggctgggtttatagcttggggctgggggaggcccagtgggactggctgagtggagccagccgtgtgacggaggcggccctcttccagttgggcactgccaccctctcgtggtccaagcagcacatgagcagaaccaggtgctcaacaccaacagccggtacctgcatgacaacatcgtggactatgcgcagaggctgtcagagaccctgccggagcagctctgtgtgttctatttcctgaattctgggtaagtggactgtggccagcccccgggaagagggtgagacggtaacaaagacagtcactcacatgggcccagtgtagtgtagctgaccgagtgtggactcggagaggcagcccccactgcaccaggctcctgagattcccggctgtaggccctgatgctttctctgttggatccagtttccttgtctcttattgaaggatgttattacctcctttctaggatcattgctggagcttagtgaggtaatatgttcctttatttctgccttaaggatacagccaaaatccctgcctgtgggttgctcagtaaggaaggaaaacatcaagtgattcttcaaagaaatacagaattgcaaggagggctctggaggaagtgt

SEQ ID NO: 4583 - DNA, 1169 bp, Homo sapiens
ccttatttaggttgcgcaggcgcccgctggccatttcgtcttagccacgcagaagtcgcgtgtctaggtgagtcgcggtgggtcctcgcttgcagttcagcgaccacggtgggtaccgtttttgcgaggattgtttgtccccatatctctgggagggccacggggaccttggcgagctgcaggctgccgtcgagagccgcgagtggttcgctgaatctcggcaccgccgctgaggcctgcaggccgcgccgactctattgtgtgagaagtcggaggaggcggagcggaagcggccgccgccatttcctttcctctacgctggctctcggcccgggcccccacggttcggggcgccgacagctgttgctcaggacagctttgggggtccggtcgccggacgaggaggtgttggagtcgccggggtgggtgcatccgcccggtttttgctccgtgggggggcggtgcgggcccgggcgcgcctcggaggcgaaggacagcttaattggcgctctcagttctggtcctccccgctttgcagtttgtttcgacgccggaccgcgtaagagacgatgatgttgggcacggaaggtggagagggattcgtggtgaaggtccggggcttgccctggtcttgctcggccgatgaagtgcagaggtttttttctggtgagttagaactaggacgcgggagttcgagttcgaggccggggcgggcgggctggcgggcggccgggctggggcggggcggggcggggcgggccgggccgggccgggccgggtgggacccggggcgccccctggcgaggcgcgggcgactacactcaccgctgtgctgctcgcgcccggcggcccgctgttacgcaatggaaatttcgaaagccccgcccgtcctcctggcccttgggggagtgcggcaggtttggcagactttgttttctttacctatctttgaacaccagcttttcttttatgggtgtctttttttctttttcttttgagttggagtctctgtcacccaagctggagtgcagtggcgcgttctcggctcactgcaacctccgcctcctgggttcaagcgattctcctgcctcagtctcccgagtgtctgggactagaggcgcgcaccgccacgcccggctaatttttgtatttttagtagagacggggtt

SEQ ID NO: 4584 - DNA, 1225 bp, Homo sapiens
tctcctgactcagcctcccaagtagctgagactacaggcgcccgctatcgctcccagctaatttttgtatttttagtagagaagagtttcgccatgttggccaggctggttgtgaactcctgacctagtgagccacctgcctcggcctcccaaagtgctgggattacaggcgtgagccacggcgcccggccatctctgttatttcattgtaatgttttaacgggtaccccctgtaaattagtgtatgaaagggcttttgtctgttgtaaagcactttacaaatgcaaaagtttgttggaaattgtatttgaatgccccacatctgtgtaaccaatcctctctatatgaggatgttgtgtatgtttcagttttattttgaaattttccagaaatggaatcttttaactgattttagggaaaccctttaatctctctaggctgcctttctttatctatgaaatgaaatagtaagttctttttagctctgcgatttaaaagctttaattttaaatgagagagtggttagtgatcttcatgaagtttgataggtggcaatacatttaactgattttgctctttatgtgtagatcatggaagggaagtggttgctgtgtatgttactggtgcttggaactgctattgttgaggctcatgatggacatgatgatgatgtgattgatattgaggatgaccttgacgatgtcattgaagaggtagaagactcaaaaccagataccactgctcctccttcatctcccaaggtttgaaatggtctttgaatctattccttttacgtcttgagatgataaaattatgaagatacccgggtgcagggaaatgtagtctcaactactcaggaggcctaggacaggagtgtgagtccagccttggcaacacagggagatatcatctctaataaaatataaaagaaaaacatggtgaagataaatttggaacgttttcaaagggaaagcaaaattcgtgaaaatacttattgatctctctggcagcctttgtcttgctagaggccaattatatgggttgaatttgaaggccagctatgaaatttttgtgacagttgaaagcaaaccaggagaatagattctagataaaaaggcatgttgctgaaaatttaaatttttaattcatttatgtatttaacacaggttacttacaaagctccagttccaacaggggaagtatattttgctgattcttttgacag

SEQ ID NO: 4585 - DNA, 2099 bp, Homo sapiens
acattcagaaaacttcaagacatcaccatcagcaggctccagttgaacactagtctgtgtaactttaaacatctagcagtaaatacttgcagttgtgatataaaggaccctgtttctgtagaaaagaaaacatttaacataatggttgtgaaatgtaacatgaagcaaactaacttttttttttttaacatctttgtttttaaaatagaatgatagaactttgccagtctttaagatcttggcttaatttaatgtattaatctgtttgtgcaaacataataccaccatttaaaaatgttagggagatgagttgcagtttttataatagattttttttaaagtttggtattgtaaaacattcacacctctgtccctcaaaattgataattacgtttaaagtgcagtcatttgtggttagaatcttgttttgtttgcttccattattgagttcctcctaaggaaattgaggagagggactgaatagaagcccaaattcatataaaagttgcgtttaagttgtattaaaaatagatatataagaaaaaattctttcacttgatgtttgttagaccagaaagtgtgtgtgttctgtagctcagttcccagacagctttttaggtagtggaggaggtggcttcatgtggcacttgggcatttatattccacttgggagggtcaggctgtggccttctggagcaggtggcttgttaaggaatgctagcagggcatggcacgtgagctccggaatagatgtcttcatcacttcttccactgtgtgttgacactgttttccttacctatttcctcagatccccagctttctcctctgctatgcattttcttcacagtgcagcttgcagtccgttgctgaaaatgattataagccctgcataatgttaagctttattgtgattacgtgtatgtttcttctttcttttaagcagacccatacctttccagggtcaaagtacagaatagaatacattgatacaaagtacagaaaaatactttgatttttatccatttcttttactctgtgtaaagacttgagaagtctaattcacaggcaaaccaatacagaattgactgcagttgaacagactagaagtatttgtgggaggagtgacatgaagcatgagttatctgattttttttgtagctgctatatattttaagccttcatttgcaattcatgtaacagttgtgtcataaattacacaataaagcagtcctgttcaaatttttttttaacgtggcttgtagaatttttaaaaaagtgatcttaggtttgttttttcatgcgggatgcagatgggtgctatcagagcctctcccacaccactatagtgtaataatgttattattactctacactgaaacgtattcagagttagatattattttagcttcagttgttctttagaggctttcaaatgtaccgatgatactgtttcttgcactgaatatataaacactccacagtgtttatattgggaagatattgggaaggaaatatatttgtaaaagatgaaggctgtatctatttttttttctttttaaagtttgttcacttaaattcttttgaggatgggatgtatttttcttgctgttcagtgctttttccttttcatctgttgttctgtggtcacagtgaccttagctacatagcagactttcccaaatgtattgattacaaataaacagttgttacttagcaagacctgaaaatatgtctgcaggtttctccttgaagcaaatgtgtgggatcattgcatttccagaaatctgcctccttcaccctccgttgacagtatatgtcatgcctcactttcttctagctgagctttaaatcattagagcttaaattgtcagatcgttcattgcctttccagggttatttagtaaagtttgttgaaaacaaaaacgccttttcttggttcttttttcagttattttgaaggtccagcatcctgattaaatgtctgacacattaatgaatgaccagcagcagctttcagctcttaaaaagacacttatattttgattttacatgctggttacctgttccattgttgtcaaatgcccactctccatcagat

SEQ ID NO: 4586 - DNA, 1151 bp, Homo sapiens
caggggtctttgatgcactttgttctcttttgtgatggttgtcaggaagatcagagccaaagttgctgaagtcctttgaaacatagttataagtgaaagacttaccgttagctttgtagtctagatttttggattctgattttattaatgttactgtgtcctgtgaatcacctcaccctttgggacaaagatggggatgtttgcttgactttgagtaaataacatatttactcaaggaggtgatcaatattcacagtgtactgagcctgagcctctgtggggttgctgagcaccagggtcacagatgagggggagatggcacgggagagtggagatgctctctgtgcagggccagggggtgcagagtgggaggaaggagagggggatgctgagtgggtcactggacaagatgtccgggttaaaggtcacccgggaacacagggaccttggcaagaaggtgacaggactgtgacaggtatccaaggcattaaagatatctttatcttatctttgtaaaaatcaaagcttctggtccatcggaggatccgagtgtgaatttcctgaagaacgttggggagagtgtggcagctgcccttagccctctgggtgagtgcacctccttgcccagtgcttccctaactcagcctgcactttatgtaactttcacctggaatactgcaaaggaatgggtaattgacatgcccttgacactggtgaggatttgttgcctcaaatcaacctttagtagtgctggaccacgggcaactcaaggttgaattccctgacaaaattctcgagctttctacatggagtgaagtcgaatcagctggcatttggttgggataatcccagtgagggagggtgaccagactgtggttgcaggtcttgcctgtcacctctgactgccctcctttggatgaacaatagtctgcaatttcccctaagccaggccttgggatttggacttttgaggacctgggtagtagttagttgacatgctatttatcttttccttcttttagtttacaacccccaaacctttctggtgcttctgagtgctgggcctgcctcagagcggggagaaggtggaggcaggtgctctgggtgacacccggttctggtgcctcaggttgcacagtgggtctgtgggg

SEQ ID NO: 4587 - DNA, 1132 bp, Homo sapiens
ttcacaggggacccggtacttggccatggaggctggggtgggcgtgtggccctgaaaagctttgtgttcacaggcacttcttgtttctggttttttgtttgtttgtttgtttgttttaagctataaagtattggactctttggcactaaaaccccagattgctacaaaccgaaggctaaaatagaggtcagcaatcattcatattgtgtaaaatgtcacccttagctagcaatttatttttccatatttgtgtgtttagtgcactgttagaattccttttcctcacttttgttttgttcatggcacttcataattttatcatttcattttattttcagttgatatctggtcagtgggttgcatcatgggagagctggtgaaaggttgtgtgatattccaaggcactgaccgtatccttccccgcgaccttggccccgccatgctttcttaatgcctcaggcagcatgaccacctgcttacacgagcgctcacgaggacaaagtcgtaaaatccactccagactgtgttctaaggggggctttactgtatttgttaattagtgtcacaagccaagtggttcaatttcattctttatttttaacttgactacctgtgatgactttgagacttagagttcagttaaaccgattatattagctcttaattttgccaaaaatagctggacacatagaagaaattatttactctttgataagtatattctgatatttaaatgaaaatactgtattatttagtttattccgttaatttaactaggaaagatgctatctaaatttaataggctagtgtgcttgtgtgctttaattaagtactattttgttagttactggtatgcattgaaatattttcccccaaagtaagaactgaagcacattacaaaggacctaagtgaaagagattaaaatgaaaattttgtgaggaacaatatgttaaactttcttgtttgttactgtgctgacattttgtagaattttttttaaaaatctgtctagtgggttattttgtgacacactggggaagtcaaaataaatgtaaaatgaaagagataaactcatactgtagtcagcaagtcatgttagagatacagcagaaaggagaataactactctaa

SEQ ID NO: 4588 - DNA, 1157 bp, Homo sapiens
attttttaaaaaaaacttgtagagaccaggtcttgctatgttgctcaggctggtcccaaacttctaggctccagcgatcttcctgtgtcagcctcccacagtgctggtattacaggcgtgagccaccgtgcccagcaccagtcatatctcttaagaacaatggttttggaggagttggggtgggaagccagactctcctgctggcatattctgactgcttcttcaggaggtccggcaggtgatcacatggagctcagatgaactggtttatctgcctccattcaggggtagacagggactgacgtgattctgcacttaagtgatgaaagtaatggtaatctaaacatatcatggtttactgtcagaccctttctgtcaggagaaagtaagaagtttagctttctgacaagtgcatgatgagcaggagaggagagactgagatgttcgagcacatttcaaaaagtggaagcatcaatctagattgggctggagtccagcgaagccagtaactgggtcactctcagctttttggccaacagccttttctcgttgcctcattttcttcttaccacagatagctccttctcaagaacctcatgctgtaggatgtgaaacagcttcagatgctcttctcctttgacacgttcagataaccatgacgtgaccatcccattgacattagtgataggatcaattcgtgctgaaatgcaagtgatactcagcagaattcattagggtgacggtgggatagtgttgagttgaattaagaacttagatgataggaagtttgagggaagtatattgggaattttatcagtgagatggggctagattctcctctgccgtatttatttataatatgcccagttctagatcaaaataacaagtggaataatgctttggaaatcttttctcttccaaacacatagcaacaatgtataaataaaagatatagagacacaactttagtataaagtaaatatatctggaacagaaacggaagagaaacaaaaacagtgagtgagaccatatctgattttgtcctgcacttgttttgcccatgtatggactggtcattataagattagtttctgaagggaaaatgtctctaaatactgtaaatgaaaaagtgtctgagacatgtctcaatcaattta

SEQ ID NO: 4589 - DNA, 1255 bp, Homo sapiens
gcccagaactgagcccggcggggccgtgcacggcgaggctgctcggggtccctgcgcggactggacggcgggcaggagccccgggccggggcggatccgggcagagcgggcgccaagctccaggggacggggctggggaccgcaggacggacggaccccgcgggccgcggcctccccggagtcgcgccctgtgcgctgctgcctgtggagtgcggcgcggcggctgcaggactaggcggccccgagcggaccgggtctgccctggtttatttatttttatctttctttaaagagtgcagaaggcttcccctcctctcacgccgcctccccaaagagggccaatgtgggtgactttctgagtggcccccaaagcaaatcccgagacctgcgcttcgcgaaccttctctgccggggcgctggtggagccgtttcccagccggggcctctggcccagcgaatcctgctggaaggcggtggttctgcgatgccctgtggattcgcctcgacgccttgttggcccggggaccctggggatgttttataaggaaggaaaagatgtaggtgaagcccagaaggagggtagcgtggccgagcggtctaaggcgctggattaaggctccagtctcttcggaggcgtgggttcgaatcccaccgctgccagcttgttgtgattcctccatttttgtcccttcatgggttacaaaaggaggaagtcgccttgggccccacgctttcccggcatcgggaattccatttggcattgtgcatccatccactggacgggctttgtggggagttcgtcatgctggtgtcaacagcaagtgaggtgggttccgttcttcccagatgccaatgattgcggcggaaaggcaacggtataaatacccttgatagccttttctccttaagtgggtggagatattggtgggatgttctaggctagtcttcggtgtaataaatttgaagcagttaagtgaaaagtagaaggaactgtttccgcccggtttcgaaccggggacctttcgcgtgtgaggcgaacgtgataaccactacactacggaaaccggcttgatgcttttctgccatcataattagtcacgacacacggcggtattttatttctcataagagttctgagcttcttccgtgggtccctttgagcttggtaatgggtatgagcgcacaagaatacagagtccagtgcaaccatttaaaaggggagggttgcagagtcagagagtagctcagagacaca

SEQ ID NO: 4590 - DNA, 1230 bp, Homo sapiens
gcgggtggatcacgaggtcaggagtttgaggccagcctgactaacatggagaagccccgtctctactaaaaatacaaaaattagccgggagtggtggcacacgcctgtaatcccagctactcaggaggctgaggcaggagaagtgcttgaatccaggaggcagaggttgcagtgaaccgagattgcgccacgacactccagcctgggcgacagagccgcagttcgtggtgaaaggtaggcccattttttgagagtcttctctgtcaaaaaaaaaaaaaaaaaaaaaatccacacggtgagagctccagtggcgtcagggtgcacgtttctccatctccgtgccgtgagcttcatcgcgggtagaaaatggcttggtcgctggtagggtagaaggggcaggaaacggacgtaagtgggagggacggtcaggcactgacggcagagtttgaatttcccaggagccgaggcactttagtagttttatcacactccaaataaatccaagttcaaacccgcagttgaatacactccgactctgatctagaatgaaaaattgttgagatacggtcatcgggcgcccggctagctcagtcggtagagcatgagactcttaatctcagggtcgtgggttcgagccccacgttgggcggcaactggtcgttttagtcctaaatctacgactactagccatacctaaaaatatattataagtagaccagctcttaggaaaataatctgctctgaagtcttgcatttctgtgtgtgtaatactcttgcgggcgctccactgttcattatctacccattatcttgcgatacaattaggatttaaagctgtggtaaaatatgcccaacaaaatttaacactttttaactgtacagttctgtagcattaaatacatttaaatggttgtgcatcagtctccagtcctttttcctgtttcccagatgaaactctgaacccattcagcattaactctccattcccctctgcccacagacgctggcaaccaccattctactttctgtgtctttgaatttgactcctctagatacctcatataagatgaatcgtgcaatatttcctttttaaattgtcttatttcacttaatgtcttcaagattcatccttatatttcctttttaaattgtcttatttcacttaatgtcttcaagattcatccttattgtagcatgtgtcaaaatttccttccttttaaagctgattag

SEQ ID NO: 4591 - DNA, 1136 bp, Homo sapiens
attcgagacggagtctcgctgtgtcgcccaggctggagtgcagtggcgcgatctcggctcactgcaagctccgcatgccgggttcacgccattctcctgcctcagcctcccgagtggactacaggcggccgccaccacgcccggataatttttttgtatttttagtagagacgggggtttcaccattttagccaggatggtctcgatctcctgacctcgtgatccgccagcctcggcctcccaaagtgctgggattacaggcgtgaaccaccgcgcccggccttgttttgcttttaattgctggaagtgactggggtacccttagaggtcacgctttacagtttgacaaacggcattacgcagggccacaaggagactggtgttctggggaagaatggatctaagggccatgactccatgggtgaagccgacacctggatgttgactataacacttataaaagtcatagagtaacctctccgcatctgtttccgtagtgtagtggttatcacgttcgcctaacacgcgaaaggtccccggttcgaaaccgggcggaaacaagactgtgttttccttccagttcaaaaaggtttcttagtgtggagtctatgtgtataaacgttcacaagttttgctacacttagacaccggccggattttccaatccattgccaattaacttcaacctgcgtattccatgtctacgtctgtaatatgagggtgagaagtaagtggtcttactggtcattattagggtcttcctgcaaagtcccggcggatcaaatacagtcagccgccggggaatgccacggaatgacagatgaacgattaaaaagtgcaagaaggctcgggttggaaatccttggtggaagttcacgccgtggaaggtgtgcaccggcgggccaatagtgatgccggtaactacaacgtgtaccacacatcaagtagtctgcaggtgtggccctgggcttcctgcagaggaacctaaccattctgggaggttgtttacagatgaggccactgaggcatggacaggtcacacaaggctgcggaacacgtaggacggagcaaaaggacagggaacggaaaagaaacagggcacagagaaattcaagtgaaatacaggctggttcagg

SEQ ID NO: 4592 - DNA, 1099 bp, Homo sapiens
gtttttgaaaggtgctgccagccatcatcctactgaggggtagggctgggaggtctagcatttcatgggataggactgtttgccctaatttcctttccatcttctgtaggatgagagccactcagagtgggtgtcttgtgtccgcttctcgcccaacagcagcaaccctatcatcgtctcctgtggctgggacaagctggtcaaggtgagcgtcaagccaaggcaggggctttaccagtcagggtgtgctcccaggtggtcatacactccaagtcctgtggaaagctttgcagatgccctcagttgactctttctcttgtcacatggtctgatgtcccttgtaagtcagcacactgcattggatatgtgttataatctaacgtgaagtggccaggacatgttactgaatgagaaatggctaccgtatccagaagtgccaagcccttttttgttgggcctgaccctagctcatcaagagctaggatgttcacctgtcaaccgcacgtctatgcaggtatggaacctggctaactgcaagctgaagaccaaccacattggccacacaggctatctgaacacggtgactgtctctccagatggatccctctgtgcttctggaggcaaggtatttggggacaaggcgtctcctactcagtggaagacagcgtcatggaaggagcacttagccagcgtctctaacgtaaaatggcaaacattagccaagatggttttaggaggataatgagataatggcaatctgagaatatgtttccaaagattactttcagcaaatgacagttaaggcatactatctggaagaaaaagatgattttctataagcctgtgggttttttttgttgtttttttgtttgtttgttttttgttttttttttgagacggagtctcactcggctgccaaggctggagtgcagtggcgcgatctcggctcactgcaaccatctcccgggttcaagcaattctcccatctcagcctcccgagtagctaggattacaggcacccgccatcactcctgggtaatttttgtatgttagtagagaggattttaccatgttggccaggctggtcttgaactcctga

SEQ ID NO: 4593 - DNA, 1451 bp, Homo sapiens
ttgttgttaacccactcatgaccttgacacttagtgaattatccagtgtgttaaacgggctgcgggttcctcactgatttttcttctgttttacctcctttagataagaccatcatcatgtggaaactgaccagggatgagaccaactatggaattccacagcgtgctctgcggggtcactcccactttgttagtgatgtggttatctcctcagatggccagtttgccctctcaggctcctgggatggaaccctgcgcctctgggatctcacaacgcaagtagctgctcacttagctctggggccttgggaagaatctgggcagaagtgaggtggatgcaattggctggtttcccaggggagatccagtccatttgggaactggaaagcagagcacacctacagaagatgtttggcctccctcactttaaataagttactcagcattgctgaggagtgtggctgaacatttttgccaggtgcaaaagttctgagtgggcagcagtttgaacatgttttaccttgaaagctcaggtaattggcaggtggaattagagggtcctggtgatgacagatggcattgtcagccaatccccaagtgggagtgaggacatgtcctgcaattctgaagggattctctgtcacttggctcttctctttcatatactcagtcacttgactctgtgatcagagccaaatccagggttgtatgagtgatgcaatgagacagagacaaagcccaggaaatgagtctgaccgttgaatgagagtgtttgctaagtctgagaatgacaaactcctccctctcaggggcaccaccacgaggcgatttgtgggccataccaaggatgtgctgagtgtggccttctcctctgacaaccggcagattgtctctggatctcgagataaaaccatcaagctatggaataccctgggtgtgtgcaaatacactgtccaggtaaagtgagccatctccaaggatctcttccaccctcttaaactttgctttttttttttttttttggcgacagtctcactcttgcccaagctggagtgcagtggcgcagtctcggctcactgcaacctctgcctcccgggctcaagggattctggtgcctcagtctcccgagtagctggtactacaggtgcgcagccaccacgcctagctaattttttgtgttttagtagagacagggtttcaccatgttgcccagggtggtctcaaactcctgggctcaggcgatttgcctgcctcgccctcccaaagtgttgggattacaggcgtgagcccccacctgcctatctttgcctttttttttttttttctcggagacagtttcgcttgttccccaggctgaagtacaatggcgtgatctcggctgaccacaacctccgcctcctgggttcaagcagttctcctgcctcagcctcccaagtagctgggattagagg

SEQ ID NO: 4594 - DNA, 1451 bp, Homo sapiens; identical to SEQ ID NO: 4593

SEQ ID NO: 4595 - DNA, 1705 bp, Homo sapiens
tgccttagtccagcctggactaagtccttccggagttggtgtgcatcagaacaaaaacctcgtgaggggagaacaccctccggaagcacagttttaaagtttatttttaacattttaatactctactttttaaattgcccatcgttacccacgatagtgaaatgaaaattaagctcccctggggttgccccgtcaaccctccccgcaccaagtggaacaggcggagctcgagctatgccacataggggcggggaagcagcccggcggtcctcatgggaatgtgccgtacacttcacctctttcgcttctcgctctacatcatccctgagaagcctttttaaacacttgaatgtgcttgtttcagagtgtatttgtaaagtgcagtcagattttgttgtacggaagacgggactgtgatgccttgcaatttccctctgccttttgcattacatggcgccgccatcttgagcagaaatgtatcatggggctcgccattttgcatggtcgagcgggtatttccggttccggcggggggcttttctctctctctttcactgcaaggcggcggcaggagaggttgtggtgctagtttctctaagccatccagtgccatcctcgtcgctgcagcgacacacgctctcgccgccgccatgactgagcagatgacccttcgtggcaccctcaagggccacaacggctgggtaacccagatcgctactaccccgcagttcccggacatgatcctctccgcctctcgaggtacggactaaggtagatttcaggacccgagattgcagggctgggggattccgcgtgtcgtgtagggaattccgcgtgtggtgtggcaggccggtggcgcgcgagttggcggggactgacagacttctctgccccattgtgaattggggcgtgcggacccgagcctaggcctcaacccgggcgaaccacattgcagatgagaacctacgtgtacatcagctcgcagctgctaggagggttggagagttggaaacttttaaaatatcttttgccttctccttcgtagtgtggccgggggcctacgggccgggcggggcggtgatgaccccaacatgccatctgagtgtcggtgctgaaatccagaggctgtttctgagctgccgcccggcccaaggctcgtggggaggcaggtggactccagaggacctcgtggctcaagtgtcggcctactttttctgcccctggttctccccgtccctatccctgtgttcctgactgcgtttagacgcttcttgtgcttccgctttgctgctacactgttaagaattgtctgacttttgaatcatgtctggctgttaatcgtaaaatttgttgagtgggacaggtttcagtaaaagcatccaatcctgtagcgcctgaagtggcttttccagcattcattactacatttctgtcggccctcagaggtaggcataggaggccccagctactctacagccacaaactgctgtgcatttggttgcagagaagacacaaagtggctgttgagttcgtctgagtttcaggaaagggtgtctgtatttctggcacctaaattaagttctcaggatacaggctgggcgcggtggctcacgcctataatcccagcactttggaaggcagaggcgagtggatcacttgagatcaggagttagagactagcctggccaatggtgaaaccgcatct

SEQ ID NO: 4596 - DNA, 1705 bp, Homo sapiens; identical to SEQ ID NO: 4595

SEQ ID NO: 4597 - DNA, 1283 bp, Homo sapiens
tttttggggaccgggaaaaacaaagttgcctgattccgcgcaggtgcacaggccccggatgtacacccggaaaggggagtgtggctgtagaatcatccatccgtctacagctaaaacaatttgccaataaagtacatgtttttcctaagccaaaaataaatacgttaacagaaaaatgatttaggatatagcttgaatgcttaaatatgtgcacctttacaaacctctcagtgtattcttggagttcttgaaatgttgttttaatatttgttgccagtaatgttctttcttcacagccgctccgggaattctgaagttctgggcctttctcagaagactgtaatgtacctgaagtttctgaaatattgcaaacccacagagtttaggctggtgctgccaaaaagaaaagcaacatagagtttaagtatccagtagtgatttgtaaacttgtttttcatttgaagctgaatatatacgtagtcatgtttatgttgagaactaaggatattctttagcaagagaaaatattttccccttatccccactgctgtggaggtttctgtacctcgcttggatgcctgtaaggatcccgggagccttgccgcactgccttgtgggtggcttggcgctcgtgattgcttcctgtgaacgcctcccaaggacgagcccagtgtagttgtgtggcgtgaactctgcccgtgtgttctcaaattccccagcttgggaaatagcccttggtgtgggttttatctctggtttgtgttctccgtggtggaattgaccgaaagctctatgttttcgttaataaagggcaacttagccaagtttaaggtcgcgtgcgatgcattcttccctagccaaggggcagtcaccacgcgcccttctgcctgtgagggattccaaggcaagactgaagcctactcctggttttattttagaggctattgtttgcctccagaaggcgctatagcagatgctacaaaaggtgaattcatgtctccaagaaagaaaaataggccatgagtgtgaggcgaaggaaatgtggacatgagagttagttctgttttgcctgcacggtgggagcggcgtattcggcacctggaacgagttgtgtttgcccaggagcatgcagccagccgcgccgtgtgcatctgccgcacagcattgaacacagctactctcattccatcttcagcttttaatctgagggaacgtcacctgaattgacgagaaatttaagtcaatttgtaaaattttccttctctgatctggtggaggaaaag

SEQ ID NO: 4598 - DNA, 1230 bp, Homo sapiens
aaacaacaagtaatttgtagtatagatatatttatcactaaactaatgttgcatgggatatacttctactaaaacattgttttgagaggtgacagcgtgctggcagccctcacagccctcgctcgctctgggcacctcctcggccttggcacccactctggctgtgcttgaggagcccttcagcccaccgctgcactgtgggagcccctttctaggctggccaaggccggagccggctccctcagcttgtggggaggtgtggagggagaggcgctggtgggaacccgggctgcgtgcggcacttgcgggccagcgcgagttctgggtgggcgtgggctcagcgggccggcactcggagcggccagccaacccgccggccctgggcagtgaggggcttagcacctgggccagcagctgctgtgctcaatttctccccgggccttagctgccttcccgcggggcagggctggggacctgcagcctgcagtgcctgagccaaccccccccgccatgggcttccgtgcgcccgagcctccccgacgagcgctgccccctgcttcacggcccccagtcccatcgaccacccaagggctgaggagtgtgggcgcatggctcgggactggcaggcggctccacctgcggccccggtcgggatccactgggtgaagccagctgggttcctgagtctggtggggacttggagaacctttatgtctagcccagggattataaatacaccaatcggcacactgtatctagctcaaggtttgtaaacacaccagtccgcaccctgtgtctagctcagggtttgtgaatgcaccaatcgacactctgtatctagctactctggtggggacttggagaacctttgtgtccaaaatctgtgtctagctaatctcgtggggaggtggagaacttttgtgtccagctcagggattgtaaacgcaccaatcagcaccctgtcaaaatggaccgatcagctctctgtaaaatggaccaatcggctctctgtaaaatggaccaatcatcagcaggatgtgggtgggggccagataagagaataaacgcagcctgcccgagctggcagtggtagtttgctccggtttctttccacactgtggaagttttatttttttgctctttggggtaaatctggctgctgtttatactttgggtccacactgcctctatgagctgtaactctcgccgcgaaggtctctagcttcactc

SEQ ID NO: 4599 - DNA, 1242 bp, Homo sapiens
aaatgcgcctgccctgtggatgccacttgtagtgtggctggtttacattgttctggttgcagattatgaaaaattattgacttgctgaaggcggtgaaaggtgggaggggacggtagggatggaagagggaatttgaatatttgaccaggttaatgtgaagaacagagataaacccttacattaacccctcgctcggagcacctagggctgcagattaaaatcccatgggcctgccagtcaaaggcaaggccccaagctactctctcacactggcctcccacagcaatgagacagtggcttggagggtgatgcatgctttatgtgttcctgagccggtgtgcagcgggagcacccggggagaaggaaagcccagaaatgggcaaaagatgttggttccctggacggtgaaatttcccaaataggccttttaaatgtgggtctcagaggttaaccaaacaaagacagtctcggcaggaccacaccggagaggattttagcctgacttaacccactgagaacagagtcttgttcaattttatgggaatttcaacaagtaaccaatacaggcggccttcccctcttatttttgtattcccttggaccggctgtcaatcacacacacacacacacacacacacacacacacacacacacacccctcggtgcactggccccttcccttccccgcctgcctgctcctctcccagcctgccagctgccctccctgctccccttcttctcctctcccggcagatccactcaacttgaacccggactctgaggcttagcagccttggagaaaccgtactctaggaagaaaaaaaagcacacaggaaagagactcctgacccttcctcaaggctgctctcgccccacctcataacactgggcgcaggcacaagctcccaaaacttcggaatctggatacattactgtcttggagggggtgaaaactgcccagcaaagcaagccggcctctgtgcccctacccagcggcctcccgcggccggccttccctgggagcctcgcagaacccccgaccgagtctgggaacgcccgggggagacaatagctcgggcctgacgcccgacagggaccctctgcccttccttcctcgctgtcttgctcccgtccctataggatacccacccggccctgttgccatctccctggagcgccagcggtggaggcttcggaggagccggccggatgcaccgggaccccgcggggcctagttggga

SEQ ID NO: 4600 - DNA, 1199 bp, Homo sapiens
caagctcctcctattccttgccctgtacatctcctcatctgcatcctttgtcatatactttgtcataccagtaaactggtaatcctgagtaagagattccctgagttccgtgagccactctttcagattaataaacctaagaagggggtcacgtgaagcccactttttggccagtcagaagcacaggtagaataacctggggcttgcaattggcatcagaagttggcgggggcacagtattggggactgagcccttgacctgtgggatctgatgctatctccaaggagacagtgtcagagttgaatggaattgaagggcacccagctggtgtgccctatagaattgattgcctgcttgtgggtgggaagaaatcccatgcatacttggtcacagaagtcttctctgttgattggtgttttgttagagcaggggaaaaacaatttgagtttgtccacactcagtatgataatgatctttatttcatagagtcagaaactgaggattggaaacattaataaactcgcccaaggccacatagctagtggctggttatggtagatattatgctcattcaactcccattccatactctctttggaaaaattagagtgctcaaagccacatgtcccagaccattttgcatctcatatataggaagcaaattgagctttgtcaattagatgcgttcctgctcaatctggcaggtggaagtgaaacagaagccatccttctgctttctggtccaactgacatgaggattaacggcagttagagtccaagtttgggtctagtcaccgttttcatgggcatgagagccacttgggttgggggagcagcatggcagcaggagtggttttctgaattctggccttcagctatggtggtaatgtcctgacatcaacaactgaaggccctccgagttctcttcctctgtctcataaatatttttttcaactaataattgtagattcaaatgtatttttaagaaatacagtgagtgacatggtcatgtcttcaaatactatagagcaatagcacaagcagcatattggcgttgatagaattcaccaatctcattcagatttcctcagtttttgtactcatttgtgcaagagtatgtgtatttacttgtgtaccgtttggtttggtttgttttgcctgagacaaggtctcactctgtcatccagactcacttgca

SEQ ID NO: 4601 - DNA, 1105 bp, Homo sapiens
ctgaatctaatcgtgctgcacagtcccttttgccatgtaaggggcattcacaggtcccagggattatgacccaggtatctttggagcacttgctcagccaaccccagctccaaatgtaaaggcatgcacagtggagagccgcttaattcagcatctcctcacagggcctccagtaggcacctccttccctctcccatctgctccaggaaatgtctgctccagcttctccccttccttgttccgtgggttcccactcactgctcaagtgagtcactgggactgtcttagaatgctggcattctctgactgggacatattcatttggtaaacatctgagaactgtgtcagagcaggcaggccccgcatccctgcattcctgcatcccctccttcccagcctgactgcctgtggggcccttagctgccccttgtcctctcacctgattctgcagattcttcttcttgagcagcagctcagaaagcgcatccgccctgcgtttcaagcccagctacttcttagcttcacttccgtcaacttcaccttccctgtagtgcagtggggcattgatggtaggtctctctaagggcttggtggactttaacatgtgattctgtgattccgacttgcctgaagataccccagctcccccctcccgactatccagctgcattcctgctctggaccctgctggggctgccacacccactgcacggcagggctagagagatgtgcagcctgaccctacccctgagcctgtctgtgaaggtggagatgggcatgcacccacagcccatgaggcaaggtggtgtcctgagtgtgctgtgagttcaggcgcaggaaggcctggcttgttgcagcaggatgtccccaagcgtggtccaaaattggggctttgccacctgcagggatttcctagaaggagatccaagggtcaggaggcatttgaaaggctttcacgcatctttgtatgtggcttgattgatccttttttaaggctcttgctacccagaaatgggattctctctctcattataaaaacatttggccatcttttcttgtgtaactgtcagtgaatgtatcattttgaatatttttcaaattaaaa

SEQ ID NO: 4602 - DNA, 1230 bp, Homo sapiens
gcaggggcgtccctcctctcagcacagcctccccgcgctggatttctatcaatccagtttccacctgcctggaagtcagcagggtcctccccagtcccagatcgccgggcgaggccccagatggacctcaggggcggggagtgggcggagcttaggggccgaggcgaggtgtgggtggggcgggacgccgctgtggaggcggggcctgggcgcggacgggcgcggagcgaggcaccgcaccgccggggcggggagtgggcggggctcgggggcggggcggggtgtgggcggggctcacgggcggggcgggtgagtgggcggggcctcggcgtggtaggcgcgctgcgtaaagaggcctgcagtcccgcggcgcggggcaggttccgggctgcttaggttggcaccggtccgtggtccccgggggcgcagtcgcagcgctcccgccctccaggcgtcagcgagtgcgcggtccagtgcggccggaacctggcgcaactcctagagcggtccttggggagacgcgggtcccagtcctgcggctcctactggggagtgcgctggtcggaaggtgagtgatcccctgtcggggaccgggggacttgggaaggacagttcccggactggacggccagaacgctctcagggatttcagctggccggccatatggccctgtgggtcgtcgcgcccgggccagggaccattctgtacataggatcgtgcttggctctcacggaacgcgcccacacgcagggtcccggtgtcgaatcgtctggtggaatctgccctcaaccctatggagcgggtgctggtatcatagtcatattacaagtaggaatcagcgggcccaaggtcagtctgtaaagggggtaccggggtttaggcccgtgcgctgcccagcgctgccctgaaggcgcggctgaaccactggtttgcgctgcctttgtcaaggacattgtggcactgtggaaaaaatgaaaaatcagcttctctaacctataatctctctgggaaaaaaaaaaatcagcttttttttttttccccgagacggagtctcactctgtcgcccaggctggagtgcagtggcacgatttcggctcactgcaacctccgcctcccgggttcaagcaattctcctgcctcagcctcccgagtacctgggattataggggcgtgccaccacgcctggctaattttttgtatgtttagtagagacgggtttcatgttggtc

SEQ ID NO: 4603 - DNA, 1264 bp, Homo sapiens
ccggggccgcatgtccatgaaggaggtggacgagcagatgctcaacgtgcagaacaagaacagcagctacttcgtggagtggatccccaacaacgtgaagacggccgtgtgcgacatcccgccccgcggcctgaagatgtcggccaccttcatcggcaacagcacggccatccaggagctgttcaagcgcatctccgagcagttcacggccatgttccggcgcaaggccttcctgcactggtacacgggcgagggcatggacgagatggagttcaccgaggccgagagcaacatgaacgacctggtgtccgagtaccagcagtaccaggacgccacggccgacgaacaaggggagttcgaggaggaggagggcgaggacgaggcgtagatgcccccgcgagacgggttagggaaagcggaggaggaaagcgagggggtggggggcttcccgggacgataacctggcagtggaaggaaagaagcatggtctactttaggtgtgcgctgggtctctggtgctcttcactgttgcctgtcactttttttttccttttttgtaatattgatgacatcaatgtaacatttgagatatttctgaattactgttgtaatggctaaaatcacataaacgtttgtgtcggaatggtgtcctctctttctcttcctttttctctttattaacgatttaaatgtaactttctgaacacattgcattgaattcttcctttaacaaaaagcaaaggcgtaggtaaaagctcaaatgaatttattctttcggtatggtaaaattgaaccaatcacagttaagatgagagatcaacctgagttttaaaatacctttaataaatattagttgaaaaaatgtctacttgaaagcacagtgtgtgtcttcatgtgcaattcctactatgcttttatctcctttacaaaaaaaaaaaaagcatttttggaatagttcctacatactcacagcacaaaattctgaagagtggaaagtgagtgtgtctttttcctgtgttccttgatgcagtttcctccctggagggaaaccatcctaatcacggttatctttcttacttccttgcagaaatactccatatattttcaaacccatgtaggatatttcctttttctctttcttcacacacatgatgtgatactaacacaattctgcagccttcttcactaaacagtgtatcttgaacctacagagagcttccctcctttaaatggatatgtagcgtccattatatagttgtgctat

SEQ ID NO: 4604 - DNA, 1123 bp, Homo sapiens
attccccttagcaaaaatcctcttaaaatattttctaacttaggaataagcgaatcgaatctaaaatttacttgagaaaatattctcaatatttatagaatgtaagttccttcttctgccatcctgtgccttctgtcttctttcccaaatgaaacattttttcattgcttcttgtgtgtatgtatttaagggctgctctctgttcggcaccaatgtttgacagtgattggctcttctcttaaatacagccagctccccaaggtcatcagtcaacgtcattatgttcagaagcagatagatgggcaattcaagagcgacctagggtctttcgacatttggccggctgctgagtatttaattacgtctcgacaaacatgggagagagccctcattgataagcttagcttgttaagagctggtctcattaatggtcatggtgataaattgtgctagtcttattgaaaaaaagatgtctaaaacgaggacattatgtctaaatgatgaggatgtgtgtgtgtgtgtgcgtgtgtgtgtgtatttgcaggggctggagatgtttccttcgttcttaaaggataaatctggtgtttaaaatccaaagatctgaattcaagtcctagatactataaaccatatgacctaaggcctatttggtaactaacctcttggggcctccctgttaaatgggattagcacttgtttacgaggcaagagtgtggttgggaatagatgtggaaatgcagtgtctctgtttgctgctgaagtggtccagaatatgccactggccataaggactgttgtgagctgacagcatttgagaaccagcagatgcaggacgcagctttgtcggaactcccccatctacctagaaacagagctttcccgaagaattcaactgtcataaatccccctttaagggagatttctcccagcagaggtgaagatgagaagttgatgcaggatgagaaattgcataaacacaccttactaaaacaaaccttctcttatattatttcccccgtgtatttctctgtcatttcccactatttcttgtctcttgaaatcctaaccccttccctgcattaggatggtatataaagccccaaattccaacctcttctct

SEQ ID NO: 4605 - DNA, 1155 bp, Homo sapiens
ctgcctgcagggatggtctccttttaaagcaggttgtgtgcagcattcagtacactgaaggtaagctaaaccatcaacatctctggtgttttaagatgttattttattggaacaactgacaaatgagggatgttagctttgtggcagaattccctgcatgtgtgataactgatcttgttttattttttggcattgcaactgtggcatagttacaatttctgtttgttcatcacatttaaaattggaagagaacgcgcttgatggatagagcgccttcagtgtactgtttcttattaactttactttttttaaatcaacttgctatagactttatatacattttgttaaatatagttcctagtgacatagaaacgatgcgtagttttcatttactaattacaaatgttgaggcctaattctgaaagtcctcatatttaaaggctagacaacgtaatgaaatttttaactatttgtatgtcattttgaaagtgtactgctttatggtaaaagtgtttttcatttgttcattgttttcattatttgtgatcatgttgtctttcaatacaggcataaaccttccactcttgaacaaagcagctgctttttaaaagcggtaattgcttctttaccttttatttcttttgtaaatgaagcttttctttaagaatgtgactttaaagtgttgtctattgcataaaacagttgacactcacttattgtaaagtgaagattgttctactgcatgtgaagtggaccatgcagatttctgtatgttctcagtatgcatcactagataataaagtcttttgtgaacaaggcatttgtagccatttttaaaagtttttgtcttcagtgctggtaagtcaggtaaaccataaatagttaaaagcaaccttttgtttttttcctgaaagtttttaattgaaagtattattagttaaagatgtaaacctagccaaaattaccagtttattaataattaggatcctaattatttcaaaaaatcctacaaatattgtcagctttcagtgtagtgagattattcctgtaggttatggggtataattcaggatttaactaatgtttctgctattttctcacttttccttttgatggtgcggaaagagaaaaaggaaaacggggcacaggccattc

SEQ ID NO: 4606 - DNA, 1280 bp, Homo sapiens
ctggaaatggactccaatccactatttgcatttatagatcacagggctaaaacaaagttagttttctcctcgcaaagaaaaaaaaaattccctgtaatattttagctgatgtgacaaatgagagaaacctggggacatgctgaagtttgaagctggtgctcactttcatcattgcctgagttttcccaagcagcttttgaagagtgaggaactaagttttcttagaagagtaaatgtctcacagaggggtcacccttataccttggatgttgaaactttgtacttctggaactaaagcagttaccacggtgctgggcattgggggtagggctaaggcgttctaacctcaggagggctaacagttcggggacactctttttatctttggcgaccccatttttttcaagcccaaaatgaggccaggtgatctggcaagttttgtgtttctaacattgtgacaaaccccagaatgatattgcatcacggaaaaaactcctaggcccaggcaactgggacccctgggctaggccccacactttggggggcccatctggccttttccagccacgtctacggccataccaccctgaacgcccccgatctcgtctgatctcggaagctaagcagggtcgggcctggttagtacttggatgggagaccgcctgggaataccgggtgctgtaggcttactttgtgtctgacccatgtttccctgagacaaaacaccaagctcacaccacactcacaccacaaaacaaagaacgggtaaaaaaggcacacacacactttttcagtttacaccaaaccagaatcaaaaccaaaatcagagtatccagaaatccaagccaggtcaaaaccaaaaccaaagtatcaagcaattcaagtcaagtcaaaaacaaaaaccaaagtgccagtacaggcacgccgtgggtgatcaggccacgcttccactcaaatggagtgggcaagttccaaagaccagtcttaccaagtttcagatgtccggactccaagtgccagttccttcccggtgttcagccactgcattgatcctccaccggggcctgccacgcgctgctctgacgaggtgtccaaccggggcaactgcctaccccggagcgctctcaggatccgcgtcactcaagctggccaaataactcttcggccagttctcccttgcacggcagcagcacagtgagaatgttcatcacagaatttattcagtctcagggcggtgtttctccaggtgtggacttcagaataccaccaggtcagaacca

SEQ ID NO: 4607 - DNA, 1711 bp, Homo sapiens
tctagactgttttattacaatcaagtatgatgttctctgttgacctttttagttttaattgagtgcttctgaatgatacttgtgatacagatcatatgtttctttgatggcagtttcacaccacagaaggttctcagcgccttgtagctcattgctgtcaccactccaggctgttgcctgggtgcccgctgctggaaccctgggatgaccaggcacagctgcagatgcctcgagctgctccagccatgagtgtggaaaccaactcggtggtcaggcttcaacacagaaatagcagagagcccctttcagtcacaagaaacataagtcacctaatgcatatccacacgttctcagcataaaaatttagcatcttgtttgacttactttcagggaaattgtccacaacccaaatggcctattactattttattgaggttgcagaagagatcattttatcatctattgtggtttttgctatttttgatgtttcctaatgaaacttgcacttttccccccaaattttgatttttttaaaactatttttttccttttatgaacaggttgaaaggattgttgacaaaaggaaaaataaaaaagggaagacagagtatttggttcggtggaaaggctatgacagcgaggacgacacttgggagccggaacagcacctcgtgaactgtgaggaatacatccacgacttcaacagacgccacacggagaagcagaaggagagcacattgaccagaacaaacaggacctctcccaacaatgctaggaaacaaatctccagatccaccaacagcaacttttctaagacctctcctaaggcactcgtgattgggaaagaccacgaatccaaaaacagccagctgtttgctgccagccagaagttcaggaagaacacagctccatctctctccagccggaagaacatggacctagcgaagtcaggtatcaagatcctcgtgcctaaaagccccgttaagagcaggaccgcagtggacggctttcagagcgagagccctgagaaactggaccccgtcgagcagggtcaggaggacacagtggcacccgaagtggcagcggaaaagccggtcggagctttattgggccccggtgccgagagggccaggatggggagcaggcccaggatacacccactagtgcctcaggtgcccggccctgtgactgcagccatggccacaggcttagctgttaacgggaaaggtgagtgtctagggagctgctcaggctccgtggtgatcccagagggctcgggtccttctctagagatcaggccttgagctgggcagagtccggggcttctcacggcatctgctggagccttgcagagatttcgccttctcctttcttcgctggaagcctttgatatttctcttaattcggcaactagttttttctgtgtaattcgccatccacagactgtgctaccacactgacttgctttaaacagtatctccctctaactaggttattaggtgataagtttttacagcaagtttctgaagctgtctacctttcttcacctctgaagtgctgagtcttgtctcgtgttaagcgttttcttctaagtgtggccagcattgatacagaagtgcaggttcttattttgctcatctgtgtgaatacccaggaatgcctttcagtgggagcgttgctaacccagcagagcctttgggagccgggctcg

SEQ ID NO: 4608 - DNA, 1178 bp, Homo sapiens
tcacaattgtatcaaatacacactcaaatcatgtaccacatctaccattatatgttctccctttaaaatgaaaaaaaggttatattccaaactggagataaggcaaagctgtaagtttgaatagaattgaattttgatccggcactgtctcttggcactcagtataaatcttcatacccccatctgactactgcctcaaggccacaatctctaaactcattcctaatccagttacatgggaggacaagcatggtcagacagcaaagaaaactccaaatacacacttgtaggggctatagtgggagaggggcaagcaaaacaagtacgccaagttctcccaacaaggtgtagaggaaaggacactggaccaggaatcaggacccaacttggggtccccagtcacccaccatctgtgtgatcgtggggaagctatttgctcttctttgtctgaattgattcctctataaaacaaggaggtctcattcaatgttttgggtggttatataaatgagtcaaaggtctctgctggcattactttccctaagtttctcagttgaaatttcctttcctttatccctgtgaggtctgctggaggtttcacatgtgggcaggcaaactgtgggatcccactacttcaacacaaggctttgataaaatgcctgggactatgaggataaagtagtattttccctcattcattcaatcagcagacacaaaactaccatacacgtacatcatatacaatacaatgtgctagacattttaggaaatgggtagaaaattgtaattttaaaaggtacagttcctacatgaaggcatgtaatgtttataatccaactggataacaaattgaagaaaactgcaatgacaaagatctagaacaaattgctaattaatcacagtatctttcccactgagcctaggtgtgacctcaaaatccttctccacacaagcactccattcagcacccaaaagactgtcctcaccaggtgaggtgaggtgctttgtgcagtccacaataggcactcttctgagcgcatgcccagctacttccagtgccctcccactactgctcctaccaagctcctttgacttccaccttcgcctccaaatcactaggtattcccaaaaagaagggagccactaagaacctagtcacactggctgaacactcttgt

SEQ ID NO: 4609 - DNA, 1186 bp, Homo sapiens
tggtgctaagtaatatgccattgtctggatgtaccccagtttatcccctcacctactgaaggatatcttgattgtttccaagttttagcaaatatgaataaagtggctctaaacatccgcgtgcaggtttttgtgtggaaaaggttttaactcgtttcataaataaggggtgtggctgctggaagttacgcaacttttactttaccttgatggctgtcaacctgggctgcccattgtaaccacctggtgagcatttaacaaataaatccctgtgcccacccccacccaggccacttaaaccagactcaacgagggtggggcttgaacaaagtgttaaccaacccattgggaggtcctgaagtgcagccggtgttgagaatcaccaattcagaggctgacaccagattcctgagtttctgcagatttctcctcagcttctctaccaagggacatttagactttgagagcagtaagaaaatggttaaataaacaagtatttgttatgttttataaaacatttctttttaaaaatttatatatatgtgtgtgtatatgtgtatatatatatgtgtgtatatatgtatatatatgtgtgtgtgtgtgtatatatatagagagagagagagagaaagagagagagagagagagagagagactcactctgttacccaagttggagtgcagtggtgtgatcatggctcactgcagccctgaacccaagggcccaagtgatcaagtaattctcctgactcagcctctcaagtagctggaactacaggcacatgccatcacgcacagctaatttttcttttttttttctgagatggagtcttgctttgtcgcccaggctggagtgcagtggtgcaatctcagctgactgcaacccccacctcccaggttcaagcgattctcctggctcagcctcctgagtagctaggattacaggcttgtgccaccctgcccagttaattttattttattttttgtatttttagtagatatggagtttcaccatgctggccaggctggtcttgaactcctgaccttgtgatcctcccgcctcagcctcccaaagtgctgggattacagacgcccagctaatttttttaacttttcttgtagaaatggggtctccctatgttgcctaggctggtctcaaactcctgggctcaagtgatcctcctgc

SEQ ID NO: 4610 - DNA, 1212 bp, Homo sapiens
ttccctctcccgctcctttaaacccccctgcatcgtagagagcgggctggattctctgtggtgctgatggaggagggggagcaggttgaaacaatcgagtgggcgcgccaggactccccagctcctggcggggaagggagggggagcccctgttctgcgcagggaggcggcggggctggggggcccccggaacgaggaagaggcaggggtgaccgctagaataggaaagtgctcacccccgggaggcaaaatttcgttcagatcgcacattaattggagatatctgattaattccagcttctgatgactataaatggcgattctctaccaaggtgtctatattaaaaaaaaaatcattccgtgtcatcccccacgtcaggcctgctcgtgggcgtgaggctgtacttcctccgcccccttctaatggagtgaaccattcccagctctcccccccccctcagcctctctctctctctctctttctctctctctctctctttctgtctcttcctcgctccctctctttctctcctccctctgccttcccagtgcataaagtctctgtcgctcccggaacttgttggcaatgcctattttttggctttcccccgcgttctctaaactaactatttaaaggtctgcggtcgcaaatggtttgactaaacgtaggatgggacttaagttgaacggcagatatatttcactgatcctcgcggtgcaaataggtaagtggccgctcagcccggctggaggctggaggcgggaggcagcctgccccggcccgaggcgcggagggggactagcgggtccgcggccgccccagggtgcggagaagccggcaatcccccgagggtgggggcatcagttcctggggactagcgcgtcccagatcggtttttcctaaagctatagattccaaatgttcgccaggaaatgtgtgcggccggacattttctggacacggtttttttccccctttttcctgagcacacatccatttttgtttccctttctgggtttataccaggtttggtgcgctctggggcaatgtactggcccctgcgatactgcaagatatgattttgaagagtcgaaatgtgaatgcaggaataaaatggctaggcagccaggactggaaagtttatgtgctgaaagcaaagatattccagggctcagactgctgcatttagaactttgtcattctcccgcccc

SEQ ID NO: 4611 - DNA, 1130 bp, Homo sapiens
ccttgcatttgatatgtcatccagttcataatcaagttgcctttttctggctaaaacataatgattatgtatttttctcatttggtcctacaagctgctggccctttgtccctccactgtgggaatcagatctagaggaggctgagcctgcagacacagcagtggccaaaaggtcactctaagtgttttgtcttgactccttacttgaagtccacccagctagcacacatctggtttatactgaagccccctgcctagaaatactcatttcaggaaccaccagtaagcatctgtgaccacacaggctttttgactgatggcttcccggatctggtttcaagggataaccccgtctgtgtgcatctatggtcttctctctacagcgaggactttgcagtgctgcttgtggtccacacaaggggctcagagctgagtctgaactgcttcatggtcaccagctcctgtcccttccagtcttgagaggcttttttctccagatggaacctttccttcccgccgttttctcggtctctggctgtttttctcttgtgcccgtctaattggacacctcctggcttccatctctgtggttctcctgcctcacttcctgttctgttgtttttccgttttgtcaaaatatctcctatgttcttggcttccttttcgtcgccaggttttcagctttcctttagctcttcttctaatatggcttctgcccacaaaagcctgctctgtcaggatctcatggttctccacttgccagaaccttcttcagcctcagttcctcggcctcaacttgtacgtttaacccattgaccaccaccccccaaattcaccttcatttctttgaccctgctcctcactccttttctgttgaggaatctgttgactaactccaggctcactcaggctcaccgtcctgctctctgcaccagcctttccagagcgtgccagttctcatggcttcatctgttaactgttgatcacttcagtcctgatttttagacctaaatggtttccttaacgccattctaactgcctgtgactcattttcacttacagtgtttattgtaacgccaaaccaacaaatcacaggtgcttgcttctctccataaatctccccagtctaa

SEQ ID NO: 4612 - DNA, 1133 bp, Homo sapiens
atgttaaagattgtttttaaaacctagagctagataggaggcattcattattagatggtgttcacccatgtgtgtgtgtaacttagtggtaaagttgaaggtaaatactttttaacatgtcttttgaattcaatatacttataataggcaagcttaaaactttctcttttcttccagataaagcttcaccaagaaggttgcccaggaaacgggcacagaagagatcagtgggatctgatgagtaaatgttcctttgtgcaacaattcggtctttacttaacctgccctaatatttttcggcctgatgggaattagtgcagagaagccatgtcaccatagaaggcaactcctacttgtgtgtggactgagcaatcagagtctgtggcgataatattgctgaaaatgcactgcattcatttttctaaagtaacaaatttggtttttttttaaaccattaaaatctatgtgtgtgcgtgtgtatgtatgtgagcagttggtcttaccagaatcattgttgaactacctgaaacaagtctttagaatactaaatataatgctgttgtctcttcctttttgacattttctgattttttcccccaaaactcagttaatatttacccactatgattattgatgtcctgccttgaacagttttaaagaaaacaatttttggaatagctcaaatttcaattgatggcacaaatcagcattttgttgttgttactgtattacaattagtattctaaaggcagaagcagaagtagctgctttttagcaatagaattgtttcagtattttgctgctgtttaatgcgcatcttcagaaaacttcccagtggcttcaaggaatttggggatctctctggcaacaaattgtgaaacatgaaatttctgctgactttaatatatgaaacctaatcctacccccttttttaacaaaaagaaactagtacatttgtgaaaattgtgttgtgttgtccattgttgctctagttctgacccagaggtagctctggagtgattttagacctactcactcagttgtgtgtaggtttttttgttttgttttgagagagaatttttctctccttaatagaagcatcctttttaaagagaagttgccttggtccacac

SEQ ID NO: 4613 - DNA, 1122 bp, Homo sapiens
agaattgtcattacttaaccatgggagagggtgtgggcagacaggggacaaagattttccactgtgtattttcatggtttttcctttgaacaatgtcctctcttccaacaaaattttttgcttttaagtgccacataaaggcagctcatgttccttacatcgccgttatcaagaggatcgtcattcaaataaagtaaccactgacaatgctaattaattggaagtaaagaactgggcggaaagaacggctaaccgcaagctgccgggtcgcaactgcggcggaaggcggactctcgcgggagccacaaagaggcagcagccggccacgtgacttcccggtggcctgctctccccacctctccgcgctgagcagccacgtcggcggcggtccctggtccagggaggggcgtggcaaaggcccgtgcgcggtacgtgtcccgcccctcgctgcccggagcccggatgaagagtaacgccattaccgccggagccgccgagagccttagccgacggaaactggacactggaccggcagcgccatgagactcctcccccgcttgctgctgcttctcttactcgtgttccctgccactgtcttgttccgaggcggccccagaggtgaggctgggggagtgtgcggaggggatggccaggaaggagatgccagtgatggcaagtttgaagttggaggcggtggccgctccgggtcctggggtccgcgtccaccccgctggcctctctccgccctctccccaagcctaggctcgtagcagcaggggtccccgcgggcgctggagaccccgctgcggcctgccccttgcacgcggagcgcggggccgtgcccgggcgaccttgcttcgtggccggccgagggctgggcttgctcctcttgccctggaccctcgcctgcaggagcggccagaactggagggtcctcggctgcaggaggaggcgctggacacggctgcgctccgagcgcgccgcagccgggctgtttcttttggccacctccggctccgctccacccccagcccctcgcgctcagggctgacgtgtctttagcttccacgccgggagtccgtcttcattcatttgccaaaacccttgttttctacacatcta

SEQ ID NO: 4614 - DNA, 1261 bp, Homo sapiens
aaagtagaactaccatttgatccagaaatcccactactgggtatctacccagaggacaagaagtcattattcaaaaaagatacttgcacatgcatgtttatagcagcacaatttgaaattaccaaaatatggaaccagcccaaatgcccatcaatcaatgaatggataaagaaattgtggtatatatatacaccacggaatgctattcagccataaaaaggaatgaaataatggcattcacagcaacttagatggaattggagaccattattctaagtgaagtagctcaggaatggaaaaccaaacatcatatgttctcactcataagtgggagctaagctatgaggacacaaaggcataagaatgatacagtgcctttcctttcagcggagcatggcggcaagatcgccttacaaatttccaagaagaggaagtttgtcactgatggcatcttctaagctgaaatgaatgagtttcttactcaggagctggctgaagatggctactctggagttgagatgcgagttacaccaaccaggacagaaatcattgtcttagccaccagaacacagaatgttcttggtgagaagggccggcggattcgggaactgactgctgtagttcagaagaggtttggctctccagagggcagtgtagagctttatgctgaagaggtggccactaggggtctgtgtgccattgcccaggcagagtctctgccttacaaactcctaggagggcttgctgtgcggagggcctgctatggtgtgtcgcggttcatcatggaaactggggccaaaggctgtgaggtcgtggtgtctgggaaactctgaggacagagagctaaatccatgaagtttgtggacggcctgatgatccacagcagagaccctgttaactactacgttgacactgctgtgcgccatgtgttgctcagacagagtgtgctgggcatcaaggtgaagatcatgctgccctgggacccaactggtaagattggccctaagaagcccctgcctgaccacgtgagcatcgtggaacccaaagatgagataactgcccaccacccccatctcagaacagaagggtgggaagccagagcctcctgccgtgccctcagtcaccacagcataacaggatctccttggcagctgtattctggagtctggatgttgctctgtaaagacctttataaaatattgtacaaagacagaaaaaaaaaagaatgatacagtggactttggggacttgggggaaagag

SEQ ID NO: 4615 - DNA, 1200 bp, Homo sapiens
cctccaccaacccataatcattttcttttcttttctttacattacactcacttttattcttctatgtgtgtattttatttagttataatcataataatactccaggtgggtgcagtggctcatgcctgtaatctcagcattttgggagatcaaggtgggtggatcacttgagcccaggaggtcgagaccagcctgtgcaatctggcgaagccccatctctaccaaaaaataccccaaaaaaacctagccaggtgtggtggtgcacacctgttgtcccagctacccaggaggctgaggtgggaggattgcttgagcccaggaggtggaggctgaagtgaaccatggtcacgccactgactccagcctgggcgacagagcaagaccctgtctaaaaaacaaaaaacaaaaaacaaaaacaaaaaatgcatactccaaatgaatgaaagttggcttttttgtttgttttttacaggaaagaaaaaagatggtcaaggaagcccagagagagaaaagaaaaaacaaaattcctaaacatgtgaaaaaaagaaaggagaagacagccaagacgaaaaaaggcaaatagaatgagaaccatattatgtacagtcattttcctcagttccttttctcgcctgaactcttaagctgcatctggaagatggcttattggttttaaccagattgtcatcgtggcactgtctgtgaagacggattcaaatgttttcatgtaactatgtaaaaagctctaagctctagagtctagatccagtcactgactctgtctggtgttgacagaggatttatttaagctattattttaataaagaactttgtacatttttatttttatatttttttctcttacaaatatgtttttggaagcatgataaatgtttaaatgtagtcaacatctgtaactcttacatgagtgtccagaggcactcatgggaaaattggttttgctttctttgtacacaccagagacccatctgaggtcatctgattataaggccatgtttatataaagggaatttcacccacagttcagctggctgttgattttcactgcaactctgcctttgtgtgtattggcgatcatttgtaatgctcttacacttcgtctttaatgttctttttggagttaggacctctcagttcataaagttttttacaattcaatcatttggcatattcattcat

SEQ ID NO: 4616 - DNA, 1201 bp, Homo sapiens
aaactgcttactagctttcatgcaggctcacctatctcttggtgttcatgcatctgtacaactgagctaggctaagacagctgacattttcttgtttcaggcctatatggacactctgcagacgcagtggagttggattcttcagatcaccaagtgcattgatgttcatctgaaagaaaatgctgcctactttcaggtttttatatttagtgataattttgttgttatttaggtcttaatacctaatcttttgagtgtgttttataaagcactgaaaataatcttcaaaatgttgcataaatcctcttcattgattttgagtgcagagtagcatagatttgcaaccttgccatcagtcctacaaatagtttcccgctgccacatacctaaatactttctgcacgaattttttcctttagccacctgtcaaagagatgtttagggatgacaatccttgaaacagaactactagatgaaattgctcattgagttgctgttcattcactgatcactctcatccttcacagttttttgaagaggcgcagtctactgaagcatacctgaaggggctccaggactccatcaggaagaagtacccctgcgacaagaacatgcccctgcagcacctgctggaacagatcaaggagctggaggtatcgtctcagacccagaacctcagcagctgtgcctgatcagggagataaaacacatgccttggatgcagttggctctgattagtattattgtacaatgcacgcccagagccaagcaagcattttcttcagcttccagtggcttttctcaaaattaacttctttacatgcccaactactcttgacagttacttttgcttcagtctgggcaattggttgaaaataagaacagagagaacattacttcacatgacaattcctttgggaacgcatacttcaaattttatcagcatagccctttcacacaaggatgttcttccctgcccacttaattcctgcctgcatagcttctggagagtgttgtcatgaaaggttctcatgtttcctgccgacgaatttgtgattttttacaattgatgcaactgcagtgatactcagtgtgtcatgtagctacattaatgcaggttgaaaatctcctctaaaactcacagggtatctatgtttaagtatgattttattcaccattgcagaaagaacgagagaaaatc

SEQ ID NO: 4617 - DNA, 1226 bp, Homo sapiens
ggtccccccgagtctccgggactgccctctcgactgtcagtggggcagcctctccgactctgcacccgcctcgacctccccacccgctcccacacccctgtgccctcatgtggagcctaagagaacagaacaggccgtgaagccagcagagaaaagttctgccaagtttgtgaacccttttttttttaaacaaaacaacaaatcaacaacagcaacaacaacaacaaaaattaaaaacttttttctaaaaaaaaagtgaaaataaaaaaaattatatgcgcttcatgggactgagtcaccaccttcccttacatacttcagttcagattgtagccatacttaaaaaaaaaaaaaaagccaaaagatgatgacaacatttttatcagtattgtgaataaacttgaacacaaatacacgaagttccatgtcatgtcttcagttgtagaagtttttcctctttaaggtaaagcgaccaacttgaactttctctggcaacacgattcgcagttatataagggaatcagtgttcacgtctctgtatatatttatttatgtgtaatttaatgggaattgtaaatatggtgagtctgttttaagcctttttttttttatttatctgatcttgtttacctcttgtttagtgggttttgaatcttccctattagttcttcatgtggttcatggtactgatttagaaatccagtgtttgggggatttttttctctgggattcatgaatttagccctgttgtagcatgttaaaggtgacaaacagctggacaaatttttaaaaagtaaaataaaattttatctataattagtattattacatttagcttttcattgaaccgaaagaaaaaaagtgatattggaccctggaaagattttgaaacttgagtggtttgataacccttctatgtattgtagggagaaaaaaaaaagtttattttattccactgtcctcccttaaaagcatcatttgagcaataaatgaatattgtctttaaaccaagggttagggaattttcctctctctctctctctcctctctctttctgttcaaagaacttcaaacatttgggaccacctggtattctgtattttcactggccatattggaagcagttctagttgcattgtattgagttgtgctggcagtagtttccatgcctgtcaatgtatcatagtcctttgttgcccagataaataaatatttgatacgcttta

SEQ ID NO: 4618 - DNA, 1154 bp, Homo sapiens
aaatgattgaaaaaagtttagaatagcgaggaggcagttagtgaaatcttaacaccatcagaagaagctgttaacttggcacgtggtgctctacttcctgcaacgaggcatgtcaatttcaaatgggaataatgattgtcattcacaagagcatcgtaaaaatggaacaagatcccctctgatacgttttggacatctgtcctctctaaatctcatgttgaaatgtaatccccagttttgaggtggggcctggcgggaggtgtttggaccatgggagcagatccctcacaaatggcttggtactatccttgcggtaacgagtgagttctcactctgagttcatgcaagacttgatcgtttaaaagagtctgggacctcctccctctctctcttgctccctctcttgccatgtgacaggctggatcctctgccaccttctgccattattctaagtttccaaaagccctcaccagaagcacatgctggcactatgcttcctgtacaacctgcagaaccatgggccaacacattctttatagcaatgtaaaaacggactgacacactctctacacacacacacagacacacacaccccactcatctgttaatactgagaactgttactgtgagaagattcttaccttttcagaagtatgtggaaagatttgtgttttgtggaaggcaccaatattaagcaaatttttttctttttttcttttttttgagacagagtctcactttgttacccaggctggaatgcaatggcacaatcttggctcactgcaacattcacctcccaggttcaagaaattctcatgtctcagcttcccgagtagctgggattacaggtgcacaccaccacacccagctaatttttgtatttttagtagagacggggtttcaccatgtcagccaggctagtttcaaactcctggcctcaagtgatcaacctgcctcggcctcccaaagtgctgggattacaggcctgagccactacacctggcctgttaagcaaacttttcttcttttagggtctacatgcatttatatttaatgagtaaaataaagttaatgcatggcaaaaatatttttctgaggaatttgaaatcttaccgaaatggagaatcttttttccttttttctttaaaaacacc

SEQ ID NO: 4619 - DNA, 1197 bp, Homo sapiens
tttggactgaaaataccttgggtagtgtgtcttaatcggtttgggctgctgtaacagaaataccatagaccaggtggcttataaacaacggaagtttatttctcatggttctagagggctgggaaatccaagatcaaggtactggcagatttaatgtctggtgagggcctgcttcctggttcatagatgtctgtcttctcactgtgtccaaacatggcagaaggggaaggagtgagggagctctctggggtgttattttaataaatgcattaatcccattcatgaggactccaccctatgacctaatcacctcccagaggctccacctgcaaatactgtcacattggggattaaatttcaatatatgaattttgggagcacacaaacattcagactacagcaagtagcaaaatcgtattctcattctctagatagtgctttgtgtttcagtcatactgtcaccatgaaaatctgagaaatttgatacgctgttaagattcattgctctgtcttatgtagctggctgtcttccaatgtcatgagtcactgtgtgcctttattttcttatttagaaaatgggaataatgattgctggtctcattcagatgggtcgtgtaaaagcacagtgattgaatgtaaaagcactgtgtgaactgataactgtgtaattgaaggtgaaattacacttctcccctgggtttgtggtgtgttgatagtgatggttcatcactcaagttcatctatcacaacccttctgctgccagcatgtttatcttacatagaaaacaatttacagtgtgtttcatgaaattcatcatttgaacaaatgcttagttattggcacacagaagtgagtgctcttttgcctatctcagaatacacaccctctattgctgattagttattctggcatacaatgcgatactgaagcaagacataaacttccttttaagctgaaaaactgcaaaacccatcttaacaatcagtatattgtggactgtactttgcccctcacctctcctttcttctttcactctctactgtttctgtcttactaaatcccaggacatggttccagacccatgcccatagaataagagttaagaagtttctgatatgtgcactttgggtctgggaattgtataagctatacttctgttagaagtccgctgtaggcatgcagggtgcaatgggtaa

SEQ ID NO: 4620 - DNA, 1099 bp, Homo sapiens
gtgaagcaaatattcgtcgctggagaaatgatcgcaattccatattttcctgcaaagcaacaacaaaatgttttacgggacctaagaaaggtaggtacccacaagtagatgaagctgtactacgtttcgtcagtgagacacgtgcaaaaggattgcctatcacacgccaagcaatgcaattgaaggcaggagaagttgccaaaaccctaggaattgatgaaacaaaattcaaagccacaagaggctggtgtgaccgattcatgcgtcgagcaggactatcattaaggcatcaaacatcgttttgtcccaagctccccactgccattaaacagaagacagtgttggagcactctttcaagaagtgctgcataaccagtactcttgacaacaccgggagagacgttctgtggaaaaatgcagacatcaatgactgtggtttgaaaagtgattcagaagagttggattcagaatatgaagttataattataacttaaccaatttatttcacacattttctttacatatgcacaagattgatgtgataaaaatctgtttaactcaaagcgctgtttcaataaatataaacattttctgtgatatgaaagcattgtgtcatagtttaatgggcagtgttttttcttagtgatacatatggtgcatcttaacaattggtagtgtcttaggttaaattaaaaatggtagcttgtaaatttatttttctttttaagatagcagttatttattggggaatttgattctgactcttacaatgttaaacttgtaatcctgtgtgaaacacatgtttttgggggggagggggtaaccaagatttcagggtagtaacttaggaatctaagaactatcttctactttaggaagagtgggattagttactccctttgtataggaggactttatgctcaaggaatgtgttgtggagaaaaacacttcttcacaaacaattcagtgacaagacctcaaaggtaatgcgtattgaggaaaacagtagtgggtgaaaattcccgcttagctgtaaaatgactctcttgccaggtttccgtgtttgtctcaactgaactctgggctgagtgtttaccag

SEQ ID NO: 4621 - DNA, 1141 bp, Homo sapiens
ctttcattctgatgtttaaaagtgacttacgtatctttaaaccaatttggtcatgatgtttaatcttaatcactgctagatttgatttgttaatattttattgaagaattttgaatccatgttcaaggcattggtttatatttttattatgttttataattttctgtgcctgattttgttttaaggttatgctagtttgataggatgatctgaggactatatgcttctgattcccatggagctgtttgtttgatattggaactgtacctttgtaggcaagtcttacaacatattttgacttttgggagggactgcagggtagacttttaactcccaagtgtacttaacaataagggattatccaaacattctattttctcttcagttttaggaagttgtatttttcttataatttatccatcttatctaaacagtcacatctgttggcaaaaaatcagtcgtagtattttcttactctctttcatttctgctgggtgtgtagttatgtctgttttttattgcttctatcattgatttgtgcctctcctcgctttcttgattagtgttgccagttttctgttttactttctttttattttgccaacatctgattttcatgatactttcttgcctcatcctttttagtttcattaaattttgttctttattatcttttcctgtctttttcttcaggtttgttctgttactcaaatttcttaacttggaatgctcattcatttttaagcctttattctgctctattggaatcacttaaagctgttaatttccttgtaagtattgcttagatgtatcatacacaattttatatttattagtttcattcttttctatgctggtttcttctctgaccctccccccaccccaaatcatgttggaatttttttttctccacatggatggggatcttatttatttttagtaatttctcacttaattgcattgtattgttaattgttttttaaaaccatttaggatatccaaaattatttcttctctgtttctgaataccatgtaatcaaaattttctgagaatgtagtataaaagtactcatagattttatgttagaaattgagcattttataagtaaattaatcattttgccatgatgaaaaagctgaa

SEQ ID NO: 4622 - DNA, 1204 bp, Homo sapiens
aggaggatagaggaaggtgaggttggaggcaaagtacagattgaagattgtatcagctcttggggtagaacatagctcacattttctacttgaaagttccattgtgctgatagtcagaactttattttgccgcttagttgttctattgttattacattcatcagattttcctctctactactatattgaaaagtattcctgccctgacacagcttacaatgttttttggtacctcctctgctaaccttctgcaacagcctcatacacacacacacacacacacacacacacacacacacgcgcacacacacacacacacacacacacatctccgaggaaaaagatacaaataaagaagatggacaggctttcctttccgtctggcggcagccatcaggtaagccaagatgggtgcatacaagtacatccaggagctatggagaaagaagcagtctgatgtcatgcgctttcttctgagggtccgctgctggcagtaccgccagctctctgctctccacagggctccccgccccacccggcctgataaagcgcgccgactgggctacaaggccaagcaaggttacgttatatataggattcgtgttcgccgtggtggccgaaaacgcccagttcctaagggtgcaacttacggcaagcctgtccatcatggtgttaaccagctaaagtttgctcgaagccttcagtccgttgcagaggagcgagttggacgccactgtggggctctgagggtcctgaattcttactgggttggtgaagattccacatacaaattttttgaggttatcctcattgatccattccataaagctatcagaagaaatcctgacacccagtggatcaccaaaccagtccacaagcacagggagatgcgtgggctgacatctgcaggccgaaagagccgtggccttggaaagggccataagttccaccacactattggtggctctcgccgggcagcttggagaaggcgcaatactctccagctccaccgttaccgctaatataagtaaagtctgtaaaattcatacttaataaacaatttaggacagtcaaaaaaaaaaaaaaaaagaagatggacagaaaatgcttttatttgacagattcctcaagagggattaatagtacacagcagtatgagtgtggtcagcagcagtgaatgtcctatacacatataagctcttaa

SEQ ID NO: 4623 - DNA, 1249 bp, Homo sapiens
ccatccttgtctccccatttgctatggtttgagtgtctctcctccaaaattcaggagttgaaacttaatggccaatgtcttagtattaacaagtggggctttgaaaaggtgattaggccatgagggctcctccctcatgaacgacattaagacccttgtgaactggacttcacacagcagcataaagccctcttggccttccaccatgtgagcgtgccgcgtttctcccagccagaggctgcagccctcaccagacagccaaacctgccagcgccttgatcttggactttccagccccgacaactgtgaggaaatacatttctgttcttcttaaattacccagtcttgggtattttattatagcagcacaaatgggccacaatctgccatagtacctgtcatgtaggaagtattctgaaactatttatggagtgggtttcattaaaagttactctaatctttgaaatagaaaaatatcttacttttatgatcaatgttttgttacaaactgtctcaattatagaaacaggcttttgcatacttacctggcagtggagataccatgatcacgaaggtggttttcccagggcgaggcttatccatcgcactccggatatgctgacccctgcgattttcccaaatgtgggaaactcgactgcataatttgtggtagtgggggactgtgcttgcgctttcccctgaaaaaaaaaaaagcaagaaaagaaacaggcttttgctgaggatccactcctgcttcccctgttgggccattcctgttgtgttgtgtttgatgttagaaacaacgtacaaagttcctcccttaaaattaaatctagatctttacttgtcatgcctgataatatcaaactagagctccagatactataattttgattatgaactttagccatcattgaagtacatcgtcccttcttattaattctcttggagcaaatccttcatgaatgataaaatgggagaggggtcatcatccttagctaaggtagggatgctaagatcgctaaggtgtagggaatcgtatttgatagttcagctctatccagtgtccttagactaaacctgaaagttaacttccagaattttacgctgagacctgaaaaataggagcaatcatgtaaggaggagaaaggcaatgcgggtacattctagacggattagaggaaggagtgtgttggtagaccaggtgagttcacatgggaagaataattgaaatctctgagtttgatct

SEQ ID NO: 4624 - DNA, 1131 bp, Homo sapiens
acctagccagccttaagagaagggtgatcagaaggcagcaagggtgcaaaagttcagatcagacccaaagtacgacttgatgggaggaataagtcctagcgttctatagcactgtagggtgactgtaattagcaacaatttattgtatattttcaaatagctataaggagaatactgaatgttcccaacacaaagaaatcataaagatttgatttctttggcatgggtgcagtggttcatgcctgtaatcccagcactttgggaggtcaaggtgggcagatcacctgaggttgggagtttgagaccagcttgaccaacatggagaaatcctgtctctactaaaaaatacaaaattagctgggcttggtggcacatgcctataatcccagctacttgggaggctgagacaggagaattgcttgagcccgggaggcagaggttgcagtaagctgagattgcactgttgcactccagcctgggcaacaaaagacaagagtgaaacttgatctcaaaaaaaaaaaaaaaaaaaaaaaagatttgagatgatgaatatgctaattaccttgatctgatcactatacattatatgtattgaaacatcactataccccagcaatatgtataattattacgtgtcaattaaaaaaacttatttttggctgggcgtggtggttcacacctgtaatcccagcactttgggaggctgagacaggcagatcacttgaggtcaggagttcaagaccagcctggccaacatggagaaactctgtctctactaaaattacaaaaatgagccaggtgcattacaggtgcatgcctgtaaccccagctactaaggagactgagcaggagaatggcttgaacctgggaggcggaggttgcagtgagttgagattgtaccactgcactccagcctaggcgatagagtgagactctgtctcaaaaaaaaaaaacaaacacacacacacacacacacacacacacacacaaaaaaaaaacatatttttaaaaagactaggctggctttgtagccagacaatctgggttcaaattccagatttgactctactactatcgagttgtggaatcagaggcaagttgcttacccctcagaggctcagtttccacatc

SEQ ID NO: 4625 - DNA, 1165 bp, Homo sapiens
gggtcgtggccgccgctgccgcgctgcagctcgggatcccagtccggcgcgctccgggccgcatccttagccggcctcctggcggccgcgggattatttcattcccaacggagagctaggaagaaaggagactcccccgcggagcggttccgtgctctggcagggtgtagacgtttgtctgtgcgattcgccggctgcgcaaacgacgcgggagagagccggtcccgggctgcggcggcgcggccgcggggatgagccggccatggagcggccttggcggggcgcacgcagcggactggcgctgccgcgggagcgcagcctgagccggggctccagggggcttcgaagcctccggcgccctgggggggtccctgccgccgactccgggaaggacgcgagccccgcgtggcggacactgccgcagtcaccgttctgaggcgccccgagcttgctccgcctgcagctcggtgcgctctgggcacccgggcgccttgcccggtgcacggcggctggcgcaccgcggctagattggctacaggagcggggtgcaggactggctagaggtgggtgtgtgcgcgcgttggactggagatccgagcagaagcagaaccaggcggctctgagcagccatgcttcccggggtgggcgtgttcggcaccagcctcacggcccgtgtcatcatcccgctgctgaaagacgagggcttcgcggtgaaggcgctgtggggccgcacgcaggaagaagcggaggagctggccaaggagatgagtgtccccttctacactagccgcattgatgaggtgctgctgcatcaggacgtggacttggtgtgcattaacctgccgccgcccctcaccagacagatcgctgtcaaaaccctaggtgagcgacccctaccccgcatcctccgtcccacccccgccctttaaccttctctaggttccttcccccctgcctttccctctccgcatcccagaagcttaccctgcatctacgctgccccggggatctgagatcccagatccgactcagagctccctccttcctcgtccccggccttccccacctttgcgcttccctcctgcctcctggcaccacttggacgcgcttccccacgtgtgtagattgcaggctggagaaggcgtgtgttccggggatccgaact

SEQ ID NO: 4626 - DNA, 1109 bp, Homo sapiens
tttaattgattttatttttaagtgcgcattaaaaatgttcatctaaaaagttgagtgtgattaagcttctctttatgtgttgtcatttttatttcttctacaaattgcctacatattcattgccttttttaagaatttgaactggtagtctttgtcctcctgaattttttctgtatttgtaaaacacattttgccatatgtgtggcagatttttttttctagagagtcatttgtctttgccatttgtggcatgttttgtcatagggaagttttaaatttttatgaaatagttttatcagagaattcatgaatgttgattgtctttgatagtgttgatagaattattttttctgaatttgtaagaaaatttagatgagcagtcattttaaaaatgtctttatttagacaatactgaatatcatcattataaactgcttaatgaacagaattgtctttcactcaattgtgtttggcttatatgcttttgtgttaaagtatctcataactctgtagtgttttttctgtttttttgttttgttttgtttctgtttttgtgtttttaagacagagtttcactcttgttgcccaggctggaatgcagtggcacaatctcggctcaccagaacctccccatccccggttcaagcgattatccttcctcagcctcccgagtagctgggattacaggcatgcgccaccacacccagctaattttgtatttttagtagaggcggggtttcaccatgttggtcaggctggtcttgtactcctgacctgaggtgatctacctgccccagcctcccaaagtgctgggattacaggcgtgagccaccatgcctggcctgtttctataaagtctttaggtctcagttttctcattggtgaaatgggaaggctgtactatctcacctgtttttggcttaaaagtttataaacttgttagctctgttgattattaagaatcaatacatttgcatactttgctttaaccatttatttccataatccagtagtactttatatttttgatattttgatgtaatattttgtttctgatttgttctgcttgattgaacggttgtttttaaacacaccctctttgcatttta

SEQ ID NO: 4627 - DNA, 1207 bp, Homo sapiens
atctggagagaggagggctcaggactgtgttcactttatttggtcagatgtattttatttgaaaaccatttgagcccaaaatacaagtgtacccttcccacttctggctcaagcacccgtgagccgactagacgtaatattaaaacttactgatgctgggtgcggtggctcatgcctataatcccagcactttgggaggccaaggcaggcagatcacctgaggtcaggagttggagaccagactggccaacatgacgaaatgctctcgctactaaaaatagaaaaattagccaggcgtggtggcacacccctgtaatcctagctactcgggaggctgagacaggaaaattgcatgaacctgggaggcagaggttgcagtgagcagagattacaccactgcaacgagactcgggcccagacgagatctgcctgggcgacacagtgagactctgtctcaaaataaataaataagtaaatagaacctcctgagctaccctggcttataaggattcagattactttaggaaattaggcattagcactaggaggggggaagatggctggcaaaacttctagctagcaacctatgtctagcacatgggtaactaaccatagcgagatcctgaacacatatcctctaggtgcaggtggagggaacgatgtccaatacctgaagcagaatctcacatggacggaacgtctgtatttccctctcctgcacgaatcactcatcattcttggagggcttctctgcattcctccttttcttctctcccctcccctgccttttgtcttttctaaagagtctgaactccgatttccatgctctcctgctacattaataagcaaaacctgcttgtgtgtacggttctttactggaaacatgactttttgtttctgtattggttttactgtcatccagttttctagtttaatatctagcaaaactaaatctgaatgtactcgctttttccgttaagtatgccaagcacctcggttgaaaggcttgactcaaaccagaagtcttgctggaattcgtctctgaacacttgaaaaacagaaaccctgagccgcaacaaacatgcctctgtgtgtcgggattgcctttgtctctgcttccatgtggcttttccttttgtagctatgcttagtgacataatcttccctcttctagccttctcctttcaagcctgtctgttaattaacc

SEQ ID NO: 4628 - DNA, 1195 bp, Homo sapiens
tgtatgatttcacttacgtgaggtccctagggtagtcaaatttatatagagagaaagtagaatggtggctgtcaggaactgggggaggagcctgggttgttgttctatggaagagtgcagccatagaaaagaacaagatcatgtcttttgcaggaacatggatagagttggaagctattattcttagcaaactaatacaggaacagaaaaccaaatatcacatgttctcatttataagtgggagctaaatgatgaaaactcatgaatgcaaagaagggcacaacagaaactagagtctacttgagggtggtgagtgagaggagggagaggagcagaaaaaaattttaaaaaaactattgggactagtacctggatgatgaataatctgtacaacaaacacccatgacgtgagtttacctccataacaaactgcctatgtatccccgaacctaaaatacaagttaaaaaaaacaaaaagagtttcatttcgggaagatgaaaaagttccatagatctatttcacaataatgtgaatatacttaatactactgaactgtaccgttagaaatggttaagatgagtaggcaggcgtggtggctcatgcctgtaatcccagcactttgggaggccaaggtgggtggctcatctgaggtcaggagtttgagaccagcctggccaacatggtgaaaccccatctctaataaaaatattttaaaaattagccgggcgtggtagtgggtgcctgtaatcccagctactcaggaggctgaggccagagaattgcttgaacccaggagatggaggttgcagtgagccaacatggtcccactgcactccagcctgggtgacagagtgagactctgtctcaaaaaaaaaaagaaaagaaaaaaaaagaaaaagaaatggttaagatggtaaatttcatgttgcttcttactacaattttttaaatggctaccttatttaatctctgtgagaattaaatgatatcaagtgcaaatgcctgacacacagtagatgctcggtaagtgtaacattcttttccttctccttctgaatggcttgtgaattatcacaaacattaaagagacttctagcatccaaagcctattgatatgggtagaaagggaggataagatctcaattcattttctttgcctctctcctcccttttcaaccctttgaatcaggccag

SEQ ID NO: 4629 - DNA, 1208 bp, Homo sapiens
cgccactgcactccagcctgggcaccattgagcactgagtgaaccagactccgtctgcaatcccggcacctcgggaggccgaggctggcggatcactcgcggttaggagctggagaccagcccggccaacacagcgaaaccccgtctccaccaaaaaaatacgaaaaccagtcaggcgtggtggcgcgcgcctgcaatggcaggcactcggcaggctgaggcaggagaatcaggcagggaggctgcagtgagccgagatggcagcagtacagtccagcttcggcttggcatcagtgggagaccgtggaaagagagggagagggagaccgtggggagagggagagggagaggggggagagggagagggagaggggctaacttatattgtttagaatggaaccattacagagactttcatcctgttctgaatgtgaaggtggccctgcctatctcctttctcattttgcccttttattccactcagttcttcttgtaaagtgtgtatttgccccatcagtctctcagtatgtgtagaaaccagaatggatggattttggtcatttgggtgtggacttgtggtcagaaactctttggaaggatggttatggaggtgaggattatttgtttgaggaatgaaacgataatgtacagttaatttggtgatggtatatttttagatgcaagtaaatacgagatctgaagtgtacgattcaaaagaggtcatctgagttggcgactaaaatagagagcaagattaactgtttatttttatctgtgggtgagtagggggaagagggtagaaaaatttcacgagaacagtggttcttaagcgggttttgtggagactgtggtgcagcataagagtatagactggggccaggctgtgtgacttctcattatatcttgaacatttacttgttgtgttatataatgcaacaggtattgtatcatacctgttgggcaggttatataatatgtctgggccttagttctctcatctgaaagatgtgaatcacagtagtaactgcctgatggtgttttgtgacctgaataaattaattcttgaagagaattttggtgtattggttgggtgcaatggctcacacctataaccccagcactttgggaggctgaggccggccggccacttgaatccaggagttggagagacctgcgtgggcaatatggcgaaactccatttctaccaa

SEQ ID NO: 4630 - DNA, 1222 bp, Homo sapiens
cccccaccagcccagcagaaccagtacgtccacatttccagttctccgcagaacaccggccgcaccgcctctcctccggccatccccgtccacctccacccccaccagacgatgatcccacacacgctcaccctggggcccccctcccaggtcgtcatgcaatacgccgactccggcagccactttgtccctcgggaggccaccaagaaagctgagagcagccggctgcagcaggccatccaggccaaggaggtcctgaacggtgagatggagaagagccggcggtacggggccccgtcctcagccgacctgggcctgggcaaggcaggcggcaagtcggttcctcacccgtacgagtccaggcacgtggtggtccacccgagcccctcagactacagcagtcgtgatccttcgggggtccgggcctctgtgatggtcctgcccaacagcaacacgcccgcagctgacctggaggtgcaacaggccactcatcgtgaagcctccccttctaccctcaacgacaaaagtggcctgcatttagggaagcctggccaccggtcctacgcgctctcaccccacacggtcattcagaccacacacagtgcttcagagccactcccggtgggactgccagccacggccttctacgcagggactcaaccccctgtcatcggctacctgagcggccagcagcaagcaatcacctacgccggcagcctgccccagcacctggtgatccccggcacacagcccctgctcatcccggtcggcagcactgacatggaagcgtcgggggcagccccggccatagtcacgtcatccccccagtttgctgcagtgcctcacacgttcgtcaccaccgcccttcccaagagcgagaacttcaaccctgaggccctggtcacccaggccgcctacccagccatggtgcaggcccagatccacctgcctgtggtgcagtccgtggcctccccggcggcggctccccctacgctgcctccctacttcatgaaaggctccatcatccagttggccaacggggagctaaagaaggtggaagacttaaaaacagaagatttcatccagagtgcagagataagcaacgacctgaagatcgactccagcaccgtagagaggattgaagacagccatagcccgggcgtggccgtgatacagttcgccgtcggggagcaccgagcccaggtaacgttagccagggtgg

SEQ ID NO: 4631 - DNA, 1162 bp, Homo sapiens
tcaggggattggcttaagttggatccaaatgttattcagcatcaagagtctcagcgagatgatgaacttttgactcttaaaagaacttcactgggtcattgctcagcttgcaagatttggcagatatgaactatttgtctctccagtgtgataggtggtggtgtggcgctgaacgcaagctctaagaataaaacgtgcagcaaaaggaggtcacgctttagtcagggtggccataaggaagcttagaactcacatcccctctgcccctgcctcgcccagtctcattttctctccttcactagaacagtgaatgaatctgagctcattcatgtcaagatgatagagaagaaagatcactttctcttagctggcttagggaaggccagattgtctttcttacactgagtgaaaaattactgaggacttttgttttttttttttttggtcttcaaggcaacatctcttgcttttacagacccacggaaatcgagaagaggatgcaagatttactattcgtgccctagcctggcagcttcagcctacatcacagctgtaatcatatgtgatgcatttttatttacagattagtaggctctgactctgacatatgactaaccgggaagctcctccctgtaacagttgtatgtcgtctgcttcagagaactaattgcttggcaattcccctttggtaattccctctttattttctgatgagttacttaacagcgatgggcttgttgagcagagcgtggagtttaatgtgtgctccagaaactccactgtaggcctgggggatatgtttttcgagttctgtttagctttactgaaggaacagtgaaaccattatatggcctgttaatatttcactcaataccagattaaacaccgagcagcgtgcagttttccaaaagaaatcaaaaccaggcttctttttaaaatgtgcccctgtgcattagaaaattattaaaaaggaatttaatatgtatagaatgtttaatgatcttttgaaaatatggtttcaaatggagtagtcttccaggaccctacagagtgagtatggtgtgctgttggactggtagtttggaggctcagtttctgttgcctgccctgcaacaggatgacttgtgctactcactgtaccttgctgggtctcagttttcct

SEQ ID NO: 4632 - DNA, 1316 bp, Homo sapiens
ccccttacccttgtgctgctcatggtaaatgttagcatttggaaattttgctcagagcatcatgtcacattatgaagtttttatttttcacaggtcaaatgggaaaaatgtgttctcttcttctggaacttcattctctggtcgcaagataaagactgctgttagacgcaggaaataaaggtcacattggtgttgtactcaattttaacaacagctggtgccctgctttcagatactggattgtactttgtgctggggttatctgaagtcagatctgcctaaggacttctttaattttggaattttcctcctttctctttcgttacagaagccccaccctgcctcacccacccttttttaaataaataaatagctagactggtgactgattcttcagcaaaaatattttatgatccagcagattattcactgatttgacatagtctggctgtacccaggaatggagcctgcacggtgaatggctttgtatagaacctctttgtctacaccattatgtgcgctgataagcgttcatggaacgcgttgaaattgtaattatatctgaggaattctgtatagattagaattctgtatagattagagagtgttgaaacggatgatttctatgctgagtttgtgctggtgtatgtgtgaagtgagtgagttgggtgtattgtgcgctaaacttttctgatagaggaagcctgattaaagaatggtccgtgctaaggacttgttagatctagttcactctccatttaataattatatgctatttctatattttcattctcctatcacctgtcttgcctttttcattattttattatgaaacttgtgtaaatacaattttgtttctgtactttttggcataacataaatctgtgaacttgaaatttgaattttgtgttagagatttttttgttgtttgtttagtcttgtctcagattttattatgtaaatcccattattcaaagttgcctaaatccatttggaaatctttaaaaaaaaaattggggattcttaaagttgaatttattggcttttctgatccagttttgtttggaccaaaaaccagtattgtacaaagtattaagcatatatttttatatttactaaaatggactgtggtgactttggataataaggaaaagtttaatattaaagccatgtttattacagtataattaacatgttaaaccatgggataaatgccatcaataaaaaattatgacatactttttgttctagttttacctcataatgaaggcacacagtattattggggggactttgtaaaataaagattaacagtg

SEQ ID NO: 4633 - DNA, 1465 bp, Homo sapiens
tgtggtttttagtgcacttaatattagcttgcttaaggcatacttttaatcaagtagaacaaaaactattatcaccaggatttatacatacagagattgtagtatttagtatatgaaatattttgaatacacatctctgtcagtgtgaaaattcagcggcagtgtgtccatcatattaaaaatatacaagctacagttgtccagatcactgaattggaacttttctcctgcatgtgtatatatgtcaaattgtcagcatgacaaaagtgacagatgttatttttgtatttttaaaaaacaattggttgtatataaagtttttttatttcttttgtgcagatcactttttaaactcacataggtaggtatctttatagttgtagactatggaatgtcagtgttcagccaaacagtatgatggaacagtgaaagtcaattcagtgatggcaacactgaaggaacagttaccctgctttgcctcgaaagtgtcatcaatttgtaattttagtattaactctgtaaaagtgtctgtaggtacgttttatattatataaggacagaccaaaaatcaacctatcaaagcttcaaaaactttgggaaagggtgggattaagtacaagcacatttggcttacagtaaatgaactgatttttattaactgcttttgcccatataaaatgctgatatttactggaaacctagccagcttcacgattatgactaaagtaccagattataatgccagaatataatgtgcaggcaatcgtggatgtctctgacaaagtgtgtctcaaaaataatatacttttacattaaagaaatttaatgtttctctggagttggggctcttggctttcagagtttggttaatcagtgttgattctagatgatcaacataatggaccactcctgaatgagacttaattttgtctttcaaatttactgtcttaaatcagtttattaaatctgaattttaaaacatgctgtttatgacacaatgacacatttgttgcaccaattaagtgttgaaaaatatctttgcatcatagaacagaaatatataaaaatatatgttgaatgttaacaggtattttcacaggtttgtttcttgatagttactcagacactagggaaaggtaaatacaagtgaacaaaataagcaactaaatgagacctaataattggccttcgattttaaatatttgttcttataaaccttgtcaataaaaataaatctaaatcactggtgttttaagtcacttgcatttgatatcttataggtgtatatagcatttccttatggggaataattctgaaaagggatttttaaattgattcagccctataacctatacaatttggaatactcttttgtggtaatggaccattttcttggagtgacttcacaaaactgaataattaaggttaattttatgaccatttgctataaagaaggtaagtagtc

SEQ ID NO: 4634 - DNA, 1164 bp, Homo sapiens
cccagcatgatttctggagcattgatgagaccgctgattaattctcctccgcctcagagtaacactgtcgatagcgacttcggagatctctaaacttctttaccgcgcccgccgcgcccctccgcggcccgggactgctcatcatcttttccaggaagcgaccgtggaaacaataaacacgcaggccccctagcgtccttccgttccgcgctgccaggccgcctcgcctcccgctcccgcccgccccgcgggacacagcccgcccgcactccggggcccgagcgccgaccacactccaggcgcagccggggagagccccgcgcgcgcatccctccgcccgcggccgaggcgacccctcgcggtcccgcccgcccgagcttcccgcggaggcacccggccgccccgcctcccccgccccgcgcccgccaactcccagctcgcggccctgattggtcgccgcattcccgctctccttcccgaaccgccattttgaaaatcttgttgattctggggagccgagcgcgcggcgcgagcgtcacgccagacagcggcccgcgcgccttctcctcggcgtcggccgccgccgcctcccagaacctcctcgtgccctcgcgtgccaggcccgcggcggccgaaatccgcggtaagggctgcttcgggacgccggaggcccggtcgcccctgccgcggccgacgggggagggacgcggccatttggacggcggcctggggcgggggaggggacgtggagggccggcagctcgggccgggccgggaacagcgcaggccgggcgggcgcgcgcgcacgcggggcagcgggcgcggtttcccgcctcgggaatccctggacggcggcggcggagcgggagggaagccgcccctggggactgagcgctgcggtcccggctatgggaggaggcaactttcagggcaggtgtcccgcgggaagggtagcatcattcagggtggccgcccggtcctgcctgcgggagtaggaggaccgagacgtccggctttcttcccgcatgcaggttcacagcatgtccgcctcggcccctgctgcggagggggagggaacccccacccagcccgcgtccgagaaagaacccgaaatgcccggtcccagagaggagagcgaggaggaagaggacgaggacgacgagg

SEQ ID NO: 4635 - DNA, 1225 bp, Homo sapiens
caccctcgtgggcatgggagctgccccggtgtcctcccgtgcagtctgtcacccacaaagggggacgcgggcagggcgccggagtgggtcccctctccgggcttcccgagggccgcagctgcctgctcggcgcctggcccggccgcgggcgggtgttgtctgacctggtggtttgttttgggttgttgatcaagcatgtcttgagtttggtcggtggcgccagttagtctgcagcgagaaggttcacacaccccctctattcattcctcttccacaggtgtgcggccgcctgagcccgagccaggagcactagagagggagggggaagagcagaagttagagaaaaaaagccaccggaggaaaggaaaaaacatcggccaacctagaaacgttttcattcgtcattccaagagagagagaggaaagaaaaatacaactttcattctttctttgcacgttcataaacattctacatacgtattctcttttgtctcttcatttataactgctgtgaattgtacatttctgtgttttttggaggtgcagttaaacttttaagcttaagtgtgacaggactgataaatagaagatcaagagtagatccgactttagaagcctactttgtgaccaaggagctcaatttttgttttgaagctttactaatctaccagagcattgtagatattttttttttacatctattgtttaaaatagatgattataacggggcagagaactttcttttctctgcaagaatgttacatattgtatagataaatgagtgacatttcataccatgtatatatagagatgttctataagtgtgagaaagtatatgctttaatagatactgtaattataagatatttttaattaaatatttttttgtaaatattatgtgtgtgtttttttttaatctatgggaatatttcttttggaaaatcatttttcagctcaattacagagctcttgatatcttgaatgtcttttctgtttggcctggctcttaatttgcttttgttttgcccagtatagactcggaagtaacagttatagctagtggtcttgcatgattgcatgagatgtttaatcacaaattaaacttgttctgagtccattcaaatgtgtttttttaaatgtagattgaaatctttgtatttgaagcatacatgttgaaaatacaccttatcagtttttaagtacagggttttatagtgtaatatat

SEQ ID NO: 4636 - DNA, 1099 bp, Homo sapiens
agtgggttatcaaacttttggatttttgccaatctcatttgtaaaatatactttattgatatggtttagatttgcataccttttttaaaaaagcaaaagcctggacatcttttcaagatgtttaaaggccatttgttggccaggtgcggtggctcacacctgtaatcccagcactttgggaggctgaggagggtggatcacgaggtcaggagatccagaccatcctggccaaccaacatggtgaaaccccgtctctactgaaaatacaaaaaaattagctgggcatggtggcacacacctgtagtcccagctgctcaggaagctgaggcaggagaatcgtttgaacccgggtggcagaggttgcagtgagccgagatcgcaccactgtactccagcctggtgacagagtgagactccatctcaaaaaaaaagaagccatttgtttttcttgtttctttctttttgtttgtttgtttgtttgtttgtttgttttgcaaactgtacttaattcctgtacgtgatttactcttctgttggattcttgctctttttcttgttgatttgtaagggctctttatataatagggagattagctctaagtctgtgatatgatcttcaaatttttcttggtttatcatttcctttagtatttgtggggtttttttggtcttatacagaattttccattctttcttttatggcttctggatttcgagtcacagaaagcatttccaccaaccccttccacacatacacgcacaagaattgacccatattttcttgcagaatttctatgctattactttttttacatttaaatatttgctccatttgaggtttatcctgatattctgttaagtatggattcaagttttttgtttttgtttttgtttttgttttggaaataggctctcactctgttgcccagactggagtgcagtggtgcagtgacggctcactgcagcctcgacctcctgtgctcaggtgattctcttgcctcagcctcctgagtagctgggaccacaggtgcacaccaccatgcctggcaaattttattatttgtggagacgaggtctcgctacattgtccaggctggtc

SEQ ID NO: 4637 - DNA, 1102 bp, Homo sapiens
gccaggatggtctcgatctcttgacctcgtgatccgcccgcctcggcctcccaaagtgctgggattacaggcatgagccactgcgcccggccccagccagagttttaaaatatgtaacccttattagaagcctttctcgtttttttttggtggaaagaagggggtatatatcccactgcagtctataccacaggaacatggtcagtctgttaatttcagtgctgagttgggatttgaaagtaagctgtttcttggccgggtgcgatcgctgtcgcctgtaatccctgcactttgggcggcctaggcaggtggatctcctgaggtcaggagttcgagaccagcctggccaacatggtgaagccccgtctttactaaaaatacaaaaattagcctggtatgatagtgcatgcctgtaatcccagctactaggaaggccgaggcaggagaatagcttgaacctggagggcagaggctgcagtgagctgagattgtggcactgcactccagcttgggtaacaagactgaaactccgcctcaaaaaaaaaaagtaagctgtttcttcagttatagatagcagtgtcagcagagtgctacctggtccattcctacctccttaatcataagtataaagtaattgatccagtggaacctcaataggatatttttggaaattctagtggattcaatgaaagaatcatcaactatcttagtatagggctgttaacttatactttctacacataactctttaatctagctttcttgctcctttactatcaccatgattatttacatttatatagtgtcttacagtttgtaacatacatttagctctgctaattttgtatagcttgtacctgaagataaaggaaaaacaaaatgttaacttaggccttacagaaattatttaaaaacatcctgacataggccaggtgtggtgactcacacctgtaatcccagcactttgggaggctgaggcgggcagatcatgaggtcaggagatcgaggccatcctggctaacacggtgaaatcctgtctctactaaaagtacaaaaaaattagccgggcatggtggtgggcgcctgtagtcccacctactcg

SEQ ID NO: 4638 - DNA, 1204 bp, Homo sapiens
ggcagcagaaatctcagctgtacttctagcccttttaaaaagtttgctctgtaaattggaatgaggtcagatttggagcttctcattgcacgcggagattattattgcatcgggttccaagccaatgggaagcccgggggaggggtttggcatgaggaagcgttggttacagcagctgattggctgcagccaagactgtgaaaggataaagaggcgcgaggcggaattggggtctgctctaagctgcagcaagagaaactgtgtgtgaggggaagaggcctgtttcgctgtcgggtctctagttcttgcacgctctttaagagtctgcactggaggaactcctgccattaccagctcccttcttgcagaagggagggggaaacatacatttattcatgccagtctgttgcatgcaggctttttggcttcctaccttgcaacaaaataattgcaccaactccttagtgccgattccgcccacagagagtcctggagccacagtcttttttgctttgcattgtaggagagggactaagtgctagagactatgtcgctttcctgagctaccgagagcgctcgtgaactggaatcaactgcttcagggaaaaagaaaaaaaaaaaaaaaagacttgcctgggaggccgcgagaaacttgcattggaagcttcagcaaccagcattcgagaaactcctctctactttagcacggtctccagactcagccgagagacagcaaactgcagcgcggtgagagagcgagagagagggagagagagactctccagcctgggaactataactcctctgcgagaggcggagaactccttccccaaatcttttggggacttttctctctttacccacctccgcccctgcgaggagttgaggggccagttcggccgccgcgcgcgtcttcccgttcggcgtgtgcttggcccggggaaccgggagggcccggcgatcgcgcggcggccgccgcgagggtgtgagcgcgcgtgggcgcccgccgagccgaggccatggtgcagcaaaccaacaatgccgagaacacggaagcgctgctggccggcgagagctcggactcgggcgccggcctcgagctgggaatcgcctcctcccccacgcccggctccaccgcctccacgggcggcaaggccgacgacccgagctggtgcaagaccccgagtgggcacatcaagcgacc

SEQ ID NO: 4639 - DNA, 1152 bp, Homo sapiens
ctccaaaccggcgcagaaaaagagctgcggctccaaagtggcgggcggcgcgggcggtggggttagcaaaccgcacgccaagctcatcctggcaggcggcggcggcggcgggaaagcagcggctgccgccgccgcctccttcgccgccgaacaggcgggggccgccgccctgctgcccctgggcgccgccgccgaccaccactcgctgtacaaggcgcggactcccagcgcctcggcctccgcctcctcggcagcctcggcctccgcagcgctcgcggccccgggcaagcacctggcggagaagaaggtgaagcgcgtctacctgttcggcggcctgggcacgtcgtcgtcgcccgtgggcggcgtgggcgcgggagccgaccccagcgaccccctgggcctgtacgaggaggagggcgcgggctgctcgcccgacgcgcccagcctgagcggccgcagcagcgccgcctcgtcccccgccgccggccgctcgcccgccgaccaccgcggctacgccagcctgcgcgccgcctcgcccgccccgtccagcgcgccctcgcacgcgtcctcctcggcctcgtcccactcctcctcttcctcctcctcgggctcctcgtcctccgacgacgagttcgaagacgacctgctcgacctgaaccccagctcaaactttgagagcatgtccctgggcagcttcagttcgtcgtcggcgctcgaccgggacctggattttaacttcgagcccggctccggctcgcacttcgagttcccggactactgcacgcccgaggtgagcgagatgatctcgggagactggctcgagtccagcatctccaacctggttttcacctactgaagggcgcgcaggcagggagaagggccggggggggtaggagaggagaaaaaaaaagtgaaaaaaagaaacgaaaaggacagacgaagagtttaaagagaaaagggaaaaaagaaagaaaaagtaagcagggctggcttcgcccgcgttctcgtcgtcggatcaaggagcgcggcggcgttttggacccgcgctcccatcccccaccttcccgggccggggacccactctgcccagccggagggacgcggaggaggaagagggtagacaggggcgacctgtgattgttgttattgatg

SEQ ID NO: 4640 - DNA, 1200 bp, Homo sapiens
ggaacctctgtcctcaactcatctgtaaagtgttttggatcagttgacataggtactcacagattggccacaacaatagaaaagacaaaggcagccaggcgctgtggctcatgcctgtaatcccagcactttgggaagccgaggcaggcagatcacaaggtcaggagttcgagaccagcctgtccaatatggtgaaaccccatctctactaaaaatacaaaaattagctgggcgtggtggcgggcacctgtagtcccagctactggggaggctgaagcaggagaacagcttgaacctgggaggcagaggttgcagtgagccgagatcgcgccactacactccagcctgggagcagagtgaaactccatctcaaaaaaaaaaaaagacaagacaagacaaaggctagcttttccactggtagctgaatgctatatactaatttaggaagtttttgtcactaagtatatgatacacatgttgggagtatgttaattattttctcttttaattgaagtgaaaagagcagtgctgggattgaccatgcagaagagatggagttgctgttggaaaactactaccgattggctgacgatctctccaatgcagctcgtgagcttagggtgctgattgatgattcacaaagtattattttcattaatctggacaggtaagaaagcattatataaaactaagtttttttaataaaataattataagaaagtttttaaggaaatattttgtgaggaattacgccatcattatcatctatactacattattattattttttttgttgtgtaggtttcatccatgtggtctgtatagatttgatgaatgtgctgtatatagttagtgggcccttctaatctgaataggtgttctcctctccagccaccgaaacgtgatgatgaggttgaatctacagctgaccatgggaaccttctctctttcgctctttggactaatgggagttgcttttggaatgaatttggaatcttcccttgaagaggtgagaatgtattattatttctaaaacttgggggttttggccgggcatggtggctcatgtcagtaatcctagcactttaggaggctgaggcaggtggatcacctgaggtcaggagtttgagaccaacctggccaacatggcgaaaccctgtctctactaaaaatacaaaaattagacaggcacggtggcag

SEQ ID NO: 4641 - DNA, 1145 bp, Homo sapiens
tgaaatgagtgaaaacctgagtgatcctgtgtctcccgtggtgcgagtgagtcgctgccgctgaaggcaaggggtgggggtgggacctgcgggggtggaaggcaggtggtctccgggcaccgcctgggatttgggagaagaacccgccacctttgcctcggcaatgctcacaagaagataaatcgcactccccaccattttgaacgggggcagatccacagggaagtctcccttggggaatgtaggactagttgcaggctgggggtgttgggaacccgggcattaatcaggtctaaccacagagccggaataattaataccgtattatataccccttttccttctgccgtcatgattctccttggcagcagcgttagcagccgcctgagggtgaaaatgtgggtgatggggaagttggtaatgactccgctgttttttctcatggctcctttgggccacagctgcccgcccccggtatacactgtagttgattgcagggaaaccctgtacctctccctttccttctctaccgattttgcacttttctctatgctcaccaccaagtgtaatcaataacaagcactgacaatacatagcaatagtgaaatctgaaataactaagaattaggtactacagccatggagctggctgggtaaaatctaattggatatttcagtttcattcacctaccctgttttggtgtttggttttggttttggttttggtgagttttttttttttttttttttggaaagcaaggatcacacttccccctccctgttccttaatcccttttctaaaaaggggggaaaatccggatggattttagggattggtctggtgtcagctgtgttttattgcacacctaaatcctgattataggcttttcatttctccgcaaagcctttattttggcagttaagccaaatgtgttttccagaaagttagttattttctcctctttctttcctttctttcctccctttttcccgtctgaccccaaacgttattgtccaaacatgactggacagcagcttttgtttcttgaccctgtaatatgacagtctgctaatattgacagaaggtgcagtttttgggttatagtcgtgattttcgctaatcaatcatattagcaggaaaaaaa

SEQ ID NO: 4642 - DNA, 1194 bp, Homo sapiens
taaataatcatctgtagagttggaatagaatatagtagccggtgaaactgcacgattgttgctggcttaaagatagaccaatcagagtgtgtaacgtcatatttagcgtcttctatcatccaatcactgcactttacacactataaatagagcagctcatgggcgtatttgcgctagtgttgggtgttccgctgtgctgtttttccgtcatggctcgcactaagcaaactgctcggaagtctactggtggcaaggcgccacgcaaacagttggccactaaggcagcccgcaaaagcgctccggccaccggcggcgtgaaaaagccccaccgctaccggccgggcaccgtggctctgcgcgagatccgccgttatcagaagtccactgaactgcttattcgtaaactacctttccagcgcctggtgcgcgagattgcgcaggactttaaaacagacctgcgtttccagagctccgctgtgatggctctgcaggaggcgtgcgaggcctacttggtagggctatttgaggacactaacctgtgcgccatccacgccaagcgcgtcactatcatgcccaaggacatccagctcgcccgccgcatccgcggagagagggcgtgattactgtggtctctctgacggtccaagcaaaggctcttttcagagccaccaccttttcaagtaaagtagctgtaagaaaccaatttaagacaaaagggaatgcattgggagcacttttcgttttaatgctactgaaggcttcaaaaccaatcgatttcggccggtcgcggtgactcacgcctgtaattcaagcactttgagaggctgaggcgggcggattaccagaaatcaggagttcgggatcagcctggccaacatggccgaatcccgtctctacgaaaaatacaaaaacacgccgggcgcgacggcgagcgcttgtaatcccagctacactctgaaggctgaggcaggagaaacacttgaacctgagaggcagaggtttcagtgaatcgagatggctctaatgtactccagtctgggcgacagagagattcggttaaaaaaaaagttcgacttaaaataattctggagtcagaatgggtttacatttaattcttaacccagttcctcaaagcctgtagctctgttaagaaaataaaggccattggtcaagcctgcttggtcccaccctcat

SEQ ID NO: 4643 - DNA, 1206 bp, Homo sapiens
gcacttgaaagacttaaaaagtttaccactccggcatattagtgaaagcccttaatataagcccttattaaaattctcagtcgagggtataaattcagattcaaatagtagtgtcgtaaacgggagggaaaaactaaagggattaaaaagtgaaactattgtgttctccctcgcagtccttaggtcactgcccctcgaggggcggagcaaaaagtgaggcagcaacgcctccttatcctcgctcccgctttcagttctcaataaggtccgatgttcgtgtataaatgctcgtggcttgctttcttttcgcgtacctggtttttgttgtcagctggttagacatgtctggtcgcggcaaaggcggtaaaggtttgggtaagggaggtgccaagcgtcaccgaaaagtgctgcgggataacatccaaggcatcaccaaaccggccattcggcgccttgctaggcgtggtggggttaagcgaatttccggtttgatttatgaggagactcgtggcgttctcaaggtgtttctggagaacgtgatccgggacgccgtgacctacacggagcacgccaagcgcaagactgtcactgccatggatgtggtttacgcgctcaagcgtcaaggacgcactctgtacggcttcggcggttaatcttttcgtcagttttcttccaatggcccttttcagggccgcccactccctctcagaaagagctgtgattgtattctttcggatggtaacatctcaatggctttactcggctattctgcctagtatgtagaactattataaaccagttgggagagaccaggttgtttggtctgagtggctgctaaagcagaaatcagctaagtaaacgaggtctccgagataagtgagctataaacttcaatgctatagttttgacatgtcaagcaacttaacgtgcagcgcgagtccgataaatgagtagctcagctttttagttttaaaaacgagttgtgcgttatttgtacgagagcctaagatgctagctgcctggaactgagtaggtggattaaaatgggtgtcaggtctgttttcccaggcgtatctgacttaacgtcagcaaaagctgtacttttagcttccctggtaacacctgccgtccttaaccgccccctgccggtagcgccagaagcctttacttccatttctagttgagcttggcgtcctgctgagtgac

SEQ ID NO: 4644 - DNA, 1292 bp, Homo sapiens
cggctaagagcatttttctaattgcccacacttcttatgcgacacccagaaaaatacaattttaaataaagcgcatatgcaaatttccctaatcgtctccaatattctctgatttcttttttatattttaactagaaacaattggaggtttccgcgttgctttgtgtggttgtaaattttaagacttcaggaaacttttccagtacaagacttgtccacagtggatatagcagctaaggggttaacaaaatgacgtcagagtagctacggtaatgggcaggagcctctcttaatctgcaaccaggcacagagatggaccaatccaagaagggcgcggggatttttgaattttcttgggtccaatagttggtggtctgactctataaaagaagagtagctctttcctttcctccacagacgtctctgcaggcaagcttttctgtggttttgccatggctcgtactaaacagacagctcggaaatccaccggcggtaaagcgccacgcaagcagctggctaccaaggctgctcgcaagagcgcgccggctaccggcggcgtgaaaaagcctcaccgttaccgcccgggcactgtggctctgcgcgagatccgccgctaccaaaagtcgaccgagttgctgattcggaagctgccgttccagcgcctggtgcgagaaatcgcccaagacttcaagaccgatcttcgcttccagagctctgcggtgatggcgctgcaggaggcttgtgaggcctacttggtagggctctttgaggacacaaacctttgcgccatccatgctaagcgagtgactattatgcccaaagacatccagctcgctcgccgcattcgcggagaaagagcgtaaatgtaaagtcactttttcatcagtcttaaaacccaaaggctcttttcagagccacccacttattccaacgaaagtagctgtgataattttttgttgtcttaacagaacaaatttctaaggacccccccggaaagcattagactatggtcttaaagttgattaacagaaataacggtttggtcagtcttgcagtgtaggttatttctgaccttattaaggtgctatttggagagaagctgtgtaagtccactatcattcaggcctctagcttgctatgattagcatttgtttaaacaactttgtaagagtaagggaaaaatctggtaagtagttaactggcgcttactaggcatttttgcaaagctttgaaaagattagaaaattgtgtcttgcgagttccagtgtcttcctcaaaatgcttaggaagat

SEQ ID NO: 4645 - DNA, 1228 bp, Homo sapiens
tgctttggactggccgtggaatccttgtcccagtccacagttcctgtgcgactgcacgaagaattcacagaggacctgtgttacttcccttgtgaagaaacagaattatcatgaaaatttaggtggaaaccatttcgcttttttcttcaaaaataagggaagcatgtgcccaaccacccctgggaaaaagaaccttcaggggcaaaggagcgaacaggtaatttataagaaaaacagaaagtggtctctgactgccccagacttccttcggagttgggggaattggggacgcctggacgcgttgtttttgtgtttgtggaaaaaataaatgaagagcatgaagcccgaggcttctgagatcctttcctgaccaaacccaagtgatttggtgcggggaattttaatatttttccccttttgtgaggtggaacaaacacaacttgggagcagcgcagcggctcagagcctgccagccaggcgggcgaccagagcaccaatcagagcgcgcctgcgctctatatatacagcggccctgcccaggcgctgcttcatcggcgctttgccacttgtacccgagtttttgattctcaacatgtccgagactgctcctgccgctcccgctgccgcgcctcctgcggagaaggcccctgtaaagaagaaggcggccaaaaaggctgggggtacgcctcgtaaggcgtctggtcccccggtgtcagagctcatcaccaaggctgtggccgcctctaaagagcgtagcggagtttctctggctgctctgaaaaaagcgttggctgccgccggctatgatgtggagaaaaacaacagccgtatcaaacttggtctcaagagcctggtgagcaagggcactctggtgcaaacgaaaggcaccggtgcttctggctcctttaaactcaacaagaaggcagcctccggggaagccaagcccaaggttaaaaaggcgggcggaaccaaacctaagaagccagttggggcagccaagaagcccaagaaggcggctggcggcgcaactccgaagaagagcgctaagaaaacaccgaagaaagcgaagaagccggccgcggccactgtaaccaagaaagtggctaagagcccaaagaaggccaaggttgcgaagcccaagaaagctgccaaaagtgctgctaaggctgtgaagcccaaggccgctaagcccaaggttgtcaagcctaagaaggcggcgcccaagaag

SEQ ID NO: 4646 - DNA, 1260 bp, Homo sapiens
ttccgtaatttattagttagcaagtggaaataaaaagaaatgtggaatggggctatgcttagcgtcattaagctgacaggaatacagcgcattcaacttgcaaacacccttccactcccacaaagagcaagctgtcactggccaatcaaaacaatgaaccataatgaaacagtttttcttgctccacccacttggtgaccaaatttgaaaaaaaaaaaaaaccgcgccaactcatgttgttttcaatcaggtccgccaagtttgtatttaaggaactgtttcagttcataccttccactgcgataggaatcatgtctggtcgcggcaaaggcggaaaaggcttggggaagggtggtgctaagcgccatcgtaaggtgctccgggataacatccagggcattacaaaaccggctattcgccgtttggctcggcgcggtggcgtcaagcgcatttccggtcttatctatgaggagactcgaggtgtgcttaaggttttcttagagaacgttattcgagacgccgtcacctatacggagcacgccaagcgcaaaactgtcacagccatggatgtagtatatgccctaaaacgtcaggggcgcactctgtatggcttcggcggctgaatctaagaatacgcggtctcctgagaacttcaaaaaacaaaaacaaaaaaacccaaaggcccttttcagggccgctcacaaagtcgtttaaagagctgaaatgcgttgcgagaatgagtttggatgacagaaataaccgtgacatcctgcataagaatgaattgtgtttgccatgaccggccacactgtgacaaaatttcaaagcataaagtaggcatagagaggtaagcgctaataaagtgattggctccacaaaaagcattttgctgggcgcagtggctcacgactgtaatcccagcactttgggaggccaaagctagtgtatcacttgagatcaagaatccgagaccagcctggccaaaatggtgaaaccccctctaccaaaaaaaatacaaaacttagccgggcgtggtggtctgcacctgtaggcccagctagcccggaagcagagattgcagtgagccgagatcgcgccactcccctccagcctgggagacagagagagactcctcaaaaaaaaaaaaaaaaaaaaaaaaaaaaattatgtattttagagcattctaagaatggtactttggacttaaccgaagggctggaggcgcgtgttgaacaaaggttatcaccttttggctcatgc

SEQ ID NO: 4647 - DNA, 1213 bp, Homo sapiens
tgatgaactcaaatgccctcggctcaataggcaggactctccgaggagcctgtgttacttccctcacttaagtgcagatttgtaataaaaatcttaatgccagtggcatgctttttggatatataagaagctaaccacttggagtatcatatttgagaggtcagaaaagtccacagttaaagatcggtttataatttacgaagaaaatagaaagttttgtttctctgagttgaaatttgccaagcacggcgggaaatattgcaagtttttggcacaaggctttgtgcttcccttataatttgagatctgcgtgaagcctgagggttcggggatcattatctgagaaaaaccgggcagttcggtgtagacaatttttatatttttggctttttttgaggtgtaacaaacacaactcgggatccgagaggacactctgcggctgccagcgaggcgggctggacagcgcaccaatcacggcgcagctccgccctatataaacgggcgggcgcagcgccgcggctcgagtcccggccagtgcctctgcttccggctcgaattgctctcgctcacgcttgccttcaacatgtccgagactgcgcctgccgcgcccgctgctccggcccctgccgagaagactcccgtgaagaagaaggcccgcaagtctgcaggtgcggccaagcgcaaagcgtctgggcccccggtgtccgagctcattactaaagctgttgccgcctccaaggagcgcagcggcgtatctttggccgctctcaagaaagcgctggcagccgctggctatgacgtggagaagaacaacagccgcatcaagctgggtctcaagagcctggtgagcaagggcaccctggtgcagaccaagggcaccggcgcgtcgggttccttcaaactcaacaagaaggcggcctctggggaagccaagcctaaggctaaaaaggcaggcgcggccaaggccaagaagccagcaggagcggcgaagaagcccaagaaggcgacgggggcggccacccccaagaagagcgccaagaagaccccaaagaaggcgaagaagccggctgcagctgctggagccaaaaaagcgaaaagcccgaaaaaggcgaaagcagccaagccaaaaaaggcgcccaagagcccagcgaaggccaaagcagttaaacccaaggcggctaaaccaaagaccgccaagcccaaggcagccaag

SEQ ID NO: 4648 - DNA, 1181 bp, Homo sapiens
tgcagaaaaatacttggtccttaaatgtggcatttggatggattaaggacttgccgaaacgtaaaactgacagacttgggggggggggatgtcccaattagcacggcttctgtatgcaacgagtcccatactttgttaaaggaagaaaggaatgtgagttctcctaatctgttaagtatctttcggtgtaagttctgacaccacaatgttaaaaaagtcggatctcaaaaaccaactgctccaagcgaagtgcacagctgtcttgcctaaagaggcctatttatagtagcctcgggtagtctggtctgggctttctcattgggtacaagtaaaggaacgaaatagccaatgaaaaggtagacttttaagtgtcgtttacattggcatttgtgacgacactctaaaattaatccaatcataaacgaaatctgattaacctcatttgaataccgcatctataaatgaacagggcctcggcgggagtgattattttctcaggtgtttgcaacagtgttctaactattaacgctacgatgcctgaacctaccaagtctgctcctgccccaaagaagggctccaagaaggcggtgactaaggctcagaagaaggacgggaagaagcgcaagcgcagccgcaaggagagctattcagtgtatgtgtacaaggtgctgaagcaggtccatcccgacaccggcatctcttccaaggcaatggggatcatgaattccttcgtcaacgacatcttcgagcgcatcgcaggcgaggcttcccgcctggcgcattacaacaagcgctcgaccatcacctccagggagatccagacggccgtgcgcctgctgcttccgggggagctggccaagcacgccgtgtcggagggcaccaaggccgtcaccaagtacaccagttccaagtaactttgccaagtaagcatctttacacctaatcccaaaggctcttttaagagccacgcatgttttcaataaatgagttgtaatcatttcattcaaaaggggggttattggacttagcaccacagtaccaatctttaatgttacgttagtactgcagaggaaataacttggaagttacagggaataacaataggtactagaaattgagtgctatgggtacgtattagatcgttagctcatttagtatcacataacactagcataaactga

SEQ ID NO: 4649 - DNA, 1198 bp, Homo sapiens
atgatgcccatggccttggatgagatgccggtgtcggggtggacctgctttagcaccttgtacacgtacacggaatagctctccttgcggctacgcttgcgcttcttaccatccttcttctgcgccttggtcaccgcctttttggagcccttttttggagcaggagcggacttagcaggttcaggcatgataaataaacacttcgtccacaacctaaagagaaatgcaagtgtcctcactctgcagctggtaatatttgtagagctcctatcgtaaactggcatttaaaagcttacacattgattggatgaattgtctctgtgtgccctgtggtatgcaaattaggtgattctagcgtttctttgcaattggttggttgttctagccaatcaaatagcgttatttacaattcgacctccaagtataatagtttctcacttgctaacaaaattcacttttacatttttgtcttcattgcttaacatcgtttttaagaattcaaaatgtccggacgcggcaagcaaggcggaaaggcccgagctaaggctaagacccgctcttcgcgggccggactccagttccctgtgggccgcgtacaccgcttgctccgcaagggcaactactccgagcgagtcggggccggcgcgccagtgtatctggcggcggtgttggagtacctgaccgccgagatcctggagctggcgggcaacgccgcccgcgacaacaagaagacccgcatcatcccccgacacctgcagctggccatccgcaacgacgaggagctaaacaagttgctgggtaaagtcacaattgctcagggcggtgttctgcccaacatccaggctgtactgctccccaagaagactgagagtcaccacaaggccaagggcaagtaaaacgagaactcttatattggctttttaaggaagcagtcttaacaaaggctcttttcagagccacccatgtattccttaaaagggctcacattttctgtgtaaatagctattttgcagttttctttaataatttttccatttataagtgggtgttcttaacactgaatcgtgaaactaaccgtccattttaaagatgccataaaaatacataagcaaattggcggggcgcggttccttacgcctgtaatcccaggactttggaaggccaaggtgggcggatcacagggtcaggagttccagga

SEQ ID NO: 4650 - DNA, 1198 bp, Homo sapiens; identical to SEQ ID NO: 4649

SEQ ID NO: 4651 - DNA, 1366 bp, Homo sapiens
ttatccgtgtttttctcttcgggaggaaaatccttttggtcagatttcccttggcttggtggtggagagggtgagatcttgcagttttcaaacacttcctaagggggttccgtccccaagagagcaagcagcagaaatgccagaggaaccgtgcctatggggacaaagctgaactcctcatggaaggagattactgcagttccggtcttgtgagccaaagctcctgttcaatcgtcctagagcatcccaagcagcaaatgattttaaacatgttaatgtatttaatctcatttagttgttaaaatatgcctaaatttcctctttgggaacgcaagacttgcagagatgactccatggagagcggactctgccggcgggaactggagtcgttggtgacgtcatcccagtctgatctgtgaagggtagggccagcaggcagcaccaaagttcccgtatgcgcgttttcagtcttcatttaggtccgaattcccggcatataagaatactaccgtcgcttgtttttcagatttttgcggctattttcgttggtgtgttggtcatgtctggtcgcggcaaaggcggaaagggactgggtaaaggaggcgctaagcgtcaccgtaaggtcctgcgagataacatccagggcattaccaagcctgccatccggcgccttgctcgtcgcgggggtgtcaagcgcatttctggtctcatctacgaggagactcgcggggttctgaaggtgtttctggaaaacgtgattcgtgatgctgtgacttacacggagcacgccaaacgcaagacagtgacagcgatggatgtggtctacgcgctgaagagacagggacgcactctttacggcttcggcggctaatgctaccgcttaaacgactcagcatctcgacttcccaaatcaaaggcccttttcagggccgcccacagttttccgcaaaagagctcatgacttgttagacgattggttggtctctttataagttaattgttcctgtcaacaggtacgtatatttttcagccgttttttttttttcgttccaaattacatttggggtttcggcatacgattttttaggctacgatccttttatgtttattgtagtagggccttagattgcactgaaaaggctagggtaatagtgtctgtttaccttaccacttttattttgagtacctaaaaatgcatggttttcgacataagtgggaaaaccgcaagacactgcgtaaccgctcaaaatggcggagagcgaagaacaaagccggtgcctggcaatgggccggacccgcgaattagcgcaaccaatcatcttcctggaaaggagtgtgggccttaaattctagcggcctgttttct

SEQ ID NO: 4652 - DNA, 1232 bp, Homo sapiens
aatggtcgagcgcttgttgtagtgggccagacgggaagcctcgcctgcgatgcgttcgaagatgtcgttaacgaaggaattcatgatgcccatggccttggatgagatgccagtatcggggtgaacctgttttagcaccttgtacacatacacggagtagctctccttacgactgcgcttgcgcttcttgccatccttcttctgcgccttggtcacagccttcttggaacccttcttcggagcaggagctgacttagctggttcaggcatgctgtcagaaaacaataacagcagtgagaatgaacgcacttaaataaaagctcgtgtctagagtctctccttttataggcctttcatgcaaataaagaattcaaaatatccagctctgattgggcaatgtgttagtgacgcatacatgtaaaatagccttcaccttatttcctttctaattggttggctcgtcaaagaacaattttaaccaatcaaattgcgcctttcacaattctaccgatgactataactagcttcttattcctccatcgagcccattctttttctttattcagtggattgttagttcttctgctgttaggaagccactatgtctggacgtggaaagcaaggcggcaaagctcgggcaaaagctaaaacgcgttcttccagggccggtcttcagtttccagttggccgtgtgcaccgcctcctccgcaaaggcaactactccgaacgagtcggggccggcgctccagtgtacctggcagcggtgctggaatatctgacggccgagatcttagagctagctggcaacgcggctcgcgacaataagaagacccgcatcatcccgcgccacctgcagctagccatccgcaacgacgaggagctaaataagcttctaggtcgcgtgaccatcgcgcagggcggtgtcctgcccaacatccaggccgtattgctgcctaagaagacggagagccaccataaggccaagggcaagtgaaatgattactagtcaaatccgtcagtgatcccgagtcccagaaaccaaaggctcttttcagagccacccaccttttctgtaaagtgctggaatacacatacgatgcctgaaatctcaatgttcactgtcctaatttttaacgaacgcttctgacgttactggtcagttctttattgaaatccttgctcacatttcatgcactaatttatcttactggtgtttctttgcagtaaaaatg

SEQ ID NO: 4653 - DNA, 1138 bp, Homo sapiens
cttcaaagtaagagttttttaaaaaatataaaggagacattgagctggaccaatcactctcaaacgcggtatttttgaatcgctccggaactgcagaacgttcatttccgtctgtcaaacataatcccaaacaaactgattaaaataaaatcaatgaaggtacgtaatacaggtaggcacataaaacataataaaatgtaaggaactaggggaaaaaagcatttagataggttaagattttctaaaatgagacctagtagctgatcacaagtcctatcacactacataattcagggcgcgaaactggaagattcggaccaatcagaaggactttgcctttataaataggagtaagaacaactgtttgttcagttgtgaccattgcttgaaacccattcctatggcacgcacgaagcaaacagctcgtaagtccactggcggcaaagccccgcgcaagcagctggccactaaggcggctcgcaaaagcgcgccagccaccggtggcgtgaagaagccccaccgctacaggcctggtactgtcgccctccgtgaaatccgccgctatcagaaatcgactgagctactgattcgcaagctaccattccagcgtctggtacgtgagatcgcgcaggacttcaagaccgacctgcgcttccagagctcggctgtgatggcgctgcaggaggcctgcgaggcttacctggtggggctctttgaggacaccaacctgtgtgctatccacgccaagcgagtgactatcatgcccaaggacatccagctcgctcgccgcattcgcggagagagggcataagttgtactgagggtgtgcgccaacttaaaccaaaggctcttttcagagccaccaacaatttcagttgaaagcgccgtagcactagggagtaatgtctcctaaaacaaggagggtggagggttaggggatgggggcagggccggtggctcttctaaactaggcttttgtgtcttggccattgtcttcaaaatggccgatagtggcggctcacgccttgtaatcccagtactgtgggagcccgaggagggcgggttacttatacaaaggtcaggaattcgagactagtctgcctaacatagtgaaaacccgtcttcactaaaagtacaa

SEQ ID NO: 4654 - DNA, 1399 bp, Homo sapiens
ataattctaccacgaatcactaacctatcatgccttcgccatcgggaagaaaacccttttggttatgtttcccttggcttggtgatggagagggtgaaatcttgcagttttcaaacacttccgaaggggggtttcggtccgcatgtgctttacagccggcagcagaaagccagtcactgtgaccttggggacaaagctgcactcctcaggcttccggtcttgtggaccgaggctcctctccaatcgtcctaaagcaactgaaggaacaattgataacaatttaaacatgttaatttatttaatctgatttggttgttaaaacagccttaaaactctcattcctatttcccagcaattgcaagagacgcctccgcggagccggcgctcagatgccaaaggctggagtcgttggtgacgtcatccagggctgggctatgcggggtggggccaagaagcaggaccaaagttccggtatgcgcgctttcagtcttcaattaggtccgaattcccggcatataagggcgttgctttgccttggcgtttaggtttcttaagttggttttagaagttgcttagtcatgtctggccgtggtaaaggtggaaaaggtttgggtaagggaggagctaagcgtcatcgcaaggttttgcgcgataacatccagggcatcactaagccagctatccggcgccttgctcgtcgcggcggtgtcaagcgaatttctggccttatctatgaggagactcgtggtgttctgaaggtgttcctggagaacgtgattcgtgacgctgtcacttacacagagcacgccaaacgcaagaccgtgacagcaatggatgtggtctacgcgctgaagcgacagggacgcactctttacggcttcggtggctaaggctcctgcttgctgcactcttattttcattttcaaccaaaggcccttttcagggccgcccacttttttcataaaagagcagacatcttgttatcctgctttgttccagatttttgctgagaagtagttactgtgcacatgtgtagatttgcaggtaacgtttaattactcgtgcttaatctcgcatgtttaggatttgggcataaagtacttaaagccactgttttctgcttgagggaagttggtatgttgaatatgtttagctttcttgtggcattttaacactagatatcagtgagtaagctggattgtgacagtttataattcccgtgggccttcctccttcagtttaagcttgaagcgttcgtaaggttctcaaagactacagaagttggaaacttcgcggagagactgcaagttaccctttccaaaatggcgggaagggctaaaaacaaagaaagctcgcacccagacggcgggccttaaaccaaggcgaatccgtgagcgca

SEQ ID NO: 4655 - DNA, 1198 bp, Homo sapiens
tccctcagatggccccacgattctttaagatacagtccaaactctagggtctgacactcagaaccaatcacaatttgactgtaacccatcacttcaacactttaccagtcacccacttgggcttctaggagagacaatggttatttctcagatgcgttagtgccatcatatggcaggcatccctctgggaatcctaccagggagtgtccaggaatgcaacaacagacatacctggtttaatgatggtgttcatatacatgacctaagaaaaaagacaaaatccaatttgatttaaaaaacaggagcagtcactaattcgtttttcctttttaatttctcttatttttcccttagaaagtgtactttgtcatctttattagggtctattcctccctcccagtctcctctttagtttttcttcctttatgagagtaagagggccatttatccattatttccgtcactgaaaacatttaacaaaagaataggaattgccaaatgaaactgttgagaagagaaacattacacatatcaggagaggcctggccgagtggttaaggcgatggactgctaatccattgtgctctgcacgcgtgggttcgaatcccatcctcgtcgctcggctttccctgctaactgggcttttttaaaggtttcccctcagtaaggtatcgtctgctatacctccccgtttgctcactgagaattaggtgtttttagctccctttaagagaggtattcttcagtatgtattagcacactaacgtgtgctggcactaacaaccttctgttggtaacatgattactgattctattttataaaggtccgaaaaattacagtattttagctccgctccctccgcgcaggcagaggtgtatccaccgctgctccagatccgcaagactcttgtagttgaaaactgatttccgaccctctgattttttgcttaaccccctgagtagcgcctagcatttctccttatctagctgtgatccggtggttgttaattatacataactggggagatttctcaaaatgctcgtgtctcctcctctcccctagaaccagttaaatcgaaatctttagaggggtggagtctagtggtcgttttgcaagtgccttgggtctcccgggttaagaaccatcactgtcctcacttccttcttagttttggtttcgctgtttcggcagttttca

SEQ ID NO: 4656 - DNA, 1246 bp, Homo sapiens
atggactagaaatccattggggtctccccgcgcaggttcgaatcctgccgactacggcagtgggtttttgcatcttcaagcaggtttcatccgaccgatcgatatttcacgtgtaaaaaggctttcgatcttttacaagttaacatcaaaatggatttcttggggattcagggcaggacaatttcaatttatgtctcagaggtcctcaaaatggatttctcattgcccaaagtaaaccttatctctgatcttttacaagttacatcataatggatatttcattgttcaggaaggaatcattgtgcacaaggatggatttctcattacccacgaaggaatcatacttcatgagtaaaacaagtcaaaggaacaaataaaactatattttgttttaattggagggttttgggttcaaaatccttatgatcagaaagaaataaaatttcatatattcatgtataggaggacgcggtaatcccaaaacgtttttttctataggtataacgcctgtcttcgttcgtcagagggccagtggcgcaatggataacgcgtctgactacggatcagaagattccaggttcgactcctggctggctcgttcgactttagtggaaactttgaggtttacataaatgccccttccctgggcactcatatacattttatgtattttatcattttaatttttaaaagaattacacaagatgacaaaaatttttataatatagactccagcttcagttcactattgttttacatacataagagttttttttttttaaatcacatcactaaattgataagtttcagaactgaccaattttcacattgcttgataaaacttaatacaggggaatttttttttctttttttgagatgtatcactgtgtcgcccaggctgcagagcagtggcgcgatctcagctcaccgcaacctctgcttcctgagttcaagcgattctcctagcctcagcctccagagtagctgggattacaggcatgtgccacgacacccagctaattatttttgtatttttaatagagaggaggtttcgccatgttggccaggctggtctggaactcctgatctcaagtgatcagcccgcctcgccctcccaaagtgctagattacaggcgtgagccaccacgtccgtttgggaaaaccttgtgtcattctgtgagagttacgattgagaattcacaaacagaaaatttctagatagcaaacaattttggtttcttttcta

SEQ ID NO: 4657 - DNA, 1209 bp, Homo sapiens
cctgggaattaagtgtaaatttaagccaggtattctagtaatgttgagttcaacaggattgccattattttaactagaattcagttgagagcagagcgccatcgccgtcttccgccttagtcactcggccctgggctggctcacgcccgccccgccccctccccgcccctcccacgcccgccccgcccctcccacgcccccgcccccgtcccgctccccctaccccgacccgccctccctcgcccgccgccccacccgccgcagccctccccgcgcagcctgggagtgactcggcgttcactcgggagacgccgctctgtggcccggacaaccggtcctatgcagcgccgtccgaggcagttcgcggagaggcggcttaccttttaacccaggaatgcccatatcttgagaaaaagaacaacaagggggtgggcgggggtggggacatggggtaggggggcggctggtggatggggaactaatagcgtttagacaagagacagaagtgagtcctgagcacaatgtagcataagcgcgtcaggatggccgagcggtctaaggcgctgcgttcaggtcgcagtctcccctggaggcgtgggttcgaatcccactcctgacagttcgtacttttagtatttagacacaaatcgagtttaagtttacgctacgttttcctacctgctctttgtgacatggtcttctctctttttaaaaaataaattttccgagttccggaataaaagcactctttgtttttattagccactccaaggacagcaaaaagtactctgtactccgaaaataatttcagaacctaccggtgttttgaaatctcacctcctttttccgtttctcctctgtctctagttgtctttccctctccctccttcacaggcagagttgaataaatgttactcttcagttcatggctcattacattactgcagggctcctctttatttagttatagttatctttttaattccatttcttcagtctcattccccacctcatccttactccccgtaagaaatcactgcaagagttccggtctggcagagagcgcggagagacgcagagcgcgggccgctcctccagggcgctccaggccctccggccccgggtcggcgggtgagctagggggcgccccgggacaggccgcgccctctgccctgcagataccggaggcctctgctgtggctgcccact

SEQ ID NO: 4658 - DNA, 1209 bp, Homo sapiens
tgcttccacctccaggccttttccctagcgatttttccctgttccagatcactcatttccccgatatcagcatttatccctcattcatcactttcactgctggcctttcctatcctctttccctgttttattattatttttctccaatcgcttatcactattattttgtttatttaatgctttattatccgcttccgccactgccatgtaatcttgagggcaagggtctctcatgttttcttcaccgttatctgcagtgccttgaacactaatactggttgaatgaacgaacgcattaatggagcggtgatattggggcagagaggatgcagggcttgcttttcaccgccatttttcagccggcagagacagaccgagaaaggaatgaaggccacggggcgtgtgcagaagtagctaccagagagtccatgcgctgcgagcctggaccagcgggcaaacgcggcttacaggcgttcacccagatattacgggtacaacctagtttcttatgaaatacctcgcccctaaggtacgcgcagggccagtggcgcaatggataacgcgtctgactacggatcagaagattccaggttcgactcctggctggctcggtgtaagcagggtcgttttacaactttctgactccgcaggagtaaggaaattcctgcaagataaatttgcctggaagactcagaagcaagaggggcagctcccgacaacatatggggttatcatttctttgcggagcattctgccactgaccacgtggtaacgccaactacgccagagaaacgctcgccctacccaagttgtgcccagccttgcctggccattttggccgaagaacgaaggaccgttcagagattaaattaaagtctctattgtgttcttccctattcagtcatttgtagaataaattctatggcttcagtttgaacactggaggggctgggtctgagcttttcattggtttttctggtttgagaggtcggtacagagacgcacgcgcacatcagcaaaacacgcacttggaacgaagaaacacggaactaggcaggaagaactatttactctgaaaaataagcccttagtgggtttccgtagtgtagtggttatcacgttcgcctcacacgcgaaaggtccccggttcgaaaccgggcggaaacacgtttttttttcctcatcttactacgaaattcttccagtgtg

SEQ ID NO: 4659 - DNA, 1099 bp, Homo sapiens
tatggctttcttttagccactgtatgtagaattgtatatggagcacggggaacaagattgctttgaagtattttgaactatctatgtgaaacaaatggaattgagaacacagaaaaacatgcccaatggggagatgacagaagaggagcaacctggaaagttgcccggaacccattaatgagccctatttgtggtatatggtttgcctttagggcagaaataatcttggcttgagaacatggaaaggggagggaagacgggctattgttagtcctgtgagtcataggatgataaaaataggacaaatatcgaaagaaggatgaatctcagctcagcacgggcgaatttggctgctctagtgcaccggtctcccgtaggggaataacaaaaatgaaaacattccgaaacactgatgaaattcttgatgcagtttttaaaacttcttggagacaggtggccggttagctcagttggttagagcgtggtgctaataacgccaaggtcgcgggttcgatccccgtacgggccaactttgttttcttccatcacgtaacttacggccaaagacaaggaaaaatcaattgtctgaggactgttactacaagaaagactgtgctaacctttataactaacactttgccagaagtccaaacctttgtagcaagtccagaggtcctgttttcttaagtcatggtgctcaaaatgtttgctcatgagaagcagaaaagcagtaggatagtttaggagttagatttaaattcaatagagggcaaaacagtgccaccaatttgtttagtgccccaacactgtccttgaaatagtctgaaaacagataaatcttcagataatgaaatgtggggcaagtgtgagaaggcagtgttcattatctctgattgcccaattaaggatccctacttgggaagatcaacactcacacatcaagacagaaattccattccgagagaaacattttcttgttactttgatttcccaagaaaggactatgcccctttccaaaatctacctttttcacatcagcaacctggacctgttggtccaggttggccaacgccgggaataactgctcagtccacatctt

SEQ ID NO: 4660 - DNA, 1210 bp, Homo sapiens
gtgccttgattatgaaggacaacaaatgagcaaacatacgggtcccgcaaaggtgggagaacaccgcagacattttcttgagggccatatagcttggcaggaggggcaagaattgatgggttatgagaacaagagaggaacgcctcactgggccacagagagggtccaggaaattgtttgggctcgaggacctaaggtccttgggactatgcttggagccacattggtaaccgggtctggagttttgggagtgccagtgcaggggtcactctggtaagcatccaatgacactgacttttaggtcctggaaacattttgcggcctatcaacacaaattggtgagaatggggaaaagagggaaaatgtagagaaagtgactggaatgcatgctaatgattcaggttacgtttacgtcctttgagtttcatttcatcttacctataaaaccaacatagacattgaaatctagaatcctaatcataccaaagaaattatgtattctcttagtgtattgggggaagagctacgttcgggtgagcccggctagctcagtcggtagagcatgagactcttaatctcagggtcgtgggttcgagccccacgttgggcgctctggttttcaatcctaaaatgttttcaggtttctcattgcggtccaaaaaaagggcattattaaagctcatccctctggaagaagggaattgtgtgatcatcgtgaccattttagccttactgacttgactgacgcattccagccttctctgaaattctagctgaacttagtctcagtgatccctggtgtggatacacttctctggcctagaggttttgtaaaaccagatatacttaaacataggttatgtaagtcgttggtagggcatgagctcttgtatatttaacaagttcctgggctgattctaaagcacaaatcccagcaaaaaaggtttaggaggcaggaaggacccatgaccatgagttaaaaaagcataccacacacctcttcgttgatttcaaaagcccaattagccacataccttcctctcacttcactaacatagttctcatctcttcaggtctcaggacaatataaagaaaatgctctagctcaggtgtccaagactggctgtacatgtgaatcacctgaggcacttctaaaattttagattcctgggctcacaggatctgaatctccagtggtttagaaaccatt

SEQ ID NO: 4661 - DNA, 1239 bp, Homo sapiens
ggcgtggtggcttgcgtttgtaatcccagctgctcgaaggctgaggcgggagaacgggagaatcgctcgaacctgggaagcggaggttgcagtgagccgatatcgcgccactgcactccagcccaggcgacagagcgagactctgtctcaaaaaaaaaaaaaaaattattatgctttcgaagttgcattatttagcctgctcttccttctcttcctcctgtcagttatctcaataaaatcccattaaaattgcattgttaaagtgtttcaaattctatttttaggtagaggttaaaattggttatataatgcattcatcacaacaaaagatggtcattgctaaattcttatcagttccttgtgcctccttaacattttatgtttctttttgtaaactagtgagggtggtgctcccgttttctccctgtttcagagaaaagggcctctgaatatcagtcagttccgaaggggtagtggatgtcaaaagaacatcaacgacgcaggtaaacaggacgacaagcatccacgattgcccaaccttccgcagagatggcatccccagcgggaagtgaaagtcgtgtgaatccttcgatagctcagttggtagagcggaggactgtagttggctgtgtccttagacatccttaggtcgctggttcgaatccggctcgaaggagttcacaattttttttttttgcgtaagttttaaaattcattctcagaaatgcgtatttcacttatacatatcctcgataagaatctatttaaaactattctggatgtgcagtgaatctctttaattttttattattctccgtaacaatttttaacacgcgccatcaagacttcatccctataattcgtataatccaaccctcttagaagccctgggcactgaggaagtgaatcagacactggtccactgggctagagatccacagaggcgtctccacccctcaaccccggatccacagccgggggaaaggggcggctggtgggaattactcggagcaactggtaattggtggggcacgcgcgtgccctggtgttcagagttctgaatcgttgcgagtcagttacaagctgaaccactagcgtctgaaccctatacatctgaagccgggatgaaattcaggagttctattcccccttctccttttaattgtcatggtggtgtctttcgaccctagcagagaatatgtggtcgatattagaatcacctggggagattttacaaag

SEQ ID NO: 4662 - DNA, 1207 bp, Homo sapiens
caataaatttctacttttttttttgagatggagtcttgctctgtcacccaggctggagtgcagtggtgcaatctcggctcactgcagcctctgccgcccagtgtctcctgccttagcctgcccagtagctgggactatagacgtgagccaccatgcccagctaatttttgtatttttagtagagatgggttttcaccatgttggccagactggttttgaacttctgacctcaagttatccacccaccttggcctcctaaagtgctaggccacagcacctggcctctactctttataaattaccctgtctcaggtattttgatacacagcacaaatggattcattatacagagtacgtccagtgtctgaaaaaactgctttaaagccgattgtagttttaaaaatgagtatcaatgtaattaaaactgagtctccttaatgcaacaagacttgaaaacccagaaactttcaggacacattattttaggaattctagaagatgaagggctaggggtcctttcgatagctcagttggtagagcggaggactgtaggttcattaaactaaggcatccttaggtcgctggttcgaatccggctcgaaggacgaaagttttgaactacgggctaataattccagaaataacggaactttacgaaaatcaggatctagacaggaagatgtattagactgctgtttaatcctttctttaatcccctttgtgatacaggaagtaggactctgttaatcacattgcagttccaccacttgaccctatgggtaagccttgccaaaagggtggttagagactccaaggctgaaggtgggaaagtgaacttgttttctttctggggccttcctgtttctctaggtgtcaccccagtaatcctaacagagacaacaattttgtagcagccccgtcttgaaatttcacttcttattggcatccctgtagcttttccgcctggtgtctaaggcacagataggacacacaataatgtcaggagagactgtccacatcctgggatccctcctctctagctgctagctctctattaggttagaaacattgaaagttagcatatactattttcttagttactcatgcaagggacttaattacagagttcaatatcaactgtatgctattaatatttctgacaagaggcactagcagttgccatttgaagaaaaatttgggatttttc

SEQ ID NO: 4663 - DNA, 1204 bp, Homo sapiens
gagaactgcaatgataccagaatgctttgttcacagccctgggatcctcatcaacccggttgtctgtatttatcaagcaaatacattttatcaagcaaatagaaaagccatagcatttatcaagcaaatccagtcacttttaagacagaaaggaggagttaatcagacaaaacagcaggacagagggcgtaatctgggagattgtgtatatctaggggaggaggacgggggattccagtaaggtttttggtttgagctatacataaatatcctaatgttttcaatataaaacccaatgccttttacatatttataaacccatgaagccaattacctagaacattacacagaatacttccggtgtatgagaatactgctttaaagccgatcgtagtttaaaaaatgagcattaatataattaattaaaaccaaatctcctaaatggaacaagacttaaaaacccagaaacttccaggacgcacattattttggggattctagagaacgcagaactacgtgtctaaaaaggacagcgttccgtgtccttcgatagctcagttggtagagcggaggactgtaggctcattaagcaaggtatccttaggtcgctggttcgaatccggctcggaggacggtagttttgacctaccaagctaataattccagacaatacggtctttacaaaaaataaggatccaggcaaaaaaaatgtattagatagctctttatgctcaaacatgcacaagtaaaccatttttggttacatgagtaaaaaattttaggaataaactagaaatgtggtagcttcaccgaagggcacctgcgtagatgaaaagcagcgtttccaggaagtctgaggcttcactttttccttgtgaaatttgtacctcgcaacactcttcacctccactccctccctgagtctcctgctggctggctcttggtttctcgatgccattcttatttccggctactgatcgtcaaatgcagtttttattcccacttcccctctccatccccgacccgagctgacgttcgaccagcaaaccacagccaacgcccgcaacacagttcagttaagaaggcgcgtgggaggtgtggggaatgacaggagcactctggccccaaggttttcgtttcagtttttactggaggttaggatatacgatgacttttggggtcctctgttatcctgttacttttc

SEQ ID NO: 4664 - DNA, 1243 bp, Homo sapiens
tgagccgctcaattcctaaacatatgtacacacacaacgcacttctgttttgtgtctcgaacacaaattacaaattatacaaattgtgtaattttccttgcccttcagaaaggagaatctcaatgtttccgaaatgaactgggcagtaacttcgcttcaaggcggtaggtcccccctcttcaacccagttgtctaaaataaccttgtctttattatttacttcctatagagagaggaggtgctaagcggacaggacagctggacaacacgcgcaataagggcaatggtcctatctattctaagggaggaggacatggaatattggtgtggttttgtttattttttatttttttggacctatgtgaaacatttttacagtaaaacccacaaattttaaatgttcaagagaattgttcatatacttgtatagtcagtatccctactcagataagaacattttagaacattttggaacatttctaatatcctagaaaatttcctcacgtttccctatattttcaaaatgaacaagaatacaggatagtcaaaagcaataggtaaatcctaaagaatccaaaacgagggtaatgacatccttcgatagctcagctggtagagcggaggactgtaggggtttgaatgtggtcatccttaggtcgctggttcgaatccggctcggaggagttccatttttaaaagtgtctcttctgggcctgaaataaggaaacttggagaacgcatgtgcagcttgcttattcaggaatttgtaagacgctcagagaaggaaaataatccaccctgaaaattgctaacaagggttgcttcacagacagttgagtgggactcgattttcaccaagttgagaagggatcatgaggaatgtggggaacgggaagaacacgctgccccaaggcttcatttttttttttttgtcggtttcacggtcctttagcaccccctgttatattgatacttggtgtgaataaacattttattaatgataatttcaaatatatacaaagtagagaaaatagctaatagctaccattagccaccacactggcacaacttaccgacactcttgcatccatcatgcccctcccctagctccagatcttttaaagccaccccaacacgtgttctcatttcattaactgtactgtgttttgaagatgtcagtgtttataattaaatagcagtagacggagtttatcgctctcatcgtaccccgctcctcttcaaa

SEQ ID NO: 4665 - DNA, 1144 bp, Homo sapiens
tctgctctaccattccagacagtttttcctggtaaagacctcttttgtccccgctaatggaattcagtaaagggatctctaccatcattcatgtggttcttaccttttccataagctcagctgctgaaatggcttgctttattcctaagactagttttacctagtagctgctgaaatgacttttggtgactctaagacattttacttactactgtcacttgcaggtcagagcttgccagctcccaagagcttctctagtgccaattagctttctttcaaaacaatatataacgtttctctttctagtaaaatctccaactttctctgttcttcagacatacagaggaccaacccagtctgtgcatatgtctcgaattgcaattttgtgattcccaaataaaatgtttagagattcatctctatattttattttgactttgacagtacttaggccaaaattaggagttaaatataacagaaattgcttctcggccttttggctaacatcaagtgtaatgtttgttcttatcaatttaatatctgatatatcctgtatccaaggaacaatatattaaatggacttttggaagtaggagatagaatagcaacttcctctgtccactccacacatcatcttggtattgcagtacttccaaaatggtgcatcctcctctgggggaaattttttttaaatgctagcaagagattacaagtgaaatatgattcatacctataaataactgctttagaaaggggccagtcttgtttttatttaattaaccacatctacttataattatactattctttagtgtcatttttgcctaacacctgagtgccttataagatttttaagctctataaactatggtccatgtttctatgactttccattttagtctaggtccaacaaataatattgacataacattaaatagttccatgatgtgatacaagcatttatatttttaaggacaactccccagaatccttagtaatgttttatccaaagaatgttcaaggtttagggggcagaggaatttcatttaaaaaaatgatgtgagacaattcctatacttcctagtctgtctacttagtctttaaaagaaaaaaaaagttccccataataaacacatatccctca

SEQ ID NO: 4666 - DNA, 1132 bp, Homo sapiens
ggtgatggtcgagcgcttgttgtaatgcgccaggcgggaagcctcacctgcgatgcgctcgaaaatgtcgttcacaaacgaattcatgatgcccatggccttggacgaaatgccggtgtcagggtggacctgcttcagaaccttgtacacatagatggaatagctctccttgcggctgcgcttgcgcttcttgccgtctttcttctgcgccttagtcaccgccttcttggagccctttttcggggcgggagcagacttcgctggctctggcatagcactgtgtagctataaagcgccaacgaaaaggaaaaacagcgtgagcagggtatgacaaggcgcttttatatagaatcgcttatgcaaataaggtgaagagttgaagtcttgtgtctgattggtagttattcagggtaacgtcagaggtcaggtctgcccaatcaggattcgcaaatccagaagacgcactactattggttgaaattaaactgcagccctaaccaacaacacgtcttctttttcgcgcccaatagtgtttataaaaagcgccgcctttcccgttcactttgtggttgctcgtagtgagttgcgctcgctatgtctggacgtggcaagcagggaggcaaagcccgcgctaaggccaagactcgctcttctagggccggtctccagttccccgtgggccgagtgcaccgcctgctccgcaaaggcaactatgccgagcgggtcggggccggcgcgccggtgtatctggcagcggtgctggagtacctgaccgccgagatcctggaactggcgggcaacgcggcccgcgacaacaagaagacccgcatcatcccgcgtcatctccaactggccatccgcaacgacgaggagctcaacaagctgctgggcaaagtcaccatcgcacagggcggtgtcctgcccaacattcaggccgtgctactgcccaaaaagactgagagccaccacaaggcgaagggcaagtaactatctgtactagtttgtggcagctcaagtaaaatcgagtccaaaccaacggctcttttcagggccacccacgtcttctctaaaagaacttaacatttattccatgtgaaagaaagtgagacatggacaagactctagtcataaa

SEQ ID NO: 4667 - DNA, 1162 bp, Homo sapiens
gcttgttgagctcctcgtcgttgcggatggccagttggaggtgacgcgggatgatacgggtcttcttgttgtcgcgggccgcattgccagccagctccaggatctcagcggtcaggtactccagcaccgcagccaggtacactggcgcgccggctccaacccgctcggcataattacccttgcggagcaggcggtgcactcggcccacggggaactgaagcccagcccgagaagagcgggtcttggccttggcgcgagctttaccgccttgcttgccacgtccagacatactggtcacaacttactgaaagtagccaacgaggaaaggcagcgccttttataaacactattgggcgcgaaaaagaagatatgtcattggttagggttgtagcttagttttaaccaatggaagtacgtcttttggatttgcagattgggttgattgggtataactaacctctgacgtcaccctaataaccaccaatcagatacaggactttcactcttcaccttatttgcatgagaggtcctatataaaaacgactcctggtaccttgctcccattacttcccgttttctcgatctgctgctcgtctcaggctcgtagttcgccttcaacatgccggaaccagcgaagtccgctcccgcgcccaagaagggctcgaagaaagccgtgactaaggcgcagaagaaggacggcaagaagcgcaagcgcagccgcaaggagagctactccgtatacgtgtacaaggtgctgaagcaggtccaccccgacaccggcatctcctctaaggccatgggaatcatgaactccttcgtcaacgacatcttcgaacgcatcgcgggtgaggcttcccgcctggcgcattacaacaagcgctcgaccatcacctccagggagatccagacggccgtgcgcctgctgctgcccggggagttggccaagcacgccgtgtccgagggcaccaaggccgtcaccaagtacaccagcgctaagtaaacttgccaagtaagcgtcttaaagcccaaccccaaaggctcttttaagagccacttaaattatcgatattagagctgtaaacacgtgttcctaatccaggcttaaattcgggcgatctttttaaagggattatcatgatcttatcacactgagtaatgcatg

SEQ ID NO: 4668 - DNA, 1197 bp, Homo sapiens
gccgccggacatttcctgacggctcaggtgggcaggctgagtgcgcgagcgcctcactggcttctcataggtacctgggtcaggacgaagccacatagttcctcgtgatgagaaactcacttctggcacctgtcgagatgccagattccatgccaagcccccgaagattctgactagtttggcaaaaaatgggatctggcaggtccacttcaaagcagcgccctcttccttttgttgccaaagatctgaggaccacactgctaaactgagcaagaaacatgcgtgggttggagatagaagtgagaataatgagtttacaagcacagtattaccaacccccaaaaacaaccaccacgctgggaaaattccatataatgaaacttaatgtgttacctttggcttctttgccataagcaaaatattggggacggggagtggataaggaagtaaactgggtaggtgtgtaaataaggacgaaagactgcaccattctttagatgacaaaaacagacgtttctgggaaataagcaaaggaagagccccacaagcagcggcctctggtggcgtgccgtgatcgtatagtggttagtactctgcgttgtggccgcagcaacctcggttcgaatccgagtcacggcagtaccttgatgtcgcctcaatttctcaacgtactgagcagtaccttgacgtcgcctcaatttttcaacatactggagtggagacagtctcggaaaaacccttgcaaaattgaattgacttacgatctaatctgtacacaaaaaacactagtattcatcatggtgccccaaccagtcagccaagcagagagtgtctacgcttgttgccttgtcttttttttcccctctccaaagattctcttcccaaccctacccaagccctacagtcttgttggcattggctgtatgtgaagaaactgaggtaatttttttttaatggaaaacttttactttcaaacactggtaggcatgaggaaaggactgttcaaaaggggatccaggtttgttgtggagatctttcttaaaacacaaaagacaaattattaatcacgcgtttctaagtatcctagctggaccaatgctgaaaaactgtaacctttgatcatctggagaaaattaaagaaatttgagtaattgaaggaatttgggtgggggggaataatggcccagaagaacagcc

SEQ ID NO: 4669 - DNA, 1232 bp, Homo sapiens
tttttttttaaccaggttcttagtacagtctgaatgcttgaccacataccaccacattaccatatggcctcagatgcagatcttgaactggatagtgtgtgttaccaagccataaatttagacatgcacagcagcgttccattatcaaatggaaatgggatgtattaaataaagcttgagcagctcctaaaggcacaagtaggttgcatgaggaagtggcacagctgtttatggcatctactcttgctatattgccttctgtttatttgtgtgtgtgtgtgtgtacatctacatctatggcctcataagagttctaaatgaccagttgactgaagaagaaaaaactcaagaatggtttatagatgttctgtatgttctgtacaatatgcaggcaccacttgaaagtaaacagctgcagccccacagccccacatacaaataaacaagagaggctagcagtgagaattacagcatgcagggccctatgcgtatgtgtttttgatgcataaatagtaaccatttagagggctgtgatggccgagtggttaaggcgttggactcgaaatccaatggggtctccccgcgcaggttcaaatcctgctcacagcgcttctcggtacctctctctctcttttttttctaaatcacaaatcgctgtgactctcagtctttcatcttatttcacatacaaactgagaagagggccgcgtcctatctcgaactctgtgttggaccgcccacctttaccctaagcacccggacctgctcctcccagctgagcctcagtgaacccctgagccccgggcggtgcttccatcaaagatctacctactcctcagagtccacaggaagcctggggcttcttgggctttcacaatagctgctcactttgttttgagattgctaaatgggaaagcagcgacagattctaacggcaaagaggaaattttgctttaaaaatacaactcccctcagtcgggcgcggtggctcacgcctgtaatcccagcactttgggaggctgaggcaggagaattgcttgaacccgggaggtgaaggttgcggtgagccgagatcaggccactgcagtccagcctgggcaatagagcgagactccgtctcaaaaaaataaataaaaaataaaaataaaaatacaactccccaggccgggcgcagtggctcacacctgtaatcccagcgctttcggaggccaggcgtggtggcgggcgcctgt

SEQ ID NO: 4670 - DNA, 1165 bp, Homo sapiens
tggcttacgcctgtaatcccagcactttgggaggcaggttgatcacttgaggtcaggagttcgacaccagcctggccaacatggtgaaaccctgtctctattaaaaacacaaaaaattagcctggcgtggtggcgcgcgcctgtaatcccagctcatcgagaggctgaggcaggagaatcgcttgagccggggaggcggaggttgcagtcagccgagatcgcgccactccactccagccttggtgacagaaggagactccgtctcataaagaaaaaaaaacgaaaagaaaagaaaaaaagaaagaagtgggcacatcaagtaaacaaatgtcaacgacagtaactctattatgtacatgatgttccaaagcagaaaatttctttataaatataaatatctgaagggagtgaaacttatttaaattgaccacaaagacaatcgcgctttgctagaatccacagtcttgttcaatgtacgcctggttgtattgcaaaccaactattttcttagtgatcctaatgaagaatagataatcgagagacccacaacgacgggccagtggcgcaatggataacgcgtctgactacggatcagaagattctaggttcgactcctggctggctcggaggcttattttcttcccccccccacacacgaattctcgctcttgtcccccaggctggagggcaatggcgcgatttcggctcactgcaacctccgcttcccgagttcaagcaattctcttgcctcagcctcccgagtagctagtaatacaggcgcctgccaccacgctcggataatttttgtattttaagtagagacggggtttcaccatgtcggccaggctggtctcgaactcctgacctaaggtgatcagagcgcctcggcctcccaaagtgcttggattacagacatgagccaccgcgcccggccttttttttttttttttttttaatttttaaagaaaaatatcatcctgtgtgttttccgttttttctttttttttgaaatggagtttcgctcttgatgaccaggctggagttcaatggggcaatctcggctcaccgcaacctttgtctcccggggtcaagcgattctcctgactcagcctcccgagtagctgggattacaggcatgcgccacccacgcctgtctaattttgta

SEQ ID NO: 4671 - DNA, 1236 bp, Homo sapiens
caagaaagtattccattttctttttcattatctcaaaatttttaaagtatttggatctctgatcactgttccacacaaagcatcagtatccaacacaagtatgtttaaaaaatgaaattatttaatgaatgagcagatgcaccgactgcataaattaatgaagctttcacaagtgcaatagacacaagggggcggtggctcacgcttgtaatcccagcactttgggaggccgaggcgggcggatcacctgatgtcaggagctggagaccagcctggccgacatggtgaaaccccgtctctactaaaaatacaaaaatcagccgggagtggtggcgcgcgcctgtaatcccagatactcaagaggctggggcaggagaatcgcttgaacccgagaggcggaggttgcagtgagccgagatcgcgccagtgcactctagactgggcgagagagcaggactctgtctcattaaaaaacaaaaacaaaaacaaaaagcgggtacatcaatgatagataatcgacagacgcagactgagtggccagtagtcaaaagcgcaaccgagggccagtggcgcaatggataacgcgtctgactacggatcagaagattctaggttcgactcctggctggctcgggtgttaatcttggctttttttttttttttttttaagaaaaatatcctgtgtgttttcaaactgatgacagaaaccggttcttaaagtcctttgaaagaaaattcatctgatctggctcttcaccttgcaccgtactgctgcacatcacaatcgtgacctttaagtctggtttaaagttaagtatcaaactgaaatttgagaccttaagtctcttcggaaattgctttttttctttttttttttgagacggagtctcgctctgtcgcccaggctggagcgcactggctgcatctcggcacactgcaacctctgcctcccgggttcaagcaattctcctgcctcagcctcccaaatagctggtactacaggctgacgccgccaggcctggctaattttttgtattttagtagagacaggggtttcaccgtgttgcccaggctggtcgcaaactccagatctcaggcaattcgccctccttggcctccccaaagtgctgggattacaggcgtgagccaccgcgcccggcctggaaattgcattttttaaatctcccctttctttttttttcccaactgatactgagaaatgggttggttcaaaga

SEQ ID NO: 4672 - DNA, 1221 bp, Homo sapiens
ctatctagataagtatattttacaaaatccacagatgattatactgtatagtccatgttttaaaaaatcacaacaatagaataattaaaaactcttctgtatgtcaatgtatgggagactcttttctctgacatgttctttcctacacccagcaatcgcctgaacccgggaggcggaggttgctgaatctttaggattcagctctgatcctagcattgacaggcgtggatttccctcaacacgcctcattttaatggaagtccaaggaatcagggatggttcgtctttccctaacacctagcataatgcctgtcgcaaattagtgattaagtcatacttttggaaatatatcttttcatttgtttatttccaagcaatattagaaagatttattaactttgtacactcttttaaacatggtcctagttttcgcggatataaaattactcataatcttccagaaactacaaattctagcctagtaaacgttgacaacaaaactggctgttatcaccgggatggctgagtggttaaggcgttggacttaagatccaatggacaggtgtccgcgtgggttcgagccccactcccggtaagcgttggtgtgtactttgacgtttgcggtttctgccgcagagttggaagccaggtatgcttacataaaaactaatatgacaaccttctcactttgcgtgtaaacgcttcaaataataacgaaggttattaaacaatattctgcccaacactacttttttttttttaatcttcaaggaaattgcttcggtgagcagtattaagtaggagacgcctcttcccacaattcctatggcctaacagcacagtgtattcaagtcttgaatacattcctatcactgtgggatgtattcaagtacattgacaagcctgtaatcctagcactttgggaggctgaggcgagcggatcacttgaggtcaggagttcaagaccagtctggccaacatagcgaaaccctgtctctactaataatacaaaaattagccaagggcggtgacgggcgcctgtaatcccagctactcgggaggctgaggcaggagaatcgcttgaactcgggaggtggaggttgcagtgagccgagatcgcgccattgcactccagcccgagcgacaagagcgagactccgtctcaaaaaaaaaaaaaaaaaaaaaaaaaatcagcagagtgtggcggtgcacgcctgtaag

SEQ ID NO: 4673 - DNA, 1212 bp, Homo sapiens
gactagaaccacatttctagcatttttcaataccaaggtcttcgaagcgacctttgatttgaggtcactttaggaatctgaaggaacacataggaagactcccaaattgaggatctagacataagaaacctgggacgatctcgatcatgggaccatcgagaatcagactcgttgggaatatccttcaagtaccaatttgtatgttgtattagtgagcggcttttacgaagcaaagactcattaatatttcaccgaatctgattcattgtctgcatgtattgactagacattcagaaggcagcaaatatttccataaattgctgggccattagccacagtttgaaatgtttaagcgtcctctttcaagtctacgaatacagccattttgctttgtttttgcgttaagaggaaatttctcgttatttctattaagactctaaagcaactaagaaattgttcctccctgtaagacaaacaggaattacgttgaagaatttaatactttcacggagaaggggcgaggatgcgggtgagatgaataacaaaagcacagatttgcggtcggccggttagctcagttggttagagcgtgctgctactaatgccagggtcgaggtttcgatccccgtacgggcctttggctttttcccccctcgagaaatttggttttcatgctctaagatgattcaaattaaccgtccccatttcttaacgaacctagaacctaagttcgtttccgaatcatctgaaatgctacatctccccaggtaataatcttcttcttcttcttcttctttttttaaatgttctttctgtttcctccaggaataagggttggggacagaaagctgttcagagcagagacctccaagactgggagcctgcttaatgaaagggggggggggcggggaagagttcaaggagtggaaaaataactggcattttttttaaaaaaataaagcttatttgatttcagattttccttccaaattagtcctgaaacctaccttctttctcaaattgtagagacacaagataaagagaataaatccttagaaggttgtggatatgtgtctctgaaaaccctttcgaatttaactgacagacgacattgtcctgtgaggaagctatcactttaaacaaggaacacagactttttgttttgttttgttcacagaaaccgattctgtgtgtgtgtgtgtgtgtgtgtgt

SEQ ID NO: 4674 - DNA, 1153 bp, Homo sapiens
gatttttgagaaaataattagatctataacgaaaaggagtaaagcatctcaggtatctgactcaaatttctcacctgtaaaatagagattatgggtcccatctcacagcgtggttgtgagcctcacaggtaaggtaacaatagaaaacacttgtcacaaaaactggcacacggtaacctggcatactgtgtgcctggcacctggcacacagtcttgtttaacaatctcacttgtctaccattgatgaaatagaggccgaggcccggggcgccaagctcctaaagcacttgaaaggagtggtttaggattagaggactcctgacagttggaagtcaacgttttccattaagactgtggtgtaaaaggtgttgaatgtaggcatgtggcaggtaagcgtcttcttgacttaatcctccaagaggaaaagcagaatgcacccatcacccaaactatggggcggagggaaggaacctaaagtggagaaataggtcacctatgactttaggaaatgctagttcagcttcaggttccatggtgtaatggttagcactctggactctgaatccggtaatccgagttcaaatctcggtggaaccttggatttagtcctctgcagtcaaatccccatcgtctctccacaatctatactgttgctcatacaaatcactcgaccaaattttattcctggtatttccacgtcacatctcttgagcggagtatctttagctgccaaccaaataataactttctttttgctgcgcacaatttgttctttggagaaaaaagagagaagcctcaaaaggaaatgcacgaggcagtcgctcgagtcctgctggaactgcaaatcaaagtctccagaaaagatctgcaaacaagtgaggagacaatagataggaggctagtgagaagagagaaaggaaatttggtgatagtcacgaacagagaaaagctgggatggaaactgaggaaaggacttacccactaaatgggtctgggagaggtgacagtcgccgaagccgagagaaaactgtcctcagacaagaccacaaggggatagaagctcaacttgtgagggctgggcagatagaacaggtgacgggaaagatacaactggcgatagtcaatagtcaatagagatagatgctgtttcgag

SEQ ID NO: 4675 - DNA, 1163 bp, Homo sapiens
cataaaaatacataatattgggataaaattctgtggcagaaacagaaaagaaatacattggcagcagaaaaaggattccccccaccccaccccgccgcctcaattttcagctgcttagccttcagtaagaaggactgtaaggcctaacatgagatctgaggaatgagtaatgaactaaggcaggtgaagtgagggcaaagagaagagttaaaagagtgctgagggtggaaaatgagaaggagagcatggagcttggggagaaaaaaaattcactgtagttggaaagctagaatggatacggaggaacgatgacactcaagactggacacacgggcgctgggcacgatcattaaactgtaaaaggttctccatatgaaggtggaaagaacttgttttgcgtaagaattctttaaggagaccacagtttgaaggacattacaatacatatcaacatatcaccataattaaattgcaagtcttcgtcaaaagcaagccttaaaggagtatcccaaaaacacattttccccagaaggacgaggtggccgagtggttaaggcgatggactgctaatccattgtgctctgcacgcgtgggttcgaatcccaccttcgtcgaccgttttctttaagagggtaaccaggtttttgtcgcaggtctgagttgctctcagaaaagttatatagattatctacagctttcctccttttgcttcctctcatttctctcgaccatctatcagttttatttcctcctgaggttcaaaggaattcttgaggatctgagtggaattactctccattcttagattacaatttactacatccggcacgtgggctgcgggcattgcctgcacctgaagggctcttagccaagatgtccgcatggtgcaatggatcccttgctccactcacatagtgcctcatgttgcaaagcgaaagaaccaaaggcgttggtcagacactgataacctctccttctccgaacaattaacagaagtttgtgtgtcaccttcctttctatttacatatgaacgagtaatttgtacctttgcttattgtccaagtaaagtgctttggaatctcctgtcttggatttgcttcaaaatactagttggtgttggagagcagcagagaaaacaacattacaaaatgttgttaattgtt

SEQ ID NO: 4676 - DNA, 1118 bp, Homo sapiens
ttgtttggtacttccccgatcctgaaaccccacaacaatggagggtggaagttactgaatacctactattttcataagattatgggtaccttaattagcagatacctagtcattttcccgttagcggtacctttgtacggttcttggggacgcctctcgtttccctgccttccaaaccctcctgaagcctatacctgttacaagtcttgatagtgctttcctcttcatggaaatttagtcctagtcagaggtccaagtctttggtcaattatcagtttctgtggaatcaatggttcaactgctttggtcacccggtctcgctggttgcaaatgactagaaacactgtcagagatctcgacaccaccacaatcgaaagaccaggctgtcctgacagaccccgtcgttttggcttaggcggcagattaaagtgtaaattcgccaagtataatcaatttagtagaatacaaacttacagacttaaaaaagtgggcaagaatacttaagtttattagaggtagtcaaaactcgctgacgcagagttcttcctcgttagtatagtggtgagtatccccgcctgtcacgcgggagaccggggttcgattccccgacggggagaaaagttgctttttgcatcttctgcccactgatggcccctacctggctctgagagcagagctgcggtgggacccctctgccattcctccttaactgccaatggaccctctcgactttcctcactcctaagaccgctgctctgatcagagaaacattccagtcaattctgaaacctcaaagtcacagttactttaaggcccataggagaatctaggtttaaatgacacaaaatgtactcattaaaagttaacgagaatacagttgtctagcatctgcctcttatttgcatggtcagaaagctcatgtaaatgttcaagtcctccatccttctagacatcaaatcttggaatgaagatatcgacaaggcccagctgggggctcgtgtatgccccagctgcaatggctgacctgggcaactccaaactatagaatccacaagatgtcgatcaaatgtatgagggaagatgacaaagtggccacagacttttgaggagattcccaa

SEQ ID NO: 4677 - DNA, 1212 bp, Homo sapiens
ccaaatttaaataattctcagtcgatcgcacggaaccttcaattattttgtgaattccctggaatcaagatattaaaggttgttttcctagaggcaataaacctgataactcacctatgtggagaaaaatatcccgtgtctgaaattgagtagagttgcagataagacatgagttctccaagacttaatttccccgtttttatgggggactagaagcgtccacttaatctagcttttaagcattaaattgcagaaagcatagaagaagttcggtccagttcaggtacgtataaaagtcgctcaatttttcttaatgaagaaagcaaggctcaggaccaccaagtttctgagttaattgagggttaggggaaagggagactttatggatcaatgtaatcggcaaaaataaataaatagatcccccagggttttctttgaaagggtgttctgagtgggcataaactaaggatttttgctttgatacattaaatgcgtttagtagaatgcctataacccagcatgagcaatatttgggtgaagcgtaccaagaggggttccatggtgtaatggttagcactctggactctgaatccagcgatccgagttcaagtctcggtggaacctgctcgaagatatatgtatatatcctcttcctggaccttttgttttccccagggaaaacgctctctacataaattaccaaaatcaattttcggcctgatatattccatgaattcctacaactcccgatagcacacttgatcttagtcaaacggcctagaagctatgcaagtcccaatatatctgcctctgggtaaggaggcggaatagaatccactttccgggatcacagctcactacagcctcgacctccccaggctcaggtgatctcaggtagctaggacgacaggtgcgccccaccacagcagcgaaatttttgtttgtttgttttttggagggagacagggttttcgctgttatgcccaggatggtctcgaactcctgggctcaggctatccttccgcttctatctcccaaagtactgggattacaggagtgagccatcgggcccgtcctgaagggattgtttctttcaataatttgtgaagtccacggaaacattttgtcccctgaacatgatggaggaagtaggaagtgctgataaacagaatctgctctttgggtctttatgcaggagagcagagattttaa

SEQ ID NO: 4678 - DNA, 1210 bp, Homo sapiens
agggtctgttaggatctaggattttccaggaaaagaactcacgggccggctttacttgcaaatttcttcttaacccgtctggaaagtgagagcgcgttgtcatttgcaaaacaatttcccaaacacaatgagataaatattttaggtttacatttaggggcttagggacaccaagtgagaagatccagaggttttctgtatcgtttttctctccctcagcttagctgagggagcatttccttttctgaaatccattaagcaacagtgtcattcagtgaggagaggttggtctcctggaagttctagcagaaggtcccatcgtctagcaaaaggtcccaggtttaaaactaggattaaggccgggctccacctccgtggtgagtaaatttgttttcagtttcgaggactccagcaaccagcacagagccaaacttgcccccaggggagctggtttctgaattgacccggtttgttcaaaataaagatgctcctgtggtggatacacttatcttagtgcttccgaagttctgtcatgtctgtagttgtgctgtcatgtctgtagtcatgctgtcatgtctgtagtcgtggccgagtggttaaggtgatggactagaaacccattggggtctccccgcgcaggttcgaatcctgccgactacgtttgaaattttaccctaaaatggggtcaggttaatataatacggaaaatacaggagaacttgtatcatctttcacccctctggttaatgtaaagcggaacgaacaggagcacttatatcatcgttagcccctctctaattctgccctggcggtgtatgtgtttgctgtcaaaatgtcgctgagctgcccgaagtaaataagctagtaaccacagtaatcctccttcactggcaacgtgcagtgctccagggtctcaccgggttttctctcctccaaaccctgctcaaaataaactctttcaagagctcggtgaaagtgtttctcacagaaaccatggagaaggtacagtctatgccacaaatgggagctatctgtatttttaaaaagtattaagtaaaattgacttttaaaaagcacttacatgtatatacacatacccattaccatatcaggatacacaccagttctatcagtccataagcctccctagcactgttcctttatagtctcatcctaatcccacacatagcagctgacaatcataaatact

SEQ ID NO: 4679 - DNA, 1180 bp, Homo sapiens
aaacggctatgcaaaaataaacacgcatttaatgtcaccgctgcaaaatctaaaacctagactttaagatctttcctttatgaaagaaaatgtagaaattcatatatgtacgatttttatcatggtaaacagaagcagaggaagggcatctaactcacattggtccgagaaaaaatcctgggggacggtgaccttgaggtaaacctgtaacgaataaacttgagttgaagaagaaaggaggatatttcgagcagaggaagctttttaagtttactgtactccttactattaatgaacatttctttgctattcatgacctagaactattttcagcaaagtcataatcttttgcagaactgccgttttcagattttcgaagcaacatgggaaatctgtttcatagaatcttataacaactttttaatatgaagattagcatatttttaggaattctctgccaagaacaaattcagtagccaatgtataaatgccatttcaattgagtttcttttcacgattttttttgttaagtcttcctcgttagtatagtggtgagtgtccccgtctgtcacgcgggagaccggggttcgattccccgacggggagacgaagcagttgcttttgattacaacataaacaataccaatcttattgagggactcaggccttaataaggccagtcttagaaagcagctcttcctggttttgtttttattatttatttattattattattatttttgagacggagtttcactcttgttgcccaggctggagcgcaatggcgcgatctcggctcactgcaacctccccctcccgcctcccgggttctagcgattctcctgcctcaggctctggagtagctgggattacagctatgcgccaccacacccggctaattttgtatttttagtattgatggggtttctccatgttggtcaggctggtctcgaactcccaacctcagaggatccgcacacctctgcctcccaaagtgctgggattacaggcgtgactaccgcgcctggccctggttttgtcatttgaagtcggattccggcgtattggtttatcaatgggttcacgcagcaagcgatcatctgatggaagtccactgccactttctctctgggaagagagatcaccgaacgcgccaggattcacagtgttttcagctggc

SEQ ID NO: 4680 - DNA, 1077 bp, Homo sapiens
actgattttatttctgcttcaaagtattcacagtgtattttgggctaggtgggggaaccggaaaagtaaaaataaaaatattgcatgacttttgtttctctctacaaagcacctgcttaggacgctgaatactgagctttgagggtccctctagccaggaaactgttacggagccagatggtaacttaggaagcactgttctgagtatttgccactttccctattgtttcatttctgaattaacccgaaagatagcaacataaggtattttgatgatgctatgtttagcatcatttagaatagcaccgggcaaaataataaataccgttgtgaaaaccaggagcgtacgccacccatccgaggtcttttcctcctttgtcggagtcagcgtctgctgactacgagttacataatgaaacttaaggagtaacagtgcgtgtcaggatggccgagtggtctaaggcgccagactcaagttgctacttcccaggtttggggcttctggtctccgcatggaggcgtgggttcgaatcccacttctgacacagctattttgcccctttaatcctaggattgggggactgggtgccgtggtttacacctgtaatctcagcactttgggaggccaagacaggtggatcacctgaggtcaggagttcgagaccagcctggccaacatggcgaaaccccatttctactaaaaatacaagaattagctgggagtagttgtgggtgctcgtaatcccagttacttgagaggctgaggcaggagaatcgcttaaacccgggaggcggaggttgcagtgagccgagatcatgccattgcactccagcccaggcgaccaagcaagactccctctcaaaaagccaagaggaaaaaaaaaaaaaaaaaaaaaagcaaaaaaccactaggattaggggactaagcggggaggattgtttgagcccaggagttccaccccgtctatagaaaaaatgagcggtgcttggtggcgcgcgcctgtagtcccagctacctgggtaggagaatggcttgatcacttgagcccaggagcgcgaagcttcagtgagctgtat

SEQ ID NO: 4681 - DNA, 1210 bp, Homo sapiens
tgaaatcacagttcggatagtctgaggagaagggggaatgcctagaaatccatgtacagaacagccccactctgttgctatggcctcctcttgtccagaaaagttcccactggccctggggcagcatcaagttggagctactgcatcaggacttaagtcacaaagagcaaagtgaccccacagggtcagggtcgtaagcagaggtctatgcgagtcaggaggcctgggtcagagggagagggcagggccgagagcggggagttactggaggaaggggagaggtgacgtggaaacgtctccttcatatcttgttcctcaattcccatcttggtctccagtactgtaagaattattcaattccgcactaacagttgtattcttctacctttccattctgtaatcagtgagttcggagctcctgtttagtcgggcaaattccagagagaacttttgcggctgggattcagccagaaggcgagccgtaagccgtgattactcatcatgtatagtttcaaggatttttgtcacagtgtcaggatggccgagtggtctaaggcgccagactcaagcttactgcttcctgtgttcgggtcttctggtctccgtatggaggcgtgggttcgaatcccacttctgacacagcctgatcttttgtttttccctaccagatttgtaccgaaagtttcgccaaggaatgccacaatagttcagccgtttctacctccaagatttccctccccaaccgatgttcgccaaacagggtctcgcaaagagagaggcatctctcttacatcaaaccaatcgacaaaggaaaaccccacatttacagaatcctgggatattttcagtgccatttggacgcagtcccgcagcactgttggagatcattttctcctgcgagaaagtaagcagcggatttccatctattggtctgtgaatccgctaacataaaaattaaacaaacaaaaaaagaaaagaaaagaaaaaaggcacgagaaaaaggtctccgttctcagagagccctgtaggaatgttccagattcctgtatatcgtctgtctctctgaaaggggagtcggacattgatctgaccagcaactgtcgtaaactcacaccgctctagcaacgacggtaacacccagttcttttccttagccgttcaactgatcagtcaactgatcagtgactaaaatcttcactgcttttctgca

SEQ ID NO: 4682 - DNA, 1219 bp, Homo sapiens
agttccttttcagttacgacccactctccccagatggaagtactattgtgacttctggctggacagcggaatgttgcctgctttataatttaaatcagtggagccacagagtacgtccttttctgtctggtttactttagtcgacatctctgtgagattcatccacatagttgtagattgttcattcttgttgcaatagattatttcatgtgagttcattcctgcatctgctgatgggtgcttgggaagtttccagtagtttttattattctgaataggttactgggcattctggtaaatatatttggtgaatatatgtaccaatttgtggtaggcaaataacaactgtcaggatgtgatatctttgatttcaataagtggaaagtctgaaagatatggaaagaaactaccagaaaaaaaaaatctgagtaaaaaatatagattttctacagccaaacctggattgtctcaccctaggtgcttcaattctcactcccaccagcagggttgtttccgtagtgtagtggttatcacgttcgcctaacacgcgaaaggtccctggatcaaaaccaggcggaaacaagtggttacccttcttacgtcttgttcctgatcctgagagtctctatttgaaccagataggacttttgtatatgaacaagcacctaaatcaaaggatcttatatcttcctttttttttatttgagccacctcaggaacatttttgctccctcctttgtcctgagccgcggcgaggcccacatcgccccatcttcccgcgccccagcatgtcgctgtcccagctccctccccttatgctctgcatggcctgtaggttctagggcccaaagcaagctctcgtggtgcaggaccccgctatactgtgcaggcgagactggcttccttgaaatttccaaagccacttgtgcaggttcttcgcaaagagattttcctcaggagtttctaaaaataagcaatgcttaggacacagacccgtgagaaaaaaataaaaaaagaaacagggccatgctttgagccaagtgaataactaatattctattgtctgccctttacccctaagtgcagagagaatttttcacaaaataggtaagaggcaatttcaagtggatacttagaaactgttaagtgttaaaataaataaatcaataaataataaaaaattagatactggcctggcctctatgggtactcaatgcca

SEQ ID NO: 4683 - DNA, 1209 bp, Homo sapiens
cccgtctttactaaaaatacaaaattagccgtgcatggaggcacatgcctgtaatcccagctacttgggaggctgaggcatgagaatcacttgaacccaggaggcggtggttgcagtgagccgagatcgcgccgctgcactccagcctgggcaacaagagcgaaactccgactcaaaaaaaaaaaaaaaaaaaaaaaaaatcaaattcaggtaaaagcagctgattggcctgaaaaataagtaacaaaaagctaaaaagtaggcacacacatgaaagagaagatagaaacaccaatattgctttgaaggaaagacattcatcttagctcatatataatgtttcaaagatgaaaaatggtcattattttcaataaagacactttatgtgaatgtctattatgccaacaaaccacaaaagaaaacatgctttccttgaatcagtgtggtttggggttttaatccctacctaaataaagaaacaatcttttttttttctggccccaatagtataatacaatataattatgaaaagagtaacagttaagacagcgttacaggcaggggccagtggcgcaatggataacgcgtctgactacggatcagaagattctaggttcgactcctggctggctcgcttgtgctctcactttttccttcttcaaagccgtattaacaatcctgtgaatgtccttttccagagtggtgctgttacttgaacgtgaaagagacaagcgtcgaaagagccaacttacaggattttgtttctacctttcatctcattctcaactggagaaaggagaaaggagaaaaagaccattagaaagcttaaaaatcaaagaagctttaaaaaaatgttttttcacgtatatcttcttcatcggtatttttttccattgggagaagtccacattcctggcgtctctgaggcacagctctttccctgggcatgactgttgtcaaaaagaaaggggacatctgaagaaacgttgaatcataaaggcagggctgtggggatgcaggatgcaagctgctccttgcatcagctgggccccctacacagagctcaaccctgaagtcggtggacccacctcagcctcaacatcgccccaatccaccactcccgccacgggcctcttctctgcctcccaggttcccaccacttttcctccgccctgagatcctagagaaatagaagacaggagaatcggc

SEQ ID NO: 4684 - DNA, 1226 bp, Homo sapiens
gggaaactcccgaggggcattccttttccccttcccttcgccccctcagttgagctcccaggaatgctgggattttcctccagtcttgtcttgcaagttcacttatttcagttttccgtaaacaccaacgtctcctctgcaacttgggaaaatctttccacgcacgtcctcaaacgcgccatacaccacccctaataaacgacgtttttttgtgaaagcaataggatctgatcacaaagcagaataaaagatctcaggtctctcacaggctcctcacctgtaaaataaagacaatagttcgcatctcaccaggttactgtgagcgttccatgaggtaacaatacagaacactagtcacaaaacctggcacacgataagggctcggttttgttcgacgacttcactttttttccagtgaagaaacagaagcccgagggggcaccaagtttctgaaccccctggaaggaaaggtctggggtgcgaagggtggggtgtgctgacattggaaaaccacatcagactttagaaaggaagaactaggtcatgaaagaattcagggaaaatcgctaagaacttggccccatggtgtaatggtcagcactctggactctgaatccagcgatccgagttcaaatctcggtgggacccagtctgctgtttcaagtttcagtcgtatgacttctctgtgatataaaggcaatcatgcaatttctacacacctttctcattccatcctggagcttttattcacaaacacacgagttaaatggtgtgtgggaagatttatcccttttgttaaatgatgtattttctttttttttttttgtaaggcattataaatgatatattttcaacacaattttattttttatatatttataagtacttatcaaatattatatacttaatttttattgattacataataccaccattaaatttaaaaacaactaaagccagaggaaaaacacttaaaatacagataattactggtaggggctaaaaattatatatcaattttaaatctgtttcagaatgctatgatggagtgatcagtcagtcatagcctttaagcataaacgtgtaatatagtgggcttaaaattctatggaagatatggaatagaaatatcttttaaagatagaaaaagaatttatgcacgttttcaactgttaaatataattatgctaagtatatttttaaagaatcctagtacatgccaggtt

SEQ ID NO: 4685 - DNA, 1407 bp, Homo sapiens
gcccatggccttcgatgagatgccggtgtcggggtggacttgcttcagcaccttgtacacgtagatagagtaactctctttgcggctgcgcttgcgcttcttgccgtcctttttctgggccttggttacggctttcttggagccctttttgggggcaggagcagatttagccgggtcgggcatggcggaggagagtgaaagagcactcaaataacaagaatgaggacaagctgggttatgccctatttatttacaagtctatatgcagatgagattgagaaattcttctgtctgattggaagttactcagatgacgttaatatcaatatagtccaatcaaaacacgtatattcagaaagctcatttgcattaagaggaagctgcaagcttagccaatggcccagcttctttttcgcgcccagcagctgctataaaatgcgcgtccctgtaggttcctttcactcactttctgacttaggccacaggtcgttttaccatgtctggacgtggcaagcagggcggcaaggctcgcgccaaggccaaaacccgctcctctagagctgggctccaatttcctgtaggacgagtgcaccgcctgctccgcaagggcaactacgctgagcgggtcggggccggcgcgccggtttacctggcggcggtgctggagtacctaactgccgagatcctggagctggcgggcaacgcagcccgcgacaacaaaaagacccgcatcatcccgcgccacttgcagctggccatccgcaacgacgaggagctcaacaagctgcttggtaaagttaccatcgctcagggcggtgttctgcctaacatccaggccgtactgctccccaagaagactgagagccaccacaaagctaagggcaagtaagggctgaactttaaaaatgtaaacttacaagacaaaaggctcttttcagagccacccaccatttctacggaagaactgagcactctgttctccaaacctatcagaaatttgtggccgagttcaagcactgaggccattactttcctattgggtaaaataaaagtattgaatcaggcctagtaaatactatccaactgctaccttataacatgaaggaacctccttaattgtcccctccccacaaactgtcctgggtctttaaaaaacttggggccgggcgcggtggtttatgcgtccttagcattttgggaaactgaggcaggtgggtggggaggggagaaatctctagggacctggagttcgagaccaccctgataacgagacccctgcctcttaaaaaaaaaatgactgggcgcggtggctcacgcctgtaatcccagcactttgggaggccgaggagggtgtatcacaaggtcaagagatcgagaccacccaggcaaacatggtgaaaccctgtc

SEQ ID NO: 4686 - DNA, 1149 bp, Homo sapiens
gtcctacaggaaattggagcccagctctagaggagcgggttttggccttggcgcgagccttgccgccctgcttgccacgtccagacatggtaaaacgacctgtggcctaagtcagaaagtgagtgaaaggaacctacagggacgcgcattttatagcagctgctgggcgcgaaaaagaagctgggccattggctaagcttgcagcttcctcttaatgcaaatgagctttctgaatatacgtgttttgattggactatattgatattaacgtcatctgagtaacttccaatcagacagaagaatttctcaatctcatctgcatatagacttgtaaataaatagggcataacccagcttgtcctcattcttgttatttgagtgctctttcactctcctccgccatgcccgacccggctaaatctgctcctgcccccaaaaagggctccaagaaagccgtaaccaaggcccagaaaaaggacggcaagaagcgcaagcgcagccgcaaagagagttactctatctacgtgtacaaggtgctgaagcaagtccaccccgacaccggcatctcatcgaaggccatgggcatcatgaactccttcgtcaatgacatctttgagcgcatcgctggcgaggcttcccgcctggcgcattacaacaagcgctcgaccatcacctccagggagatccagacggccgtgcgcctgctgctgcccggggagctggccaagcacgccgtgtccgagggcacaaaggccgtcaccaagtacaccagctccaagtgagctctcgcagctgccagcaatccaaaggctcttttcagagccactcacgcttccagagaaagagcctgtgcattttgcttgtagtcttttgggtggactccggccggcctccattaggagggaagacggcgggaaaaggtaagctaagctccctaggctttttgcgtgtgagtatagacgctccatcagacaaatttagcttgggttcttagatacccttggggaaaaaggcttgcagttgtgctttaagctataattacaagtttgctttcggttttcggttactctttccttttgtgttgttttttttttttttttttaaatggagtcttggctctgtcgcccaggatagagtgcagtgccgcga

SEQ ID NO: 4687 - DNA, 1267 bp, Homo sapiens
gcctctaatttttgtaaaaaaacatgttctcacctgttgctgatttatcatagactgatcaacaccaactcctagagaaagtaacaaaagagaaaggagggcatctcctggccctcgggcatattacagaagcaaatgaaaaggaattacagtcaggtttctggtacgtcacagaaaacaggaatctaaggacaaagtttagatcgggaagcaaatcaaccctttgaatgcagaataaagtggcagaaggacccggcgaaggtcccagcgtgtctcgaggggcatacagggcggccagctggagccgggtcaacaaaaaagcaggtgatttttgtctaccaatgaatgccggcactggttcaacctattattagatatttgccaagtaacttcactactctaagtgacagtcgtcatttttatggtggttgtgaaatgtgtcttaattaagacacctgactcagactgtggttatggggattaaaccaggaaaaacgattagatcatgtttctacaagactcactgggagcactacacagacgaagaaattcaagttgttgattctttgtgtgacgaggtggccgagtggttaaggcgatggactgctaatccattgtgctctgcacacgtgggttcgaatcccatcctcgtcggctgcatagcaagccttttgttccaggaatcacaaatgatatggtaagcactttatttggcaaattcattccgtattcaccagccatttcaataattccctctgatctttcctgctctctgcttctttagtaacacttgtcttagctgtgaatgtaatttgttagttgatttatttgattcaggcttcattctcatgcaaattttcattccttcacaagttttgcttagcgggattccccattgaggaaacaattgaagatttaattgagggctatagaaaaacattgcctgaaaaatttaaaggtacttataaaatcataaagagttacatatgcaacattatgggtattgaaccgtatgggttacttaaggcattttcagcctaattgtatatctctactgaaattttcatttattatcttaatgctaacttttaaagcagtcactattgcctaaggattccatctttgaaaaaggaaggagagtgagagtgtctcttagagatatagcaaaacttacaaatacattccatagaacatttctagttagtactaaagcatttcctcctgagaaaggaaagaagaatgtcagtattatgtagtttccatttgt

SEQ ID NO: 4688 - DNA, 1198 bp, Homo sapiens
ttcttgcagttactactttgccctttagatacaaaatgctcagaattaattccttctgagtgggcggcagaggagatgcagggcaaatttagctctcccattcaaagggtgatcttgagggatacctgcaccatctgaaaactggatttggagacatgaacttactcttggtgagtaaggcttatgatttagaagaaatataaaattacctatgaccttttatccattctttctattctcattttcctctctaaacagacagctaaaattttactttttctgacaagcagtccacaattactgagctcttattgcagtatatttttgcttctactcagtcacacccagtacacctctgtttcaagatttatgctgtaccttctacctgaatgctctttccccaaatttcacatctccttccttctctttattcaggtctttactcaaaatgtcactttatcagtgaggacttcgtcaacttctttatataataaaaatccttttagcatgccttatatccctttgtgctgagttattattctctctagtacttatcactacatgacccattagttatttatctatgtgtctggcgtctgttccctccaactgcactgtaagatctggaagggcaatatctattttttccaattgtgtacccctagcacctagaatagcgaataatccttaataggtgctcaaataattcttatcgaataaataatttcctaaagtataaatatttctaaagcatggtccaaagaccacttgcatcatctgaagtaatggttgaaaatacaaattcctgggtccaccaatgacttacagaatcaatatctatgaagatgcaaggcatgaatatatattttgaacatttacattaaacaattacaacacaaagataaaatggcctaattaaatgcataatccaaaacccagtaagaacaaactaacataataaagagtagatacattggttcataggtggataaaacaagaaaaaataaaagaataagcagatttgcatagaattaatcagaagaatttcttgggtttggcatagttatccaaagtggcataaataatgtaattattggcttggagctggatgaaaggcagaccagctgggtaaggagtatgtgatttctataaagaaaactgctccagcttcaagtacaagtgcaagataagaagagac

SEQ ID NO: 4689 - DNA, 1149 bp, Homo sapiens
aatccaacatctttagcctttaaccgtcccagttgctaacggagtggaacgagtttatttttataacagaaattccttcactacctccttgttttctaagaaaaggcgtgtagcggtttctggagtttgggaataggacgcagagatggggtaaggaattggaggcagttcagtagtttccctaagtaaagacagtagttggtaaaacatttgctatcttttctggaaggatctttcctgtgtcctgaaaatcttttttacaaatgagaaaagcattcagaaaaggaaggtctgggaggatgtttcttaactgaaatttcctcctctagtctgttcttaatccttaccaaatgtctgcaagatgctggttaatcaaaatttcttggtgatagagggctacaaaaaggggaaatgaaaattttaacgttcgttcatgaaagaataaataaatgtttaaaaaaaaaaaaaactgaggtaaatttctatattctttcataaaagcagtttaaagacgaacgtttttcgaggtggggatgtagctcagtggtagagcgcatgcttagcatgcatgaggtcccgggttcgatccccagcatctccagtgtttttgtatttatgctccggaaccgtctttcttttacagatacagtcacagcctatttctgtagaatcggaaaattaatcatattgcccccactcccgtatttatatcttgctttggttacgcctgtagctctttcatttttaaaatttcattcctgcctggccaacacggtgaaaccccgtctctactaaaaatacataaattagccaggcgtggtggcaggcgcctgtaatcccagctacttgggaggctgaggcagaagaatcgcttgaatctgcgaggcggaggttgcagtgagccgagatcgcgccattgcactccagcctaggggacaagagagagacttcgcctcgaaaaaaaaaaagaaaaagaaaaaaaaatttattcctctccattctcagccgcatttacatatgatgagtgactttggaccctgttccattagggcggtgctggaaggaacatttaccaataaaaggacaattatcaataaaaatcctaaatggatgttttgtgaacgaattcatcttttcactgagttttgc

SEQ ID NO: 4690 - DNA, 1185 bp, Homo sapiens
gcttcggtgtcaggtgagctagatggtatgtgtggcccgagccattgcatgtggggagaaaggtcaggcaggattttcacgttttcatctatttggacagttccttcttcgagcggggtcgagagcgagaggagcgacagctcccaaggtacatttcatcattcaacgtactcagatgcagggaatttgggttgcattttccatgagccttcggctagcagaaaatctgtcaaaagatcttgaacaatcccttaattctttccgcctgggattcaattgcgccaagaggactaattgtgctaaagctataaaagtgtgctttgctctcagtaacgacacaagctggatgttgttagtgtgtcccggaaggaggttactcaggtgtaatctgggttaggctttaggtggaattcatcctcagagttggtcactccctggtcgagcacgaggtaatataaaatgcttcgcgtttttaacatgacaggaattctccgttacaaccgacttgtgccaggggatgtagctcagtggtagagcgcatgcttcgcatgtatgaggccccgggttcgatccccggcatctccaaggcgatcacgtagattttgtttaattcagcctctggaacagaatataagaaaaacaaagaaaaaactattttagtcctttctcatttttgccattatcatttcctttaaatcgatcaatttcctgtctttatgtttgtttctcttctatttggttgactagccacactccatattcctgtttcctggaaacttccaaggtgttttattatgtggtgagtaatacaaagtcagagggacaattcagaaatgtactgttcctatgaatgcatccaggaagagggaatagagctgaatatccaagaatgttttaagatctactaaatgaggccctaatccattcccagtctccagtgaaaaactatcagtaaaaataaaatgtctccgtatcatagttttttttttgcggggtggggaaagtggaataggatggaaaagaggaaagtagcatgctttttttagttttagtattcaggtgggagttgctttcaacttaaggtccactctatcaccttaagataatgtagatcttgtcctacagttactaacctggtaaccattttctcactgcacgttttcaaggtttttgtgtgggaaagct

SEQ ID NO: 4691 - DNA, 1199 bp, Homo sapiens
ctccatttaaagttgatggagttttgaagtcgctgttttaaaacccgtttgtggatataataatcgtcaagcgagaaatagagatggggtgtggaatcagagcaggacaatctcagaacctgggactcacgaaaagagctggaaaatggatgttggcagagcctccgacccagcatggtgtgaagatcaaggaaagcccgcggctgcctctggactgaaaaacacttttttctgagtcattatcgctgctatatatgttggagacttgagactgtctcaggaccttcctggtggaggcaagaaactctcaccgagtcgccggcaagtggaccttggagcaagttaacaggaatgggaaggtcctagaatcaaaaacggtgctattcagactaaaatctgttactcgtctaatgaagccactacacagtatccagtcttgtaatttcagagataatgaaatttaatccagtggactttctctacctaactcttaagttaaaaaactataacaaaacaaaaccaacaagaaaaatagcaacaacattttataaaagaacccaggaagtttgagagtcagggggtgtagatcagtggtagagcgcatgcttcgcatgtacgaggtccctggttcaatccctggtacctccatttttccttcagccaatccatcctctcattatggacctccattgatttgggagaagcagatctcatgtctgtttgggtgagtgattggaagaacttggataacccaaaccgcgtttcttaaggaatgcggagcttgccaatgtgaactttgaaaactcatttgcggccggacgcggtggctcactcctgtaatcccagcactttgggaagccgaggcgggtggatcacgaggtcaggagatcgacatcatcctggctaacacggtgaaaccccgtctttactaaaaatacaaaaaaattagccgggtgtggtggagggcgcctgtagtcccagctactcgggaggctgaggcaggagaatggcatgaacccgggatgcagagcttgcagtgagccgaaatcgtgccactgcactctagccggggtgacagagcaagactccgtctcaaaaaaaaaaaaaaaaaaaaaaaaacagaaaaagaaaactcatttgcaagtttgagggccagatgctatcagcatgcagggagaattagatatggtagggggctt

SEQ ID NO: 4692 - DNA, 1199 bp, Homo sapiens
gcctggagctgttttctttctggtcttcgctctctagggatctcagccagtgagcagcgtcttggacagaatgccgcttccacgcttccgtagacgctgggcccagcggcttgggagggttgtgactgacacatgctttacacttcatttcacgctgatattgtgaattaattcccctccagtcttatctcctctcttggacctccgttccctgagtagctctcctagtactggtcttagtattccctagtagtaccgtttatgtttttctgggagcactgcagacagaaaagtaggaagttgactgtttaagataatatttctacctgggattctccttggtggtggacaaaagctgccattcgggaagttccctaggaacagtctttggagggtccgccattatgaaagaccctaatagcactaaagggatctttcggtccagaatgcaacttgagggtttcagaaatagtagagttggatagagtagactttgacctcggtttaaatcgtagaacactagcagataacagtgacagccagttataaaatatagcaaaaaagctagctttaagggggtgtagctcagtggtagagcgcgtgcttagcatgcacgaggccctgggttcaatccccagcacctccatgtattatgctcatttgcctagcggcccagagcagggacccttggcagaaaacagcacgatttgcttcatgagtggcaacagactcaaaagtagcctaaggtctacgttttgggtggtatgtctaaataatgctgcattgaagcgtgggattaggaagaaccaaggcccttggaattaaaatgaatagcagtaatccactttcatcgtttgtttcttacccacagtcaaccgcgatctgagattactacatgaaaaattccagaaataaacaattcataagttttcaatttctctgttgtgagcagcatgatgaaatgtcgcctcatgtgctccatcccgcctgggaagtaaaccatctatttgtccagcatatccacgctgtgtagtaagccacccactagttagtcagtcagtagccatctgagttatctgagctactgtcctcacgttgcttgtgttcaaataacccttattttactcaataaaggccccaaagtgcaagagtagtgatgctggcagtttgggtatgccaaagagaagccctaaagtgct

SEQ ID NO: 4693 - DNA, 1214 bp, Homo sapiens
agcctcccgagcagctgggactgcagctattaggatgcattaacgaggattgagagtcagctggaaaatggatgttgtcacactgtccgacaaatacagtgtgaattcagctcgccgacggctgcctctggactgaggagcacttcatttgagttagtattgcgggagaaaatagaagtgtggcaaacatagctcaattggaagagctctggactaaaggtctagactaaaatcagggatccttctccatgactgaacagtcctcaatgttggaagtttgtgctttttgctggtggaggaaagtagctttcatgcagtttgcttgtgaatggagcttgaagcaggctaacaggaactggaaagtccgaggataagaaactgcgtcatttggactataatcttagtgtcttagtatactgttataagtatattaggatactgttagctgccaaacagtatccagttcagtgatttcacgaaagtagtggaatttaatccagcgatctttctccaaccaacagaaaatgaaaccaacaaactgaaaacaagtgatattttatatataagccaacagaactctcatgcggtcagggggtgtagctcagtggtagagcgcgtgcttcgcatgtacgaggccccgggttcgacccccggctcctccagttgtccattttcttcattctcctttctggttctttgcatgcgtttgtcactttttctcctactcctataaaaagaggacagtgtcaaatgtgttgcttttaatactatgctatttattctggcactcatctgtggctttttataaaacttagcttgagaagaatgtcttgctaacgtgagtgaaacaagcagacattgaaagggggacacaaattaccccacaaggagttcttctttatattttttccagacgcaaatatcttttaaattatgttgattaaggttaaaactttctaggcttacatcaaagctgtgtgtgggtcatggcatcatttctaactgtatgtagatatcgacttgtagcccagcgtaaaaaaaaaaaaaaaaaaaaaaaaaaaaaaaaacctaaatagataaattttccatcaagatctccttggcaggaagcacgaaccctgcaatctcattacggacccatgcactttgagttccgtttggcggtatcgctaaagagatagactaaaaaagaatggaaataagaaaaaataggc

SEQ ID NO: 4694 - DNA, 1202 bp, Homo sapiens
tcatactcaagaaaccattgcctaaaccaatgtcaagaatattcccccctgttttcttcaaggaattttacagtttaggggcttaagtttaagatttaaattcgtttttagttgacttttgtgcattaacatcttgtcttgtctcctcacctggatctacgtttcctctgcagcactcacagaactcgtctttatattctctggcactatcgcgcgcgcgtgtgtgtgtgtgtgtgtgtgtgttggcagctccatagaggaggtttttttaaaaaggagagaatctgaagacataccagaagattcaatcttggaacttcgctccaggtggacggaaactgacaaagaaagttggctaacagcagtccttgaaatagatgacggctgtgagaggatccaagggtctttcggtccagaatgcctttctcctcttgacacagcgtcaagacaagattccattcagaagtttcagaaacaggagttaaaacatagcggactttaacctatcatgccttaagccctcacctttagataatagcatataataaatcagtaagaaaacggcattgtaagtgggggtgtagctcagtggtagagcgtatgcttaacattcatgaggctctgggttcgatccccagcacttccacaagtacatttccttatatctatcgttgaacatttcgtttcagtctttgaatacttagttccagtcttttcttttttctttgtgcatacactagcttgtgtttttcctactcacagcgaaggtaagccatttggtactcattcatttgtactatgggtcctaacactccttcagcctcccaacctgactgcttcagcacagctttatagttatttactgaaatagagaagctgcttattcaagatcccctgagagtgaagcaacaggcatgccggtcatagaagactcgttctcctagaccatcctggctaacatggtgaaaccccatctctactaaaaatacaaaaaaaaaaaaaaattagccgggcgtggtggcgggcacctgtagtcccagctactccagaggctgagacaggagaattgcataaacccgggaggctgagcttgcagtgagccgagatcgcgccactgcactccagcctgggcgactgagcaagactccatcacaaaaaaaaaaaaaaaaaaaaaaaagactcgttctcctttgctgccgttt

SEQ ID NO: 4695 - DNA, 1231 bp, Homo sapiens
ctaaaacctttagactgtgaccagcaaaagcggcactaaatactaaaccaaaagacactgttacacgcggttttcctctctggccagccagaccgccggtctgaggtccacttgccaaagtgatgcctggctggcagtttcatccaccaacagaaaggggtccattatggaatgttctcttgcatcttcaaattcttcctccttcgtctctcttaccctctgcctacaaaggcttcaagaaagagatgcaagacaatactgagggatacgaacaaaagtagctccacagttgcctcgagaagtttaggttgcaggtaattggcgagaatgaaaccctctgtatctagcaactccgcagtgctttgtgtagaagacgctccatctcaggttacgaaaatctacagaaaggaaatgtttaaaaagagaaaaggaaaatattcctagggattataatgtctctcttaagcagggtcttcgaaaagaggataattcaagtaatatgatttacaaattgcaacatgaaacaaaatgaactgaacaaatggagaaatctagattacatactccgtgggttgcgtctacccagggcctggatagctcagttggtagaacatcagacttttaatctgacggtgcagggttcaagtccctgttcaggcgaaatatttgtgtgttttactctagctccggagtccccaacctccagtaaacgtaaccgcgtatcaggcagcgcggcaggcgagccagagaagtttcatctgtccttatacagcaactccccaacgctcctgcgaccgcctgagctactcttcctcccagataagcgggggcgtcagattctcacagaagtccaaaccctattgtgaactgcgtatgaaagggatctagattgtgggctccttatgagaatctaatgcttgataatccgtcactgttttccatcagtgccagatgggactgtctagttgcaggaaaacaaactcaaggcttccagtgattctacattatggtgagttggatacttatttcattatatattacaatataataacaatattaaaaaagtgcacaataaatctaatgtgcttgaatcatcccaaaatcatcccccccaacccctgctccctcatccatggaaaaaactgtctttcatgaaacggtctctggtgccaaaaaggtggggaactgccgcccaagatagtttataccaattaagcacaggaagaagttc

SEQ ID NO: 4696 - DNA, 1216 bp, Homo sapiens
tggcgtgatcatagctccctgcagcctccagctcccaaggtcaagtgatcctcctgcttcagcctctggaatagctgtgagtacaggcgcaggacaacacaccagctaaagacccttaagatgaaatgctgagtgcatcgctctcaggttttcttctgactgtgattttcctcaatcaaatctaacctttaatattccggctgagtaaacaacaaatatgaagcattttaggtaagaaaaagctgaatttcaataactttgcgtcatctctgaaagaaatcgaaagaatgaaaaaccagaatttgattccttgccaagcataacagaagaaggagatcctgacaactcaacgttttaaagccacattggaaacttcttttggcggttatctgacacttttctaatactttgctttccatttcaagtcctgtacagtatactaaagaatctgtatcccctcattagtaccgagtatcttctactcagagcagctgaaggcgctccatgatactaaccactactaccagcatgctcacggagccagtctcagaaaatgaaagttacctcctgaaaattattacaaaacagtctttcaggaggggggtgtagctcagtggtagagcacatgctttgcatgtgtgaggccccgggttcgatccccggcacctccaaatggtggttttgctctggcagtgcttaaatgtaattctcaagcaacatagccttctgcctcctcacctttttctatcctatttctgcacgtatagagagtaaaaacgtaacccaatggattgccttcacttatctcccatctctataatgtaagcctcaacatcacctaaggcgattgcgacggcagaaggaagaggagaaagaagaatgaggtcgcaacagggtctcttgaaagcaaacaaaagcgtgcacatcaacaggcggctcactttggcttcggttttgtactatgattaaagagaaggaaaggctgagaagaagaaaggcagaaaagcccccccccgccccccgggcatttcgttttggtcgttgtttttgttttctgagccaaatccagagtcaaagcatctgtccactgatttctctccctgtcgaactgcgcagagagcacagccacaagtgcgatccaaagctgagaaaatgtggctctccagccgcttgagatgagagtggcaggacgctggacaaccgaacgaagactgtc

SEQ ID NO: 4697 - DNA, 1166 bp, Homo sapiens
tacaggcgtaagacacagcgctcggctgatacaacccttatacaacacttgcatgccaatcccagaaaggtgtatagaactccaattttttgctgttgaaaatccgataaaggtaatacacacacacacacacacacacacacacacgcatatatatatatatgcatcactctctgctttggttgcatattccagtgaagtcttccatgaagcgctgacattaaataaattatttacagtctgaaacctaggaagtgattttttttttttttgagattgagtttcgctccgatgcccaggctggagtgcagtggcgcgatgtcggctcagtgcaatctccgcctcccgggttcaaggattctcctggctcagcctccccagtagctgggattacaggcgccttccatttcaagtcgtatactgtattctaaataatttgtatcccccgttagtacctagtatcttctactcacagcagctgcagacgctccacaatactcagaaaaagaaagttacctcctggaaattattacaagaaggatttttttcaggaagggggtgtagctcagtggtagagcgcatgctttgcatgtatgaggtcccgggttcgatccccggcacctccaaacggtgactttttgctctggtagtgctcaaacctaattctcaagcaacatagacttacttctgcctccgcacctttttctgtcctatttctgcacatatagagagtaaagacgtaacccaatgggttgcctccatttataacccatttctatgccgtgagcttcgacatcactgaaggcgattgtgacggcagaaggaaggtgaaaaagaaatgaggaagaaagaagaatgggatcccaacagggtctcttgaacccaaacaaaagtgtgcacatccacgggaggttcacatttgctctcattttgtgctatgattaaagagaaggaaagacaaagaagaagggagaaaagcgccccgcggccattctttttttttttttttttttttttttggagacagagtctcgctctgtagcccaggctggagtgcagtggcttaatcttggctcattacaaccgctgcctcccgggttcaagcgattcttctgcctcggcaggtgggtttacaggtgcgtgccatcaggcccgggtaatttttg

SEQ ID NO: 4698 - DNA, 1247 bp, Homo sapiens
ctacaatcgctaactcccaagttcaagcgatcctcgtgcctcagcctctggagttgtgagtacaggagtaagacaccacgccagctaaggacccctgtgaaaaaatgttgagtgcaccgctctcaggttttcttctgatcatggctttcctctatcaaatcttacctttgatattccgactgagcaaacaacaattatgaagcgttttaggcaggaaaaggctgaatttcaatggctttgtgttatatctggaagaaatcaaaagaaacgaaaatcagaacttgattcttgccaagcataatagaagcagaccctaagaactcaacgtcttcaggccacaaaggaaacttcttgtggttattatctgacacttttctaatctttcgtttttcgtttcaagtcctacacagtattctaaagaatctgtatcccccattagtaccaagtatctcctgctcagagtagctctccacgctctatggtactgaccactattaccagcatgctcacggagtctcagaaaatgaaagttacctcctgaaaattattacaaatgggtgttatagtaagggggtgtagctcagtggtagagcgcatgctttgcatgtatgaggcctcggttcgatccccgacacctccaagtgatggtttccctctggcagttctcaagcgacagacctctgcctcctcacatttttctattctatttctgcacatatagtaagtaaaaatgtactccaatgcattgccttgaactatctccaacctctatgctgtgagcctcaacatcacataaggcgattgcgacagcagaaggaagacaaaaaagtaacgagggggaaagaacaggatcgcaacagtggtctcctgacccaaacaaaagcatgaacattcacaggcggcttgcgttcgctcccattttgttttgttttgttttgtttttgtttgtttgttttgttttttgagacggagttttgctctcgttgcccaggctagagtgcagtcgcaccacctcggctcactgcaacctccgccttccggtttcaagagattctcctgcctcagcctcccaagtagctgggattacaggcgcccgccaccacgcccagctaatttttttgtatttttagtagagacggggtttcaccatgttagtcaggctggtcttgaactgccgacctcgtgagccacccgcctcggcctcccaaagtgctgggattacaggcgtgagccaccgcgcccggcct

SEQ ID NO: 4699 - DNA, 1247 bp, Homo sapiens
ctacaacaactaactcccgagctcaagcgatcctcgtgcctcagcctctagagtagctgggagtacaggcgtaagacaccacgccagctaaggacccttatgaaaaaatgctaagtgcatcgctgtcaggttttcttctgattgtggctttcctccatcaaatcttatctttaatattccgattgagcaaacaacaattatgaagcgttttaggcaggaaaaggctgaatttcaatggctttgtgtcgtatctgggagaaattaaaagaaacgaaaacctgaacttgattcttgccaagcataatagaaggagaccctaagaactcaacgtcttgaggccacaatggaaacttcttgtggttattatctgacacttttctaatctttcgtttttcgtttcaagtcctacacagtattctaaagaatctgtatcccccattagtaccaagtatctcctgctcagaacagctctccgcactccataatactgaccactactaccagcatgctcacggagtctcaggaaatgaaagttacctcctgaaaattattacaaagagaccttatagtgagggggtgtagctcagtggtagagcgcatgctttgcatgtatgaggcctcgggttcgatccccgacacctccaagcgatggttttgctctggtagttttcaagcgacagacttctgcctcctcacgtttttctatcctatttctgcacatatagacagtaaaagtgtagcccaatgttcagccttgaactatctccactggttatgctgtgaacctcgacatcaccaaaggcgattgccacagcagaagggagacaaacaagaaatgagggggaaagaagaacgggatcgcaacacggtctcttgaacccaaacaaaagcgtgcacattcacaggcggctcgctttcactcccattttgtactatgattaatgagacgcaaagacaaaggagaagggagaaaagcgccctgaaggcatctatttttttttaagttatttttgttttctgggccaaagaacagagcgaaagcctctgttcactgatttctccaccagtctctccctgtctacctgcgcggagaacacagctaccagtgtgatccagtactgagacaagggctgtggctctccagtcgcttgagatgggagtggcagggcgctggataaccacacgaagactgtcggggaattagaggccttcaacgtgcgagaagcagaaaccaatacggatcaaca

SEQ ID NO: 4700 - DNA, 1238 bp, Homo sapiens
tggtggtccctgtggagaccttcccagccgttcccggctaccacttttagagcccaagacaaacttcgacgagtggcaaggcagtgacaaatggaaccaaaatagaggggctaaaaggggaccttcctatagaaccggggtcttttgttagggttttgttttgttcctcaccatcttccaaacaatgaagtcctgggggaggctaaccacgatcaagatttcagtaaacatcagacactggagagccgacccagcgaccgaagaagcaaaagatcttctttccttcctgaaatctgggcaggctgggagcaaaaaaaaaaaaaaaaaaaacccgcacacgtttttcgagatggcgataacagttataaggcccgtaagagacttgatccagttttatgcagaaacattttctagtcctgcgaacccttttgctttttcaatccacaagtggctttctgcccttctgttaccaagcaaccctgacgtcatcgcgtttctgcgtgcgtgcacgacacagaatcattgcttgttgatctctattttagtgcaaaaatcagggctgttatgcagtgtgtcaggatggccgagtggtctaaggcgccagactcaagctaagcttcctccgcggtggggattctggtctccaatggaggcgtgggttcgaatcccacttctgacacatacttttctttttcctctccttactttagagatatcctgatctcagcagtaggcataaacaattaccaacgtatatttttaagaatcggcttttaggtaccgggcgcggtggctcacgcctgtaatcctagcactttgggaggccgagacgggtggatcacgaggtcaggagatcgagaccattctggctaacacggtgaaacctcgtctctactaaaaatacaaaaaaaatagctgggcgtggtggcgggcgcctgtagtcccagctactcgggaatgaggcaggagaatggcgtgaacccgggaggcggagcgtgcagtgagccaagatcgcgccactgcactccagcctggggacagagcgacactccgtctcaaaaaaaaaaaaaaaaaaaaagaattggcttttaaatttatctcaaagggcttgtccaaactaaaaacattaaaagcggaagcatcgcgatatttttacgaagccgcgagatttgggccaaaaaacgcctaattaaaggcagaggttactagcgattggtctctgtgctgcagtgcgagat

SEQ ID NO: 4701 - DNA, 1168 bp, Homo sapiens
cctttaaacatgaatattggacctcactaataatcaaatcagaaaaaaaagggggggcgctatatcatttgttacctattaaaatgtgccaggagcggtgggtcacgcctgtaatcccagcactttgggaggccgaggcgggcacatcatttgaggtcaggagtttgagaccagcctgaccaacatggtgaaaccctgtttctactaaaaatacaaaaaaaaattagctgagtgtgatggctcatgcgtgtagttccagctactcgggaggctgagacgagaatcacttgaacctgggagataggttgctgtgagctaagatcatgccactgcactccagcctgggcaacagagcaaaactccgtcaaaacaaacaaacaaaaactggataaacattgatgtaggccgggcgcggtggctcacgcctgtaatcccagcactttgggaggctgaggcgggcggatcaagaggtcaggagttcgagaccagcctgaccaacatagtgaaaccccgtctctactaaaaatacaaaaattagccgggcgtcgtgacgggcgcctatagtcccagctactcgggaggctgaggcaagagaatggtgtgaacccgagaggtggaagttgcagtgagccaagtcgtgctactgcactccaccctgggtgacagagcgagactccgtctcaaaaaaaaaaaaaaaaaaaaaaaatttgatgtaatggtttcacttttagaaatttaaggaaataatcgtggatgtttgaaaatatttatgtaaggatagtttttacagcattgctgatgaaaataaaaaattagaaataatccagttttcaagaataccactttgatatggaatatgtgcaggaattaagatttatgcaaaatatagtacttagcaagtatatattcataatatattcatttagaaagcaagttagcaaattatttactacacatgaccatttttggaaaatgtataccatatgaaagactaaatatataaaaatgttaatagttacctctgactagtgagattatggatgattttaatttttgacatgtttgtatgttctacaatttgtgtgtactttgcaattagaaaaaaataattatagttagggtaagattacagttgccatgttgggaatcacttcctggacaatttcct

SEQ ID NO: 4702 - DNA, 1246 bp, Homo sapiens
agtcaactcctgttactcacatcgacagtcatttttcatgttcaagacccctgaaccgctctcatcccccactctccgctaactctcctgcttcgcttcaggtctacattgcctcgctcatttcttccctgctgagctctttgattagtttgctaagcagcatctcgggaacagcccccgtgctatgtgttctttcttgtcatggatatgtgttttttcttgtcatgctatgtgttctttcttgttcaaggcagagtcgcggctgggttgttaggatgctcgcgcccctgtacccggggcgtgcagggaagtgtaagaagggggcgaagggcgagaaacgctgaattctagcctgaattggtaggagagcctcgcaagctgagtcacggttcctgattccatttaaatagaacgttttgttcacttgtaggaatttccttttccatttctttcattaaatcgcgaacgtagtaatgacttaacgctggttacgcattcattacaatcgaagattatattaatttgcgatggtaagtgtcccaggtgtcaggatggccgagtggtctaaggcgccagactcaagcttggcttcctcgtgttgaggattctggtctccaatggaggcgtgggttcgaatcccacttctgacacaactatcttattctccttttactctactttctcagccatttctgtgttttcattctttctacctcaactttttttattctaactaaaatgatacactctcaatgaggtctgcccccttgcttttcagtcttgttcgctgtttagtagtgaatcacgttttgccccgctttggtcagttcgttaaaaggcgcattcatttaccacatgagcactcacccagaggcgtactgggaggaaactagactaggtaggaatagaaagacatgtatacagactccatcattacatactggccctgagctcataggttattgggaccgcagattacatgtttttcctcacggccagaaaccatcaaaaataaaagtgatgaaactgaaattgaaagcagcaaggttcacgctcaaggttatcggaaacaaggcaaaaggagagaaatgaaaggttccaccgagatttgaactcggatcgctggattcagagtccagagtgctaaccattacaccatggaaccctacttaacaaaaaatggatactcgatccacctggggtctctcttgtcttctacttactaattgatttaaagtaattttgc

SEQ ID NO: 4703 - DNA, 1197 bp, Homo sapiens
gacttcaggagtaagcaaggccaaccgtttggtttgagcctgttgcttctaagaaaagcgaggaaaaatcctgagacctcctcccctcgcccttcatccacttcaggggaccgagtgtctccacggaacttcacaagggaggaaaagagtgaactcattattatttgtcttgtcttcgtttcagaggcggtacatctacgaaagccctaatcatagagggaaagactcctcgttcctggcccagaaatgagatgagaaatccagggccccgtacaggaaggcctttcgcaaagtccagactcaattgccttcgcagcccttaaagtttccttaggaaggtctgtgggagaacgaggttggtttaggaattggcccctgccttgtactacgtagttttgtcatccaaagtgttttagaagtgaattgaatcatagttacgccttattttgaaacactgtaattcagagaacgtaaaaccttattaaaatgcctcataatcatcttggtagagccgttggttaagcgggagagacagttgcctccttagcgcagtaggcagcgcgtcagtctcataatctgaaggtcctgagttcgaacctcagagggggcaaggcgtctgttttgccattttacttcttcttgatccaaaatgagtaagacaacaaaggaagttgacaaaacgttgttctttctctgctttctctatagaaaagtgtacaatatgtctggtaagggaaaaaaaaatctaaggacattgctttgatggaacagaacgggtaattgctgtttaatagaaccatgttcagttacaaaacagtgattttcactaagaattaaattctccaaaattctcatctcccctcccgccctgcataccaattggagatagagctggtagcattttcaaatgtttttcagatatgcttggcaattgtctttgttttaacaacaccagagtcaagaaacttgccagttttagagtgctgagataagaaaaagtgggtggagggttgtactaggggtgtggaaggtatagaatctaattatcaattactgacttggttatcttttaccattcttctggaatggcttaccaccaggttgccaccaataacattccatatgaaaaaagaaaggaaacaaaaaactgacaaaaaactcccccctcagtctcattgcattggaccttttctcttg

SEQ ID NO: 4704 - DNA, 1181 bp, Homo sapiens
ccgggttgaagcgattcccttgcctcagcctcccgagtagctgggactacaggcgtgcgccaccacgcccggctaatttttttgtattttagtagagacgaggtttcaccatgttggccaggatggtctagatttcctgaccttgtgatcgcccgcctcggcctcccaaagtgctgagattacaggcgtgagccaccgcgcccgtgtgccaggtgttcttaaggtcgcagggaagactggagcataacctttgaagactaaagacaagacaaacccggcgattacgtctgtagttatacattgcttttacaagtaattgtttggagtacattacacaaagatgggagttaattttttccatgagttggggacaaaaataactgtgagccatattcaaagtgggcaaaagcatagatgggaataaagaaaaggaacatggataggatttaagttggacgatatcaagtttctgcacctttttactcactagaatgtgcaggaagaaggcttttgcagggagcccggatagctcagtcggtagagcatcagacttttaatctgagggtccagggttcaagtccctgttcgggcgggagtggtggcttttagtacctgattctggtatcatgtttgaaaaagccaaaaaggatactatcgttttatagggacagatttcatatactgcaaaaattcaccaaaccctgtagaaccccaaattttaaaccacgaataggcgagtaactctgatgccaaataaaagtagtaaggtgaatacatgggccctctacagtgagatagccccagattttctgaagaaaactaacatttaaggacaaccttagaatacgaagtatttaatattttatgattcctgttactctgcttacaggtgccaaagtaatcttctgttgttacttgctttccagtgcagagtttattttacgtaggagggaatatactgatcaattatcaagaaagttataatatgttcatattctggcttggcatatttctggcatttagttaccgtgagtcagccctgcaagtcttaaaaactctaggtgaatttaaaaatagtttccggccgagcgctgtggctcacgcctgtaatcccagcactttgggaggccgaggcgggcggatctcgagaccatcctggccaacacggtgaaaccccgtct

SEQ ID NO: 4705 - DNA, 1100 bp, Homo sapiens
ggataatgagagatcttggggcaccttatggaacttgggtcctgaccttcccttcccttatagcattgtggcctctaggatgtgagaagggaaatgggatgtagggattagggaggtgagttgagggagagagagaaggtaagcaaatttgggtccaggggtattaggggatagcttataatgaggttttttttcccacccctctcccctacatgaataattgggggtgcagggaaggatgtgacacagggaaggagatttaagatctcaaatttatcttcactgacatgtggccccagagacttaaggaattgggttagggtgaaatagagtacacaaggtgagaatttggtgatcttaccaaatatcaaccttggggtgatccaaggatttatattcatttttagaacatcactatacacctagaaataggtgtgtgtctgggataggtgtgtgaggggacagaagtgaggttgaaggtagggtgcttgaagagaagagagcacaaggattatcaggagcttggcaagagaacttaaaatcctttttgactgttactttctcgtggttctcagccttcagtgtacataagaatcaccagaggagtttgttaaaaatacagattctagctccttggtcagggatgaatcccaagtatttatctgtatttttactaatagacatcctatcttggtggattcctgagctgtaagctaaccccagaatgcctatgggaagagcagcagggtacaggaaaataattaggtattagggtacgggaggcaggaagagaagtagaggatcagatctggtagagggtcagacttgggacagtcagagagatcattggttttggggagtggagtgtgaagaaaatgacagggagagatgggtgcaggctttatgataggggatcacaggagataggggaggcctggctgtgagctcaaactcatccaccatgacaggtgattccctggaggtggcggggagcagacgtgggacctgggagaagggaactggagaacatcagaggcatcaagcggggtgggatgggaaggcagaagaaccagaatgtgtcaattggaatgagtcggttt

SEQ ID NO: 4706 - DNA, 1230 bp, Homo sapiens
ctgatcccgccctgggtctgcagtcacacatttctggaaacttctctggggtccaagactaggaggttcctctaggaccttaaggccctggctcctttctggtatctcacaggacattttcttctcacagatagaaaaggagggagttacactcaggctgcaagtaagtatgaaggaggctgatgcctgaggtccttgggatattgtgtttgggagcccatgggggagcccacccacctcacaattcctcctctagccacatcttctgtgggatctgaccaggttctgtttttgttctaccccaggcagtgacagtgcccagggctctgatgtgtccctcacagcttgtaaaggtgagagcttggaggacctaatgtgtgttgggtgttgggcggaacagtggacacagctgtgctatggggtttctttgcattggatgtattgagcatgcgatgggctgtttaaggtgtgacccctcactgtgatggatatgaatttgttcatgaatatttttttctatagtgtgagacagctgccttgtgtgggactgagaggcaagagttgttcctgcccttccctttgtgacttgaagaaccctgactttgtttctgcaaaggcacctgcatgtgtctgtgttcgtgtaggcataatgtgaggaggtggggagaccaccccacccccatgtccaccatgaccctcttcccacgctgacctgtgctccctccccaatcatctttcctgttccagagaggtggggctgaggtgtctccatctctgtctcaacttcatggtgcactgagctgtaacttcttccttccctattaaaattagaaccttagtataaatttactttctcaaattcttgccatgagaggttgatgagttaattaaaggagaagattcctaaaatttgagagacaaaataaatggaagacatgagaaccttccagagtccacgtgtttcttgtgctgatttgttgcaggggaggagagtagatggggctgtgcccagtttctgttctggccaccatgggctttatgtggtcacagctcacctgggtcatctttgctgctccattgtccttggcccttcagtagaaccttgtcccaccaagacctgtgatcacagggagttggatgtcacctagggtggtccctgcatacaaatctccttgtggtatcaagagacaaattttcagacctgtccaggtcttgccttcctcccagggc

SEQ ID NO: 4707 - DNA, 1380 bp, Homo sapiens
aagctagaaaaggcatttgctaagtgggaaagggatggtgttctaggcagaaggaattacattgtcgaagggcttagccaggaaagagcatagcactttgaggcatggagagcggtttggtttggctgtgagtttgaggtggggagtggcaggaaatgagcctggagacacaggctgggccatgattatctgggaatccagctaggatctcctgggacagcctcctcacagaagaaaggaaggacaggagttttgactttattcctggagcaccagaaagccattgaggggtttaacctggttggtcacccgggcagattggcagtttaacacgtgaccgagtgtgtttgaggatcaaaaggccagagtggctgcagcactggggcagcaaaggggagaggaggtttatgtaaatcaggaaacccttgagggtttgatgatcccacagttggatctgatttcagcttctaaaggattcctcaggtcactggatgtaagttctggtaggacagggagtttgccacttttgttctctgctgtaacctcggtgcctgacacatagtcggcacctaataaacatctgctagctgttgaataactttcaacatcctgctgcttaaaccctcaatggcttcccagggctgttaggataaagtccaaaattcttaacctgggtcacagtcttgcataatctgttccctcctgtttctccacccttcctctgctcgcctcactgcactccacctgtggccaattgtcagctcctcaaattcaccgctaccctttctccggcggatgatttcctctgcctgtgaggctaaccctccacagcactccatatgggcagggaagagttcattttccaggcaccaaagtgcagtgtatggtggaatggaaggagcccagagctgggaggtgcacctcaccccacctcgtgctagtgctggccttgctgccagccagctctgctgctgggcaaatgagtccgaggctctggcactcactgtcctcctctgtaaataaggggttctagtgattcacagtcctggatagactttagaatctcctgggaagtttgttttttaataccagagcctgggccacctctggagatcctaagtcagttggtctaggtatgttttgaagactcaccagtttgaagactacaaatctgatgtgtagtcaaggtttgaaccattccacaagatgataaaggattccttcctatatttggtgcaaagcaccaagtgacacttaggaatattttagacaagagagcttggttcatgattcaacattagacagatattctggcacaaatatgaagaaccctcaattttcccctgtgggtcagccacaagaccagggcaatttaacgcc

SEQ ID NO: 4708 - DNA, 1236 bp, Homo sapiens
cggggagggtgggtaagggaaagagagaaggtgggacattgaggaaagtactgagtgctcatttccctcaggttctggcagggatctaccctatcgcccagatccaggagccctacactgctgtgggctacctggcctcccgaattcccgtgcaggccctgctccacctgcgccacccagaggctgaggacccctcagcggaacacccctggtgtgcctgggacatctgtgaaggtgagttccatgtgcctggcttcgccccacctggtttcagctgctcttccttacctgcctcgccttttacccttccctgtctcctttcctctcctcagagattctgccattgatgaagctgctgtccactcacccctagatttttgttgcatagccagtaagatctctggcctggaatgttttggggaaaactggaaggactgtgttatgggagtgggagtataactggtacctggttaatgctttccctttccattattcttttcttcctccagcctgggcagagaaacgtggttacaagacagccaaggcggctcggaatgatgtgtacagagcagccaacagtctcttgcggctggcagtggacggccgcctcagcctgtgttttcatcccccaggctacagtgaacagaaaggtcagagcccagatattcttccccagccccctgctatagcgtaggtaaaagggtgtgggctttgtggccagagagagggtcaaacctggattctgtacctgttggctagctctgttacttaacatctgtgatattttcctgatctgcaaactgagggtaataattgacccttagcatagtgattgtaaagattgaagttgatgtgcacaaaggttctgttcagcaatctgcacataggaagttgaatgaatggatgaatgaatgaatgccagcagctctaaagattattgttattcctagtctttgcctcttccccatctttccttggctttagttcttgctcaaaactctcctccatttttttcttgttttggttccccaggcacctgggagtcccatccagagaccacggagctggtggttttgcagggcagggtggggccagcaggtgacgaggaggaggaggaagaggaagagctgagcagctcctgtgaggaggagggagaggaggaccgggatgcggatgaggagggagaaggggatgaggagaccccaacctcggctccagggtccagcctggctggcc

SEQ ID NO: 4709 - DNA, 1099 bp, Homo sapiens
caaggagctcacagttgagttggggtatcccttccagggaaataaattctatagactctcttttcttcccttcacagtgatgaagaggggcattccccggtcctgggcggccttgggccgccttttgccttcaatttgaacagtgacacagatgtggaagaaggtcagcaaccagccacagaggaggcctcctcagctgccagaagaggtgccactgtagaggcaaagcagtctgaagctgaagttgtaactgaaatccagcttgaaaaggatcagcctttagtgaaggagagggacaatgatacaaaagtcaagaggggtgcagggaatggggtggttccagctggggtgattctggagaggagccaacctcctggagaggacagtgacacagatgtggatgatgacagcaggcctcctggaaggccagctgaggtccatttggaaagggctcagccttttggcttcatcgacagcgacactgatgcggaagaagagaggatcccagcaaccccagttgtcattcctatgaagaagaggaagatcttccatggagtaggtacaaggggtcctggagcaccaggcctggcccatctgcaggagagccaggctggtagtgatacagatgtggaagaaggcaaggccccacaggctgtccctctggagaaaagccaagcttccatggttatcaacagcgatacagatgacgaggaagaagtctcagcagcgctgactttggcacatctgaaagagagccagcctgctatatggaacagagatgcagaagaggacatgccccaacgtgtggtccttctgcagcgaagccaaaccaccactgagagagacagtgacacagacgtggaggaggaagagctcccagtggaaaatagagaagctgtcctcaaggatcacacaaagattagagcccttgttagagcacattcagaaaaggaccaacctccttttggggacagtgatgacagtgtggaagcagataagagctcacctgggatccacctggagagaagccaagcctccaccacagtggacatcaacacacaagtggagaaggaagtcccgccagggtcagccattatac

SEQ ID NO: 4710 - DNA, 1226 bp, Homo sapiens
gccaggtgtggtggttcatttcacatctgcagtcccacctacttgggaggctgagccagatgatcacttgaacccaagagttcaagattgcactgatctatgatcatgacactgcattctagcctgggtgacagaatgagaccctgtctcaaaaaaaaaaaaaaaatcaaataaaatccaattgtgtgctctggagatggatggtagtgatgattgcacaacagtgtgaatgcacttaatgccactgaactatacacttaaaattattaaggtgatacattttgtgttatgtgtattttataacagtaaaaaaacatccattgtggatggatggggtatcgcatatactctttcagtgcctagatgtcctagggccttttatttttctaatgcatatggaggccttgagtgagtagtagagtacctaataggcactttttcctaatgacaggccaggactctgatcttggagcttatctacctctctaattcttagatttcccactacacctcgggaagaatgtggtaggccgaatgcctgactgctctgtggccctgccctttccatctatctccaaacaacatgcagagattgaaatcttagcctgggacaaggcacctatcctccgagactgtgggagccttaatggtactcaaatcctgagacctcctaaggttttgagccctggggtgagtcaccgtctgagggaccaggaattgattctctttgctgacttgctctgccagtaccatcgcctggatgtctctctgccctttgtctcccggggccctctgacagtagaagagacacccagagtacagggagaaactcaaccccagaggcttctgttggctgaggactcggaggaggaagtaggtaagtttgtatattggcagggagaatgaggagacaggaataatgagtgtacaattgtcaactcattcctttctgttcttgacagattttctttctgaaaggcgtatggtaaaaaaatcaaggaccacatcttcctctgtgatagttccagagaggtgagtgccaaagagtcagacacctgagtcttcaaaatgaggaagaaccaggggctggaggatcaatctctaaaagagatgattatcatgagagttggggctggggaaccatacatattcattcactcagctgaatttttatggagcacatctgatgtgccaagtggaaaacaaattggaaacagaagaagaaa

SEQ ID NO: 4711 - DNA, 1738 bp, Homo sapiens
cagatgcttaacgtgcagaacaagaacagcagctactttgtggaatggatccccaacaatgtcaagacagccgtctgtgacatcccacctcgtggcctcaagatggcagtcaccttcattggcaatagcacagccatccaggagctcttcaagcgcatctcggagcagttcactgccatgttccgccggaaggccttcctccactggtacacaggcgagggcatggacgagatggagttcaccgaggctgagagcaacatgaacgacctcgtctctgagtatcagcagtaccaggatgccaccgcagaagaggaggaggatttcggtgaggaggccgaagaggaggcctaaggcagagcccccatcacctcaggcttctcagttcccttagccgtcttactcaactgcccctttcctctccctcagaatttgtgtttgctgcctctatcttgttttttgttttttcttctggggggggtctagaacagtgcctggcacatagtaggcgctcaataaatacttgtttgttgaatgtctcctctctctttccactctgggaaacctaggtttctgccattctgggtgaccctgtatttctttctggtgcccattccatttgtccagttaatacttcctcttaaaaatctccaagaagctgggtctccagatcccatttagaaccaaccaggtgctgaaaacacatgtagataatggccatcatcctaagcccaaagtagaaaatggtagaaggtagtgggtagaagtcactatataaggaaggggatgggattttccattctaaaagttttggagagggaaatccaggctattaaagtcactaaatttctaagtatgtccatttcccatctcagcttcaagggaggtgtcagcagtattatctccactttcaatctccctccaagctctactctggaggagtctgtcccactctgtcaagtggaatccttccctttccaactctacctccctcactcagctcctttcccctgatcagagaaagggatcaagggggttgggaggggggaaagagaccagccttggtccctaagcctccagaaacgtcttcttaatccccaccttttcttactcccaaaaaagaatgaacacccctgactctggagtggtgtatactgccacatcagtgtttgagtcagtccccagaggagaggggaaccctcctccatcttttttgcaacatctcatttcttccttttgctgttgcttcccccctcacacacttggttttgttctatcctacatttgagatttctattttatgttgaacttgctgctttttttcatattgaaaagatgacatcgccccaagagccaaaaataaatgggaattgaaaaaagctgcgagatgtgtgcttatttagggaaacacggctggctgatggaggcatggggcctgagttcagttgcactgctctccttaaattgacacttaatattgagtccctgtcctacggattcaaccaactggatattgggaaaagagttgtactggacatgtatagacttctcattattccctaaacaataatagtataaattatttacataatatttgcattagattaggtattacaagtaacgtagagatgatttgaagtacacaggttatatgcaagtactacattttatatgagggacttgggtgtctgccgatttggtatctcagggaggtactggtaaggacactgactgctttata

SEQ ID NO: 4712 - DNA, 1174 bp, Homo sapiens
agtgtctattgatctgaaaacacatgctatgaaacattaaaacgctacctgagaccatgtgtttcttttatcaagtgagagattcctttataatttggataatttcactccgtttgcaagtaggatgctctagaactgatgttataaagtcagtttaatgatttaaatcccattgtggagaaaatagatctctgcagaaaagtacatccctgccctttcccagctccccagtcaagggggggcttcctgctgagcctggagaatgcctctaagaaggtgactaatgtaccatatctggcccctagtgtgggcagcaggcaagtagtcaggtgccttctcaagtggagaaagttgaacgctattttccagagacattggatgtgagggtgatctggctatgacatctgtcaccccagtgattgccactgttgattctgctgatctagctggctaggtggtgtccccttcttccctcaccactccatgtgcatccctcctgaagctgtgtgctcagttgaagaggaggaccatccccaatagaggaggaccagtcttcggctaagggtatacgagtagctgcgctcccctgctagaatctccaaacaagctctcaaggtccagagacaagatgtgaacttcatgtctcaattgatgatcacgtggttgtgtggtggtgcagattgtgtttttgatgtgcagcaggatttgggcagtacagaggatgatgtcagcatatcaccatcatcctcaggtggggcagatcattatgaagtccttgcctctggtttccctggagtctaggtgagaggtgcatgagatatcccttgggtacctccctcctcccctcaaggtgaatgtttcatcaacaaaatcaagctaatagaagtctcaggttgtcacttttggtgtcttgaataggatatttgtgtgagagcccctttgattaacccattgccagccccctcccaccctgacctctgaaccttcacaatatccatcccttaccctccccgctgaccaagtggctctggatcccagtcaggcgctaaaaatctgctatttgtgcttaggttagctttacccatagctgaatggctctgaggttcacggtggaagatctctaagggggacagttttgctgctcctgggatggaataggtatgatggtgatcca

SEQ ID NO: 4713 - DNA, 1176 bp, Homo sapiens
cactcttgtatcccaggctggagtgcaatggcgcattctcagctcactgcaacctccacctctcgggttcaagcgattctcctgcctcagcctcccaagtagctgggattacaggtaaccgccaccatgcctggctgatttttttgcatttttagtagagacagggtttcaccacgttggtcgggctggtctcgaactcctgacttcaggtgatctgcctgactcgggcctcccaaagtgctgggatgataggcatgagccactgcacctggtgccctatgcaaactcttattttattattattattttttgagacagagtctccctctgtcacccaggctggagtgcagtggtgtgatcttggctcactgcaacctccacctctcaggtgcaaacaattctcctgcttcagcctcccaagtagctggggttacagacgcgcaccaccacacccagctaatttttttctatttttagtagagatggggtttcaccatgttggctaggctgatctcaaactcctgacctcaggtgatccacccacctcggcctctcaaagcaaactcttaataacaactgttgtggaatgacttgggaggtggcactcagagatcccaagtgacacatgagaagtccacagagagagatcatgtttagtggagtttggatggttgcttttatcagtgggcctgtaccttacagatgctatctcattatcttctaaacagactctgggccagtgaccattatctccctcttactgatgtagactcagccaagagaagccagatgttgagtcggaaccttaactctccctctcagacgcagagccctgctttctcccctcccatttgatactctgcttcctcttgcatgctgtgagaggcggcctcattactcctcttccctcctccagtccctccaagcctaattcatcacctttggctttgggatcatagtttccaaaccaaggattgtctgaacattgtctgacaatgccctttttttttttttttaggcagggtcttgctctgttgcccaggctggagtgcagtggtgcaatcatggcacactgcagccttgacctcccgggctcaggtgatcctcccacccagcctcctggtgcgcatcaccacatccagctaattttggtattttttgtagagatggggttgt

SEQ ID NO: 4714 - DNA, 1194 bp, Homo sapiens
ggttccatgtggcctgtgttggctgcagcatccaggctgccagggaggccgacttccgatgcccagggtgccgggctggcattcagacctaaggtccactgccaaggcaccatcggacacacctgcccatgagtagacacagcagcgagcaaataggtctgataaataccccccttcccttccctccccaggagggaatgactacagggaagaaggatggattgatgtggactcattcagggcctggagcagaccctggtggccaagacagaagagatggtttcctgccaaagatattgccacctccaggaaattgccagtgagctggaagttcccactattacaagccataaggccatgttgccatggacaccagaatatctgtagtcagagcacctatcagttgcaaaagccatgcctgcaaccgatggaaaatgtaagagggagttcttaaggttcttggtggcatcacccaaggcattctgggaaaacctagggcctggccccaaaacttccctactctgtggctagtcctgctgccaacaaaatcgtagcgacctggcttttcacagctttgcttttatttccaagtcaaggacaagccgcttcattcactcctgggcatttactcttcttgtgggtctgtgatattccttgctttccagggagaatgtgcttggcaaggtctggagaactaattcagaatcttaggggaaggggagagatggaaatacaaacctgcttactggaaaggtgcaaatatatgggttgagctggaggtaggaatacaggtaattaaggtttctagtttaagggaaaacagatctattgccatttaaataaggtaactgggatttggttaagttcacaaagatagcagaagatttatttacaggcttcacctgtactgtcagggcaagagaaagcctggtaaaccagctacagcagtttaccagtgtgatggctgtgacacagctccactccacgggtggacacagcagagggcaactgggctggcctggttcagtgtgaatcaaaccgcttaacccacacatggtacatgtgattttcttttgtgagccttacaccaagccaaactattgtcaaagcatcatttctatagaaataaagccttatcttgacctgttctattaaaacctgccacacccgccctttcctacctagatttaatga

SEQ ID NO: 4715 - DNA, 1166 bp, Homo sapiens
cgctaagaaataattaactgttaggtgagggggaatagatcctgttcaaggactttgtggactgtgctgttgtgggtgggggtggggtgagggaagggaaccctgaggtctgggctgggggaggtggggagaggagttggtagctgaactaagaaaagagctgcaggggtaggcatggtgtggggtggtgcagggtgggattgagggtttttttttcccacaccccagtgtaaattctcacaccctctgttcctacctgtggtgccacttaccctgggaggggacgtcatcttcccatttcctctggagctggtctgctcttccatgcttgctttggggttttgggagcagcacccatgggagccctggggtgccaaggaccaggagggcagaaggaggcgaaggaaatggtaccgagagagccagggcagagggaggaccatggcgggtgacctggcagggagctgtgtgagctgtccaacggccaccaggaactggttcgctccaggacttggcctcacttgagtgcctggccctgcccaggccccagcccccagccctgcccctgcccctgccccactctgccccacgtctctcccagcctggccccagacagagtccaggaacaactcctgttcctgatgtgaaaaatgtccctgccagtttaggcagaacttgctttagagcactggtgcccagcctaccacaggtctgtgattttttttttttgatctagtgtttattaggtatgaattttacaaacattagcggtagctgtggagctggagagtattgcaccttctccaagctgcatggcgagaaccaccaatagtgtggtagaacttacagccctttccaaggccgtggctctcttggcctgcagatagcctacgcatctccctatgcttgttgtggaccactgggtgtcaggtttccttctgatagtgttatggaatggatcaactaggatagcctcaaaaactttgtatgtggaatctttaaccagcccagtgagaattcaggactcagagccccacagtggcatccagcttgctcttctgtaacagactgaaggctttaagcaaactagctggttaacaccatgatagacaggcttgctgttaagttgccttcttaggaactagattttcagccaccgtggcgct

SEQ ID NO: 4716 - DNA, 1166 bp, Homo sapiens; identical to SEQ ID NO: 4715

SEQ ID NO: 4717 - DNA, 1167 bp, Homo sapiens
tcgactttttcataaatcacaacatttttgaacctcttctccctttgggggagggcaggatttttctgccctaccacccacccatccatcgtctcttacatgcaccctacagccacgcaccctcaaggtggcatcgagcgtacagctggagccttctgctcaccaaaactcctacttcccggtggcaggagagcaagagagggacagacagatggcagggcatgtccaaaagaagagcatcagcacaaatgaatcctccccttccccacctccaggggtgggggcctttggcacctcaatccccgataccctactccttcccacccacatctccttgcacccatctggaacctcggttgatgtgagccggcaacagagaagcaccgtggcgcggcgagggaatgcagacggcacccagcggtggatggcggcagcggaggccgcggggaaacctgaccaggaagctgaggaccaaaccagcctctttttccgttcccggtttttttcctgaacccaacgcgtgccgtgccccgtttcccccaatatgtgttggggaggggtgtcctgaatggggtggtagattttttttcttaaaaaaatttttttgttttttttaatactcagaggagagggacataggaaaggtaaagtggatgtaatcgggtggttgttagggtttggggctaggtggggccaattgcataagcagtggagtgtgttcttcccctccctgcagtgttccttcccgtgggatgatcactctttagctgtatttggggctagaatgagatttgaaggaggccatggaacttctctttagaaagcctgccttggctgggcctggtggctcacctctaatcccagcactttgggaggccaaggtgggaggattgcttgagcccaggaatttgagactagctggggcagtgtagtgagactttgtctctaccagaaaaaccgggcgtggtggcgcatgcctgtagtcccagctacttgggaagctgaggcaggagggtttgcttgagcccgggacgtggaggtggcagtaagctgtaattgtgccactgtactccagcctgggtgatagagagagaccctgtatcaaaacaaaacaaaaaacaaaacctgccttctgggattgggcttctggtttttttcccatgacac

SEQ ID NO: 4718 - DNA, 1167 bp, Homo sapiens; identical to SEQ ID NO: 4717

SEQ ID NO: 4719 - DNA, 1093 bp, Homo sapiens
tagggaaagcggagtcttcctttgaggacttttcaggactctacttgtcatctccattttccactttactaagttattagtcgtattttaccttttattatctattctatttcctcactgttactttcagatcaagaatttataagttggtcttccccttccaacttttctggtttccgctactgtgattgctaatcttgttgggaacctctgtcctaaccactttccctggtactgctttttctgttctgttatatttgcttttcgtttttatgttttgtatctgtttttctttccaggtaaaagtttcctggtttagggaaagtgggaactggggatggaaaagaggtggtgaaggctgtgctcgtgattaagtcttgcttttttttttcccccctccagctcttctgttagaaatagtatctttgttttcctttgctgttcctcaatcccctactcttcaccccttgttttcacctattttgcgagaacccatccagatcccccttcccttcttcccctgccggcccagttatggcagagaacgatgtggacaatgagctcttggactatgaagatgatgaggtggagacagcagctgggggagatggggctgaggcccctgccaagaaggatgtcaagggctcctatgtctccatccacagctctggctttcgtgacttcctgctcaagccagagttgctccgggccattgtcgactgtggctttgagcatccgtcagaaggtaaattttctcttgggcatgtagtgctcattgggctctttaagggtacaatacaaagatgtgtttgtcgttgctcaggtggtggtaagggtttatacttaaggctagatcagggccaggtgcagtggctcacgcctgtaatcccagcactttgggaggccgaggcaggagggtggccacttgagctcaaaagtgcaagagaagcctgggcaacacagcgagactcctgtctctacaaaacgttcagaaattaagcaggtgaaggttgaggcttcagtgagccgtgattgcaccactgtgcaccagccggggcgacagtgaggaagaaaaaatcaggggataagtatc

SEQ ID NO: 4720 - DNA, 1093 bp, Homo sapiens; identical to SEQ ID NO: 4719

SEQ ID NO: 4721 - DNA, 1129 bp, Homo sapiens
ctgacgcccttttccggcgcgggagaggtggtggcggtggcggtggcggcggcggcggcggtggtgggccggggggaggagaagctgccattagccgccgccattttgtcctcctgctgccgggcctgcttgcccctccccctccggtacctctactccgggacccgcacctccggcagttcattcaggatccgtagtctgcccctaaccacccaccgtcttggcttcagggggtgacccctgcgcctgggtccgtaactccctaccctccgctgcgctcctggcttttcacccccatttgtgggccccctccccggctgccgccccgtggtggtgggccgcgcccgacggttctctcggaagggcgcttttcctccatattggaccccctcctatcatccagcgctgtgttcccccctctggacgcccctcttcgtgtcgagccactcccactctagaatcctgcttttatcccagcatctttgctttctatgttgctcagtcgccctatgtctgctttttcatttttcctgttcctcgtctcctttctcccccaaccccgtttttcttcttgggcctctgcccccttacttcgttgtctacatcctttttttttttgccattcctgtttccatatattttccacctgctttcgtattcattattttctgttagttttggtctattcgctacatgactcttgtattcgttttcccttcatatatttatcttcacagattggcctcctcaaacacctacgaagcaacatccatcttatctctagcttgtcataaagttctttctccccaattttagctttcattctgggcctgtctggatttccctgctttcttccccactatttctcatctctttacactgttcccgtccataaacgaatgcctggtcactctggaatggactgagagacctgtcgtccggcttgcttagggagctggaggtatcgagtaaagaaacactggtgatggacatttttaatgaggataggaaaacgaagatggctctggccttggccctctgttttctggcccatggttacagggtgctaaggtggctccataatgctttttctcagttcttcatatggtaaaacagtatttcatctgga

SEQ ID NO: 4722 - DNA, 1240 bp, Homo sapiens
aaggagggaacatggcatttgagctatgagggagctaagtagatcatggttgcttgagaagagtgggcagtttacatagactggaggaaaagacaccagagggcctcatatctgagtccctaatgataatgcaatggagtttttaagtttctgttatggtctgtacaggggacagagactgagacacttgctgtctggcccacaggctctggcacgttttgggggaggtgcctgcaggacccaacatactcaatgagcttccagcgcaatgtccgatcgctcggggccgactgccaagggaaaggatggaaagaagtattcctcgctcaacctgtttgatacgtataagggcaagtccttagagatccagaaacccgctggtgagagtcctgcaaagatgcttctgatggttgaaagctaggcatgcatggggcatacgttttagagctctttaaagggaagtggctgtagtagaaataccaaaagactagaggagatttcccaactttacactgggtcctttaaagggggtgtgggctctgggtgaacaccagttatcctcctacaaaggcgtgtctgtggttccctgtctttggacacgtaagaattggaggaaaataaatgtggatttgggaaactttgaggccagcttgcttcttgcaggctcatgatcaaccaatctcacataaaagtattgaatgttacatatctcagccttcttgatagggatttcatagatttttttttttttttttttttttttgagaccaagtttagctcctgttgcccaggctggagtgcaatggtgtgatcttgacttaccacaacctccacctcctgggtttaagcgattatcctgcctcagcctcctgagtagctgggattacaggcatgcgccaccacacccggctaattttgtgtttttagtagagacagggtttctccattttggtcaagctggtcttgaactcctgacctcaggtgatccgcctgcctcggcctgccaaagtgctgggattgcaaagtgtgagccaccacaatcagcgcgatttcagagattattaagggcaggggaaggaatcccttctaagagaagtttggaggaagtaggtaataaaatattcaacatgtataaatgtgtcccaggataggaggccatcagatctcccacatgaggcattttcgaccctctctccgtcttgttctccagttgcccctcgccatggcctgcagagtctcg

SEQ ID NO: 4723 - DNA, 1240 bp, Homo sapiens; identical to SEQ ID NO: 4722

SEQ ID NO: 4724 - DNA, 1107 bp, Homo sapiens
tggctcacgcctgtaatcccagcactttgggaggccgaggcgggtggatcatgaggtcaagagatcgagactatcctggctaacatgatgaaaccccgtctctactaaaaatacaaaaaattagctgggcatggtggcgggcacctgtagtcccagctactcgggaggctgagtcaggagaatggtgtgaacccaggagacggagcttgcagtgagctgaggtcgcaccactgcactccagcctgggtgatagagcgagactctgtctcaaaaaaaaaaaaaaaaaaaaaaaaacaaaaattagccgggtgtggtggcaggcaacttaatcccagctacttgggaggcagaggcaggagaatcgtttgaacctgggaggcggaggttgaagagaatagaagctctgctggtccagagaaggattgggccagggctctgggagaccagggagaaagagggcacatgtggtccctgttgactgtgagggtgggaatctgaggaaggctttggctcattgccccttgggtttgtccacagccatccttcccctgcggagtatgtcgaggtgctccaggagctacagcggctggagagtcgcctccagcccttcttgcagcgctactacgaggttctgggtgctgctgccaccacggactacaataacaatgtgagccctttgatggccctgccctttctcctcagccccagtactcccaaaacagaacaggctgaaatgcagataactctttccctccctggaaaaacattgcaacagggccaggtgcagtggctcacgcctgtaatcccagcactttgggaggccaaggtgggcggatcatctgagattgggagtttgagaccagcctggccaacatggtgcaaccccatctctactgaaaatataaacattagctggatgtagtggtgcacacctgtaatcccagctactcaggaggctgaggcaggagaatcgctagaactcgggaggagggggttgcagtgagccgagattgcactactgcactctagcctgggtgacagagcgagactgtctcaaaaaacaaaacaaaacaaaaaaacacacattgcaacaaaacaatttctctc

SEQ ID NO: 4725 - DNA, 1177 bp, Homo sapiens
agacaccagtctgggcagctcagggagtgctggcgtcaccccttccctaatcccaggctgcatggctaacggttcctatctgcagtcccagccttccacttccgagttcttctctcagaccacagtcccagcaacccagaatttggattggagtctggaagaaatgcagaatgattaaacgaccacctttccatttgaagtccccatccctgaatcttcacgggtgtgcccaagctgttagtgtcaagttttttatatgagggtcagtcgggttgtactcagattaatgaagcagggaaactgaggcagaaaagagtcctgtgttcaggagaggtcggagaaacaaggaggttttcaggactcctccttaacacccccatccccatcctgtgggagatccgaggattccccttccggactcactccctacatcgtcgagtcccgcccccctccagtcccctccccaggttcagggcggggccggtcggtgagtcagcggctctctgatccagcccgggagaggaccgagctggaggagctgggtgtggggtgcgttgggctggtggggaggcctagtttgggtgcaagtaggtctgattgagcttgtgttgtgctgaagggacagccctgggtctaggggagagagtccctgagtgtgagacccgccttccccggtcccagcccctcccagttcccccagggacggccacttcctggtccccgacgcaaccatggctgaagaacaaccgcaggtcgaattgttcgtgaaggtaagaacacttctctcctcagccacccaaattcctggaagccaactctcacctttcccccggtccagccttaactccccaatcccttccctccttgactcccacccccaatcccacgtgcactctttggttgaggggtggttttgagaggggaagacattaacttgttagcaagtaatgagaattctaggatcaaccctgaaaagtttgtaaaagtgcaagtttctagcagactaaaggaagggaagtggagaaaaaggagaattcccaaaagtgagactggggtggggttagagggcgagctggtgaagggacagtgggggcccagcagggtttagaagggacagaggggaacctcagttaggacatgtgtccctacaagatctgagggtgagtagtgcagtagg

SEQ ID NO: 4726 - DNA, 1190 bp, Homo sapiens
tgctttggactcatcagactctggatgaagatttgcccatgactcctgcccccatggggttctggcaccctcccctggcccgccggctgatacaccctctctccccaagcccggaggccatgagagcctggtggaccgctggatccgcagccgcctgacagaggctgtgaggctcagcaatcaaggcttccaggcctacgacttcccggccgtcaccactgcccagtacagcttctggctctatgagctctgtgatgtctacttggtgagaaggagcacagcggggcaggggatggtgggggcaggtgggcagcagagccctgggctcagttttgccagagttggccttgagacctaagccaacccatccccttcccagtcctcacaggcacagcgagggctcaaggctagacctccagccgtgagccctgtacctctcgtcccctaggagtgcctgaaacctgtactgaatggggtggaccaggtggcagctgagtgtgcccgccagaccctgtacacttgcctggacgttggcctgcggctgctctcacccttcatgcccttcgtgacggaggagctgttccagaggctgccccggaggatgccgcaagctccccctagcctctgtgttaccccctacccggagccctcagaggtatggcatggcctggagaggggagtctgacctgccctccaggccccctcaccccctcctccaccccacagtgctcctggaaggaccccgaggcagaagccgcccttgagctggcgctaagcatcacgcgagccgtgcgctccctgcgggccgactacaacctcacccggatccggcctgactgtgagcctcaggcccccatgtccgccccatcccactgtcccctcagcctactctgggacccagtgtccggcagtgactgcttggtttcctgtctccatggagctaggcctcacctttctccctccctggcaggtttcctggaagtggcggatgaggccacgggcgccctggcatcggcggtgtcgggctacgtgcaggccctggccagcgcaggtgtggtggctgttctggccctgggggctcccgccccccagggttgcgctgtggctctggcttctgatcgctgctccatccacctgcagcttcaggggctggtggaccctgcacgggagctgggcaagctgcaagccaa

SEQ ID NO: 4727 - DNA, 1197 bp, Homo sapiens
gttcatgccattctcctgcctcagcctcccgagtagctgggactacaggcgcccgccaccacgcctggctattttttttttgtatttttagtagagatgaggtttcaccatgttagccaggatggtctcgatctcctgacctcgtgatccgcccagaagtatttttattgtgactatttgagtgaagaaatgggactcagaggtggtgatttgtgagagtggggtggagggaggccacatggattgggttgtggtgggagatggaggtgggccaaaccttgtctcacacttcttccccttcctgccaggctgtgctgggggccctgggcagggccctgagccccttggaggagtggcttcggctgcacacctacttggccggggaggcccccactctggctgacctggcggctgtcacagccttgctgctgcctttccgatacgtgagtcaccaggcctggggaagaacaagactgctctcctcagacctcactgtagggtgactgagaagagtcatttatttcctgttccaggtcctagacccacctgcccgccggatctggaataatgtgactcgctggtttgtcacgtgtgtccggcagccagaattccgagccgtgctaggagaagtggttctatactcaggagccaggcctctctctcatcagccaggtgaggaagggcgaggagttggaggataggggcttccctggggccttccatgcaactcactttctttttttcctagaaatggcagaatcactggggcagggtcctgcgggagaggagggagaggggggaggtcagcatgggcaagacctcgggcatctaaaataccccatctgaaacctagtatggccgtccaagagggtccccagctggctgagtctgaatttctgcacctctctctaggccccgaggctcctgccctcccaaagacagctgctcagctcaagaaagaggcaaagaaacgggagaagctagagaaattccaacagaagcagaagatccaacagcagcagccacctccaggggaggtgaggcgagggtggagctggaaggaaagttgatgtgtgcggtgatgggttggctgatgcctgggcctatgtcttctccctcccaagcagaagaaaccaaaaccagagaagagggagaaacgggatcctggggtcattacctatgacctcccaaccccac

SEQ ID NO: 4728 - DNA, 1201 bp, Homo sapiens
cattgtaacgtggccgggcggtgtcaacacaaacgcccccaccctcccctggacgcgcgtaacccgctccccgcaccagccccctgcccacaactgcgcaggcccagcaagcccccacaattaaaagcccagcgccgacccttcctgtcaattaggcgctgaagcgcaggcggtcagcatcgccatggagaccaacacccttcccaccgccactcccccttcctctcagggtccctgtcccctccagtgaatcccagaagactctggagagttctgagcagggggcggcactctggcctctgattggtccaaggaaggctggggggcaggacgggaggcgaaaaccctggaatattcccgacctggcagcctcatcgagctcggtgattggctcagaagggaaaaggcgggtctccgtgacgacttataaaagcccaggggcaagcggtccggataacggctagcctgaggagctgctgcgacagtccactacctttttcgagagtgactcccgttgtcccaaggcttcccagagcgaacctgtgcggctgcaggcaccggcgcgtcgagtttccggcgtccggaaggaccgagctcttctcgcggatccagtgttccgtttccagcccccaatctcagagcggagccgacagagagcagggaaccggcatggccaaagccgcggcgatcggcatcgacctgggcaccacctactcctgcgtgggggtgttccaacacggcaaggtggagatcatcgccaacgaccagggcaaccgcaccacccccagctacgtggccttcacggacaccgagcggctcatcggggatgcggccaagaaccaggtggcgctgaacccgcagaacaccgtgtttgacgcgaagcggctgattggccgcaagttcggcgacccggtggtgcagtcggacatgaagcactggcctttccaggtgatcaacgacggagacaagcccaaggtgcaggtgagctacaagggggagaccaaggcattctaccccgaggagatctcgtccatggtgctgaccaagatgaaggagatcgccgaggcgtacctgggctacccggtgaccaacgcggtgatcaccgtgccggcctacttcaacgactcgcagcgccaggccaccaaggatgcgggtgtgatcgcggggctcaacgtgctgcggatcatcaacgagcccacgg

SEQ ID NO: 4729 - DNA, 1315 bp, Homo sapiens
ggcatccctccggcccccaggggcgtgccccagatcgaggtgaccttcgacatcgatgccaacggcatcctgaacgtcacggccacggacaagagcaccggcaaggccaacaagatcaccatcaccaacgacaagggccgcctgagcaaggaggagatcgagcgcatggtgcaggaggcggagaagtacaaagcggaggacgaggtgcagcgcgagagggtgtcagccaagaacgccctggagtcctacgccttcaacatgaagagcgccgtggaggatgaggggctcaagggcaagatcagcgaggcggacaagaagaaggtgctggacaagtgtcaagaggtcatctcgtggctggacgccaacaccttggccgagaaggacgagtttgagcacaagaggaaggagctggagcaggtgtgtaaccccatcatcagcggactgtaccagggtgccggtggtcccgggcctgggggcttcggggctcagggtcccaagggagggtctgggtcaggccccaccattgaggaggtagattaggggcctttccaagattgctgtttttgttttggagcttcaagactttgcatttcctagtatttctgtttgtcagttctcaatttcctgtgtttgcaatgttgaaattttttggtgaagtactgaacttgctttttttccggtttctacatgcagagatgaatttatactgccatcttacgactatttcttctttttaatacacttaactcaggccattttttaagttggttacttcaaagtaaataaactttaaaattcaagtgatgccttttattcctttatttgggggtcagtagggtctgcataggttgtttttcccatagcgtctaaaatggaatggcatttttgcttccagtaagggcagattttgcagaggtgtgactattgtaatgtgatccatttgtgttagacaaatggtatcctccagtaaagcttcttgattctggccaggagtggtggctcaagcctgtaatcccagcactttgggaggctgaggtgggcggatcacttgaggtcaggagttccagaccaacctggccaatgtggtgaaaccctgtctctactaaaaacacaaaaattagctgggcgtggtggtgcgtgcctgtagtcccagggaggctgaggcaggagaatcgtgtgaacccaggaagcagtggtagcagtgagccgagatcacgccattgcactctagcctgggcatcacagcaagactccgtctcacacacacacacaaaaaagtaaagtttgttgatgctgattgggtttagcctgaggg

SEQ ID NO: 4730 - DNA, 1290 bp, Homo sapiens
atcctgaacgtcacggccacggacaagagcaccggcaaggccaacaagatcaccatcaccaacgacaagggccgcctgagcaaggaggagatcgagcgcatggtgcaggaggcggagaagtacaaagcggaggacgaggtgcagcgcgagagggtgtcagccaagaacgccctggagtcctacgccttcaacatgaagagcgccgtggaggatgaggggctcaagggcaagatcagcgaggcggacaagaagaaggttctggacaagtgtcaagaggtcatctcgtggctggacgccaacaccttggccgagaaggacgagtttgagcacaagaggaaggagctggagcaggtgtgtaaccccatcatcagcggactgtaccagggtgccggtggtcccgggcctggcggcttcggggctcagggtcccaagggagggtctgggtcaggccctaccattgaggaggtggattaggggcctttgttctttagtatgtttgtctttgaggtggactgttgggactcaaggactttgctgctgttttcctatgtcatttctgcttcagctctttgctgcttcacttctttgtaaagttgtaacctgatggtaattagctggcttcattatttttgtagtacaaccgatatgttcattagaattctttgcatttaatgttgatactgtaagggtgtttcgttccctttaaatgaatcaacactgccaccttctgtacgagtttgtttgttttttttttttttttttttttttgcttggcgaaaacactacaaaggctgggaatgtatgtttttataatttgtttatttaaatatgaaaaataaaatgttaaactttttcttgtctgttaatatgtgaagataatggatatttgcggagggatagtgtctgaataccatctatctttatagtctgaaaagaacagtactgctgaagagttatacgtgtaggagttagagctacacatatttttgtttgggcttaattgtgggccttaagagaaattgcaggtgcccgtcttgattagagtggggcttgtttcagggaaaagtcggatggcagctgcaaaacggtattggaggggtggttgaggtgggttcactggggcggggaggggaggggtggtgctgagatgggattatggtggttttctctccctcttctacttagtgagcggagtccacaaaaaaatgctgactttttttttttttttttttgagacggagtctcactctcactcttgtcgcccaggctggagtgcagtggcgcaatctc

SEQ ID NO: 4731 - DNA, 1207 bp, Homo sapiens
tgctggaattacaggggtgagttgctgcgtctggtgttggtgactttctagagattactttttggtttacatcattttccttgtgactatttttacttttttggggggcggggggacagtcttactctttttagtttacatcattttccttgtgactattctatttttacttttttagggggcggggggacatgagtctcactcatgttggtcaggctggtctcaaactcctgacctcagttgatccacgcccttcggcctcccaaagtgccgggattacaggcgtgagccactttgcccggcctgtatttttacgttttaataaatccccgtatttttgttaaaggctgggtaacctgactcctcccctcatttctactgcaaaataggagtacactggggcctcccagtggagctgttctctgctgttttaaattactttctactcctccctttctaacgtccactcctggactcatttgttagatcaatatatactgggactgttgtgttttctttgagtgtactagatctctttccagaagagcttcccttgatccagatctccctaattgggaatgatgatttcacagactagagtctccgatgctggtcatgatgtcaaaactaagttctgactcatttagggaactggatacttgggtctccagaagggccaatgggagggccataattctgtttattttcaaattgtcttgttttcaccttgttagaatgaactctggaagcccagccagggacaatgcaccttcacagagattctgcactaatctgagtgaaggtctaaggtttggaatctccccctcatggagagaagctttgtatggctgtcatgcttagacagtgattcctgcaacttgaccttcaggctgggagaggtggagagccatgcctgttctccttccttgctatggtgagtatcttttgttttggctctcagtgggagtggtaatgatgatctggttggacaagagtctctgagcttttctctgaggatctttgaacccacctgatccaccttcatcctgccggcaatctcctgtaattcatgtttttatggccagttacttacatgatgaggtttaattggctatggttctgcaggatgtacaggaagcatggtgttggcatctgctcagcctctggtgggggcctcaggaaactatattgcataaggtacagaggg

SEQ ID NO: 4732 - DNA, 1207 bp, Homo sapiens; identical to SEQ ID NO: 4731

SEQ ID NO: 4733 - DNA, 1251 bp, Homo sapiens
actgcagatggagaaatggggttggtctccataaattaaaggcaaggaagtcgtactgtactatacgactacggtcatggccatagttggggagggaggctgcctcctaggggaaaatcaggtaaactgtataagcagtataacaaggttaaactttgaaccctacaaatgtgggctgacaggaagaaagagttacgaaggaaagagtttccaccagcatggagaaagttcttcccacactctaacctttcccacctctgaggagcagtagcagggaatgtttgaaagaagggccccttccctagcgtgtttgagtagagaggaaaaacctctctggctatgtaggtgggtcaggaaggcaggggaatggccatgtgagctttgggtaaatcattccttggggtttgagagcatagtctccttctgccaactcatctgtcattcttttttgaccttccgggtgcctaggcaaagctgctgaagcggcagcagcgaatgatcaagaaccgggagtcagcctgccagtcccggagaaagaagaaagagtatctgcagggactggaggctcggctgcaagcagtactggctgacaaccagcagctccgccgagagaatgctgccctccggcggcggctggaggccctgctggctgaagtaagaccagtctgtccctgggagaccaacaggaatacagcctccttggaatgattcccctttttcttgtctccttctttgtaccttagaacagcgagctcaagttagggtctggaaacaggaaggtggtctgcatcatggtcttccttctcttcattgccttcaactttggacctgtcaggtgagaccttccttgcttcactagaaccttccaggtggagcccacgttacagcctcctagctgcctgctttggcccaggccatttccttctgcttatatacaaatggttctggtgtccttggcaccgatgatgtgtctggccagccccttcctgctccattatttgtctttttttcttggagatggagccttgttctgttgcccaggctggagtgcagtggcacgatctcggctcactgcaacctctgcttcctgggttcaagtgattctcctgcctcaacctcccaagtagctgggactacaggcgcacgccaccatgcccggctaattttttgtattttttagtagagacagggtttcactgttgttgcccaggctggtctcgaactcctgagctcaggcagtctgcccacctc

SEQ ID NO: 4734 - DNA, 1103 bp, Homo sapiens
tcttactgatttaatttaatttttcactccccagagtctaatatggattctgactcttaagtgcttccgccccctcactacctcctttaatacaaattcaataaaaaaggtgaaatatattgatgggatctcttcccaagttcgcccccacccccgacagaagcatcttctccccaacttgagtagatgtttggtatagtatggtgaagtatgggggtgagtccctttccttcagggccctcaagggtataggggtgaggttgtgtctcatacacacacacagacacacaagagcaagatgtgtcaggtgtttaatcatcattgtggggggctctggttgtagaagaaagcttggcaaggtggggttatacaggagagagattatacaggagagagttggtctgaggccagaacagttcaagggaaaaagaaaagggagctgatggatgggatctgtctgtgggcccctcaaggccctccagtactactctcgcctgcctcaggttcctccgactgattcagttctgcacgctcctcctcttcctcctggttttctggggccttcctgaggagaaagattggggggaatgcggcacgttgtcgttccaccccccgacccctcttcgcttgctgcctggaagccctaggtctgaggggtctggctttctccactcacctctcctctcctcggcgttgccgcctttgccacaagatgaccccaatgagcagggcggctgtccccaggcctcccaggatccccagggccagggctagagttcccagccctgatcctcccacagagcctgtacggagacagggaaaattgagagcacagccaccaccactcaccattcctttcttgttgaccatccccccagtcacatgtgttgggggctatcttctgcttccctgactttatcaaacccctcacctgcagttggcccctcctcgcctggttctggaagacaaagttggatccagtcagaaaggaagacttcgggttgagagagggttatttagtgggagccccagtggagtctttccctttctttttttttttgagatggagtttcacttttgttgcccaggctggcatgcaatgg

SEQ ID NO: 4735 - DNA, 1103 bp, Homo sapiens; identical to SEQ ID NO: 4734

SEQ ID NO: 4736 - DNA, 1106 bp, Homo sapiens
gccgtgatccagcggcatcgcagctcgggcaaggaaagccggctgtcagggttctggaaacgtcctgccctgagggcctgcgactttctgtatggagccttggatcgcgtccctggaaagggacaccaaagatttccaattccggagagcgggcccgaggaagggtcactgctcgggcgcacgaaagctgtctaaggcttgggcgtatatggggaactctggcttttgccacgcacttttgggaatgggcaggagacctgcttcctctctccagaggttgcattttcccaagcttgaacgcttcatgtgcctactctgcaggactgaggagtttgctctgtggtgtgaaaacctaaggaatggggggcgggtgtcttgccacttgtgtgacaggcttaacctttttgtatgaagttcgtttgccttatcggccttactgtttgatagtttactgtgtctgatttcttcccccgtactttttcaactagtctctagtgatccctgaaaagttccagcatattttgcgagtactcaacaccaacatcgatgggcggcggaaaatagcctttgccatcactgccattaaggtaagtgaagtagggtaaggaatagggaatgtaaatgagaattgggttgtgaagacataagcaaaaatgaagcaaggctggggagacttgagtctcatccagatcaccttgactgctggattaagaaaagaaagtggtttagggagagactgacccctttagcatttaccacagaaaataagtgattaaagccaagatagtggtctaaggtcaagccaaaacatttcacctggggaagtggggaggaggtatggttgctcacccgaattcgctaagattttcctgaaccacgagcttgtgagatttcttctagattcggtttctttacccatcccaccatcataacagcaacccttcctgcgaaatttatattccctgagaattggaggattattgggcatcttgagggataagtagaaataccaacagataaaaagtgtgaagaagcctgtagatggagggtggaagaagtctgagtgggacatttactcagatgagccataattgacactcctttcc

SEQ ID NO: 4737 - DNA, 1179 bp, Homo sapiens
aaagatactgcctgctttcaaagggttgtctgtaatactaaattctgtgttcatgattcagtcatacccctgaacaaagttacttttttctttttttgagacggggtctcactgtcgcccaggttagagtgtggttgcgtgatcttggcttgctgcaacctccacctcctaggttcaagctattctgctgcagcctcccaagtagctgggattacaggcacctgccaccatgctcagcaacttttcttgtatttttagtagagacagggtttcaccatgttggccaggctggttttgaactcctgccctcaatgtcatctgcccacttgggcctcccaaagtgctgggattacaggcgtgagccactgcgaccggcccaaagttaaccttctgtcgaacggtttatatctggaaaggtgggtgaggaaagggtgacctaggggattgcaaaatagattattgcagatcctacctttgtgagctttttgaatgaggctataaaggaatttaaaaatcagattcaacactaattccgaaacccctcacttcattcagggtgtgggccgaagatatgctcatgtggtgttgaggaaagcagacattgacctcaccaagagggcgggagaactcactgaggatgaggtgaggacaaggaagggggctgggggtggggtcagcctcagaaaggggtccatctagatctgaccttggtctgcctgccaggtggaacgtgtgatcaccattatgcagaatccacgccagtacaagatcccagactggttcttgaacagacagaaggatgtaaaggatggaaaatacagccaggtgtgtactgaaatgagggcaggattagaggaagggtggagggtcctaacagaattgggcataggaggtcaggggataaaacatcccttgccccctcctctgaatccaggtcctagccaatggtctggacaacaagctccgtgaagacctggagcgactgaagaagattcgggcccatagagggctgcgtcacttctgggggtgagtggggggtctcatctccctgcctacctcgactcagcattcctcctactcgctcttctttttccccaaccttttgtttctgctgtgcatgacctgtgactcttctctttttacctgcagccttcgtgtccgaggccagcacaccaagac

SEQ ID NO: 4738 - DNA, 1174 bp, Homo sapiens
gtactaacatcttaattttgttataaaatctcacaaaccccctgacatagtctcagagatctgtagggccgaggttacatttggagaacccgtactctagggccaaatccattcttcttgccctggctcacttgtcccccccaccgccccgcgctggagccactgcctagttcttcagccctagatggtgctcgccagacctcctctcaatgctcatcacacacagggctattcctttcctccaatgaaccaaacgcctcccgcccacctccaggtcccagtcctctgttccctttgcctggtccacccttgccctccctgggtcgcagacgaggtcggcctcgtcattccccgcagaccgccgcgcgtccctcttgtgcggttcaccacagttgtatttaagtgatcgtgtgagtcgtcgttaaatgcctgtctccccgcggatcatgggctcctcgaggacagggactggcctgtctgtccactgctgtaaccccgcgccggcatagggacctaaggcccactggagggcgctcatcaagtagctgctggatgttgacgaaggaagcggcggcgcagctcagggatctccgagtcaggacggtcggccagacccacggggtaacgggtctaatcgtgtaggaataaagctgtattccagtgcttccaaacggttctctcattccaacccctttccaagctcaatgaatattccaatcacctctggtcccttccagtgaccctgaaccgctcagagaacgccccgtcgacaccgttcggggcgggcgccactactggcgcatgagatgcgctcaagcagagggtactccaccagcgaggatacaccgagccgacggggatctcggtctcggcgccggaagcctctgagagccgaatctggaaccggatgtggctgcttcctgccccgccccctgccgagggggcgggaatcgagggcccttcggaaaacccggccgggatttcggtcagctacattcgtgggttgtggtagggagggtaatcccgtggggatggagtgaccggctctctctccgcctgaaacgcttcccgcgggagttttagccgtgttattgttggggaagggaatgtcaaattctgctcctgccttcccccaggggctggagactggaatctttattccagttcattgcgg

SEQ ID NO: 4739 - DNA, 1174 bp, Homo sapiens; identical to SEQ ID NO: 4738

SEQ ID NO: 4740 - DNA, 1099 bp, Homo sapiens
ctctgcccctccacccaggacaatgcctccaagctgctcctggctctgatggagagccggcatgacagtgaaaatgctgagcgaatcctcatcagcctgcggccccaggagctggtgaggctgggcaggtgggcaggcgggcggaaccaggtggagtgtgttgggatggggatgagggcccggctggccctaccgccctaggaagagagcattggaacaggcactgcccctccaggtggacgtcatcaagaaggcctacctgcaggaggaagagcgtgagaactcggaggtgagcccacgtgaagtgggccataacatctatatcctggcgctgcaggtaccagttccacccgtggcaacggccatcacccccctggccaccataccccgccccagctgccatcatcccccagtcgccattgtcgccccccagccaccatgtcccccagccaccacaccctggtgactgtgctgccatttccctcagctctccaggcacaataaacagctgcagcacctgctgaagccggtgaagcgcattcaagaggaggaggccgagggtatctcttccatggtgggtgctggccccgagactggggtgggggtggggcctggaacccagggaggacacttgacccaagggcgtggcctggaacagagtgaggccctagaatatgagccaggctagaatttgggggtacagctcagggggctgattgggactggcagccgtgggtgaaacccagacagaaatggaagcaaggctcaggtgggtctagggtgggtctggaagcttcaagcaggacccgggctacacttgggcaggactgaggaggcccccgctatcctctgggattctctggtcatggctctcccactcccctccctttggcaccaggttctcaaggctcagtcctagttgggctgggcttggcctgctctggcttggcggggacactcgctgaagtgtagttcagagctaggcgaaggcctgggagggtgggggctgagtgccagcctggatgtggaggctggggcctgacctccgcgccctccccacctccagctcagcctcaacaacaagcagctgtcacagatg

SEQ ID NO: 4741 - DNA, 1235 bp, Homo sapiens
cagactctgccctgttgtgctggcagaaacggggagaagggttgagttttcatgaatagaaaacaagagcagcagctgtcaggcccagctgacaagcgtggggctggtgggctggggcatggccacgccagggagtctgtcacctgggaggtggggcagggatggtgtttcgggtggcgggatggggagcagcttggtccatgtgccttcagggggttgttacttgagagctccagggtgaagggagaaagcctgtgctctggctggctgggcctctatcctgaagagggaaggtgctagaaattagaacaagtgactgtaggggggaccgtctagaaacaccaggcccagacacacggtccctcaggtcaggaggagtgagcagccggcacagcctcctgggaggatcccgaagtagggactggggctgagagcagagaggagggtcgggcagccccagggcgggcgggcccgcctcagtgttgcttctcacagaagctgcgactctagaccaggcctgcagccagaacgccgattccgggagcttgggagccctgcgtcagggcccagagcctcgcacttgctgtgtgcgaagatcgccttgctttactgtgaccacagccccgacgcggggctgtttaacaagaacttcagcgcagccggcgtttctgttaccccggccgcggctcttggcggcgggagaggcgcagtggctgcaggctgccccctgccggccacaagggagcagcgtccgcgccgccgcccaccggccctcccgccagctcctcagcctgctccctgggaggcaggctccagaagcaccccgacggggggccttattaagtgcgagaagcctctccagcgagtcttccccgtgtgtcctcatctgcggcaggcaggagagggggagcaaacaggaaattccacagctgcctccagaaacattaaccacccctctctagtcttactggtattttttgtttccttaataaagctccagtctccctcatttgagcaatactctcatttcctctgatgtctggatgatcggcagggcaggaatctgagcgctggccccgtggtgaggccatgttctcataatcaggctccagccagaaaaataagaaacaccgcaacaggcttcagtatcagggctgaaactgctggatgaataaactatttattaaaaacggatgtttcttgcccatggttctttcccttcccccaaagctatg

SEQ ID NO: 4742 - DNA, 1193 bp, Homo sapiens
aggagtgggcggtcgactcgagttcgcagcccaggcctcccacacgcccctccctgccgtcagcacccacccgcgcggcagcggcggcggcggctggcgggcggccgcccttttaaatccccgggctcatttgcatggccccgccccctgagtgacacggctggcgcgggcgggcccgtcccccctgcccctgggtcgctctttttaagctcccctgagccggtgctgcgctcctctaattgggactccgagccggggctatttctggcgctggcgcggctccaagaaggcgtgagttcgcggccgctccggtggcttcttttttttatatctataatttaattaaattatttatttattgaggccgcgcacgggccgtgcccagcttcctgcccctcgccatccttcgggggagggggaatatttttgtccccccgcctggctgtgacacataaataccccgcgggggcctgggcggcgagcacgcggcggcggcggtctctgagcgcctctgctctctcccggtttcagatccgcatttgctaccagcggcggccgcggcggagccaggccggtcctcagcgcccagcaccgccgctcccggcaacccggagcgcgcaccgcaggccggcggccgagctcgcggtgagtcgtccccggggcccgcggcggcggcggcggaggggggcgcccgcgcccccgcccgcacgtcgcccctcctgcgagccgcccggggctgcagcgcgcgccgccggctttattcccaggccggggcggcgcgagccggcggcgggggagggccgcgcggcgcgggggcgggcggcggggcccggcggcgcggggaggacgcccgcaccccttcccccgcgccgcgggcgccctgcggggggcggggacccgggaaaggcgcgcggtgggggagggggcgcgcagctgcggcgagcgcgagttgtgcacccggcggagcccggaggagcccggcgcacctcgcgcggcggccgctcccgctggagccggagcccgagcccgagcccgggcccgggtgaggggcggggagagacacgggctgcggcgcggcaggagagtggggggtcgggcgccccccgcagctcagggaagttctggaagtgagggagatggggaggaacccccaaattcggccctacgccctctcggcctttctctcgcgcccc

SEQ ID NO: 4743 - DNA, 1311 bp, Homo sapiens
atagtggggcctgggagggttcccctggccttaaaaggggcccaagccccatctcatcctggcacgccctactccactgccctggcagcagcaggtgtggccaatggaggggggtgctggcccccaggattcccccagccaaactgtctttgtcaccacgtggggctcacttttcatccttccccaacttccctagtccccgtactaggttggacagcccccttcggttacaggaaggcaggaggggtgagtcccctactccctcttcactgtggccacagcccccttgccctccgcctgggatctgagtacatattgtggtgatggagatgcagtcacttattgtccaggtgaggcccaagagccctgtggccgccacctgaggtgggctggggctgctcccctaaccctactttgcttccgccactcagccatttccccctcctcagatggggcaccaataacaaggagctcaccctgcccgctcccaacccccctcctgctcctccctgccccccaaggttctggttccatttttcctctgttcacaaactacctctggacagttgtgttgttttttgttcaatgttccattcttcgacatccgtcattgctgctgctaccagcgccaaatgttcatcctcattgcctcctgttctgcccacgatcccctcccccaagatactctttgtggggaagaggggctggggcatggcaggctgggtgaccgactaccccagtcccagggaaggtggggccctgcccctaggatgctgcagcagagtgagcaagggggcccaaatcgaccataaagggtgtaggggccacctcctccccctgttctgttggggaggggtagccatgatttgtcccagcctggggctccctctctggtttcctatttgcagttacttgaataaaaaaaatatccttttctggactggagtctcctgtggtgtgtgcccctaaagcctggggcaggtaggatgggtgacacttgtgttctggcccccatccttcaggctgcaggaagggaggggaaatagcactggaatcacctccggggaaggtcattttaagcctcttgatgaaatcaaaacccctagccacaaaacattttatttacaaaatatatactgaatactatacatctggccccatcaccatggaaacaactccaaagcctgcctggggatttgtgcccaagcccagcccaggagggctagagaaagcaaaggtgtctaccagccgcccccatcccagaaggaaagcctcttcccatgagtgcctgtgggtgggcggtgagctcaa

SEQ ID NO: 4744 - DNA, 1411 bp, Homo sapiens
cattgcttctgttcctccagcagtcagttgactctaggtttcctttggtttatatccccagttcttaatactaaaacttatttgacttcctatcaggaagcacacaaaaaaagcgtcatttaaaaccctggatataggctttaaaggatacaaaaacagcagcattgtcgttttgccaggttcatcaccattttgatgtgctacccatccttccaccctccctttcctgcccccaagcctcccagccaggccagatgtgaagattctattaatcactgtttcagagaacattaattcttgtatagaataattatctactaaattgcttattatctgtgactaccttgcagagaacatctcaacagtgcagtaaaatagctctcctagacttgagcttccagccaggcatttagatcactcttaagcctttgtggaattctgaggaaaaaaagcaagatgcctcaatgccaatgctgggccataagattctactcccctccctgtagggtggggcgcgtggctcagctttggaaaatcattttgccagtaatattgcctgtgaatccctttaagaagtcgtcctgatctgagcctgtctttctgagcactttggtgctgaattgaaaatggtaagctaaagcagtgacagatccacgtagcctctttaacctctttattatcttgccaaaaaaaaagtttctcaggttaaacctttgtctttaacctccctttgttgtggagaaaatgtgtcactaatcagtggtccaagggatatctagctttggttactcagttcctgcagcataacagatatgacttatgccagggaaggtagaggctgattatggagacacccaggaacaggaataagaagggataggtctgctccacgtagaacctccccagatcggaagttaagtcttggagagtttccaaagtgctgaagtaaaaaggagacttggagggcctttgcttaatgagcaagaggcttgtgtcctcccaagaacatgagggagttcagaagggagctatagctcacagacagaaacctgcccgctcaccccatccctcgtgactgggagcatgtttgctcagaattttctaagaggactctcccttcaaaaatccaatttgctcccagaatgttgtttagcctctgagaatctcactctttcatttccatctgtgaatggacatagatgtgttgctcagggatcagaaacatcagagtccagggcccagtggcatggtgttgcattagtagttagaaaagtaattggtcagctctactgtaaaagaaataagtatgtagtacagttttgtaaatgtcaggtctgttctattgttttgtgatctgaagactgtcaaactggttgataatcaaagaaaaggttggtggttagaataagta

SEQ ID NO: 4745 - DNA, 1411 bp, Homo sapiens; identical to SEQ ID NO: 4744

SEQ ID NO: 4746 - DNA, 1156 bp, Homo sapiens
tgatgacaaaatgaccaggaaagattcttggtttcactctgcagagcatcagaacagctggagtcctttgtgcttctttcttcatgcagtgatttcatagatgagaattaggaggaggctgggattttttaaaaaacaaaactcaggccgggctcagtggctcatgtctgtaatcccagcactttggttggagggggggggtcgaagtgggcagattacttgaggtcaggagttcgagaccagcctggccaacatgacgaaaccctgtctctattaaaaatacaaaaattagggcggtgtggtggtgggcgtctgtagtcccagctacttaggaggctgaggcatgagaattgcttgaacctgggaggcagaggccgcagtgagccgagatcatgccattgtattagatctatggctcacactgggcacgaggatagggggaggaaagcaaatgccaataacaaatatggtttcagtaattgttaaagttgtcactccagcctgggtgacagagcaagactgtctcaaaaaaaaaaaaaaacctcttcggtaaaatgtggagcttttgttagtatttttgcaaaggaataataggattcaacttttttttttttttaattttctttcatttttgagacagtctcgctctgtcacccaggctggagtgcagtggcaagatcttagctcactgcaagctctgcctcctgggttcacgccactctcctgcctcagcctcccgagtagctgggactacaggcgaccgccgccatgcccagctaattttttttgtatttttagtagagatggggtttcaccgtgttagccaggatggtctggatatcctgacctcatgatccgcccgcctcagcctgccaaagtgctgggattacagatgtgagccaccgcgcccacccggataaagtcactcgttgttgattgtaatacaaaagcaaggtgtacaagaagagtttttactaacttctaccactcttagcttttttctgtcatcttttggagaagtgaccacttgacctgagtaccatacagggtagtagaaggaatgaatttctccagcccttggttcagaggaagttggtgatactggaagtttaacgattatgggccaggcacagtggctcatgcctgtaatcccagc

SEQ ID NO: 4747 - DNA, 1156 bp, Homo sapiens; identical to SEQ ID NO: 4746

SEQ ID NO: 4748 - DNA, 1178 bp, Homo sapiens
gatccaccacctcagcctcccaaagtgctgggattacaggcgttagccaccgcgcccagcccataatacgtctttttagcaaaagttgtctactacatcttggaatctcctgggagaaaaaaataccagtgcctatctgtgcttgatatattctgatttagttgggcctgacatttgtttttgccactcattacatgattaatttatttctgctctaaaaggagttcattctgcctgagtgcagtgactcattcctgtaatcccagcactttaggaggccaaggcaggaagactacttgagtccaggagtttgagaccagctaaggcagtatagtgagactccgtctacaaaaaaataaattagccaggcatggtggtgcacacctgtggttaagcccaggaactccaggctgcattgagctgtgattgtggccatggcactcagcctgaacaacaaagcaagacactgtgtcaaaaaaaaaaaaaggagacatagttcatattctaatcatatggactccgggtaagttccagggtaactggctagagaaaatacttgattaaattgttactgattgtgtttgtttgtttgtttatattctgtcacctaggctggagtgcagtgtcacgatcccaatttactgcaacctctgcctcctgggttcaagtgattctcctgcctcagcttcttggtagctgggatcacaggcgtgcaccaccacacccggctaatttttgtaattttagtagagacagggttttaccatgttggccaggttgttcttgaactcctggcctcaagtgatcacctgccttggcctcccaaagtgccgggattacaggcatgagccactgcgtctggccatttatgataatttttttaaggtagctcttaaagtttgtgccttagggtgtggtggctcacacctgtaatcccagcactttgggaggccaaggcgggaggatcacatgagaccaggagttcaagaccagcctgtctaacatggtaaaaccctgtctctactaaagataccaaccaaaaaaaattagcctgggcgtggtggctcgtgcctataatcccatcactttggaaggccaaggcgggagggtcacttgaggtcaggagttggagaccagcctggccaacaggttgaaaccccctttctactaaaaataca

SEQ ID NO: 4749 - DNA, 1178 bp, Homo sapiens; identical to SEQ ID NO: 4748

SEQ ID NO: 4750 - DNA, 1148 bp, Homo sapiens
gaggatagatctcgggtgacgtgggattttctaagcctgagaggtgtccttctgcacacccttgtaacaattaaaattgcttttcttccatgtttctcttggcagagagaaatgccatcatgcttactgctcttttggattcttcatgcagtggcttcccatttgctctgggaacagtgcctctgtgctggttatatgtatgcaccacatgtgcacacacgggtgttggtgcaactcaccagcaggtgtgcagtaggcaagcttgaaggtggcccatgcttctctgttgtcacacaacacctttccctgtttctcttcagttgtcctctgatattttcacagcctgttagtggcggctgatctgtagaggtatgaaaatacagccccaaagggggaatttgtcatggggaagggccagccactgactacttgatcttggagaccacatttagatggaaatgagaggacctccacagccccgcctccctgccaggatgctagattattggctgggaggtgggcaagtggcagcccagctgaagcaagaggctgattgactggctgctcactcaggcaggtggcctgccctggcatcctgtagattctgagcaggttgagatgtggatatctccatgggaagcttgaaccaggctagaacagctgtctgccaaagatacaagaatatgcaaagtccctcttacccccctccttccctcaagtcttagttggtttgagagccagggatatggatccagggtgctgttgcagggtcacctgcctgttaccacacccccatccagctgggtggtgggtgagggtgtgagacaggcagggagaccaggtaatgagtggctgcaaggagtcatatagcctgggtgtgggtgagggtctgcctgcctgtttctgtctgggtgtctgagttccaaaaaatgtgtgttgtttgttcctcctcatcctcttctgagactgttgtttttttagagcttgattgtgggagaaaagcttgtgtgaaattccctcttcacctccccaccccccaaaaaataaaagggggcataaactttattccactggagaagccctgggggtggctggagccagcctgctgagaagcgtggtgcagctgggtctgggacttcactagagct

SEQ ID NO: 4751 - DNA, 1232 bp, Homo sapiens
gcctctgacagagctggaggatgtagcagatgttcatatgcttgtacattccccggcccatgtccgcgtgaggcttgaccactaccagtacttggctctgcttcgcctgaaggaggtgctgcagaggcttcaggagcagctgactaaggatacagagtcaatgactgggtctcccctgcagaatcagacagcttgcattggagttctctttcccagtgctgaagtggctctgcttatgcatcctgcacccggtgctgtcgatgctgactctgcaggctcagatagcactagcctcgtagattcagagctatctccttcagaggatcgggaactgaagtctgatgcctcatcagaccagggcccagcaagccctgagaaggtcttggaggaaagtagcattgaaaatcaggatgtatcccaggagaggccacatagcaatggagaactgcaggactcaggtccacttgcccagcagctggcagggaagggccatgaggcagtagagtccctacaggccaagaaactgagcagaacccaagcctccagctcaccagctgcattgaagcccccagctggcagggagactgctgtgaatggacagggtgagctcatccccttgaagaacattgagggagaattgtcaagtgctattcacatgaccaaggatgccaccaaggaggctctacatgccaccatggacctcaccaaggaagctgtgtccctgactaaggatgccttcagtttgggcagagatcgaatgacctccaccatgcacaagatgttgtccctgcccccagccaagtaagtggctctgtacctccttcactcatcccatctccttctcctagttctgatcattgggtttaaggcctcttactatgtgcatttctagattgggaagtaccatatagtccaggagaatgcatagaatggcctatttaatgggcagttttcaagccaatatttattgcttcttagaatcagattatctcctttttcactgattcactattttttcccctcaagacaggccttaccgtgttagccaggctggtcttgaactgctgggctctgcaatcctcctgccttggcttcctgagtagctgggattatagacacctgccactgtacccagcttgcttcacaattattgatacaaatatgctatatcagaataataataatggcatatatataatattattttcagtgggctttcatctaattttttt
